United States Patent Application Publication US 2005/0228172 A9 - sequence listing, part 67

SEQ ID NO: 290342 - DNA, 486 bp, Homo sapiens
aaattttaaaaaattcaatgtgtcataatcaattactgattttaatcattttgctgctcaaactgacccaagtttgtccagttagggtcccgtgaagctggcccccrtgtcgttttaacatgtccctccttagtttctcagaatcttcttgctttctggtaaaataaggtgtttcaagctcagcttgttcttgttcttttttagccctgtaatgaatcatttttataacattcccttgttcatttagtgttcctttagaaaccaagatttgaatgttaaataagtgcattgctactgaggtgttattatttccaagcctttcaatggacagaactaatataatacacacgcacacacatatatagagagagttgcatgcatgtatacacatttgagttatgcatagatcataaagcataaatatgtgtatcactgatgcatcatggattcatattactaaccataattacaattctacatcacaaa

SEQ ID NO: 290343 - DNA, 486 bp, Homo sapiens
aaattttaaaaaattcaatgtgtcataatcaattactgattttaatcattttgctgctcaaactgacccaagtttgtccagttagggtcccgtgaagctggcccccatgtcgttttaacatgtccctccttagtttctcagaatcttcttgctttctggtaaaataaggtgtttcaagctcagcttgttcttgttcttttttagccctgtaatgaatcatttktataacattcccttgttcatttagtgttcctttagaaaccaagatttgaatgttaaataagtgcattgctactgaggtgttattatttccaagcctttcaatggacagaactaatataatacacacgcacacacatatatagagagagttgcatgcatgtatacacatttgagttatgcatagatcataaagcataaatatgtgtatcactgatgcatcatggattcatattactaaccataattacaattctacatcacaaa

SEQ ID NO: 290344 - DNA, 486 bp, Homo sapiens
aaattttaaaaaattcaatgtgtcataatcaattactgattttaatcattttgctgctcaaactgacccaagtttgtccagttagggtcccgtgaagctggcccccatgtcgttttaacatgtccctccttagtttctcagaatcttcttgctttctggtaaaataaggtgtttcaagctcagcttgttcttgttcttttttagccctgtaatgaatcatttttataacattcccttgttcatttagtgttcctttagaaaccaagatttgaatgttaaataagtgcattgctactgaggtgttattatttccaagcctttcaatggacagaactaatataatacacacgcacacacatatatagagagagttgcatgcatrtatacacatttgagttatgcatagatcataaagcataaatatgtgtatcactgatgcatcatggattcatattactaaccataattacaattctacatcacaaa

SEQ ID NO: 290345 - DNA, 607 bp, Homo sapiens
accaagttttaccagacatgcaaagaagagctggtaccaatataactgaaactatttgataaaaccaaggaagagagactccttcttaactcattccatgaaccagcagcaccgccatacccaaacctggtaaaaacacattgaaaaaggaaaacttcaggccagtatccctgatgaacatagattcaaaaatcctcgacagaattctagcaaactgaattcaacagcacataaatatgttaattcaccacaattatgtaggcttcattcctaggatgcaaggttggttcaacatacacaaatcaataaatrtgattcaccacataaacagaattaacaaaaaccatatgatcatctcaaaagattcagaaaaagcttttcataaaattcaaagtcctttcatgataaaaatcttcaataaactaggaatcaaaggaacatagctcagaataagagccatctatggcaaacacacagccaaaatcatactaaacaaggaaaaattggaagtgttccccttgagaactggaacaagacaaggatgcccactctcaccactcctattcaacttagtactggaagtgctagccagagcaatcaggcaaga

SEQ ID NO: 290346 - DNA, 569 bp, Homo sapiens
cctataatttttggaaaggtggaccaaggtggaagataaaaattgtgaagacaagcacatgattttgtttctagcttgcactgtccctaaaaatgtaatagaaaagaaaatattcggtatgtcattggtgataaattggctaccatccttagcttctgtggatctttgaggcttttgtattgctagtaaagtctgagctcagtaaggttatcttccctctctgtgctagagaaattttgtttaattgcggagcagcagtggacaaaatttcttatgaaggacactccagtgtctcaagtaagctgctcaaagttgcatccagagtcattaaaccyttgacctatactgtctgggcatatgcccaaatgaaacaaacaaaataaaaaaaacctcaaccccatttactacctcttgccctaagctctttgtcttggtgaataatttgtatatcacagaattatatctcttcttggcaaatgcttgcttacttacgtactcaggtgtcttttgagatgaagaatatcctccacaaaactgaagcttaatattcttacttcatcccttcaggt

SEQ ID NO: 290347 - DNA, 520 bp, Homo sapiens
acatacatatatgctctgatgttaggtgcatatatatttacaactgttatgtcccttttgatgaattgagcactttatcattaagtagtgaccctttttttgtctcttgtgacagtttttgacttgaagtctattttatctcatataagtctagccacctctgctcacttttgattactatttgcatggaatagtttcctccatcccttcactttcagcttatgtatgtccttaaatctaaaatgastctcttgtaggcagcatatagttggatcttattttctatttattcagccactctatgtctttttcttggatagtttaatctatttacattcaaagtaattattgatgggtaaggatttactactgctattttgttaattattttaatactatttttacctatcagtttggcaaaaatttaagactggccacacactctgttattgagtttgtggacaaacaggaacttttatacagtacctaaggaaatgcaatgaaatatgatacctataaa

SEQ ID NO: 290348 - DNA, 566 bp, Homo sapiens
ttagaataatggcctctggctccatccaagttgctgcaaaggccattatttcactcaattttatggctgagtagtattccatggcatatatatatatatcacatcacattttctttatccactcattggttgatgggcatttargttggttccatatttttacaatttttaattgtgctgctataaacatacatatgcgtgtctttttcatataatgacttcttttcctttgggtagatagccagtagtgggattgctggattgaattgtagttctacttttagttccttaaggaaccgccatactgttttacatactggttgtactagtttacattcccaccaacagtgtagaagtgttcccttttcaccccatgctcttctatataatactgtttgtagcacacctccttgtcagcgtgtctgccatggagatttttctcctctcctctactaacttgtttttacaccattgttattcaagacatttcttcctgttttggacacattgtattaacgttcaataagctgtagaaccttagcgttggaagagatatttgaagccat

SEQ ID NO: 290349 - DNA, 566 bp, Homo sapiens
ttagaataatggcctctggctccatccaagttgctgcaaaggccattatttcactcaattttatggctgagtagtattccatggcatatatatatatatcacatcacattttctttatccactcattggttgatgggcatttaggttggttccatatttttacaatttttaattgtgctgctataaacatacatatgcgtgtctttttcatataatgacttcttttcctttgggtagatagccagtagtgggattgctggattgaattgtagttctacttttagttccttaargaaccgccatactgttttacatactggttgtactagtttacattcccaccaacagtgtagaagtgttcccttttcaccccatgctcttctatataatactgtttgtagcacacctccttgtcagcgtgtctgccatggagatttttctcctctcctctactaacttgtttttacaccattgttattcaagacatttcttcctgttttggacacattgtattaacgttcaataagctgtagaaccttagcgttggaagagatatttgaagccat

SEQ ID NO: 290350 - DNA, 638 bp, Homo sapiens
cccttttcagaaaaagtatgctgactcctggcatagttttgtttcataatgagtgttccctaattggtagcttccattgttctcttacattgtatatttctagttataagtcttcattatgatgctgcatagggaattatcctagaggtggcattaaagagctsctgtctgttagaattgggaggggaagttagagatgatctttctttcccccattttcaattgattcctgtggtttatttccacattcagagtctttgacagtaaatcaaactcaataaacagaagagtagcttaacatgggtgatccgtgtaataggtaaagaaagcttacattattgaaacaactatctcaactgtgtatgaagtgctgaagtgtcacaaaaaaagtacattttaagttctcacttgtgtgtgtgctgcagtactcccctgggctatatgaccctgcaggcaatacagccaataaaaactcaatggaagaaaaagtgcttaacctactctcatagataaagccaaagtgaactttagtttggagagaattggcaggttaattaagaagtctgttgataattatgttaagagcactgactgatgtataattcatcttgatgttacttgacatatagatgtaactg

SEQ ID NO: 290351 - DNA, 638 bp, Homo sapiens
cccttttcagaaaaagtatgctgactcctggcatagttttgtttcataatgagtgttccctaattggtagcttccattgttctcttacattgtatatttctagttataagtcttcattatgatgctgcatagggaattatcctagaggtggcattaaagagctgctgtctgttagaattgggaggggaagttagagatgatctttctttcccccattttcaattgattcctgtggtttatttccacattcagagtctttgacagtaaatcaaactcaataaacagaagagtagcttaacatgggtgatccgtgtaataggtaaagaaagcttacattattgaaacaactatctcaactgtgtatgaagtgctgaagtgtcacaaaaaaagtacattttaagttctcacttgtgtgtgtgctgcagtactcccctgggctatatgaccctgcaggcaatacagccaataaaaactcaatggaagaaaaagtgcttaacctactctcatagataaagccaaagtgaactttagtttggagagaattggcaggttaattaagaagtctgttgataattatgttaagagcactgactgatrtataattcatcttgatgttacttgacatatagatgtaactg

SEQ ID NO: 290352 - DNA, 511 bp, Homo sapiens
cctcccttgtccctcccttccaccctctcttcctctctttgctccctctctgaagtgatcattgagaactatgtcccagtcattgttctagaatgagttactgcacaaaatgttcttgtcattatggtgtttacattctagcagcctgtgatttaaaaccacaaacaaaagctattgcatattatgggagataaaaaattctatggaataaaaacaaagcaaggtaaaaaggctaggtgtttgatatttatagtagtttctattattgctttaacaaatcacacaagcttggtatcttaaaagaacagaaatttattcttacacattgctggaggccggaagtctgaaatcaagttttcagtaggaccacactcacacccgaagctctagggctagaaactgttccttagctcttccagcttctggtagttgttggcattctttgacttgaggccgcattagttcagtctttgtcttcrtcttcatatcaccatgttctctgttgtgagtc

SEQ ID NO: 290353 - DNA, 568 bp, Homo sapiens
gaaaattgttataaaatctaaaaattcctccctcaattattcatgcacaaatagaacttcagagaaaaagagttacaacttcctttcaatgggaaattaaagcttataagaayacaaaaaaataaaaataaaaaccacattggaccaaacccatgctctagcaagcccaagattctatgtattgtcgcaacaaaatctatctaatgattgccatcagtgatgtcatccttaaaaataaagactttaattttatacaaataaatcaattaatcatgtttatttcaatgattatttagttatacacctctttatctctttacaaatatgcagttctcttattgtctactgcaaactcttaaggaaaatttgggcttgctaatatatccccaagcttattgggaaatatgagctaatttgttctatttgaatataacaggcttgcagcctgacttgtttaatagccttgtaatctcttgtattgcttttacattgtatagcacaaacaatatggacacgaaagattaaaagtaaaaggtattattggctgttatagccagagagacattca

SEQ ID NO: 290354 - DNA, 665 bp, Homo sapiens
actgtaatggtgccatttgcaatcgagagaaatgtaaacaaatgtaaagatatattatgaaattgtaactgcattaaatgaacggtagtacacataatgtactactggaataactttgtagccacctcttgttactatggtggtgagctcaagtgttgccagtgtccgcttaagccatgctgtgacgctaatcatctctgagtaagcagttgtctctgcagtaaattgcgtgtcacagtaaaaagtgatctctcgtggttctcgagtatttttcattgtgttcggtgcaaaacagtaaaccttgaataacaccatggtgggacccatacgaagtgccactaatgatgctggaaatattcccaagaagcagaaaaaagtcatgacattacaagaaacagttgaattgcttgatatgtaccayagattgaggtctgcagctgcagttgcccgccatttgagaaggacaattcatcttgtaaactgatgatgtaaacttaaggtatcatatatacagtatagtactgtgaatgtgttttctcttccttatgattttcttaataacattttgtttcctctagctcccttattacaagaatacagcatataatacatatagcataaaaaacatgtgttaactgactgtttatgttatctgagaggcttcc

SEQ ID NO: 290355 - DNA, 624 bp, Homo sapiens
ctcagttctctcatctataaaatgaggctaataatagtaccttcccatattgttgtaagagtgaaccaagtaaagcattctgatacagtgcttctcaaattttaatgttctttacaaatcacttgggaatcatgttgaaatgcaaattctctttcagtaagtctagggggaggactgaaattctgcattttttaacaagctctagataatgctgaaggtgttcatctgtgaatcacacttagagtagcaaggtgtcataaaagtgcctggcacataataaaagttaaataagtgctatgtacagtattattatttcacaacatccactgtagaaccgtggcttactatatctcatcctatctggctgtcatatactacatrcattatgttgcagtactatcttcaagagtaattgttacctttttcttctactggcctgccttagttgccccaggctgagtcgttttatttttgctgatccttcgttttccttaccacatctactgaaaaggtctttctctagtttctcagttattatagaacatattttttctaatacttttgcaaaatgaccatgtatcatctttcgacaactttcataccgtgttaatatctttctctcca

SEQ ID NO: 290356 - DNA, 624 bp, Homo sapiens
ctcagttctctcatctataaaatgaggctaataatagtaccttcccatattgttgtaagagtgaaccaagtaaagcattctgatacagtgcttctcaaattttaatgttctttacaaatcacttgggaatcatgttgaaatgcaaattctctttcagtaagtctagggggaggactgaaattctgcattttttaacaagctctagataatgctgaaggtgttcatctgtgaatcacacttagagtagcaaggtgtcataaaagtgcctggcacataataaaagttaaataagtgctatgtacagtattattatttcacaacatccactgtagaaccgtggcttactatatctcatcctatctggctgtcatatactacatacattatgttgcagtactatcttcaagagtaattgttacctttttcttctactggcctgccttagttgccccaggctgagtygttttatttttgctgatccttcgttttccttaccacatctactgaaaaggtctttctctagtttctcagttattatagaacatattttttctaatacttttgcaaaatgaccatgtatcatctttcgacaactttcataccgtgttaatatctttctctcca

SEQ ID NO: 290357 - DNA, 671 bp, Homo sapiens
aatgctctgtgtgtcttaagtgctcaattaatgtgtttgatcatttggagttggagaagccgttgctcatccatactttcttctttctaaggtgagcccacaaaggttgggatatgagatcctctttctttgtacaattcctgggatatctggcttactacatttatttttctaatccaatttgagacagagatgcacaacatgtttatttccattagaagggagggcaatatgaatagattccttccaaatatctattagcactgtcaaaatctttaaggctgcatgtaaaagatttgaggctaaaagtcatatatatattttcaaatattctgagtgtcacttgtgcatcacaaattcttctcataaacgttttttatgtttaccgtctctgctaaaaattttaacttgcttcatgtatgtgtctgtgctggtggttggataattttaaaagagattcttctgatttgaatggagtctttttggtaatttcaactttataggtctaaacagaagagaacataaagaygcagacttcacattcaggaagacctaggttttaatcccatctccactacttcctgactctgtgacttaacaagatacctaaattttttgttccttaggttcctcattaactaaattagagtaactaataatttttgtatatt

SEQ ID NO: 290358 - DNA, 570 bp, Homo sapiens
gtgcatcacaaattcttctcataaacgttttttatgtttaccgtctctgctaaaaattttaacttgcttcatgtatgtgtctgtgctggtggttggataattttaaaagagattcttctgatttgaatggagtctttttggtaatttcaactttataggtctaaacagaagagaacataaagacgcagacttcacattcaggaagacctaggttttaatcccatctccactacttcctgactctgtgacttaacaagatacctaaattttttgttccttaggttcctcattaactaaattagagtaactaataatttttgtatatttgtccagtgtctggcacaacaaaagtgatcaatgaatctgagtcattcttgaagagaatkattttcatctttatgaaagtcaacctgaagtttatgataatcaagttcttccataaatgtcattcagtatagtcattcttctcctcttttatgaagcttcttctccataaatcagagcttcactcaaaaacacataatttacggaccaataaggacttcttgaatgccaaatcaattgagaggt

SEQ ID NO: 290359 - DNA, 481 bp, Homo sapiens
gacaaccttctgctttgaccttggatcccatcagaccctttgtcttmcacagctccagcatccttcatggtttaggaacatcattccttccccttactctctcagacctaagggtggcaatgacttcccactgttgctaatctctaaggtgttttatctccttggcttccttagtcttggcccacacaaataattccttcatttaccactctttagttaaactctttgaatatgccatctctttcttgccagcaaggaacctgactgcatctaataatgaaaagttccctggctgtgttttggtagaagagggaagtagtaaagctactcctaactataccttcattcagtacatattgagtatgtaagatatgcaatgcactgtgctctctgctataatagctacaatgctgcataaaacatgacttctgttctcaagggaatagttaaacaaaggggaaagtaacataaatttttctgt

SEQ ID NO: 290360 - DNA, 620 bp, Homo sapiens
aaaccaaacataacatgttctcactcataagtaggagttgaatgatggcaacacatggacacagggaggrgaacaacatgcaccaggaccagtcgggtggtgggtggcaaggggaaggagagcattaggacaaatggctgatgcatggggggcttaaaacctagatgatggattgataggtgcagcaaaccaccgcacatgtatacctatgtaacaaacttacacattcagcacttgtatcccggaacttaaagtaaaataattaaataaaaaactcatatgtaactatttcatctcattgattttagcactacttatttgctgctaaatgtgataaacattcagctcagcaattaagaatattaaaatcttgacaatcatgatgccctaatttaggttaatttgggatctattaaaatctgattgaaattttaaccctgtgagagagatattaacattcaacaatattttttttaagccagaaaacataaggcaccctgacggtaaggacctgatctaaatggatgaaaactgtgaaactgaacagtgatttctagcaacagctcttaagtagttgtaatagagggtgttctgcacaattcccaaagcataacatgaca

SEQ ID NO: 290361 - DNA, 567 bp, Homo sapiens
ccatctcctctcctcaagttgaaagaagaggtctctattggatctgtgagctgtgcagcctgggtttaggggcggggtgatgcccgtactcccttagctgtcccagctggtatctcagtaggtcacatgtcccctccagtctactgtctgtgggctcatttcggcactaggactcacctaggtgttgcagtcctagtggcctagactgcctttcaagtttatttggagccccagagcactgtagactgtggtgatgaggcttgcaggaattgragttcccatcagtgggatctgcaattcccctctaaatagggctcgtttaaatgctccctccttgggtgggtgtcaactgagtttggtctggttttgctttttgctataataatggcagcactgagttcaatgccttacaattgctggctctccctctcctcagggcacagaaatattctctgcaccatgctgctgcttccgggaaatggaaggggggtggcatgggccatccaagactatttcttctacctcttcagtgcctcttccagtgatatagagttaaaaccaggtact

SEQ ID NO: 290362 - DNA, 883 bp, Homo sapiens
  misc_feature (1)...(883): n = A,T,C or G
tagtcatgctagtctctttagcaagtggttcctccacaatctgcttgtattccttttcyaccatgtaccaggatgcaaatttgtcaaacttttatgctctgtttcccttttaaatatgaattccaactttaagtcatttatttgctcctgtatctgatgataggctcttagaagcagccaggccacatcttgaacactttgctgcttagaaatttcttctgccagataccctaggtcatcactcttaagttcaaacttccacagattcctaggacatgaacacaatgcagccaagttctttgcaacagcataatggataacctttactcgcgttcccagtaacttatttatttccatctgagagctcttcagcttggacttcactgtccatgtctctatcaacattctggtcataaccatttaactagcttctaagaagttggaaactttccttcatctttctgtcttcttctcagacctccagactcttccaacttctgcctgttacccagttccaaaaccacttwgtattttcttcacaacaggtaatatttcctgtctcatttctatctgtatgcacatatatgtgaatataagtgcacacatgtattatgtatgtatttaaaggcttctagtctttgaaccgccttttctcccacataatgttttatttttccttacaagtaaatgttctttaaatgaaaacatagatttttatagttgaacagtattttattatggaatatactgtaatgtatttgactctttttggatattttcattattaacaatttttgctattatctacatwatcatcctatatatttccaattattttcttgtggacatttccaattattttcttctaataaatnnnnnnnnn

SEQ ID NO: 290363 - DNA, 1007 bp, Homo sapiens
catatattatcttttcctttgacttttgctcaaaactgtggaatagagcatatctttaaagcaccgatgtcaggaaaccccaggctctttcctttctgggcaacataaatgagaaaacggtcacaaaagatatggaaccttaggaggaaataaataaaaatgaatcctagagggcagcattaaaaagtgtatagaaaaactctgttaacaagtaaatgagtatttttaacaaggttttcttgtcatcttctttgactggcatcagagttttcatttgaatcatgttatattaggtgctctgagcaaaagtcaattataatttagattmctgatgaaagctaaacatcagaataagagttagaaggaagcactgtggcataccattttctgagagcttgtttgaaccatgtctatttgtttccttttcccccttggtgggtatcattttcacaatatgctttattgtgttctgtcttcccttcttgaaagtcctgttcacaaatggttgtcattgtctcagtcacatattggtttagtattgactaattatttaacctttcttgatattttcttcatcatcwagtaatcagtacttgatatcactatgtagttcatcttctttttcacttgtttaatagctctatwgagatatgattcacataccataaactacatcttttaaaaatgtacaattcagtgatctttagtaatatggtggtcactgagtatatgcaggggattggttccaggaccctcatgtataccaaaatctgtgcatacttaagtcccacagtcagccctgtggaacccacatatatgaaaaatccacattccatagatgtgggtttcacatcctgagaatactgtcgtttccatctgcgtttagttgaaaaatctccacatataagtggatctgtgcagttgaaacccatgttgttcaagagtcaattgtacttatagaattatgcaaccactgctgctattctatttcagaacattttcatcac

SEQ ID NO: 290364 - DNA, 426 bp, Homo sapiens
agtaatcagtacttgatatcactatgtagttcatcttctttttcacttgtttaatagctctattgagatatgattcacataccataaactacatcttttaaaaatgtacaattcagtgatctttagtaatatggtggtcactgagtatatgcaggggattggttccaggaccctcatgtataccaaaatctgtgcatacttaagtcccacagtcagccctgtggaacccacatatatgaaaaatccacattccatagatgtgggtttcacatcctgagaatactktcgtttccatctgcgtttagttgaaaaatctccacatataagtggatctgtgcagttgaaacccatgttgttcaagagtcaattgtacttatagaattatgcaaccactgctgctattctatttcagaacattttcatcac

SEQ ID NO: 290365 - DNA, 559 bp, Homo sapiens
gatatgttttaattgtccaaaatgtgtacctgtagtcaaagttaggtaggagggaaggacatgtgaaaggaagatttcagaatgtttttcatttacattttggaggaagagaaagagtgcactcgttcctggaaatcctctctcttgtattccccattggccaggcacatgtgtctttctttgatattcttaaaatatcaagtttgttggagttggtatttggctcatggagcagattgtattcacatgtagacagtcacttaggtgatgtgattccaggagcccctagaagtccatgaatctccactmtcttcctctattatctgtaccattgtgggctattctgtcattgacgtttattctttgtgttgagtcttcacctgttaatgctctgtcttggtcacactcacacaaattaatcaatagaacatgatcttatattaactactaatttctggaatgcttttgaatgctgattacagtatacatctataatttgtcaatttaaagaaacacacagtgctgatccgcactcccagagttcccgatgcattatatc

SEQ ID NO: 290366 - DNA, 559 bp, Homo sapiens
gatatgttttaattgtccaaaatgtgtacctgtagtcaaagttaggtaggagggaaggacatgtgaaaggaagatttcagaatgtttttcatttacattttggaggaagagaaagagtgcactcgttcctggaaatcctctctcttgtattccccattggccaggcacatgtgtctttctttgatattcttaaaatatcaagtttgttggagttggtatttggctcatggagcagattgtattcacatgtagacagtcacttaggtgatgtgattccaggagcccctagaagtccatgaatctccactatcttcctctattatctgtaccattgtgggctattctgtcattgacgtttattctttgtgttgagtcttcacctgttaatgctctgtcttggtcacactcacacaaattaatcaayagaacatgatcttatattaactactaatttctggaatgcttttgaatgctgattacagtatacatctataatttgtcaatttaaagaaacacacagtgctgatccgcactcccagagttcccgatgcattatatc

SEQ ID NO: 290367 - DNA, 522 bp, Homo sapiens
ccatgacccatagaaataccccacatmtatatggaagtgttacagatctgagaaagtaggtattgatggaggcaagggactaattctcacttttctttttaagaaccaggagcagtaatttatcagaccacatggagttgtagataagctactgaatgttgcaggttgaaaagtctctttgcctgtaaggacttttaaacaataaatatgtgctttaatgaatgtcattgcaacttgtttatcccaatgagaatgtgttgtcaattccagtgagcgggtattttgtgcatgtttcactgtggggttcaaatcccattaaactaatacttacccatgttcgataaatttgtgaaatgtcatttgagagtttgatacggaatgttggaaatacgaaaataatattaattatttgaatggaggaaagaaaaaagtaaggggtgtggcttgccaagttaccttgataaagtcatttgacttccttagacatcaagcctcttgtttgtaaaatgagaggaatatgtt

SEQ ID NO: 290368 - DNA, 604 bp, Homo sapiens
acaatgtggtggttgtgaatttagttttgggattcagaaacacttgtgtttgagacatacaacttctaccaacaagttgtgtttctcatctgaaaaagtagacataatacaatcatagaatttgaagtaaaaaggaagtgagtgcaaagggctctgtagagtacctgataccacataatacattatcagtagacgttaacttttgttattgccaaggttaatttgacaagccagacagggagttaacacttyccttccagttccctccactgttccatgtgtatgtgcttctccaatttgggtctaattagaatttcttccttggcggaaccctaactaagtgcaccgagagggatgctttgtccattttattagaaggaaaaattaaatgctgagtggcttgatagagttaattttgacttgtgaatgctgcttcctcattctttctgatggtgcagtgttgataacccatgtgatgtctctgctgcttctttcactgtggctgctactgagatgggagggtgtgcaatgccattacgcttcaaaaataattgtgtataagaatattatttttgaaatgtcaacctatgcatctttcccctgt

SEQ ID NO: 290369 - DNA, 609 bp, Homo sapiens
ccttgttctatgggtcaaagcaagcaacgtgactgaacccaaagtcagtgggttggggaaatatactccaactcttaatgaagatgaactgaaaagttaccgtgcccaaatacagcaacggtaaacatttgggttattaatgtaacatattttggaagagacaaagacctgaaacttagatcaattttaagtaaaaatgacttgtgtaggaagagaagacaaaaatgacagttgcccagtaagatacargatgcttggttaaatgtgaatttcagataaacaataacttttgacagtataattatgtctcatgcagtatttggtgattggattgcctgggggtaaactcgtctacattgggttcatgaaaaatttggtacatgttatacaaaaagaaatcattatttatctgaaatctaaatctaaatctaattcagtgtcatgttatttttttttttttgacttaaatctggcaatcctaatgatgaagtcactgggagtgagaactacaccttcaagaagccaagaaggaatgatgcatagagaaaataagctttgtaaaactgtcttattccctgcctcccaagaagatgttctaccactttcaaa

SEQ ID NO: 290370 - DNA, 609 bp, Homo sapiens
ccttgttctatgggtcaaagcaagcaacgtgactgaacccaaagtcagtgggttggggaaatatactccaactcttaatgaagatgaactgaaaagttaccgtgcccaaatacagcaacggtaaacatttgggttattaatgtaacatattttggaagagacaaagacctgaaacttagatcaattttaagtaaaaatgacttgtgtaggaagagaagacaaaaatgacagttgcccagtaagatacaggatgcttggttaaatgtgaatttcagataaacaataacttttgacagtataattatgtctcrtgcagtatttggtgattggattgcctgggggtaaactcgtctacattgggttcatgaaaaatttggtacatgttatacaaaaagaaatcattatttatctgaaatctaaatctaaatctaattcagtgtcatgttatttttttttttttgacttaaatctggcaatcctaatgatgaagtcactgggagtgagaactacaccttcaagaagccaagaaggaatgatgcatagagaaaataagctttgtaaaactgtcttattccctgcctcccaagaagatgttctaccactttcaaa

SEQ ID NO: 290371 - DNA, 470 bp, Homo sapiens
gggttattaatgtaacatattttggaagagacaaagacctgaaacttagatcaattttaagtaaaaatgacttgtgtaggaagagaagacaaaaatgacagttgcccagtaagatacaggatgcttggttaaatgtgaatttcagataaacaataacttttgacagtataattatgtctcatgcagtatttggtgattggattgcctgggggtaaactcgtctacattgggttcatgaaaaatttggtacmtgttatacaaaaagaaatcattatttatctgaaatctaaatctaaatctaattcagtgtcatgttatttttttttttttgacttaaatctggcaatcctaatgatgaagtcactgggagtgagaactacaccttcaagaagccaagaaggaatgatgcatagagaaaataagctttgtaaaactgtcttattccctgcctcccaagaagatgttctacc

SEQ ID NO: 290372 - DNA, 413 bp, Homo sapiens
ctcacctctagaggccacccacattcctttccatgtggccccttccccttttgcaaccagccagggaaaaacatgatgctcttaaaggactactgattaaatcagctctaccttggtgcacttcgtatttttgttgttgttgttgttgttttaagaaacagagtctcattctgctgctcggggtagagcactgtggcatgatcatagctcactgcagtcttgaactcctggactccagggaccctcccgyctcagtctttcaaagtgctgggattacagggatgagccaccacacccagctgacattctgtatcttaaagtcaattcactgcaaagtttcttcacataattttttaggttagtgtttgaataactggagaagatgagtaaatatgagggacagggaatattgg

SEQ ID NO: 290373 - DNA, 617 bp, Homo sapiens
atgaaaataatgattagagaagtatttaatatatcaaaatggcaataatatcaaggtaaatcaagagaaaaatgcagattaaagagttgtataaacaataccaaatcatttacttagataaagagatggtggtgatgcacagctgtagtcccaggtactcaggaggctgagatgggaggatcacttgagtcaaggggttcaaggccagcctgggaaacatagagcatgtctcttaaatatatatatgtatacacacacacacacacacacacacacacagacatatatatgtatatgatatgatagaaattacctctgagtgatgggatacagaataattaatatatttagcttctatgttttcctgttttttttctgtattttagaaaatgtactttagcaacttactaaaatatttgatatcccaatctattgatctatatctggctactactaaaatttaggggaagtgcatgtggtcattggcgtaggtagaccatatgtctaattcctacatgcacagattagctgcagatgggcatcataccaggttaaaggttgcatcagattaagggttcagagaaggagcragggctgggaaaatggtcatgttgaat

SEQ ID NO: 290374 - DNA, 602 bp, Homo sapiens
ccaaccagattcttctcattattttcagaagcattattatttattctaaaaagaaaggaaagttactttttttttgagaatttactgtatgccagtttcaacctgaccgatttgtcagcagctatgcccattatacctcttgttagtaataaggggcctgttctttttttytctctcttttattttttatcttttgggtaccatcagtacagataagctgtttattttaagataaaattacttgagatttaggttgtagaatgccagtttattttctgaattatgataagctccaactcttagaagatttatgtaaattattcataggagtgtttagatttgtataaataaacctggtcaagtaaaactttgactttttatatttctgggaataagaaaagacatcttaggtagctattccaccctttataacttttttgctataattatgcatattctatatttactgatggatatcaaacagttaacttctagatgtgccaagagatgagcaatttctttgtagaagattttggttactgtttttgtttttggcaagattcagtggatatggctgaaaaatgtaagagtgataggggaaa

SEQ ID NO: 290375 - DNA, 602 bp, Homo sapiens
ccaaccagattcttctcattattttcagaagcattattatttattctaaaaagaaaggaaagttactttttttttgagaatttactgtatgccagtttcaacctgaccgatttgtcagcagctatgcccattatacctcttgttagtaataaggggcctgttctttttttttctctcttttattttttatcttttgggtaccatcagtacagataagctgtttattttaagataaaattacttgagatttaggttgtagaatgccagtttattttctgaattatgataagctccaactcttagaagatttatgtaaattattcataggagtgtttagatttgtataaataaacctggtcaagtaaaactttgactttttatatttctgggaataagaaaagacatcttaggtagctattccaccctttataacttttttgctataattatgcatattctatatttactgatggatatcaaacagttaacttctagatgtsccaagagatgagcaatttctttgtagaagattttggttactgtttttgtttttggcaagattcagtggatatggctgaaaaatgtaagagtgataggggaaa

SEQ ID NO: 290376 - DNA, 268 bp, Homo sapiens
cattcctatagcaagaagtaaagaactcttgagatggctaaactgcaataaagaagcctgaagttgcaatatagaggtctaaattatcactatggaagctgtcctagatttccttcattgaggaagaaccacaaagaagagccaactgactttcaaaatacagtgaagtgagtgaaaacaaaaattttgtgttaactccctrtctatcacaattagtgcaacatagcacagcctaactaataaaggggaaaagccaaaaatcagttat

SEQ ID NO: 290377 - DNA, 1116 bp, Homo sapiens
ctatttgggaaatagaggacatccttgctagatgagcctgcataattgggtgacaaaagctgatctttatgaccaaattggggaaaataaggaaaatctttctgcagaacttgaactaagaaatagtttcaaatagatggtatgaatttcagactgataaaaagtcacctagggacaacgccattcttaccaagagaaatggtgctgtgtggtaggaaatgagtaaacgacatcctgggaaacaccgtcaatactttctaagttggaaaaaactgcaggggaaaggggaagactttgttaaagtattttttttttctctgaagacaatttcattcagaggttgctttagccaaggagtctcatcaaatttaaagtctctggcagtgctcttactaagagccatgtcctcatcagtcatttagcatcatcctgatgtagagaaacacttygctgaattagattctcccaacctagaagggcaagtattggaggtgagtgcaagctacaggacagaaaggaaccattccccagagagccacttttaccttgcatttggaawaagcatgggtgtctgcctcattcagcaagattgtgcttaataaggcacactcataatgttagaaaatatgccaactgtgaaccagaatgcatgtaacttgagcaagagtcctaatgagctctgtaggggcaattgcgctttataattctgaataaggagaacctawttgtcagccaaatttacagtcaaaggagaaagatcagtgtggagactgggaactatatcacatattcagatgaaaacatagtgtgttctgacacaatacttattgattggggctacttttataatagggatttctgcctgtaatgggggagtgggtgggaattctttgtcaaattgcaaggcaaatgagggcaagagcttcatccagtttactactataaattgttccctaacagtaagaacagagtctggcaaataatagacacttaataaatagttaaaaataaatgaacacattattttgttaatacattggaatagctattgaatttttgagtatcctatcatatttaatcttctaaggaaaggaagtactttcatttcttgaaata

SEQ ID NO: 290378 - DNA, 557 bp, Homo sapiens
aagcatgggtgtctgcctcattcagcaagattgtgcttaataaggcacactcataatgttagaaaatatgccaactgtgaaccagaatgcatgtaacttgagcaagagtcctaatgagctctgtaggggcaattgcgctttataattctgaataaggagaacctatttgtcagccaaatttacagtcaaaggagaargatcagtgtggagactgggaactatatcacatattcagatgaaaacatagtgtgttctgacacaatacttattgattggggctacttttataatagggatttctgcctgtaatgggggagtgggtgggaattctttgtcaaattgcaaggcaaatgagggcaagagcttcatccagtttactactataaattgttccctaacagtaagaacagagtctggcaaataatagacacttaataaatagttaaaaataaatgaacacattattttgttaatacattggaatagctattgaatttttgagtatcctatcatatttaatcttctaaggaaaggaagtactttcatttcttgaaata

SEQ ID NO: 290379 - DNA, 572 bp, Homo sapiens
gcccctgtggcttttcagggtatagaccccctcctggctgacttcatgggctgtcattgagtatctgcagctcttccaggcatatggtgcaagctgtyggtagatctaccattctgggatctggagaacagtgcccctcttctcacagctccactaggcagtgccccagtacaggctctgtgtggggtctctgaccccatattttccttccacactgccctagcagaggttctccatgacagccccatccctgccacaaacctccgcctggacatccaggtgtttccatatatcttctgaaatctaggcagaggctcccaaacctcgattcttgacttctctccacctgcaggctaaacaccacgtggaaactgccaaggtttgggacttgtacccaatgaagccactgcctgagctgtaccttagccccttttagtcacagctggagcagctagggcacagggcaccaagtccccagactgcacacagcacagggatcctgggcctggcccacagaaccattttttcctcctaggcctctgggccaatgatgggaggggctgctgtgaaga

SEQ ID NO: 290380 - DNA, 567 bp, Homo sapiens
acaaaatgaaacaaaagaaaatktatatatatatatgtatatatgtgtggatatatatgtggatatatatggatatatatacaggatctgtgtatatatatacatatgcacacacaaatatatacaggtcctgtacataataagtattcaattaattataattgttgtgtggctggagtacaatggcgtgatctcgactcaatatgaattccctctgcttgttctgtattactcatctattttcttttctttcttttttttcttttttagacaaagtctcactctgtcacccaggctggagtgcagtggcatgatctccgctcactgtaacctctgcctcccaagttcaagtgattctcctgcttcaccctcccaagtagctgggattacaggcatgcaccaccatgcccagttaattttgtatctttgtagagacagggtttctccatgttggtcaggctggtctcaaactcccaacctcagtactgcttcattaccactcccaatcacaaattctactgatggttaatttgtaggctgagatcacaaatcatcatgaaacacagg

SEQ ID NO: 290381 - DNA, 517 bp, Homo sapiens
tatgtgctccaactcggtttatcagagggccctgcaattagagattggaaattcctaatatggataataataaacttatactttattgccaggttttttccttatgcatagttcccactttttaaaaactgttaaggagggatagatgatcaataatagagcaaattttggacactatagagtctctaaccataacctcmccttaattgtaccaaaacacaacttccatcataatacacttttcagctacagtcatgtcatcattctagccataactgaaaattattataaataccataatattttaatatgcaaaatctatctaaatatattaatagtagttttaattttatatgtacaaatatgacacgtgcacaagtattttatatcctacaaacatatgaatatgacactaagaatacttggaagtctaggctctctataagtttgcattattaatcaaagtttaaagtgagttctgtaatattatatagaattatagagttgtaggttcatt

SEQ ID NO: 290382 - DNA, 591 bp, Homo sapiens
tcaacatctgaacattatcaagcatctgattgagctattcacttttatggaacttctgcaaacagaagacagcacttctctaaaactttctagtgatgactgactgtggttctttcattttacctagacagataactaactaataatgcagttttttgttctaaatatcccttgacaattattccaattttctgtttgcctttaacattgaagatttggatgccgagtaccaagtacgtatattgtatcctttttaataatataattccaattactacaaatgtaattgtgaagtcagagctatatagtattttgatagcagcacttgtttttctaactgaaggtaacttgaattatctggtgattctacatcagttttcttgcactgattttttttagtgtaatgcaccactctttcaaactatttgcaatctcattaaggcatttatctaatgaaatacttkaaattacttccccagataatgtcagatcataatgacatcaaaatggtgctatcatgtagtcccactggattttttattgaaatctttccattgaatatattgaaaaataaaaggaaagactgcttct

SEQ ID NO: 290383 - DNA, 603 bp, Homo sapiens
aataagctggacttattcaaggacaaaagaaactatattcttcttgcttctccccattaaactggcttcatggactcattctttctcccttctgtatagaatcccaggcaagtcccatggcttttctagacactcttacatattaaataaaaagaaactttcttctggcatttgtttaaaatgaggcccagcataaaagtcaaataagtctatccaggccagtgtaaaaaatcaagactcaatttagaacttctctcctccatcaaatcacctctgtcccaagtttggaagcctgaaaggaagagaaaggaagccaggtgggagggckgccctgcttcctctcctatatgcgctctttccagggtcagagaatggaaagaaagaggtaacgggactgaagatgtcccagattactgccctatcagattctgggattggtgccctgtgaatgtggcttccaaagctaatccttttttctcgtgcaggaaaaatggcacatgtggtgctatccattcgcttcccagtagcccctaggtttcaagtgactaccatctctggtcacattgtacagtggtcttcttggacaggataactttcaagtag

SEQ ID NO: 290384 - DNA, 595 bp, Homo sapiens
acagctggtgttaggcagagaaacaataatgaccagcagaggaggggatcacaattgccatcaccaaatcgtagtcattcatgagcacagacattaccgcatacacacacctgcagcttctgcagctgtgtgggcacagagagcctggagggaagcggggcacaagcccgacaccagcctttcttttgtcaggactctgcagctgcgtgggagctctgcccgaatccttggaaggggtttttgaaatggacactcacatgtaatatttcaagttgactgaaattaaactgctttgaactgaaaatgactgaaaggtgggttgggggtctaaggtagaaatcaaatgtggaagactgtkgaaactcttagatcatatatattgcaataatcataagttttataagcttaaatttgtatatcacatttgaatttaagaaaatttaatgcactcttgtttcattttattattttaataagtctatggtattttaaaaagcaattgaacccatcctatttgactgatatgaagtttgccaaggtcacccacataatatattgaagaagtgaaactagaacccagtttcactttaaatag

SEQ ID NO: 290385 - DNA, 595 bp, Homo sapiens
acagctggtgttaggcagagaaacaataatgaccagcagaggaggggatcacaattgccatcaccaaatcgtagtcattcatgagcacagacattaccgcatacacacacctgcagcttctgcagctgtgtgggcacagagagcctggagggaagcggggcacaagcccgacaccagcctttcttttgtcaggactctgcagctgcgtgggagctctgcccgaatccttggaaggggtttttgaaatggacactcacatgtaatatttcaagttgactgaaattaaactgctttgaactgaaaatgactgaaaggtgggttgggggtctaaggtagaaatcaaatgtggaagactgtggaaactcttagatcatatatattgcaataatcataagttttataagcttaaatttgtatatcacatttgaatttaagaaaatttaatgcactyttgtttcattttattattttaataagtctatggtattttaaaaagcaattgaacccatcctatttgactgatatgaagtttgccaaggtcacccacataatatattgaagaagtgaaactagaacccagtttcactttaaatag

SEQ ID NO: 290386 - DNA, 570 bp, Homo sapiens
tgcttttcaggttcatatacttctgcaatattcatttaaggtctaaaatgaatacttctgtgatgaaaatttttctctgctaacactttaaatttttcagaacactcttttgtacatcatcatagtcctagaattgtatatattaggctcttaatattttagaatatgtaattaatatttgagaatatgttttcagtataaatatttataacatctgatataaaaaatactataggtctgtgtattgtttttaaatttsttctttaaatttaaaattaagaagaataaacttttcaatatttttatagtccacaatgcaaatagcttccctgttgaatttgcctgtcctaactagtttctcagagagtctcacatagcttgtcctcttgatcttattttcaaactttattattttgccctggcacagaaactagagactttggtctcttttattctgtttccactaccatgagagattctcttttgaaggttttttgctgtaattcttattacacatcattcgttaattgcccatgaagatttcccatgatttaaaggtagcaatgtaat

SEQ ID NO: 290387 - DNA, 608 bp, Homo sapiens
tgcaccaaaacaattacaatagtaatatcaaaaataactcatcagccgggctcagtggctcacgcctgtaatcccagcactttgggaggccgaggtgggcggatcacaaggtcacgggttcaagaccagcctggccaacatggcaaaacccagtgtctactaaatacaaaaattagctgggcatggtggcaggtgcctgtaattccagctactcgggaggctgaggcaggagaatagattgaacccaggaggcggagtttgtggtgagccgagatcatgccactgcactccggactgggtgacaaagtgagactccatctcaaaaaaaaaaaaaaaaaaaaactcatcacagatcaccataacagatataaaaataattttaaatttatagatagttcaagaatgaccaaaatgtaacacagagatayaaagtgagcacatgctgttggaaaaatgtcaccgatagacttgctcaatgcagtctttgcacaaacttccaatttgtaaaaaaaacatgtatctgtgaagcacaataaagcaaagcacgataagataaaatgaattaagcttgtatattattggggggaatgtaaattagtagagtcatt

SEQ ID NO: 290388 - DNA, 1219 bp, Homo sapiens
agtcttgatttcctggaatcaaaaccccctccctcactgtgccattactgccactgtcataattccgatccccatccccataactgaccgatctcaagtacttccaattgcctttcctggtttcttacactcagtcttgtttcccaccgcagccactttcaattctttctgcatacaaccactagattcactgtggaaaacagattgccttactattatctgaatccctttgtcaaatataatataatatatatagaatgggcaatggtgtaggactttagcaattgtatatagctctaaggcatgtggtcttgcattcaaagtctccctctgactccatcttattattctagctctattttctattcatactyatacatctctttactccttacattttgcatgtgtgcacaaaagccataaaatcatttgcttcaaatacttttggaaatgtgattgggtaatatattaaataattattcattcttttaggtccagctccaatgttaccaactctgtgaaccttttctgctctcctccagggagtcactcatacccctttatgccactgaattatttcatacacgcctctgttaaagcacttgccccwagtcttgatttcctggaatcaaaaccccctccctcactgtgccattactgccactgtcataattccgatccccatccccataactgaccgatctcaagtacttccaattgcctttcctggtttcttacactcagtcttgtttcccaccgcagccactttcaattctttctgcatacaaccactagattcactgtggaaaacagattgccttactattatctgaatccctttgtcaaatataatataatatatatagaatgggcaatggtgtaggactttagcaattgtatatagctctaaggcatgtggtcttgcattcaaagtctccctctgactccatcttattattctagctctattttctattcatactcatwcatctctttactccttacattttgcatgtgtgcacaaaagccataaaatcatttgcttcaaatacttttggaaatgtgattgggtaatatattaaataattattcattcttttaggtccagctccaatgttaccaactctgtgaaccttttctgctctcctccagggagtcactcatacccctttatgccactgaattatttcatacacgcctctgttaaagcacttgcccc

SEQ ID NO: 290389 - DNA, 1219 bp, Homo sapiens
agtcttgatttcctggaatcaaaaccccctccctcactgtgccattactgccactgtcataattccgatccccatccccataactgaccgatctcaagtacttccaattgcctttcctggtttcttacactcagtcttgtttcccaccgcagccactttcaattctttctgcatacaaccactagattcactgtggaaaacagattgccttactattatctgaatccctttgtcaaatataatataatatatatagaatgggcaatggtgtaggactttagcaattgtatatagctctaaggcatgtggtcttgcattcaaagtctccctctgactccatcttattattctagctctattttctattcatactcatacatctctttactccttacattttgcatgtktgcacaaaagccataaaatcatttgcttcaaatacttttggaaatgtgattgggtaatatattaaataattattcattcttttaggtccagctccaatgttaccaactctgtgaaccttttctgctctcctccagggagtcactcatacccctttatgccactgaattatttcatacacgcctctgttaaagcacttgccccwagtcttgatttcctggaatcaaaaccccctccctcactgtgccattactgccactgtcataattccgatccccatccccataactgaccgatctcaagtacttccaattgcctttcctggtttcttacactcagtcttgtttcccaccgcagccactttcaattctttctgcatacaaccactagattcactgtggaaaacagattgccttactattatctgaatccctttgtcaaatataatataatatatatagaatgggcaatggtgtaggactttagcaattgtatatagctctaaggcatgtggtcttgcattcaaagtctccctctgactccatcttattattctagctctattttctattcatactcatacatctctttactccttacattttgcatgtgtgcacaaaagccataaaatcatttgcttcaaatacttttggaaatgtgattgggtaatwtattaaataattattcattcttttaggtccagctccaatgttaccaactctgtgaaccttttctgctctcctccagggagtcactcatacccctttatgccactgaattatttcatacacgcctctgttaaagcacttgcccc

SEQ ID NO: 290390 - DNA, 1184 bp, Homo sapiens
gaacttaattaatagaagagagaacaaacaacaataataactatattctgcaatccctgagataggtactattatatccccattttagacatggagtaacggaggtaaagagagattaagtgatttgcccaagatcaccccgggagaaggaacacatgtggataaatttcaaccctgtgtggcaatacaaatataagtccctaggatcctcrcaaatcaatactgaggcacaggggtcattctgagctaggatgattagggaaggaataagaaaggcagtgacatatgagttccatcttaaagaatgagtgggagttttataggtaagaatggggaacagggaatgtattttaggcataggaaatggtattaaaatatagtacagttggggaaaataacttatgatagagatggtctaaaattatttaaatcctgaggagagaatacagaagggatcttcttcttccagcatattataacacgtcagatgagatcatttcggttataatattataagagtaacattttatttatcttgatctaaagcctttttcattcttattctcttttactagcattttgaaattttcccgtttatcacagtcaacaaaaatttawaaatgggccaaagaccctaacagacacctcaccaagaagggtgatgcaagttagcatataaaagatgctttacatcatatgtcatcaggaaaatgcaaattacaacaatgagatagcactacacatctattagaatggctaacatccagaacactaacaccaccaaatgctgacaagaatgtggagcaacaggaactcctactcactgctggtgggaatgcaaaatagaacatccactttgtaaaacagtctagcaagttctttcaaaactaacatattcttaccatatgatccagcaatcacactccttggtatttacccwaaggagctgaaaacttatgtccacacaaaaaaccagcacagatgtttatagcagtttcattcataattgccaaaactgggaagcaaccaaggtgtccttaagtagataaattgataaataaactgtgatacatcgatacaatggaatattatttagtgctaaaaaaataagctaccacgctatgaaagacatgaaggaaacttaaatgcatactactaagtgaaagaagccagtctgaaaagtc

SEQ ID NO: 290391 - DNA, 617 bp, Homo sapiens
atagttatggatatttgctttgaaataaatcattgagctttgtaatgaaccatatttgctttgtaatgaattagatttgttttaggtattttttgcatatgcattttatattttatattttatacttaaatgttttaaaatgytgaggaaaaaaaaaaaattccaaagagtaagtccaactcccaaacatttttcaagcctctactcatattccgttgcccaaagtatatcatatggtattgcccaaagtccagagttggaaagtacacttcactattcactaggccagggattggcaaacttcttctgtaaaaagccaaatacaaactgctttaagttttgcaggccacatacagttcttctgcatattttgtctctttttaaaccctttaaacatgtaaaaaccattattagctgaagactttacaaaataaaaaactgcagttagagcggacccagttagatttggccatagattgccaaccactgcattaggccaggataatatgactatagaaagttttagaaagtgggaccaataatttaatctgctgcactttacctccttgtttacagctattcatatctactgctatggtctgattttgccttcaaaa

SEQ ID NO: 290392 - DNA, 577 bp, Homo sapiens
gatggagcatacatttaatattaatgaagcacatatgcatggtttggagaataatggctgttttatattttcttgcaaagtaacacaaagtgctttctgataacttagaaaggatgacacccacaagtaaatgaagmcatattacattttttactgatatacgtaaaaagtattgcctttcacaagccaagaaatgcccctaaagaaagtaacattaaatgataaatatttctgtctaaatagtccaaaataactctttaatatcaaattccaatacatttattaaagtagtgatatatttattaaaatatttttacatttattacatttttaaagtaataataaatcattcatataagtggtaacatttgttagtagtacataaaataatgttttatcttaaaatcaataacaagatttgactaaagacaatatatgacagccactgtggtagatagcaaaagtgcaaagggaaataattcacagttcctatatttgaggtacgcagtgtccaatggggtatgatagaagaaggttacaaggacaaccttcaccaggccagagactttaccttgag

SEQ ID NO: 290393 - DNA, 577 bp, Homo sapiens
gatggagcatacatttaatattaatgaagcacatatgcatggtttggagaataatggctgttttatattttcttgcaaagtaacacaaagtgctttctgataacttagaaaggatgacacccacaagtaaatgaagacatattacattttttactgatatacgtaaaaagtattgcctttcacaagccaagaaatgcccctaaagaaagtaacattaaatgataaatatttctgtctaaatagtccaaaataactctttaatatcaaattccaatacatttattaaagtagtgatatatttattaaaatatttttacatttattacatttttaaagtaataataaatcattcatataagtggtaacatttgttagtagtacataaaataatgttttatcttaaaatcaataacaagatttgactaaagacaatatatgacagccactgtggtagatagcaaaagtgcaaagggaaataattcacagttcctatatttgaggtacgcagtgtccaatggggtatratagaagaaggttacaaggacaaccttcaccaggccagagactttaccttgag

SEQ ID NO: 290394 - DNA, 595 bp, Homo sapiens
tctataatctgtgtatcaaattgtcatttagattaatgctatccaatgggaatatgatgtgagccatatagtaatttaaatttttctagtagccacatctaaaaaggttaaaaatttgttaattttaatgatgtatttcattcaaactaatatgaacaaattatttcagcatgtaagcaatataaaaaatcattmatgaaacctgttacatacatctcttttggtcctaagttttagaaatctgatatgtattttacatgaacagcacatgtcaattcatgctagccagtatccaacttttctgttctagttcaggctgctgtcatctcccacgtagatagcagtgattcacttgcttccaagtctaatacactcacaagtccagccaaatttaatgtcttcctgttccactgacagctaattagagaatagatggaggctaaattccagaccccaagaaaggacccctggtctgggggaaacgtgagtgtgagctctgaggtagttggagcctcagagtccaggagcagacggccataacaaatctgaggttttagggactccatagtccagagcaggggcagcaaactacagc

SEQ ID NO: 290395 - DNA, 554 bp, Homo sapiens
tatgatgtgagccatatagtaatttaaatttttctagtagccacatctaaaaaggttaaaaatttgttaattttaatgatgtatttcattcaaactaatatgaacaaattatttcagcatgtaagcaatataaaaaatcattaatgaaacctgttacatacatctcttttggtcctaagttttagaaatctgatatgtattttacatgaacagcacatgtcaattcatgctagccagtatccaacttttctgttctagttcaggctgctgtcatctcccacgtagatagcagtgattcacttgcttccaagtctaatacactcacaagtccagccaaatttaatgtcttcctgttccactgacagctaattagagaatagatggaggctaaattccagaccccaagaaaggacccctggtctgggggaaacgtgartgtgagctctgaggtagttggagcctcagagtccaggagcagacggccataacaaatctgaggttttagggactccatagtccagagcaggggcagcaaactacagcacaagggtgca

SEQ ID NO: 290396 - DNA, 593 bp, Homo sapiens
gagtgctgggattacaggcatgaaccaccatacctagccactatcactatttgttataggacaaaacagttaatcaggttttgaaaatagttactagataagtgtttcattaatttaataaatctagctttgcagtgctgtgcaacgttatcttttcaaaaattaaaaatggccaggtgcggtggctcatgcctataatcccagcacattgggaggccaaggcaggtggatcacctgaggtcaggagtttgagaccagcctggccaacatggtgaaaccttgtttctactaaaaatagaaaaattagctgggcgtgctggtttgtgcctgtaatcccagctacttgrgaggccgagacaggagaatcgcttgaacctgggaggtggaggttgcagtaagccgagattgcgccattgcactccagcctgggtgacaagagtgaaactccgctccagaaaaaaaagaaaaataaaaaataaccattatacttgcatgttacaaaaaccatgcatgtttattgttgaaaaatttgaaaatataaagagagaaaacaaaaacacgcataatcctgtcttttcgaattaacattatta

SEQ ID NO: 290397 - DNA, 551 bp, Homo sapiens
aacagtgtcatgggccctgtagcacagctgtgctgaactcatcctgcccaacatgggtgaagtactatggacttaataagggatgatttctgggggagtgtcagctagctctcttaaagatgtagactccttacaaacagaattgtggtgcctttaaagctggatttctcaaccccrttaacattgtcatttgaggccgggtgtgatggttcacacctgtaatcccagtactttggaggccaaggcaggcagatcatttgagatcaggacttcgagaccagcctgaccaacatggtgaaaccttgtctcttcttaaaaaaaaaaaaaaaaaaaaatagctgggtgtggtggcacatgcctgtaatctcagctactcaggagactgaggcaggagaatcgcttgaacccaggtggcggaggttgtagtgagccgagatcccgtcaccgcactccagcggtgcattgtaagctgtttaacagcatcaccagccacttcctgctagatgccattagcaccctttcccccaacttgtgatgcccaaagttatcgt

SEQ ID NO: 290398 - DNA, 551 bp, Homo sapiens
aacagtgtcatgggccctgtagcacagctgtgctgaactcatcctgcccaacatgggtgaagtactatggacttaataagggatgatttctgggggagtgtcagctagctctcttaaagatgtagactccttacaaacagaattgtggtgcctttaaagctggatttctcaaccccattaacattgtcatttgaggccgggtgtgatggttcacacctgtaatcccagtactttggaggccraggcaggcagatcatttgagatcaggacttcgagaccagcctgaccaacatggtgaaaccttgtctcttcttaaaaaaaaaaaaaaaaaaaaatagctgggtgtggtggcacatgcctgtaatctcagctactcaggagactgaggcaggagaatcgcttgaacccaggtggcggaggttgtagtgagccgagatcccgtcaccgcactccagcggtgcattgtaagctgtttaacagcatcaccagccacttcctgctagatgccattagcaccctttcccccaacttgtgatgcccaaagttatcgt

SEQ ID NO: 290399 - DNA, 420 bp, Homo sapiens
aaacttactaaatacattacataaggaatatgtagtactggaaaatatatcatggattacttaatcatcaaccacaaacagataaactattctgacttaaacagctctatttctttgcactaacactctatttatttgacttactacacagctcaatttctttttagttgggataaaaatctcaactatggacattaagaatctgagactacagatcagaaaaaaaatgttgtgtacatggtaagagatcaaagttgcagtactgaggacattttgttatacagtgtctaaaagttcaaaattccatggacagatcttactgagacatgatgacacctcaaataaactcagtttagtttacatctgyttgcaagtaagcacggaaagcattcttatatcttcagaacgatttaaccaagg

SEQ ID NO: 290400 - DNA, 604 bp, Homo sapiens
atttgacaatgtgactttgctgttatttttttaacttaaraaaaagcaatttgtcccattgataataatttcaaaggtttatttcaatgaatggttattcatcactaattaagaatatgcttgattaaatgttttataacttcattttatttttattttatgtggctaaaactattttttcagcctgtagttattaaatgtggtataataaaaaattctgaaagtgccacaagaatatatgtcatttcagcttgatggtgcttacacttttatagaatgttgacagaatcatttttgtaaatgttgtctggaaaggaaatgagagggctttggggtttttggggtgctgtcccctttcaattttgaacaaaagatattgtttcactaggctaacttcacagcaagtagctgagtcagggctagaacccagaattcaaaaatatttgtctccctgtcattgaatcacactgtactcaaatggttagctctctcttatgttagtatagcatggcttaccagatcatctagggttgttaacatttagtcttacatcacagagaagaaggctggaatattttatgtaataaactccatttgtagcacc

SEQ ID NO: 290401 - DNA, 604 bp, Homo sapiens
atttgacaatgtgactttgctgttatttttttaacttaaaaaaaagcaatttgtcccattgataataatttcaaaggtttatttcaatgaatggttattcatcactaattaagaatatgcttgattaaatgttttataacttcattttatttttattttatgtggctaaaactattttttcagcctgtagttattaaatgtggtataataaaaaattctgaaagtgccacaagaatatatgtcatttcagcttgatggtgcttacacttttatagaatgttgacagaatcatttttgtaaatgttgtctggaaaggaaatgagagggctttggggttttkggggtgctgtcccctttcaattttgaacaaaagatattgtttcactaggctaacttcacagcaagtagctgagtcagggctagaacccagaattcaaaaatatttgtctccctgtcattgaatcacactgtactcaaatggttagctctctcttatgttagtatagcatggcttaccagatcatctagggttgttaacatttagtcttacatcacagagaagaaggctggaatattttatgtaataaactccatttgtagcacc

SEQ ID NO: 290402 - DNA, 1163 bp, Homo sapiens
ttgagccaaaaaggtaagcagaaaagggatttttaacataatttccagaagtcctaagagtaaattggatttaaaagtttcttttgagatatttgtcataggtgaaattattggtaacatgtaagtttgatactacataaacatatgatataatttgctttcattgtgtagcatattcaggtgcataaatcatttataagtacaatatatcacttttatctccctctccaaacaagttaagcagaatggtgttattattctcattacttgggtacatataagacctggagaggtcaaataatktctccatgattgcaaagctgttaaagggtagagctgaacacaaatctgtagattcatattcaaataattcttaagtaagccagataaaccaatatgccaggctcttgttgccacgaagttgattttgactaaaatagttttcagtcatcttgtaatgacaggggagaatgaaactgagcttcaaaaacagaagcccttgctttgtctactaataactcaaattacttctctctgagtattagttttctcaacagtatgagagtctggaaccaaagaatwttgagccaaaaaggtaagcagaaaagggatttttaacataatttccagaagtcctaagagtaaattggatttaaaagtttcttttgagatatttgtcataggtgaaattattggtaacatgtaagtttgatactacataaacatatgatataatttgctttcattgtgtagcatattcaggtgcataaatcatttataagtacaatatatcacttttatctccctctccaaacaagttaagcagaatggtgttattattctcattacttgggtacatataagacctggagaggtcaaataatgtctccatgattgcaaagctgttaaagggtagagctgaacacaaatctgtagattcatattcaaataattcttaagtaagccagataaaccaatatgccaggctcttgttgccacgaagttgattttgactaaaatagttttcagtcatcwtgtaatgacaggggagaatgaaactgagcttcaaaaacagaagcccttgctttgtctactaataactcaaattacttctctctgagtattagttttctcaacagtatgagagtctggaaccaaagaat

SEQ ID NO: 290403 - DNA, 500 bp, Homo sapiens
tgacaacttccgatatacttccatgataaaagtgcmacaaaataggatcagaagggaactgtctcaaagtgataaaaggcagccacaaaacccccaggtaaacatcatagttaatggtgaaagacaatgctctctctgaagatcagcaagaaacaagacaaaggtatctgatcttgatacttctatttaatattgtgatggaagttttagtcagagcaattaagcaagaaaaattattaaaatatgtcaacactggaaaggaagaagtaaaactgtctatatgaaaacgagatcttatatacagaaaatcctaaggataccatgaaaaggccattagaaataataaacaagttcaggaatgtattgggatagaagataaatgtacaatctattgtgtttctacaaactagcaataggctacatataattgtaacgaacaaaataattccatttacaatagcaccaaaagaataaagtgctttctaataaatgtaacaaag

SEQ ID NO: 290404 - DNA, 556 bp, Homo sapiens
  misc_feature (1)...(556): n = A,T,C or G
nnnnnnnnnnnnnnnnnnnnnnacaagttaagtaagtgtgctgagtataatacattggatataaaaacaaaagtaaaatacagtcttgtttcttgtagaattagcaatggaatgccttgaaaaaggatttaagggaaaaaaaagaacagaatactgcaattggctttagatgcatagaatttgaaagtgattaagtctgcctgaggctgtagctacctggagctttgaaaaaccatcatatgyccaagttctttaagtcgtggagaacccttgacacataatacaaagcagattaaagtttatatttcctatgttgaatataatcatgtataattataggcatggtattacatgttatagacatttaattaaatattaatttcaacattaaattattttttaaatttagagtcattatgtacattttttagaatttcaagagttttggtagagctgcaaaagacttattaaccttaggatccctaactatggtatataagtggatacacagttctggtaaaggagcactgggaaaggcctttgagatgcatgaccc

SEQ ID NO: 290405 - DNA, 551 bp, Homo sapiens
acttttttgttcagttcataattactgtacctaagttgagggccatttccttgaatcattgcacatttttttttttgctcctacttcattttctctctaatttcacaaccaatgtttacaaattaaccttaagtcattttttatttttaaaacttcaatgctacttctctagttaataaaatcaccattcaacaggctttagattgatactttgagtccaacataccttccctttcatattttcactcacacactgtatgctgtgttcaagtgcactgagacttattatatgctaatcagaaaagacttcatagaagaagtagtatctgataagtgtcaggaaccctgctttatgcttgtgtgaaaccctgaataaatcccttataatataattttctcactagatcaagtttccaaacccacccacctcagtggtgccttccctgattttcgcacggtaaaatgtgatttctccctrtttgaaaacttcacggtagtttgttcttgtttaaaaatgacttactactttctgcctttcattataatgattt

SEQ ID NO: 290406 - DNA, 570 bp, Homo sapiens
aaatcaaagagattacttggtatggactacactgtgtcctcctaaaattcatattggagtcctaaccccaagtacctcataatgtgactgtatttgagacagaccttttaaagaggcaactaaggttaaaaaaaggtcatgtaggtggaccccaacctaatatgattggtgcctttataagaagagaaaattaggacacagtcatacacagaaagaagatcatgtgtaaacacgggargaagacaatcatctccaaggcaaagagaaaggcttcagaagaaaccaaaccatgaactcagtcttctagcttccagaactgtgaggaaataaatttctgttgttaaatcattcattctgtggtattttgttatgctagccctagcaaacagatacattcctgaagaatcaagtctcagaaaggatgaaaatacggttatatccaggaattgtcttaaaaactaataaatatttacttcagaactgcagcctttgcactgataaagtgtgaattctgcccatccttacagaatcaaagtacacaattctgcaagaaagaagcttattgactaa

SEQ ID NO: 290407 - DNA, 580 bp, Homo sapiens
aaacatcttttagagagggccacatgagttacggaaaggagtttagaattaattattatgtagaacattgtacaatttaaaacatgtattgtgtgaagctactgcagttttactcagggaaaccatattatctgtttcacagttttaaatgccaaaactattttctttggaatatacaaagaaaggtgtgtagcaaggaatgaggcaagatgcctggttaagaggacagttacattttacaagagggagctgcttacttgggccaagtcagaagcagaagagttgatgagatgtagttatattcaggctgtactttgaaggaaaagctaagagaatttgctgattaattgactatcaagaaggagaaaaagggataggaccaaacttttaggtatttgacctggataattaagtgaatgatacataattaattgagagagggsatacagggaggtacagttgggaggagaggaggtacttgataagaaattaagaggtcattgttgactatgttaagttgagatgcttattcttcagaaaaaataaaaagttccactgagttaaacactgaataaataag

SEQ ID NO: 290408 - DNA, 614 bp, Homo sapiens
aagccccttataaaaccatcagatctcgtgagaactaactatcacaagaacagtatggaggaaactgcccccatgattcaattatcgccatctagtcctgctcttgatacatgaaaattattacaagtcaaggtgagatttgagtggggacacagccaaaccatattattctgccccggtccctctcaaatctcatgtcctcacatttcaaaacacaatcatgcccttccaatagtctcccaaattcttacctcattacagcattaacccaaaagtccaatccgaagtctcatctgagacaaggcaagtcccttccacctatgagcctgtaaaatcaaaagcaagttagttactttctagatrcaatagggatacaggcaatgggtaaatacacccattccaactgggagaaattgatcaaaacaaaggggcttctaggccccacgtaattttgaaatccagtagggcagtcacttaaccttaaagttccaaaatgatcttgagataaacttttgtcattttgttctttattttgtcttcaaaatgagagcttgtagtgggtaatatttgaattttgcaagattgcaacttgtaaaattttgtgaaaaattgta

SEQ ID NO: 290409 - DNA, 614 bp, Homo sapiens
aagccccttataaaaccatcagatctcgtgagaactaactatcacaagaacagtatggaggaaactgcccccatgattcaattatcgccatctagtcctgctcttgatacatgaaaattattacaagtcaaggtgagatttgagtggggacacagccaaaccatattattctgccccggtccctctcaaatctcatgtcctcacatttcaaaacacaatcatgcccttccaatagtctcccaaattcttacctcattacagcattaacccaaaagtccaatccgaagtctcatctgagacaaggcaagtcccttccacctatgagcctgtaaaatcaaaagcaagttagttactttctagatgcaatagggatacaggcaatgggtaaatacacccattccaactgggagaaattgatcaaaacaaaggggcttctaggccccacgyaattttgaaatccagtagggcagtcacttaaccttaaagttccaaaatgatcttgagataaacttttgtcattttgttctttattttgtcttcaaaatgagagcttgtagtgggtaatatttgaattttgcaagattgcaacttgtaaaattttgtgaaaaattgta

SEQ ID NO: 290410 - DNA, 634 bp, Homo sapiens
attagtgagaagtaattaaatattattgacaaaatttgttgattaaaagcaaatgaggaagtaatgataaagtttttctatatgatacatgtatttttcaatataattatagctacttataaaatcatttaaaacagcaaaactgttgatcactggataattgagttgtggggttttgaccatcaattttatttttataagttcattttattatctttttagttaacaagaaaatagaaaaaaatggcaccaggaaaattgtgcagaaaatgttttttaaaagttattataaaaagttcttcttactagaaaaaaggattgtgaattcttcccacttctcacttatcatctgtaagcattttgcagataggacatctagatatgggaaaacataagaaaatttctccaattacttaagtgtcctccaatccttggaaggcactcagactgatagaagtgagttctttgacataatattttgcataactgaagttcaaacgttattgtttgtaacatctatgcatctatatgcaagcaataygatatgacaggaacaagtttctattatggatatgaatttgtcctcccttagcgagaaagatcattgaatctaggccagatgagaattgctgtt

SEQ ID NO: 290411 - DNA, 564 bp, Homo sapiens
agaataaagacttgggcagaaattaaagcagctctatgtttgagaaacatttggggttcaagtcttaacaagttagaggggttcagtaaacaccttgggattttcatggaaatcccagaagaaccatgtcttacaagtaaagataaacggctacatcctagttctaagagcaaaaccagtattcttaacagccccacttagaacagagcttaaataagataaatcaaacttcccattttctaattccctactgaaacaaaacacttktttttagaaatgatgacataattcagattttctacaacatggtatgcataatgtccggtgtgcagctaaaatttaaaatgtgtagcaataaagaggaaaattgaacacaaaattaaaaagaaaaaacagaaacagacctacagatgacccagatactggaattagcaataaaattcattaaagcaggcttaatatacattaaaatgggttttatacatatatgagaggaatcaggaaaacatgatgaaaataggtaaacagatggagagccaaagcagagatggaaaaatctaaaaa

SEQ ID NO: 290412 - DNA, 466 bp, Homo sapiens
tgcctctgtattcctagctacttaggagactgaggcaggaggatcacttgagcccaagtgtgtgaggctgcagtgagccatgatccagccactgcactccagcctggatgacagagtgasatcctgtctcaaaaaaaagaaagaaaagaaaagaaagaaagaaaagaaaagaaattagaaaatattttgacatgataatatatagaaaatttaaaaattgagagggaaatatttatggtctcacatttatacattagaaaacatgaaagttttgaaataagataataactcaaggagattttaaaaaagatgagcaattaaacccaaacgacaagagtaaagcaaacataaataagaataagatggtactgccataaaaagacacatagacaaatggaacagaatagagaactgataagtaaatctatgcatttaaagccaactgattttttacaaagacaccaag

SEQ ID NO: 290413 - DNA, 605 bp, Homo sapiens
gttgggggattgcttgagtccaggaggtggaggctgcagggagccatgatcaggccactgtgccactgcactccagccggggtgtcagtgagactctaactaaaaaaaaaaaaaaaaaaaaaaaggatggatagatgtactatatatatgcaaaattctttaagcaacaatttatataggaaggataaaaatggtcaatgatcatatgaaaaaattctcaccttccttacatatcatagaaaagcaaagtaaagccaccacacactcactggcatagctaaaattaaratctctctctgttcctgtgttagtttgctgagaatgaacagaaaaataaacactacatgatctcactcataagtgggagttgaactatgagaacacacagacacagggaggggaacatcacacagtggggcctgccagcggtggcggctaggggagggatagcattaggagaaatacctaatgtagatgacggattgataggcgcagcaaaccaccatggcacgtgtatgcctatgtaacaaacctgcatgttctgcacatgtatcccagaacttaaagtataataaaaaataataataattttaaaaatctctcac

SEQ ID NO: 290414 - DNA, 519 bp, Homo sapiens
aaaacaggcaaagataatccacagtaacagacaacatatcagctattgtttctaaagacaactgactgaaaaggggcatgagggaacattgtggggcgatggtaatattctatatttatgtttgtgtgattgttacattgaygtatttatttgtcaaaacttatagaatgtaaacttaagattcattctttctactatatataaattttttctcaatgaaaaagaaaaagagagagaacaaatgcccaaggtcacagagttaatggttgcaacacatgagttagaatgtcaattgctcatttcttttctaggacatttaggatttcaataatcttaatgtgagctgaaaaatccctaacagtaataataccagtcattttggactggtgtgagacattgaatttaggttaatatctgtgccaagacattgaacttagattcacctatgccaaggaaatctttttggtattaaaagtttacagcacgttgttaaagaatagtggaactggatatcacagg

SEQ ID NO: 290415 - DNA, 1223 bp, Homo sapiens
tcccaaccctgtgagagtagatagttttattatgcctagtttgtgcataagaagctgaggcttagagattttaagttaagttgccaaggctacaacgtcagtaagagacacagctaagattcaaacctgtttacyaaatctgatagggatactcatatcatattgcttccacttacaaatacgttgactgtgtggggcatccattgtttaggaccactaggctcccatttcatattgttgggtaactgtaataggttgaatattatccactcaaatgtcaccaggataatgccagcctaagcagttggaatttttattttgacagtttttttcaatttaatctcctgatccacaggcatggctacttaatgaaccccaaatagcttgggatgccccaagagatttatgatcctttgccaaataccagagggaaataagaaccatgccagatgggttcaagtgagaattggtgcccccctttaaatcattaacatataattgtaatgctaaagtccccacccataggagaaaatcatcgtgattttctaaatatacatcatacgaagagggatgtgtatgatctgcgccttcactctggagttcctwctctacgcataggttaataaaagctgtcaggcagagcaagactccgtcttaaaaaaaaagaaagctgttaggtaaaccagaataatttattgtctccwcgttgcgtatttcattcctgtttattttcaatgtttatgtgacaaagttattaactgagatattaatttttaactcctcatggtatctctccttttcaatccattttccaaaaatatcatggtcttgtgtgaccccttctctccggacaggtttgtgtttctgggccatgagaaaggtggcttgcaagatgcatcctggtctggtttggttttcctacagcctaagacattcaaaaaaatgttgctggatttcttggggaagaggaaatggtctggctctttgaggagcagacagcagtgaggagactcctctagcctagaaggggatggaggtttgaggaggctactcttctgagggatggctgtgtgttatacacacacaggttactggaaccttgagaacacagctccaaagcttgccagagaagtaagtaccccaagcttgacaagtaaactgtagaatcttgtgcattaaaggagagaagctgctttgtcccaattttagagcaaacttagaag

SEQ ID NO: 290416 - DNA, 451 bp, Homo sapiens
gataagatgaacacataagaaaatatatattacagggccgggcacggtgactcacacctgtaatcccagcactttgagaggccaaggtgggtggatcacttgaggccaggagttcgaaaccagcctgaccaacatagtgaaaccctgtctctactaaaaatacaaaaattaaccaggcatgatggtgcgtgtctgtaatcccagctactcaagaggctgaggcatgagaatcgcttgaacccgggaggcagacgttgcagtgagccaagattgtgccactgcactccagcctgggtgacagagtgaggctttgttgccaaaaaaaaaaaaaaaaaaaaragagaaaaaataaaatatatgttacaggacaaggcaatccttggtgacacctgaaggggagaaatagaataaaaccctcagggcctagaagatgatgtggcaagttggagag

SEQ ID NO: 290417 - DNA, 521 bp, Homo sapiens
tcagtgccaccatttgcaaacgatatgcctttggtagattagtgtctaacccttagttgcctcatagataagatgaagaagatatttccgcttttcattaccacaaaataggatgtgtgtgtgtcaatatattgtattagtccattctcacactactaataaagacatgcctgagactcagtaatttataaagaaaagaggtttaattaactcaaatttctgcatggctggggaggcctcaggaaacttgcagtcatgatggaagccacctcttcacagggctgtaggagagagaatgagtgccagcaggggaaaaatgctaggcacttaagaaaccaccagatctcatgagactcacacastatcatgtgaacagcatggggaaaccacacccatgattcaattacctcccaccgggtccctcccacaacacatggcaatgataggaactacaattcaagatgaaatttgggtggggacactgccaaaccatataacatatctagaagctcatatgggcc

SEQ ID NO: 290418 - DNA, 468 bp, Homo sapiens
ttagtgttgttgttcatggttagtatgctattttttttagaggcttctggaataatagaaaagcaaggctctagagcattcaaaacaccagtttccccagttctcttgaggctttccttcttagagctcatcttcactaaacatcatgtgatgatgacctctcctctgaaaaccagcctcctgagtgggcctgctaccatttgtcaacagccactcaaggcttttcccagtccccggagacaccctgagggtagcagtaataatgcactctcactctttttctccctcyctctccaccctcatccccctctttctctctgaaggttcacatacccaagacccctccagatctctggtggtgactagcctggagatgggggagccacaggcaccacagagaggccaggctgggaacagaggtgattggaatcttccaggtgaggggaggtggtgttctcaacgcaggaa

SEQ ID NO: 290419 - DNA, 561 bp, Homo sapiens
taagacaggccaggtcatgcagactcctcatacaagggaggtgggttccagggagggaaagtgggttctggaaaggcagggatgcagactttgaaggggtttgagcaaggaacaaatctgatcatgtttgaactktaaaaggtagttttggctaccaagcggagaatggattgaggctcacttttggaaacagagcaatggggatgggagaagaggagtcagctgttgaggtccaagtgagagatgagtgcagtctcaccagggtggtggacggggatgaaaagaagtggatggatttcaaaagtgttcaagaactacagttgattgaatctggcaactgaatagatgtgagaggcaagttacagggaggagtcaaggacgtcactgagagttttgatctagacaactgtgagaggatgggactattcactgcaatagaaagtcaggaagcaggtgagagtggggcgggacatgatcttgcgtttctgtcaactgaattaaccatctgatcttcatgagtgacgatagccagttggtgcttgcagcttgcagtttgcagca

SEQ ID NO: 290420 - DNA, 540 bp, Homo sapiens
aggcaggataagactttgggtcctgttttgggctctagggagtgaccagaactgtttataccttggaaggagaggacaggaaatagaagtggatactttgcccagtgatggggcattcccaaattactttataatttataaaacaaattataaagtaaaattggttttactttataaactctgattttccctgcactgccctacactmtcctccatccaaggcatagggtaagagtagagacacatagtcccagcagaaggcctgtcacacagtagacactcaatgtctgttgatgaatgagtcaatgaacttttctcagttactgccgtgcaccacacacacacacacacacacacacacacacctgaagtgtctttcattcttcaaacagggtaccaaaacctttcccctgtttcccctactggggcagagctgacatgtctcctttttgcttggaccacctccatgctttttctcccatacatactaagacactcaccccacctccaccagccctaccccacccagaaagcaacaga

SEQ ID NO: 290421 - DNA, 540 bp, Homo sapiens
aggcaggataagactttgggtcctgttttgggctctagggagtgaccagaactgtttataccttggaaggagaggacaggaaatagaagtggatactttgcccagtgatggggcattcccaaattactttataatttataaaacaaattataaagtaaaattggttttactttataaactctgattttccctgcactgccctacactctcctccayccaaggcatagggtaagagtagagacacatagtcccagcagaaggcctgtcacacagtagacactcaatgtctgttgatgaatgagtcaatgaacttttctcagttactgccgtgcaccacacacacacacacacacacacacacacacctgaagtgtctttcattcttcaaacagggtaccaaaacctttcccctgtttcccctactggggcagagctgacatgtctcctttttgcttggaccacctccatgctttttctcccatacatactaagacactcaccccacctccaccagccctaccccacccagaaagcaacaga

SEQ ID NO: 290422 - DNA, 540 bp, Homo sapiens
aggcaggataagactttgggtcctgttttgggctctagggagtgaccagaactgtttataccttggaaggagaggacaggaaatagaagtggatactttgcccagtgatggggcattcccaaattactttataatttataaaacaaattataaagtaaaattggttttactttataaactctgattttccctgcactgccctacactctcctccatccaaggcatagggtaagagtagagacacatagtcccagcagaaggcctgtcacacagtagacactcaatgtctgttgatgaatgagtcaatgaacttttctcagttactgccgtgcaccacacacacacacacacacacacacacacacytgaagtgtctttcattcttcaaacagggtaccaaaacctttcccctgtttcccctactggggcagagctgacatgtctcctttttgcttggaccacctccatgctttttctcccatacatactaagacactcaccccacctccaccagccctaccccacccagaaagcaacaga

SEQ ID NO: 290423 - DNA, 540 bp, Homo sapiens
aggcaggataagactttgggtcctgttttgggctctagggagtgaccagaactgtttataccttggaaggagaggacaggaaatagaagtggatactttgcccagtgatggggcattcccaaattactttataatttataaaacaaattataaagtaaaattggttttactttataaactctgattttccctgcactgccctacactctcctccatccaaggcatagggtaagagtagagacacatagtcccagcagaaggcctgtcacacagtagacactcaatgtctgttgatgaatgagtcaatgaacttttctcagttactgccgtgcaccacacacacacacacacacacacacacacacctgaagtgtcyttcattcttcaaacagggtaccaaaacctttcccctgtttcccctactggggcagagctgacatgtctcctttttgcttggaccacctccatgctttttctcccatacatactaagacactcaccccacctccaccagccctaccccacccagaaagcaacaga

SEQ ID NO: 290424 - DNA, 497 bp, Homo sapiens
ccactcccccacactcctttttaaggtrtgagcacatcacacaacagacattctaaaccttgggttcatggatagaattcagggatcatatatttggatagggaaaaaaatcacgtctttattttcactaacctctaactgaaatatagcattctcttccattatgaacacagtccacaaactgcattagtgtgtgtctctgactcctatagaaacacacacattttcatatcacatcaggtctggtgtcctgaaacatcatttatttacattcatcactacttcaggattatggtagttattagacttcaagtagatcttattagtatgttaattaaaaatacatatagtgctgctatttttaaagcgtaatacctatctccttattttatttttaacgtttaatttagattcaaggtatacatatgcaggtttattacttgggtataatcctattacccaggtatgggtatagtacccaatagttagtttttcaa

SEQ ID NO: 290425 - DNA, 619 bp, Homo sapiens
ctgttacttcataaggctgttatgaggattgagataatgtgtgtaaacctcattgtgtagagcctggcatgtatttattcttgtcaattatctgggaagttattgttagagagcattatgaaacaggaacttgcatgggatttaggttcagatggacactagaktccaatttatcttcatcacttacaagctgtgggatcttagccaatttatttggcttcttaatactgagttttcaccatgtttaaaatggaattaacaatatcttctttgtagcattattatgaggattatgtgacatacactatgaaggctcttggcacaggcacatgaaataagacatagtattattgttgttgaagttgtgggcccgggtggatattcacatggagagggtttgatggatgaagggtaaagggctgaggtccatgtttagattgtcacaataggctgtgaaggacacaaaaggaagccacaaattggcagccagggaagtgggaggtaagtttagataagtcattgtaggattggaggattggtaagctttcaaaattagagttttcctgtcatttttgtcatgctgagactagatatgatgtgtcaaggaagaaaattcaag

SEQ ID NO: 290426 - DNA, 619 bp, Homo sapiens
ctgttacttcataaggctgttatgaggattgagataatgtgtgtaaacctcattgtgtagagcctggcatgtatttattcttgtcaattatctgggaagttattgttagagagcattatgaaacaggaacttgcatgggatttaggttcagatggacactagagtccaatttatcttcatcacttacaagctgtgggatcttagccaatttatttggcttcttaatactgagttttcaccatgtttaaaatggaattaacaatatcttctttgtagcattattatgaggattatgtgacatacactatgaaggctcttggcacaggcacatgaaataagacatagtattattgttgttgaagttgtgggcccgggtggatattcacatggagagggtttgatggatgaagggtaaagggctgaggtccatgtttagattgtcacaataggctgtgaagracacaaaaggaagccacaaattggcagccagggaagtgggaggtaagtttagataagtcattgtaggattggaggattggtaagctttcaaaattagagttttcctgtcatttttgtcatgctgagactagatatgatgtgtcaaggaagaaaattcaag

SEQ ID NO: 290427 - DNA, 467 bp, Homo sapiens
cttttgtgccctgggggccaggagcgcctgtgtgtggtgtcaaataggctgtgatttgagcacaatgacctgacacttgatgcaggcgattctcactctgtgtaaacaatacaagaaatttggcttggtataaaaacagtgacctattatagtctcctggcacccctccagaacactagaagtcctgcagggaaatgctttctatattttggcttgtttatacagaggtggtgacaacaagcctatagatgtataagctgaagagactgaaaagcatsttttcagtaagtcttgatacttctgcttcagcattgctggcctgcatgtcccatctctctgtacctctttcactctaagttgaacaagcttgtctctgcctcctaaataagaggataggagagatagctgggggcctcccaatcaaaggaatatttataaggcagtatcttaaaaacagtgaatttaat

SEQ ID NO: 290428 - DNA, 558 bp, Homo sapiens
catcattttatttgaatctccctgataccctaaggtttaagtagtttaaattattacccacattttatagataaggaactgaatttcagaccaatgataaaacttgtcaaagtttatacagcagagtctgtactgatttgaattctgttccttgcgctctaacactcatacaattttattttggaattgactgggcggctagtttcccagatataacaaggttcaccygcaaggaggttgttagttctctctagggcacaagcttttatggatgcaccactgtagtgtacacagggtatagtgaacatgattgatattgggatgcacatatttaggcaaagaaaagccattggttgtcttgtgtcctcttaatcagctcatcaaagctgaatatgaacatatttaataccaatgtaatctataattagagtataaaatactaacaatagataataaggtggtttgaaagttaaaactctaaatcagatgctattgctaaatttggcaaatgaaggaaaataaacataagattcttaatatacttgtcctatgaaataa

SEQ ID NO: 290429 - DNA, 581 bp, Homo sapiens
agagtgcagtggcatgatctcagctcactgcaacctccrcctcccgggttaaagtgattttcctgcctcagcctcccaagtagctgggattacaggcacccaccaccaaatccagaagcttttctggctataaaacaatgccatttttctcactgacattattttattcaaaaagatagaaatgtaagttgtagcaatgaatatatcttctgatccaggagaatcaacaaaactattttttattttgggtggaaaaaatgcattctatacatttccaaattgtgcgtattataaaccaggatgcttgcctccattctgcaaaccactatctcttcaaatgaggagaagatcagaaatgaagtgacttttccacagtctcatgtggagttagtgacagagctgggcctggaaccagtgtagtcttcatctcacttgactgtatgtatacatgcacacgcatgcattcatgtatgcacacattctgcctctgcagccagttccactgaatgtaacagagatgactatgaaccttgcagacagccagccttgcaggggtgaggattatatgctagtaggcagca

SEQ ID NO: 290430 - DNA, 581 bp, Homo sapiens
agagtgcagtggcatgatctcagctcactgcaacctccgcctcccgggttmaagtgattttcctgcctcagcctcccaagtagctgggattacaggcacccaccaccaaatccagaagcttttctggctataaaacaatgccatttttctcactgacattattttattcaaaaagatagaaatgtaagttgtagcaatgaatatatcttctgatccaggagaatcaacaaaactattttttattttgggtggaaaaaatgcattctatacatttccaaattgtgcgtattataaaccaggatgcttgcctccattctgcaaaccactatctcttcaaatgaggagaagatcagaaatgaagtgacttttccacagtctcatgtggagttagtgacagagctgggcctggaaccagtgtagtcttcatctcacttgactgtatgtatacatgcacacgcatgcattcatgtatgcacacattctgcctctgcagccagttccactgaatgtaacagagatgactatgaaccttgcagacagccagccttgcaggggtgaggattatatgctagtaggcagca

SEQ ID NO: 290431 - DNA, 581 bp, Homo sapiens
agagtgcagtggcatgatctcagctcactgcaacctccgcctcccgggttaaagtgattttcctgcctcagcctcccaagtagctgggattacaggcacccaccaccaaatccagaagcttytctggctataaaacaatgccatttttctcactgacattattttattcaaaaagatagaaatgtaagttgtagcaatgaatatatcttctgatccaggagaatcaacaaaactattttttattttgggtggaaaaaatgcattctatacatttccaaattgtgcgtattataaaccaggatgcttgcctccattctgcaaaccactatctcttcaaatgaggagaagatcagaaatgaagtgacttttccacagtctcatgtggagttagtgacagagctgggcctggaaccagtgtagtcttcatctcacttgactgtatgtatacatgcacacgcatgcattcatgtatgcacacattctgcctctgcagccagttccactgaatgtaacagagatgactatgaaccttgcagacagccagccttgcaggggtgaggattatatgctagtaggcagca

SEQ ID NO: 290432 - DNA, 1157 bp, Homo sapiens
cagaagcctggctgttctctctagctcttccccaccttctcctctctaaacaactaagtccccaatcctgctcccagtagctctcaaatctgccaatttctcagactctactgccactcccgtaatccaggactccgggtcctcgccctcgtcaggatttcagtagcagccttctagccattttctcttcccttccagtccacatccctcactgtcatcaaagctcacttcacacttcactacccagcttaaaacctcccaccagcacctggcagccgacaatgtgtggtccaggttccctgaagcctgtgtgcaaggcyctttgtggtcagtctgtcccacctgcctccccagccacacttcctccttgatgtcaggctccagaaacacagctgaggacccttcattgccctcgacacagagggctatcccagttctgtcgctttgcctgagcatgcatcccactggccttcatctggctgattcctatctgaatcaaggtttgactcaggtgtcacctcctctgagaagccttctctgctcttccccatctcactcctcaaggataggtgaggtggwcagaagcctggctgttctctctagctcttccccaccttctcctctctaaacaactaagtccccaatcctgctcccagtagctctcaaatctgccaatttctcagactctactgccactcccgtaatccaggactccgggtcctcgccctcgtcaggatttcagtagcagccttctagccattttctcttcccttccagtccacatccctcactgtcatcaaagctcacttcacacttcactacccagcttaaaacctcccaccagcacctggcagccgacaatgtgtggtccaggttccctgaagcctgtgtgcaaggctctttgtggtcagtctgtcccacctgcctccccagccacacttcctccttgatgtcaggctccagaaacacagctgaggacccttcattgccctcgacacagwgggctatcccagttctgtcgctttgcctgagcatgcatcccactggccttcatctggctgattcctatctgaatcaaggtttgactcaggtgtcacctcctctgagaagccttctctgctcttccccatctcactcctcaaggataggtgaggtgg

SEQ ID NO: 290433 - DNA, 608 bp, Homo sapiens
catgaactcacacttgggcgggatccctgggagactctgccctctgtgtaagagatccttgttttccagtattggtgaggggcgcacctctccactctgtttcattagatccctttgtggtcctactctggggtatatccagtggccacctgagatgtggcgtgaagagtctgtgatcatgacatagtggttttctttgtgtaatggccagtgccctgtaaggtcatagttacccttaacttttttcctgtttaacgcccctgagaaacttggttccactttctaagcatagtgtccattaatgaatacattttaaaatcatgtaataaatagtgaatagggtatttggaaagtagaggaaagaaaaagcaacgatccaaaatcctggccttctaatagcaacagaaattgtcattttggtatactccttccagttattttaaatgtgatgtttagaaaacacttgtaatctcagtatgtaygtatgcatttgcagtgattaagaccttgagcattctgatttctgataagattcatgtgctcctctagcaggagtgacaggtggcacctcaggcagacaggcaggggtggttttttggctgtgtaaa

SEQ ID NO: 290434 - DNA, 536 bp, Homo sapiens
ggactcaacatttctatcaattcccagtcatccctgttttaaattggaaagatgcatgttctgttgggtacttttgtcaagcacaggagggccattagtggtgattggatgtgtcattttccagaattattgatgcccgtgattgtgccggggctgcaatcgagaaaaatggcagagagtgtcatcccacttttctcagactgtgggcgagtgttggggaaccgaggaaagtggatggtgtgtccactgtctaagtgtcccagcctttctgtgcatgttatagaaaaatgaggattgtactgcgtttcaggagaaagaaagggctcgtayagagcgagagcaaagttttttaaaaggataaagacgaaagaaaatgacaaggaaataaagaggatgggagagagatgacgatgatgatggttgtgttagtgtgttctcatgccgctaataaagacatacctgagactgggtaactttataaaaaaagaaaaaaaagaggtttgatgcactcacagtttcacatggccatggaggcc

SEQ ID NO: 290435 - DNA, 585 bp, Homo sapiens
gagtgttggggaaccgaggaaagtggatggtgtgtccactgtctaagtgtcccagcctttctgtgcatgttatagaaaaatgaggattgtactgcgtttcaggagaaagaaagggctcgtatagagcgagagcaaagttttttaaaaggataaagacgaaagaaaatgacaaggaaataaagaggatgggagagagatgacgatgatgatggttgtgttagtgtgttctcatgccgctaataaagacatacctgagactgggtaactttataaaaaaagaaaaaaaagaggyttgatgcactcacagtttcacatggccatggaggcctcacaatcatggcagaaagaggaggaggagcaaagtcatgtcttacatggtggcagtcaagagagtgagtgcaggggaactgcccttttataaaactatcagatctcatgagatttattcactaacatgagaacagcactggaaaaacccacccgcatgattcagttacctcccaccaggtccctcccacaacacgtggtgattatgggaactacaattcaagatgagatttaaatggggacacagacaaaccatat

SEQ ID NO: 290436 - DNA, 580 bp, Homo sapiens
tgttactcagaacttatgtcattaggaataaaaccccaatttcttctgaatgtgccatttgttccccaaaggaagcascaaatgtgggtgacagttcatggggttaataaaaggttcatggtaggctctctataatatcttggatattggctcctgccctctcccaattttctacatcatatccacataaagtgaccttcaaaacccctgactggaagttatccacaagatataacatcttttttcatcctcagtgtgatcaccagatggtctcccatcagctcataccagtaacttctccctagtgctccagggagggaaagttctgaatccaccccaacgggaaacgtgtcatgcaagatccaaagggcaagactatcctttatttctctgctgcttcacattcctccacttgcccacttcatgacattaatttttctgcattttcctggctttcttcctcactattttttttttcatttgcctaagaatctttcatccttgttaagaagctagagtgtgaaaaagcatctatttaagctctcccaccttttccttctgcttgcatttgcagctgcta

SEQ ID NO: 290437 - DNA, 611 bp, Homo sapiens
actttcctgttcttgcttggttgttgacatgccatctctttttgcatccatagcacatagtctgtctggggctgggagcctccctgggtgaggcccagggctctgtacaatgcccaaagtagggcccacattgagggctgtctgcctggtgggatcgaagtcagctctggctaaagcagtgatatggcaaaacctagctctgtcattctcactccttcagcagcacccacctctctgtcccatatgggcaccctccctgccttactcctcattattttgttttacatggcagctratcacgcctgataaaataactggagagcagtatttcatctcgaaaatgaaaattttcaggacccgtttggaaaactccccaatgcagaaatataacagagttaggataacatttttgaggtggaggctctgaacaaaaacactttaaaacaattatactattagacaaatggtcagggcctgtcatacaacatctttgtataaattcaaaaacagtgccctttttggatcaggtgtgcagctcagctaaaagactgaacattatataaatggcagtttaaatattgtacaaatcacacgaaggcaggttctctggg

SEQ ID NO: 290438 - DNA, 1157 bp, Homo sapiens
ggggtattgaagtctccaattaatacacttgaattgtatatttcttgcttcatttctgtcagtttttgctttgtgtattttggtacttttttgttaggtgtatatgtgcttatagttgttacatcttcctgatagagtgacattcttcttctttaaaaagttgcyttttatctttagtaactttttgctgttcttttaaaatgcacttaagaatctgttattaatatagtcacttggctattcttctgattgctgtttgcataatacatgtttttctatccttttactttccatctatttatatctttgaatccaaaatgtgcctcctgtatacagcaattagattgggtcttatattttttaaaaatgttttttgacagtgttactaactggatcttggtttttaaatccagtctgacaatttctacctttgattggattattgaatcctttcacatttaatgtcattattaatagagtttatgtctgccatttgacttttttctatatgtcttttttatacttctataaccctgtactgctttttttgcataagtgagtattttgtagtgtagcatwggggtattgaagtctccaattaatacacttgaattgtatatttcttgcttcatttctgtcagtttttgctttgtgtattttggtacttttttgttaggtgtatatgtgcttatagttgttacatcttcctgatagagtgacattcttcttctttaaaaagttgctttttatctttagtaactttttgctgttcttttaaaatgcacttaagaatctgttattaatatagtcacttggctattcttctgattgctgtttgcataatacatgtttttctatccttttactttccatctatttatatctttgaatccaaaatgtgcctcctgtatacagcaattagattgggtcttatattttttaaaaatgttttttgacagtgttactaactggatcttggtttttaaatccagtctgacaatttctacctttgattggattattgaatcctttcacatttaatgtcattattaatagagtttatgtctgccatttgacttttttctatatgtcttttttatacttctatwaccctgtactgctttttttgcataagtgagtattttgtagtgtagcat

SEQ ID NO: 290439 - DNA, 536 bp, Homo sapiens
aatagttttatttcaccttgatttttgaatgatagttttgttggatatagtattcttggttaacagttgtttcctttgagcactttttaatatgttgtcctacttcctttggacctccattgtttstgatgagaaatcagcttttaatcttattgaggttcccttgtaacagagaagtcattttcctcttgctatttttaaggttttccttgtctttggctttcagtattttgccataatgtgtctgcttatggatcttcttgaatttatcctacttggagtttcttaagcatcctggccataaatattttaaaataaactttgaaagatttcagccactatttcatctaataatttaataatttttttctgtttcttcctctctctcctctccttttggtactgccattatgcatagcagttggtgcacttaatggtgtctcatgttttcctgaagctctgtacatttgtcctcattcttttttctctctgttcttcatattgcataatttctattagtttatcttcaagattgt

SEQ ID NO: 290440 - DNA, 537 bp, Homo sapiens
tttgccactaggtgccttttgaatatttgaaatgtggcaagtgaaactgagaaactgagtttaaaattttatttttaagcagggtgcagtggctcacgcctgtaatcccagcactttgggaggcccaggcaggtggatcatctgaggtcaggagttcaagaccagcctggccgacatggcaaaaccccatctctactaaaaatacaaaaattagccaggcatggtggcgtgcacctgtaatcccagctacttgggaggttgaggcaggagaatcacttgtacccgggaggcagaggttgcagtgagctgggatcatgccactgtactccagcgtgggcaacaagagtgaaactctgtctcaaacacacacaccccaaaaattttatttttaattaatttttttatktgtataaatttagaggatacaaatgcaattgtgttacgcggatagagtgcatagtggtgaagtcttggagctttcagtgtatctatcacaccataatagtgtatactatacccactaaatttaattagcca

SEQ ID NO: 290441 - DNA, 537 bp, Homo sapiens
tttgccactaggtgccttttgaatatttgaaatgtggcaagtgaaactgagaaactgagtttaaaattttatttttaagcagggtgcagtggctcacgcctgtaatcccagcactttgggaggcccaggcaggtggatcatctgaggtcaggagttcaagaccagcctggccgacatggcaaaaccccatctctactaaaaatacaaaaattagccaggcatggtggcgtgcacctgtaatcccagctacttgggaggttgaggcaggagaatcacttgtacccgggaggcagaggttgcagtgagctgggatcatgccactgtactccagcgtgggcaacaagagtgaaactctgtctcaaacacacacaccccaaaaattttatttttaattaatttttttatgtgtataaatttagaggatacaaatgcaattgtgttacrcggatagagtgcatagtggtgaagtcttggagctttcagtgtatctatcacaccataatagtgtatactatacccactaaatttaattagcca

SEQ ID NO: 290442 - DNA, 491 bp, Homo sapiens
ggcagttactaaacactttttacgtagaaggtgtcatgacacttgggatgtgagaaactctgcctctgggtcacccattaagtgccagctgtgtaccaagcactaaagtcattgagagaagtactcagcccctgccatcaatgagcttagagtctagcgagggagccagatgcagtggtggacaatggcagaacagggaggtacatgccagtgatatactgaggcagasaagtgagtccagcccagatggtgattgagcagttagggcaggcaccctaaggaagctgtccagctcactatagtgcagggcagaggatggtcatttatggaaatatacttcaaatgcatatcagagttgagagaaggtagacattgcttttctccagtgtaaaggctgcccgacctagttatcagccaagtccctggttgttgtctcaggttacaggagacctggtcagtttgcttagaaaagctcagtatttagcaattgc

SEQ ID NO: 290443 - DNA, 491 bp, Homo sapiens
ggcagttactaaacactttttacgtagaaggtgtcatgacacttgggatgtgagaaactctgcctctgggtcacccattaagtgccagctgtgtaccaagcactaaagtcattgagagaagtactcagcccctgccatcaatgagcttagagtctagcgagggagccagatgcagtggtggacaatggcagaacagggaggtacatgccagtgatatactgaggcagagaagtgagtccagcccagatggtgattgagcagttagggcaggcaccctaaggaagctgtccagctyactatagtgcagggcagaggatggtcatttatggaaatatacttcaaatgcatatcagagttgagagaaggtagacattgcttttctccagtgtaaaggctgcccgacctagttatcagccaagtccctggttgttgtctcaggttacaggagacctggtcagtttgcttagaaaagctcagtatttagcaattgc

SEQ ID NO: 290444 - DNA, 388 bp, Homo sapiens
gaagggaatgaagatcttgcttctaataggttctctactaactccagtttgactaacagtgtcttctcctaagggctccacccattttctacacagaagagaccaggactttaagtctctttcctttatgattcagtttcacattgcactttcatggggtcttacacaaactgtcagcctgctactgtcccagcagatcccaggaggttacccacaracatgcttcctgcctctccttggacttagggagaagatcaaaagagacaaagttccagtgcccctaccccctattctaccactaacctcagcaggggccaagtcccaacctccccgtatcctcaaagataaagcagaatgtgacctggaggttgggatcagagcctgctgg

SEQ ID NO: 290445 - DNA, 434 bp, Homo sapiens
ttgaggagtattgccatcctaacaatattaagtcttctaatcaatgaacatgagattttttttcatttatttgtatctttaatttctttcaacactgctttatagttgtcagagtataagttttacacttttttcattaaatttattcccaagcatyttattcttttttatgctattataaatggaatttttttcctatttccattttcaaattatttattttaagtgcagtggaaagacaattaatttttgtgtatacattttgtatcctgcaaccttgttgaacttatttactagctctaatagttttttactgaatattttgggatttttcatatacatgcttgtgtcatctgaaaatatagttttacttctttccaatttggatgactcttatttctttttcccgaataattgccctgaatagaccctcc

SEQ ID NO: 290446 - DNA, 434 bp, Homo sapiens
ttgaggagtattgccatcctaacaatattaagtcttctaatcaatgaacatgagattttttttcatttatttgtatctttaatttctttcaacactgctttatagttgtcagagtataagttttacacttttttcattaaatttattcccaagcatcttattcttttttatgctattataaatggaatttttttcctatttccattttcaaattatttattttaagtgcagtggaaagacaattaatttttgtgtatacattttgtatcctgcaaccttgttgaacttatttactagctctaatagttttttactgaatattttgggatttttcatatacatgcttgtgtcatctgaaaatatagttttacttctttccaatttggatgactcttrtttctttttcccgaataattgccctgaatagaccctcc

SEQ ID NO: 290447 - DNA, 566 bp, Homo sapiens
taggcaggatataccattactctattggctttccttgtttgactggtcaaataaggcacccatctcttccataacacttaacgcttgatgatgtttgtcagtacctgcagctgatctgtcctcttggcacctggccatctcaaagcacaggcctactctttcccacatagctaagtagaccacaccatgctgaatcttgagagatgacagcatgggacttaacagckttgcctggaagggagtgaagcttaaatatattctattaccagccaccagcaccaacatgatcaccatttgctgccacagagaccgccatttatggagcatctcctgagaatcaaattcttgattaggtactttccatatattatttctaatctccacatcactcttcagggtaggtgtcactctcattttagagagaagaactctggggctcagagaacttaagtgattttcacaaggtccagggccaaaagtggaaaaaacagattgaccccaaatgctatgcttttcttcactatatcatatgtcccagcagaggggaaatcagaactaaaggggac

SEQ ID NO: 290448 - DNA, 566 bp, Homo sapiens
taggcaggatataccattactctattggctttccttgtttgactggtcaaataaggcacccatctcttccataacacttaacgcttgatgatgtttgtcagtacctgcagctgatctgtcctcttggcacctggccatctcaaagcacaggcctactctttcccacatagctaagtagaccacaccatgctgaatcttgagagatgacagcatgggacttaacagcgttgcctggaagggagtgaagcttaaatatattctattaccagccaccagcaccaacatgatcaccatttgctgccacagagaccgccatttatggagcatctcctgagaatcaaattcttgattaggtactttccatatattatttctaatctccacatcactcttcagggtaggtgtcactctcattttagagagaagaactctggggctcagagaacttaagtgattttcacaaggtccagggccaaaagtggaaaaaacagattgaccccaaatgctatgcttttcttcamtatatcatatgtcccagcagaggggaaatcagaactaaaggggac

SEQ ID NO: 290449 - DNA, 537 bp, Homo sapiens
taaaactgtatgaatccacttctctggtttctcttttctagatttttataatcctctgccgctttggtctcttaaatgcccatgccttgcctcatttttgtctgttattctatttatttgcatgttctgaatttgctgtttgaggttaatccccagaataagaaagagaactctagaaaggctctgacctcagctgtcaatccctcttcctccaggaagccttcccaaaaaggcacaagagtcatgcagtttctatccccagagatggccctatgcttttcagtcaatagaggtaccacagaaggggaagcaagtagcctcctctccacttgtgttgccaccactcctctaaaatcgagaggcagaagagagccccgagaagcactgggaaaggacatgtcaccaagaggtatgagtcctcatcatgcagcratgaagactccaacaaacatccaactagaatataaagcacaatgagacactaggctggggtaactgggattacttctcaccagtgtgctgttggagggaggctgc

SEQ ID NO: 290450 - DNA, 574 bp, Homo sapiens
atagagttacagtgggagtgtagagcaggagatgttcactccaaagttctgcattagaggggtcagtttgagctcagttcaattaaacatgtattaagcaactactctgtgctgagtaccacactctgtcctgggagtacaaagaggttggagtctagtgtgagagacaggcctgtgggcaataattgtagtttcaacagaataagagaaacacccactccagcctgaatgggttattaacgagttaaggctttccatagccaatgattttgaggcagagcttaaaggataagtaggaggtagcctggaaagtgggtacacgagaggaaaggatatggaaagtgaagggaaaaacagagcaaaatttaggagatgagaggcagcttttagggtgttggggggtgagscaggaactcactaggggtggggttaagagggggtagggccaggtatagggcacttagtgtcaaggtaaggggctgctcaaaaattataccctggtgaagagcccttttgagaattcgtgggttaatttcatttaagtctgagggtatgcctttatttatttatttat

SEQ ID NO: 290451 - DNA, 566 bp, Homo sapiens
actttagtacacaacttcccaaagtgtaatgtgcgtatggatcacctgggtttttttgtgtgtgtggtgggggctgttgagacacggtctttctcagtcacccccgctgtagtgaagtggcatgatcacagctcactgcagcctctacctccctgggtcaatcaatcctcccacctcagcctcccgagtggctgggactacagatgcgcgccaccatgcctggctaatttttgttgtattttttgtatagatagggttttgtcatgttgcctatgctggtctcaaactcctgggctcaagttgtctgcctgccttagcctcccaaagtgctggtattataratgtgacctaccatgcctggcctcacctggggttcttgttaaaatgtaggctctgactctgtaagtctagggtggaacttgagattttgcatttccagcaaggttctaggtgtatgtgatgcttattaccttgggtaccaaggctttaggactcatctttaagaagctcttttttttttttttagtctccttgcattttgtacaggtggtgtcctgtctctgata

SEQ ID NO: 290452 - DNA, 572 bp, Homo sapiens
gaaacccttccttaagatcttatggctatttagaactaggaccctcttgtgtactgcaacacagtagaggacaagagggacagcagtagaaaaaaataggaaaagagtttaggagaaaagagagttatgtggactctttttgtatagtaaatctcattagtttgggccttgctatttttgaacttgtaaataatctgaaagaagacaggactgaaatttaacttttatattacatttttttctatagaaattagtggagtgcatggtgatatagaggaaagcgttttaaaattaatgtatagaaagatatatttcacaaaggaaaatcatgtattttgatacagaagcatcattgttcacaaacaagtcatgtattagttaaagatccttgatccttgtctaacagataaagcctaatagattgccaaggaagctgaaatgtctcctcattgcatgargatgaaaaaaaatactttatatatctatttgtaaattctgtaataatttatattgatcctaattagcctctattagtgaaatttaattgtttttctgtggaaaagataaaatta

SEQ ID NO: 290453 - DNA, 556 bp, Homo sapiens
ccctccttcctccctagaatggggatatgatgccaggagattctgcagccatcttgtgaccaagagacaaaggccacgtataagacaacagccaccattgaggcagctctggaatgccaggtccaacctcttacttaagacaaataagcaccttacttgtttaagccattatggtagagctttccgtgactctctgccaaatcctaatgtaggattctgaagtctgggaagtcccggctgaacttgggctcagaagctggtggagatgctgcatggtgcaggccatcccttccttgcaggaggaacaatggctgtccttgactccatctggcttagctcctggtcactccartgtcttggcacttcccctggaggactggagctttgtgtgtgttttcttttttaggaaataagaaaacatcactagtattcagaaattttcccttcctgaaatagaatcctttggaaaaaaaaaggatttaaaatgctgttctcgtcaaaaaacatttataaagtcttggtgtatggtggctatgctgtggtctgtacaggttga

SEQ ID NO: 290454 - DNA, 579 bp, Homo sapiens
gtgttgtctgttttagcgaggaggagattgctctgacagaggatgatcaggcaataatgtagaagaaagatcaggaaagaatagaaggtarcatttgaatttaaccctgtggtcagatgataatgggcggtatgcaaggtggttcactcatgtggccaggggagaatccagagagacactctgggatttgctcagacaggaacctggaaagaagttcaggaagaagagattggaagtcaagatgggagaaagtggcatttgtctccctaaggccaaactgtaatgtaggacaaagcttggcctggggttgtcattgacaggtgctcagccctgctgtctgggtccagagagacctgtggcttgaggcactggtaccctaattgccccctgcccctgaagtggaggtaattgagtctcctaaagtgtgaaacagagctgggataatagtagcaactaagacagagaaggcaaatccaaaggccaacaaactggttgtgtaagtttgtaaatgagcggggagtggcttgaagagtggtttttaagccttctccaaagacataaaaactttacagacaacaa

SEQ ID NO: 290455 - DNA, 579 bp, Homo sapiens
gtgttgtctgttttagcgaggaggagattgctctgacagaggatgatcaggcaataatgtagaagaaagatcaggaaagaatagaaggtagcatttgaattyaaccctgtggtcagatgataatgggcggtatgcaaggtggttcactcatgtggccaggggagaatccagagagacactctgggatttgctcagacaggaacctggaaagaagttcaggaagaagagattggaagtcaagatgggagaaagtggcatttgtctccctaaggccaaactgtaatgtaggacaaagcttggcctggggttgtcattgacaggtgctcagccctgctgtctgggtccagagagacctgtggcttgaggcactggtaccctaattgccccctgcccctgaagtggaggtaattgagtctcctaaagtgtgaaacagagctgggataatagtagcaactaagacagagaaggcaaatccaaaggccaacaaactggttgtgtaagtttgtaaatgagcggggagtggcttgaagagtggtttttaagccttctccaaagacataaaaactttacagacaacaa

SEQ ID NO: 290456 - DNA, 579 bp, Homo sapiens
gtgttgtctgttttagcgaggaggagattgctctgacagaggatgatcaggcaataatgtagaagaaagatcaggaaagaatagaaggtagcatttgaatttaaccctgtggtcagatgataatgggcggtatgcaaggtggttcactcatgtggccaggggagaatccagagagacactctggratttgctcagacaggaacctggaaagaagttcaggaagaagagattggaagtcaagatgggagaaagtggcatttgtctccctaaggccaaactgtaatgtaggacaaagcttggcctggggttgtcattgacaggtgctcagccctgctgtctgggtccagagagacctgtggcttgaggcactggtaccctaattgccccctgcccctgaagtggaggtaattgagtctcctaaagtgtgaaacagagctgggataatagtagcaactaagacagagaaggcaaatccaaaggccaacaaactggttgtgtaagtttgtaaatgagcggggagtggcttgaagagtggtttttaagccttctccaaagacataaaaactttacagacaacaa

SEQ ID NO: 290457 - DNA, 558 bp, Homo sapiens
gcatcccagaggagaaatgagaaccttagggataagaaccatgctggggaaataccatatttagtgaattgcaaaatgtatcattagtttatgtgccattaaaaaagaaaaaactgctgccaattaaactattacacaccataagctataagatgcatcctgatttcagagatggcaaaatgtagaaggaaaaagagcatcttagaatcaataaatatgggaactagtatttactgagtatttgttatattctaggcactgagctaagtgctttatacataytatttcatttaactctaaaacaaccctgtgaaataaatgcaagtataggaaagactagcattttatagaggaaaaactgagatacagagagcgtttacataatctgcttaaggtcatttaactagtacagagaagaggtaagatttgaacctacaactctttcactccaaactccatcttcttaaccctttactctctgaagaaacactggagcatctgataccaaatgaaaatgagttatttcatggtggtaagactgaaacattaaaactgtca

SEQ ID NO: 290458 - DNA, 499 bp, Homo sapiens
ttgttatatacaaaaaagtatatacaagctctttaaaaatcaagattcttgaagaagtccctttcctttcataattcatcctgcttgtcttaaagggaaggccaatctctttccaaggcatgggcagccctccagacttacagcatttgaagctcaaggtcaaagcaatttatgttcaaccttccagccattagaggctgagtgccagtacaggaaaagccccttcytaccattttagggacctttgtgcttctagttacatatgtgcgtgttagaagacaatgtgtaataataacgctgcaggctgccaggagaaagcgcaggtcctcaagcggtgaggtggaaagtaccaaagaagctgcatggccaggatgtgggctgacttagtagttctactttccattttaaggacactgaactgggggggaaagcgtgtacccagtctcactgttaacaatgtctgtggaaagcccagctggtaaagccagcaggcagacca

SEQ ID NO: 290459 - DNA, 539 bp, Homo sapiens
tttccaccaatccatataaggttggtacagagattggccagatgcttaccaagctcattctctcttctgaagcacacgactgttacatttcccaaccgcccttgcagytaggaacagttgtatgactgagctctggtcaatggaaggtgagcagaagtatcatatgccacttccaggactggctcataaaatcatcccacatgtatgtcctccacattctctcttctcatctatcctcggatggctgggtgcaaagtgttcagtggaggactctgaggccctatgagcaaagctactgaatagaaagggtaagtcctgggttgtcatcaaccaggaacatctgtaggagactatgacaagagcaagaaataatcttctattacgtgatctctgatacttactggttattacagccatcaacctatgctgaccaataagcagggaacactctcttattaatatcagggtggcaaactgtggagactgaagaaattgctttctatctctacctcaaaatcttatgtcaggtgttaatgtat

SEQ ID NO: 290460 - DNA, 612 bp, Homo sapiens
cttaccaagctcattctctcttctgaagcacacgactgttacatttcccaaccgcccttgcagttaggaacagttgtatgactgagctctggtcaatggaaggtgagcagaagtatcatatgccacttccaggactggctcataaaatcatcccacatgtatgtcctccacattctctcttctcatctatcctcggatggctgggtgcaaagtgttcagtggaggactctgaggccctatgagcaaagctactgaatagaaagggtaagtcctgggttgtcatcaaccaggaacatctgtaggagactatgacaagagcaagaaataatcttctattacgtgatctctgatacttactggttattacagccatcaacctatgctgaccaataagcagggaacactctcttattaatatcagggtggcaaactgtggagactgaagaaattgctttctatctctacctcaaaatcttatgtcaggtgttaatgtattttataaagaatacacatggtttctttaaaagcaacmagaatatgtcagtgatctaggtacaaaaacggcaggagaactcaaagagaaacagaataatgagcacaggggaggggaaa

SEQ ID NO: 290461 - DNA, 567 bp, Homo sapiens
agaactaattgtaattttcagaatttttgccagctcgttgttaaacaggttggtagcttgaaatctgctatgataggagtatttacacaatagaaatcagcaaatgttacaaacaccacaaccagggcttttattcttccctggaaacattrccagcacgtcactgactatgccttcctatttggaccagtatggcaaggcaacactatgtcctgacgctgttttgttggaatttcaggaccaataataaggaaataattcctggattgcagactttgcaaacaaaaacttgaaacagtaaaagcaaatgttacaaagacacaagggaatgaggaagaagtatgtctcccttaacacagctcaaccttctgacagttccatgaggagttctcctaataagctgataagaaataatttggaaagaaaatactagttttaggtggggaggcagttaaattctggagcagtgcggaggacagctttggaaagaaagaccttagagatttagtttttaaactaagagatgggggaggcatcacaggtcccttgaggtaaattctaaaacag

SEQ ID NO: 290462 - DNA, 605 bp, Homo sapiens
attatttcatgagatagatattattgtctgcatttcatagatgtgaaaactgaggctcatagaagtcaaatgatttgcccaaggtcacacgactgtcaagtaggagctgcgagagcgattttcatttgtgtaaaatatcacacctgattggagtgctccctaaaacagttatctacacctggtggtgtgctagagcctgcttgttctggtttctgagaactaattgtaattttcagaatttttgccagctcgttgttaaacaggttggtagcttgaaatctgctatgataggagtatttacacaatagaaatcagcaaatgttacaaacaccacaaccagggcttttattcttccctggaaacattgccagcacgtcactgactatgccttcctatttggaccagtatggcaaggcaacactatgtcctgaygctgttttgttggaatttcaggaccaataataaggaaataattcctggattgcagactttgcaaacaaaaacttgaaacagtaaaagcaaatgttacaaagacacaagggaatgaggaagaagtatgtctcccttaacacagctcaaccttctgacagttccatgaggagttc

SEQ ID NO: 290463 - DNA, 563 bp, Homo sapiens
taagggtgaatgaatggtggagctgggatcagaatccatgtgtcttgcctcaaagtctagactcttaattatgccatgttgctttccacactagagagggtaacagagggagaaatttaaggtgtgaccaggtgtctgactctccttggcctatattacccaaatgtgatgcaaagaaagaattgtagaagttaagaccacaggcctagtgtaaaacacacctgaggtgatagcctatctactcatagattgtgtgattttagcagtggtgtgttagaaaatgtttaacaaccagcatatatatgtrtgtgtgtatatgactatatattacatatacacaggtaagttcatttacaaatcctactgatataaagaatgtataaaacacaatttacagagaacaacagcatatacaatactctgtattgtatatttaatgtagccagttgattctcacaggatgcttttgacctatggttgcaactgacaaacatgtatagttctgacacacatgctggttgatattttcactatgttaaggagtgagacaaaggtgaaaagca

SEQ ID NO: 290464 - DNA, 542 bp, Homo sapiens
tagagagggtaacagagggagaaatttaaggtgtgaccaggtgtctgactctccttggcctatattacccaaatgtgatgcaaagaaagaattgtagaagttaagaccacaggcctagtgtaaaacacacctgaggtgatagcctatctactcatagattgtgtgattttagcagtggtgtgttagaaaatgtttaacaaccagcatatatatgtgtgtgtgtatatgactatatattacatatacacaggtaagttcatttacaaatyctactgatataaagaatgtataaaacacaatttacagagaacaacagcatatacaatactctgtattgtatatttaatgtagccagttgattctcacaggatgcttttgacctatggttgcaactgacaaacatgtatagttctgacacacatgctggttgatattttcactatgttaaggagtgagacaaaggtgaaaagcacctgaatactacgccagaacatcacttgttcatcaaggatgtcagcaacttctttgctgaaccaaataac

SEQ ID NO: 290465 - DNA, 513 bp, Homo sapiens
gggaagaggtgatccatacatagcacacaattgtacggtatttccaccacagaaaaaataaatacataaaaatgatttcaagaacataggtaataacaatatgttgtaaaataatcaggaagtgatgaattttgagtatttattaactttgcttttaacataacacatttaattataaacctacataattaagcamtagctagaatgtgacaaccagttctcaaaattcctaaaaatttaacaactgtctctccatgagctggttcaagacaggctccaacacatcatgggatcttaggcaggccaatcacttaatctctctgagcttcagtgttcctctttgtaaaatgggttagcaatgtcactggccaatgcctggccacttagtaagtacgagtaattattatcttgacccattatattagtgttatattcccattatccatagcaaatacttcatgtaaaattagtttcccctgctctcagcacctcaatgatcactttacattcacc

SEQ ID NO: 290466 - DNA, 513 bp, Homo sapiens
gggaagaggtgatccatacatagcacacaattgtacggtatttccaccacagaaaaaataaatacataaaaatgatttcaagaacataggtaataacaatatgttgtaaaataatcaggaagtgatgaattttgagtatttattaactttgcttttaacataacacatttaattataaacctacataattaagcactagctagaatgtgacaaccagttctcaaaattcctaaaaatttaacaactgtctctccatgagctggttcaagacaggctccaacacatcatgggatcttaggcaggccaatcacttaatctctctgagcttcagtgttcctctttgtaaaatgggttagcaatgtcactggccaatgcctggccacttagtaagtacgagtaattattatcttgacccattatattaktgttatattcccattatccatagcaaatacttcatgtaaaattagtttcccctgctctcagcacctcaatgatcactttacattcacc

SEQ ID NO: 290467 - DNA, 565 bp, Homo sapiens
aaaactgagaagtacttgtgaagttcacagtccagggacatgggctcattaaaggactagtcctaccaccatgttaataaaaggctatttgtagaagttccttttacccagtacatcatgcccaactttcaacaacaacaacaacaacaacaacaacaaaaagtcaaggtaaactaaaaggcaaaaagtaaaataaaataaaataaaataaaataaaatagagagagatcaaacaagcaycagaactaaagtcaattatggcagaaatgttgaaattatcagactaggaattaaaaaacaaactatgattagtatgctgaggttattaatggaaaaagcaacaatgtacaagaatggaagaataaggagatggaaatagaatagaagaataaggagatggaaattatgagaagaaattttaaaagactggagatcaaaactgctgtaacacaaattaaaaaatgcctttgatgggctcattagtcgactagatatggctgcagaaagaatatctgagcttgagcatatgacaatagaaacttctaaaattaaaaaattaagagaa

SEQ ID NO: 290468 - DNA, 1103 bp, Homo sapiens
gctgtaacacaaattaaaaaatgcctttgatgggctcattagtcgactagatatggctgcagaaagaatatctgagcttgagcatatgacaatagaaacttctaaaattaaaaaattaagagaaaaaagatgtaatgagtcagaatagaatattcaagaatcgtggggctactgaaaaaggtataacacatgtgtcacgagaataccagaaggataagaaaaagagaaaggaaacaaggcagtatttgaaacagtgactgattatttccccatattaatgtgagacaccarataacagatccaggaagctcagagaacaccaagcaggataactgccaaaattactacacctaagcatatgatattcaaacctcaggtaatcaaagacaaggaaaaaggtctcagaagaagccagaaaaaaaaacaatacctatagtggagcaaagaaaaagaaatgcawactttaaaatataaaattgagtgattagatcgttactgcatactacagtggacttgtcatgttttgtctaacaagctcctgttcctttcctttctccaagttgcactccattatttcaggagctacttcaaccctggtcctttgaataaagtgcttattgtgggaatggtatcctggtccaccatgatgatccagcgatagatgcacagttcaagccagcttattttccaggatttttcaaattgcatgtagaggagtgacctttctctctccaataggaaatctgaagctgtggtccccatagaatgctggctcccattctggcctcacctaagggtgaggcaaattgaaattaagattgtgaaatagatgcctcggacatcagtcagaaatgtttttaaagagaawgtgtgaataaggaagcctggaggctagaggacgcttcatttgtgtcatacttctttggcaagagctgttacatattccaaaaatcaggtcatgggagttggcagtggtgtctaacatagaataaagtttgggagatatagtcctctcagaaacaggaagaatatttatagacataattacaactaataatttgatctgggcttgataaattatctttcatcagagttcaaatatc

SEQ ID NO: 290469 - DNA, 475 bp, Homo sapiens
tccttctattatctatcattgtgtattttatacttatagcaccctcagctgagactagccacctttcatatgtccactagcacaggtggccggtggctgccatattgaacagtgcaggtctacagggtagtaaaagctaaggccttattaaagtccaggctccacaagcctaggagatatagactgtccccatcttctcmataaagtaattgaggtaaatggaaattaacttcgttacactcacacagtgtctaagtgttctaagggtctattcctatccaataaatcacccccaaaacgtgattgcctaaaacaataatttataattctcccatgctgttgtgtggattgacctgacctgactaagaggctctttcctgtgcctgtaggcctgttactccagaacttgagtcaactgaaggcctagttgcgatggacacagatgctggctacttcctttgcatgtcaggggttt

SEQ ID NO: 290470 - DNA, 593 bp, Homo sapiens
gattatagactttaattgcattttactaaacatctttacagcaacactcagattagtatttgatttaataactaaggtctrtagcagccaaaaaataaaaagatcatcacacctcatatctaaaaacatatggatgtcacttaaggaaaaatacgagaaagatacaacagaaaaaagctagtgaatcttgtttctgtctctgtctctttttatttgaatgctagagaactcaaataaaggtaaaataaattcattatccataaattttataaaaatcatacttactgtgcctttaaatggccaactgatctagtttattgtgtcttcctctaagctactcttgtttgtgtgtgagaagagtttatgttcacgtatctgtatggtatttttctaagttgtgaaatatctgaaaccagggatggcttctgtgcctttcacatgatattaaaaaattttctggccaggcacagtggctcatgcctgtagtcccagcccctaaggaggctgaggtgggaggattgcttgagcccaggtgtttgaggccacagtgagctatgatcacgccacttcgatccagcctgggcaacacagtg

SEQ ID NO: 290471 - DNA, 584 bp, Homo sapiens
tgaaggttgtaattaggtaataacgacgtgatgtgataacatggttttctcatttaacagattcactcatgaatcacaacataattattgagccctaacaaaaatgccagttctcctaacaggctctatagagatatagcattgaatgtaaaagtcagggtctctgtaaaagtcagggtctctgatctcggagaactagatgttcaagggagtcacagcagtgcaatatatgttagagtttcaggaagccatttacaaatattaggcaagtaaatgttatgttccaatttttattttatgtgcctccctctctaaaagaaaatataagagacacagagtaagaacctaagttatcaccttgattcagtaacaagagattgtattagagttccctagagaaaaagaaacaataatataaagatgtacatatacgtctatatacctgttataagaattggctcatacaacaaaggaggccgagaagtcctatgatttaccatctgcaagctatagaaccaagaaagctagtrgtattttttagtaggagtccaaaggcctcagaaccaggagcactgatgtccaac

SEQ ID NO: 290472 - DNA, 625 bp, Homo sapiens
ccctaaaactcataaacctgtatttcaaaaccacagtagatagttgtccccagtatcaacggagggcaaaataagaagacayatatttatccaggaggaattttattcacataaaaataacttcctaacccctagtgaaatattttagagcattatatatgattattaagaaatatttattaaaaatatgtcagtaggccgggcacggtgactcacatctgtaatcccagcactttgggatgctgaggagggtggatcatgaggtcaggagtttgagaccagcctggccaatatggtgaaaccccgactctactaaaagaagtacaaaaactagctggacatggtggtgcatgcctttagtcccagctattcaggaggctgaggcaggagaatcacttgaacctgggaggaaaaaacaaaggaaaaaaaatgttagttatatatttttaaaggctgaaaaataatcacatctcaaatcagagttcccttccaattttttaatatccattgtataatatccaacatcatttactcacatattttatagctggaaatcttgtcaagtaagagacagcaatcatgcaccgttgaatccatacccgccaccacagagaatcttagcact

SEQ ID NO: 290473 - DNA, 507 bp, Homo sapiens
acctctggcaatggctcattctcattatgcacgctackgtaagcatttagctcctggaagaaacccaatcacacaacaagggcacttttgcatccttcaataaatgcctgaagtccacaagttccagatggaatagaacaagcccttctagctcctgtgttaaatgggatccattagtagagcatcccattagaaagtattttcttctgatattgtgcaatagtaatctggcccaatgtgtgtgtgtgtgttgggggggggggtcattacctagaattgaaataactatgagacagcaaatagcacatgtgtactattgacttcagacaagtggcacaataaagtagtggccagaaaactgtttagaatcagaaggcttaggtttatcccagctgcagcttactgtgtggtcccaataagttatccttttttctctgaatgtcaattttcttacccagtctttattacaaaaatcaggagagaaaatgtacatatggggctttgtaa

SEQ ID NO: 290474 - DNA, 507 bp, Homo sapiens
acctctggcaatggctcattctcattatgcacgctacggtaagcatttagctcctggaagaaacccaatcacacaacaagggcacttttgcatccttcaataaatgcctgaagtccacaagttccagatggaatagaacaagcccttctagctcctgtgttaaatgggatccattagtagagcatcccattaraaagtattttcttctgatattgtgcaatagtaatctggcccaatgtgtgtgtgtgtgttgggggggggggtcattacctagaattgaaataactatgagacagcaaatagcacatgtgtactattgacttcagacaagtggcacaataaagtagtggccagaaaactgtttagaatcagaaggcttaggtttatcccagctgcagcttactgtgtggtcccaataagttatccttttttctctgaatgtcaattttcttacccagtctttattacaaaaatcaggagagaaaatgtacatatggggctttgtaa

SEQ ID NO: 290475 - DNA, 507 bp, Homo sapiens
acctctggcaatggctcattctcattatgcacgctacggtaagcatttagctcctggaagaaacccaatcacacaacaagggcacttttgcatccttcaataaatgcctgaagtccacaagttccagatggaatagaacaagcccttctagctcctgtgttaaatgggatccattagtagagcatcccattagaaagtattttcttctgatattgtgcaatagtaatctggcccaatgtgtgtgtgtgtgttggggggggggktcattacctagaattgaaataactatgagacagcaaatagcacatgtgtactattgacttcagacaagtggcacaataaagtagtggccagaaaactgtttagaatcagaaggcttaggtttatcccagctgcagcttactgtgtggtcccaataagttatccttttttctctgaatgtcaattttcttacccagtctttattacaaaaatcaggagagaaaatgtacatatggggctttgtaa

SEQ ID NO: 290476 - DNA, 437 bp, Homo sapiens
tatagttactatttttgtaatacatttttaaaatactgcctactcagaatgcatacatatattttacagtatgaagtagagaacacatttttccctacatagaaaattatttttcacaccatatattgagtaatttcttctgtattaatctataatgttatttttgacatatatctaatatttccccctctcccactcctgctgttctctctctttgtgtgtgtacaatattatttcaacaacctaatttttttatccctttctttttatttatttatttacttatttatttatttttttgagacagagttttgttcttgtcacccaggctagagtgcagtggcacgatctcagctcactgcaacctccgcctccsgggttcaagtgattatcctgccccaacctcctgagtagctgggattacaggaacgtgccac

SEQ ID NO: 290477 - DNA, 515 bp, Homo sapiens
gtgatgttgagctgtttgtcatatatttgttggctgcatgaattttttcttttgaaaagtgtctgttcatgtcctttgcccacttttcaatggggttgttaatttttagtattatttcttatcagtgatacttcccaaacacaaactgcatccgatgtcacagaggtatttccaaagttcttcatatttataagaacagcacaaattattttctaatggcctccagcacacagcttcttaaagggctagtttgggtgcacacaaacagcccatttccccacaacactctcccaaagggacatctggtagaccctctatgactatccagtatttcatcacattcagcagcgaatggaaaagtgctgttcctcacctggcaattttaattggaaartaatctcaacccatatattttgaaaataatttaattatattcaatttgttgatgggtaacataattgagattagtattgttctgtgacccccaaatggcagttacttctaaaatattgtta

SEQ ID NO: 290478 - DNA, 556 bp, Homo sapiens
caaattttgtctttagaaaaacactaaaggtgtttcactgtatcttccaagtcttctgagtcaaggacaaacagggttaagtgacatatccatatcactgagcacaggatttaattgtggtggtaatactgatastaacaatgttaaaaccaactacatttttccccaaggggtttttcttttccttcttattcttcagtttttaaagtcattaaaaggtaaaactaaggtgcagaaaaccaaaactttaagtccagatggtctgtttcattttggaatgagttatccaatccttaggcttgatttttctcatgtgaaaaatctcttcttaggctaagatacgatgtcactacctcagtttgagtttttcacagaattaaattagaactggaaggaactaatttatttaagtcatcagctcattctgtagaccactggcattagctatgcaaaaatagcaaaatatgctattttgattcacaacatgccagttttataggagtggctgaatatcccggagatgtccaatgaactctttggtggaaagggatgtggc

SEQ ID NO: 290479 - DNA, 556 bp, Homo sapiens
caaattttgtctttagaaaaacactaaaggtgtttcactgtatcttccaagtcttctgagtcaaggacaaacagggttaagtgacatatccatatcactgagcacaggatttaattgtggtggtaatactgatagtaacaatgttaaaaccaactacatttttccccaaggggtttttcttttccttcttattcttcagtttttaaagtcattaaaaggtaaaactaaggtgcagaaaaccaaaactttaagtccagatggtctgtttcattttggaatgagttatccaatccttaggcttgatttttctcatgtgaaaaatctcttcttaggctaagatacgatgtcactacctcagtttgagtttttcacagaattaaattagaactggaaggaactaatttatttaagtcatcagctcattctgtagaccaytggcattagctatgcaaaaatagcaaaatatgctattttgattcacaacatgccagttttataggagtggctgaatatcccggagatgtccaatgaactctttggtggaaagggatgtggc

SEQ ID NO: 290480 - DNA, 556 bp, Homo sapiens
caaattttgtctttagaaaaacactaaaggtgtttcactgtatcttccaagtcttctgagtcaaggacaaacagggttaagtgacatatccatatcactgagcacaggatttaattgtggtggtaatactgatagtaacaatgttaaaaccaactacatttttccccaaggggtttttcttttccttcttattcttcagtttttaaagtcattaaaaggtaaaactaaggtgcagaaaaccaaaactttaagtccagatggtctgtttcattttggaatgagttatccaatccttaggcttgatttttctcatgtgaaaaatctcttcttaggctaagatacgatgtcactacctcagtttgagtttttcacagaattaaattagaactggaaggaactaatttatttaagtcatcagctcattctgtagaccactggyattagctatgcaaaaatagcaaaatatgctattttgattcacaacatgccagttttataggagtggctgaatatcccggagatgtccaatgaactctttggtggaaagggatgtggc

SEQ ID NO: 290481 - DNA, 608 bp, Homo sapiens
atctagtttgagtaaatgatgtgggtttatatctaggtgagagaatgacaatgtgtcactcctcttgtgtgttttacaaaggatgatcagaaacaggctgatctcacaagttaagtckgtggggctaaagggctgcctttgaaagtactttgcagcatggctatttctcccattaaattcaaaggttattccagaatagctccatactggtctgtacttatgctctatgtatcttctcaaaagagaactcagctaggagaatccccacttgcagacaacgtttctgctccctgagttggtggcgagccttccttagaactgggaggctgagccaagttagtcccagtggggagtcaatttgccagttacactgtctcagtctctaaccatttccaatctaggtagttgcaaatagaaaaagttgaacttttgcaaaatcagcaggagagagtcccacctaagggtgaggcaaattgaaattaagattgtgaaatagatgccttgagcatcaatcagaaatgtttttaaagagaaagtgtgaataaggaagacttgaggctagaggacgcttcatttgtgtcagactcctttggcaagagctgttacgt

SEQ ID NO: 290482 - DNA, 608 bp, Homo sapiens
atctagtttgagtaaatgatgtgggtttatatctaggtgagagaatgacaatgtgtcactcctcttgtgtgttttacaaaggatgatcagaaacaggctgatctcacaagttaagtctgtggggctaaagggctgcctttgaaagtactttgcagcatggctatttctcccattaaattcaaaggttattccagaatagctccatactggtctgtacttatgctctatgtatcttctcaaaagagaaytcagctaggagaatccccacttgcagacaacgtttctgctccctgagttggtggcgagccttccttagaactgggaggctgagccaagttagtcccagtggggagtcaatttgccagttacactgtctcagtctctaaccatttccaatctaggtagttgcaaatagaaaaagttgaacttttgcaaaatcagcaggagagagtcccacctaagggtgaggcaaattgaaattaagattgtgaaatagatgccttgagcatcaatcagaaatgtttttaaagagaaagtgtgaataaggaagacttgaggctagaggacgcttcatttgtgtcagactcctttggcaagagctgttacgt

SEQ ID NO: 290483 - DNA, 608 bp, Homo sapiens
atctagtttgagtaaatgatgtgggtttatatctaggtgagagaatgacaatgtgtcactcctcttgtgtgttttacaaaggatgatcagaaacaggctgatctcacaagttaagtctgtggggctaaagggctgcctttgaaagtactttgcagcatggctatttctcccattaaattcaaaggttattccagaatagctccatactggtctgtacttatgctctatgtatcttctcaaaagagaactcagctaggagaatccccacttgcagacaacgtttctgctccctgagttggtggcgagccttccttagaactgggaggctgagccaagttagtcccagtggggagtcaatttgccagttacactgtctcagtctctaaccatttccaatctaggtagttgcaaatagaaaaagttgaacttttgcaaaatcagcaggagagagtcccacctaagggtgaggcaaattgaaattaagattgtgaaatagatgccttgrgcatcaatcagaaatgtttttaaagagaaagtgtgaataaggaagacttgaggctagaggacgcttcatttgtgtcagactcctttggcaagagctgttacgt

SEQ ID NO: 290484 - DNA, 497 bp, Homo sapiens
acatttctgggctgagttttcctctggccaggttcagacactaccttgtgccagggagcactctcctgttcacttcgaggctgatagggctgtttctcttctctcaacgtcttgtccctgtgggccttaaaagggctgcatttgaatttaaggaatttacatggccactgtaaatggaatcagtgatctctaagaatctctctatgattcttcctacacttagtgaaaaatacgatgccttttgccaactggactcatgaaygtaaatgtcactgaattatattacactatttgcctacccacccacaattttaattttctctacattgcatcccaagcatcttaccattgtactttgtagagaatatctgatcaaaagatagaattaaataaataattaatgagccaataataagcatcttaaattgtttcagtctgcctagttataaaataggactttatttttcatggtttggttaaaaaaataaaaactacat

SEQ ID NO: 290485 - DNA, 640 bp, Homo sapiens
gcatcttaaattgtttcagtctgcctagttataaaataggactttatttttcatggtttggttaaaaaaataaaaactacattattatcatgtccttaaaatattccattctgaattgtgcaccagaggtaaatttccacttacttcaggtagatttttttttttctttttagaaaaagtaggcttacatacatggtgttaaatgtagttgtggtttgtattttcaggagctgatattaacttataaaacataaacatgaaagccattttaagtctcttcaaatcacttgcttacataatgaaaaatttccttgaatatattagtcctcccaaaataaacttagcttctattagtcagttacattgacataagttcatttaacaatatctggcttattacagaaatagtagaagatgtagcatctaaagtctggactattttataggatcaattaaattcatttaaaccaaacatcacatatttgcatttaactctaatcatgcaatgaagacagctccattctctgttgcttccattttcctttcttctctattgttgaacragtttgttttcaactccagttcagtttcttgggctcactcagttcttactattaaactgttaaaaagtgttagtttt

SEQ ID NO: 290486 - DNA, 615 bp, Homo sapiens
tacttagcaatatgcatttactattcactcatgtttctgcatgtcttcgtagctcattacctcttatcaatgatagtactctattgtgtagttgtacttcagtttgtttatctattcacatattaaaggacatcttggttgcttccaatttttggcaattatgaaagacagtgttataaactttygcatgcatgttgtggacatcagttttcacgtcagttgggtaaatacctaggagcgggattacagagttgtatttatggcaatgtttagctttgttaaaaactgccaaactctcttcctatgtggctgtactcttgcatttctaccagcaacaaaataaacttcttgttgctctgcattcctgccagcaattggtattttcaactggaaaaggatgacagggctggccaccataataggaatgcaatggtgtctcattgttgtgataatatgcaattatctaatggctaatgatgttgagcatcatttcatgtttattttccatctgcatatcttatctggtgagatgtttattaagatctttgcttatttttaaattgggttgtcttcttattgttggatttaaagagttctttgtatattttggataca

SEQ ID NO: 290487 - DNA, 564 bp, Homo sapiens
aaacatccacaaatacaagcatataacaaaaagttactagacatgggaataaggaagaaaaatgtgacacataatcaatttaaaaagcaggtagtattgtagtaaaagcaggttgaattgacttaaagaaaccaaccatctttaggatgttgaatttttccccttaaagaatagtatcacttttcatttgttcaaggtgtcgtgtgccaatcattcccttcaaacagatttctgtgtctcccaccccaacatggcttattttattttgttttgttttattttacgttttgctttagttaatgattgctttcttaaaaccttctaactgacagttggtttggtttcttgccttttcttaaaggggataggaaatgctattgagttttctatattaattttatggccttctgtttattgaatcacaatactgtctgaaattactttttagttattcctcttatattttccaggtatagtatatttctgaaratagtcatagtgtttatttatcctgctcaatatttgtaactctttttcttatcaaatacttttaactgaaaatgc

SEQ ID NO: 290488 - DNA, 598 bp, Homo sapiens
tttttaatcatgaagggttactggatgcttttcttgcatattgaaataattatatgtttttgttttaaattatttgtgtggtgaatcacaattattgatttgcttatgtcgaaccatccttgcatccctgggatgaaacccatttgatcatggtgaattatcttttgatgtgctgttggatttgatttgctgctattttgtggaggatgttttcatgtatatttatcaggaatactatatagatctgtggttttgtttgtgtgtatgtgtcctttgtgggctttggtatcagagtgatcctggctttgtagaatgaattagtgagctatcgagatgtaaaagtaagcagcgatattaagaaaaatattttttattaaagactttatctgcacatgtaaaaatattaatgtctttaaaaacattccaaagtttttatagacagaaaataaagcaagggaagtgtttgtatcactttgaagataagtctgatattcagcaaaggatatgttctactaatccaaaaatttaaattgactttgacctgaatagygccaaccagttacattaaatatagggatggagaaaacattacatgatt

SEQ ID NO: 290489 - DNA, 608 bp, Homo sapiens
aatggggacccctttctgggaacattaaggcaaaccttgagaccagttcctattattgtcttaggataagtgatgtagaaattaaactttcctgaagagtagaattagccttcattgttttccccaataactcagtatactcgtggaaaataacatggtttaggacgactttaatcaggaataaaattttacaatcctggagcctggggctaaagggtacagttggaaggatgagggcagcaccaacatcaggtagaatattctgaaatcaaggagaaggaagtgatattttaaggaccagattataatatcacttcctctgacttgagtgtccagtttttggtgattcttagaatggtctcaggcattgcrtagtggaagccaggaagtaaagtagagcatgaagacatgaaatgtaagctgaaagctcattagaaggaagttctgggaaacaggatcccattagaatggcccacccagcatcattatctaaaaatatttagcatagaaatgtattatctacggctggcacaagtcagaattgaggcattaaaaatggtaggaatggcggcagagagtattgtataagtgtgtcctacccaggccaa

SEQ ID NO: 290490 - DNA, 595 bp, Homo sapiens
cactttttcatgtattgtgtctcattttgtagtcaaaataccatggggccgggtgtggtggctcatgcctgtaatcccagcactttgggaggccgaggcaggcggatcacgaggtcaggagattgagaccatcctggctaacacggygaaacctcatctctactaaaaattcaaaaaattattatctgggcgtggtggcacgcgcctgtagtcccagctactcgggaggctgaggcaggagaatcgcttgaacccgggaggcggagattgcagttagccaagattgcaccactgcactccagcctgggcaacagagcaagactctgactcaaaaaaaaaaaaaaaaaagtaccatggttggaatgataaatgatattgtcatttttgttagcagtgaagtgagtggcatctatgtattttttaaggtatataatgaaattgtgcctaggggagttataatttactctatgtatttttatatatacttaaatcaatacattcttacagactagcttctttagtggtaacatacaggccgattttctcactccatgaatgattacggacatgtatccaggagcggaggtccctcagc

SEQ ID NO: 290491 - DNA, 387 bp, Homo sapiens
ttggggcacccatcatctgagcagtgtacactgtacccatgtgtagtcttttactcctcaccccctctgtcacacaggagtgcagtggtgtgatctcagcccactgcagcytcaacctctcagactcaagtgattctccacctgagccttccgagtagctgggactataagcatgcaccaccaagcctgcataagtttgttcattttttgtagagacgaagtcttactatgttgcccaggctggtcttgaactcctggattcaagcactcctcccgccttggcctcccaaaaagctgagattataggcatgagccactgcacccagcctgatgactgtttaacttcactttccatactttcttctctgtagctagcttggttcttgc

SEQ ID NO: 290492 - DNA, 1198 bp, Homo sapiens
ctgtttcagttgcttaacctgaagttacttaaacccaacttcagtttttgttttttttttctaaatctgtgagatttttttttctaaatctgtgagatggggtaacattagcactcatatcctattgtgaggattaccaaagttcatacttgttaaagcatgtcaaacagtgcctggcacatgttaaatgctgttaatgtaagctcttattattaaccattgttcaccttatatgagggactgcagtgaaacaaacacaaccatattcagcttcattctggacctttaactctgccaaaaccccttcctgtctagagcaatacttccctttccccttttcttgtttttctcagtgctgtgtcgggtctgtgacatcaaatattatcttgcgtgtatggccaccaagcctgtattcatatatatatatatatatatatatatatatatagagagagagagagagagagagagagagagagasacagagatgtatatatgtcacttaccccacatactctgaagctatctgcacatgcaagtagccacaaagttgtagtgagacttttcaattatttgccatatatagattttgctgtawgtgtttgtcacgtgccaactgtgggccaaatattgtattctcattagggatagaaatgaaatgaaaacagatgccttcctcatggcatttatattatagataagggagaaagatattatcaagtactcaaataaattcacagtgataattataacaaaagttattcaggagagcttcagcwtgatgtgaaaccctgtttagtgattttacctaattaggaagaactcagaaccagccaggatgggaaactcaggaagaatcagttatatatttatataaaatgcatatactgcatcttatacatgatatacaatataacataacatattattattacatagcatcattgtcttcttgaatacagaaaattaaatgcagagatagaggaagctaacatttgtatctggcaacgtagcctgatatggtttggctgtgtccccacccaaatctcaccttgaattgtaataatccccatgagtcaagggtggggccaggtggagataattgaatcatggggatgctttcccctgtactgttcttgtggtagtgaataagtataaatgggagtctccctacacaagttcttccctgcctgctgcc

SEQ ID NO: 290493 - DNA, 600 bp, Homo sapiens
gtgtttgtcacgtgccaactgtgggccaaatattgtattctcattagggatagaaatgaaatgaaaacagatgccttcctcatggcatttatattatagataagggagaaagatattatcaagtactcaaataaattcacagtgataattataacaaaagttattcaggagagcttcagcttgatgtgaaaccctgtttagtgattttacctaattaggaagaactcagaaccagccaggatgggaaactcaggaagaatcagttatatatttatataaaatgcatatactgcatcttatacatgatatacaatataacataacatattattattacatagcatcattgtcttcttgaatacagaaaattaaatgcagagatagaggaagctaacatttgtatctggcaacgtagcctgatatggtttggctgtgtccccacccaaatctcaccttgaattgtaataatccccatgagtcaagggtggggccaggtggagataaytgaatcatggggatgctttcccctgtactgttcttgtggtagtgaataagtataaatgggagtctccctacacaagttcttccctgcctgctgcc

SEQ ID NO: 290494 - DNA, 546 bp, Homo sapiens
gattcacaagtatgaggaagagcagaagataggaatgggtccccagtgggtcctgcaatgataagacctagcttgcctgggacattaggggaatgagatgacattattcaaagacattatggatgctagggtaaagagttttattacatacgcagtgggatatcactgaaggttttgagcaagggctcagaatttaaattttgaaaatttgcaacatgttgtgaccaactggagctaagggatgattgaaataagagaaatggttgacacacgtggaaaaaccagggtcacagcgttgaaaggtctggactggggaagctgcagtaaatgtgcraaagagacaggtgcagaaaataaattgggtctagaattaaaatgactcccatttacctgacaaacatacttcatttttaacataattctaaggatgctacaaggagctaaggacatttgtacaaaggacattatatttgtaaatatataatagtagtattttctcatggggctccaaagttgtatatttcatttatctttgaactagtaaga

SEQ ID NO: 290495 - DNA, 588 bp, Homo sapiens
ctgtttccatttctgtaaagcaaccaccataacgtgtcttttgctgtttgttgtaagaattaaatgaggcaatgaatgtaaagtgcttataataaatagtagctggttaatgaggaattactactatgatttggttttaaaaagtaaaattggtggcagaatttggagggcatatgatgagttcagagtgatacatayccagtaagtatttagaaatgtacgaccaaggagagcaaaagtcccaaatgggaactgctaagtctagagatggtagttgaatccagaaacacggatgatagagccttccaagggggcatatatagagatgacagctggggacagatccttgagaaatacctgaatttaagcagtaagaagaaaagccagaaaaagcacacaggaacttttaaacataagagacacatcttttaaattttcttatttaattaaattagtatcatttgctctatttatgaaaaaaatacaaatttgaatttcatgaacttcatatttggtttaatatcatcatgattataaatggcttccttaagacacttttgggatatgaactctgtacattttccgaag

SEQ ID NO: 290496 - DNA, 588 bp, Homo sapiens
ctgtttccatttctgtaaagcaaccaccataacgtgtcttttgctgtttgttgtaagaattaaatgaggcaatgaatgtaaagtgcttataataaatagtagctggttaatgaggaattactactatgatttggttttaaaaagtaaaattggtggcagaatttggagggcatatgatgagttcagagtgatacatatccagtaagtatttagaaatgtacgaccaaggagagcaaaagtcccaaatgggaactgctaagtctagagatggtagttgaatccagaaacacggatgatagagccttccaagggggcatatatagagatgacagctggggacagatccttgagaaatacctgaatttaagcagtaagaagaaaagccagaaaaagcacacaggaacttttaaacataagagacacatcttttaaattttcytatttaattaaattagtatcatttgctctatttatgaaaaaaatacaaatttgaatttcatgaacttcatatttggtttaatatcatcatgattataaatggcttccttaagacacttttgggatatgaactctgtacattttccgaag

SEQ ID NO: 290497 - DNA, 583 bp, Homo sapiens
ttcttctacaaatcattttgcattttttggtttggtaaagggattcaaaattcttccacatgctatgcaaaatgtattttcaactaatgtcagcaaattaagagaatagatttgtttactttatagaaagaaaacagagaagaccaatcaacacaagtagtttatgaaatatttaagaattgaatgaaagtcttcttctcatagttcattttatttctacaaaaccaacctgccctcctagaaataactgctacatgagactaattatatttacctttacagaatttgtgaatggcagacattaacgccatgcrttattttattttacagattgcaggagagtgagaagcaaaaaatagtgcccagaattggtggaattagaaccaaaagtaggtaatgacattataagatgaaggtgtgaacaaagaaatccttagtaaccaaatcaaagatttatcagtgttttcttaaccagatgtaacaattaaaatagtatatgctttttgggggtaaactgctggtcttttagtatgtccattgatctttctaagatttagtacaacatctaaaaataaaagaaatt

SEQ ID NO: 290498 - DNA, 583 bp, Homo sapiens
ttcttctacaaatcattttgcattttttggtttggtaaagggattcaaaattcttccacatgctatgcaaaatgtattttcaactaatgtcagcaaattaagagaatagatttgtttactttatagaaagaaaacagagaagaccaatcaacacaagtagtttatgaaatatttaagaattgaatgaaagtcttcttctcatagttcattttatttctacaaaaccaacctgccctcctagaaataactgctacatgagactaattatatttacctttacagaatttgtgaatggcagacattaacgccatgcattattttattttacagattgcaggagagtgagaagcaaaaaatagtgcccagaaktggtggaattagaaccaaaagtaggtaatgacattataagatgaaggtgtgaacaaagaaatccttagtaaccaaatcaaagatttatcagtgttttcttaaccagatgtaacaattaaaatagtatatgctttttgggggtaaactgctggtcttttagtatgtccattgatctttctaagatttagtacaacatctaaaaataaaagaaatt

SEQ ID NO: 290499 - DNA, 556 bp, Homo sapiens
gctaaactaaactataacactgcacaaacttcccaaggaaggtaagttgaaaagtctaaaaagtgattccaattattctaattaacatttgagatactaaaagagtcaacgactcaagaaacactttgaagtaattccatttttctttatcattttctaaaaaagtattcacataaatttaagatccagattgcttaagagtatgtcttcaaagtaggtttatcactaaagcattctgatccacagacgtagtcttaatgcttctagtatgtgattctaacctaaaatcacaatccttggtttgaaaacatcaaagctaagaaacaaaaaaataaatcagcgtgaaaatgtgcagcagctatagctacaaaagtggaaaataaattmtattttttccataaagactctatgaaaatataaagcccaaagtcagtgacagcagaagtctacatacaaatggtgtttaaaaatagaaagttttctaaagcttctcatgaaatgtcaatgaatagtcataatctgagttaagaccttataaatcaaggttaagttatac

SEQ ID NO: 290500 - DNA, 547 bp, Homo sapiens
tgatttctattacttatttcttctactaatttcgagtttgatttttttcttgctttcatagtatcttgatgtaaatcattgggttaattatttgaaatctttctatttcttcttgatgtaggtatttattgctctaaacattccaattaagactgcttttrttgtacatcataggttttgctatgctgtgcttctgttttcatttgtttcaatatatttttaatttccttcataatttcttcattgaccttttggtcattcaggtcatttggcatattgtttaatttacatgtatttgtacagtttctgcaattatttcattaaataggttttctatctctttactcaactcttttccttttagaattttcatagtgctaatatttatttgcttaaaggtgccccatagttcctgtaggctttcttcattcattcatgttttttttttcttttcttttttttttttttttttttggtctgactgggttatttcaaaagacttgacttgcctttaaattcagagagtcttctgctgggtctagactgt

SEQ ID NO: 290501 - DNA, 581 bp, Homo sapiens
tgcacatcgtaatttgtttcttaccttaaaataaatgtatataacattgaacacagatggatataaacatgggaccagtagatactctggaccactagaagtaggggagagaggtagtggggagggggktgaaaagctacctattgggtgctatgctccctacctgggtgcaatacacccatgtaacaaacctgcacatgtacccccataatcaaaaataaaagctgaaattttaaaaaaagaaatgaaactataaaaacaatcgatattattaaattatatttaaatttagaaatgtaaattaaatacattcttcaccatgaaaaaacaaaaataaatgtatttgtaaatttctggtaaagcttttgtcagcacaagaacatttttatgtattcttagttttctgatttttaaattattttattagccttgttttactcaataaacagtaccaaagtataattacaattaatgccattaataacagaaacgagactaatatgaatgcgataagagctgagtgagtgaaggtcaggaagagtggcagttgaggggtcaaggcaagactcactgatgatttc

SEQ ID NO: 290502 - DNA, 477 bp, Homo sapiens
tttttttctaccattgccagatcttagcctgttcatgaacttagaactctgaataaagcaaatgtctgctccctttgaaactactggcacaggtatgtgctatcaatctttcttctagcctctactaaagacttgtagtcatttactagagtggtagtgcattgkgaaaaggacatattgagactttgggggggacttttgaacatttctttaaactactttaattttttgtgatccaagaaacatcactgtgatgagaatgaggggttgagaagttatggcagccagctgatatgtgaacatttggtgagaactcattttacaattgtccagtgaatctaagaacatactccgtggttatacaaatgcataattggaatagacatggaaatattgagcagatggtagaattcctagattggctctttaaaccaaggaatgagaattgttatgatagaaatcattaagtagaagctt

SEQ ID NO: 290503 - DNA, 586 bp, Homo sapiens
acaagcactgggtagatacagccattcaaaatgggagaaattggccaaaacaaaggggccaacaggtcctatgcaagtctaagatccaacaaggcagtcaaatcttaaagctccaaaatgatctcagttgactccatgtctcatatctaggtcacactgatgcaagaggtgggctcccatgtccttgggcagctccactcctgtggctttgcagggtactgtcccrctcctggctgctttcatggactggcattgagtgtctgcaaattttccaggtgcacagtgcaagatattggtggatctaccattctagggtctggaaaatggtggtcctcttctcacagctccactaggcagtgcccctgtagggattctgtgggtcctccaactccacatttccctctgcactgccctagcagaggttctccatgagggccctgcccttgcagcaaacttctgcctggacatccaggcatttccacacatcctctgaaatctaggaggaagttctcaaacctcaattcttgacttctgtgcacctgcaggatcaacaccacatgaaagctgccaaggcttgtggcttgca

SEQ ID NO: 290504 - DNA, 586 bp, Homo sapiens
acaagcactgggtagatacagccattcaaaatgggagaaattggccaaaacaaaggggccaacaggtcctatgcaagtctaagatccaacaaggcagtcaaatcttaaagctccaaaatgatctcagttgactccatgtctcatatctaggtcacactgatgcaagaggtgggctcccatgtccttgggcagctccactcctgtggctttgcagggtactgtcccgctcctggctgctttcatggactggcattgagtgtctgcaaattttccaggtgcacagtgcaagatattggtggatctaccattctagggtctggaaaatggtggtcctcttctcacagctccactaggcagtgcccctgtagggattctgtgggtcctccaactccacatytccctctgcactgccctagcagaggttctccatgagggccctgcccttgcagcaaacttctgcctggacatccaggcatttccacacatcctctgaaatctaggaggaagttctcaaacctcaattcttgacttctgtgcacctgcaggatcaacaccacatgaaagctgccaaggcttgtggcttgca

SEQ ID NO: 290505 - DNA, 586 bp, Homo sapiens
tggtgctactaagaccaccctgtaatcattaatatttatagggatactaataataccaacttcacaagaaattgacaggattaagtaaatatatgtaaagtacttaggaaagttcctggaacataatgtcatttagtcttagctaaaatttgactggaggtgacataaatatactaatgatataactttattatatacaaagaaaatggcatttggctggaacttactaagtgataaccatactactgttattaacaaaaaggagagtcttattgagttgtgagattaatgatatacatgttcaattttatttaatatgtacaagtagtttttgattaatacaatttaattttaaaaaccaaaaattaattttaaaaatttaaaaatattttyaatttaataatttataattttatgttaataatttaataatttttatttaaaagtaaaaattgaagttttaaaaataaaatgtcactgttagtaaacattcatgaagatattagtctgtctcagagatagtacctacctaaaatataatttttcatgtttccatcattatttatggttgcttttctttgaaaat

SEQ ID NO: 290506 - DNA, 586 bp, Homo sapiens
tggtgctactaagaccaccctgtaatcattaatatttatagggatactaataataccaacttcacaagaaattgacaggattaagtaaatatatgtaaagtacttaggaaagttcctggaacataatgtcatttagtcttagctaaaatttgactggaggtgacataaatatactaatgatataactttattatatacaaagaaaatggcatttggctggaacttactaagtgataaccatactactgttattaacaaaaaggagagtcttattgagttgtgagattaatgatatacatgttcaattttatttaatatgtacaagtagtttttgattaatacaatttaattttaaaaaccaaaaattaattttaaaaatttaaaaatattttcaatttaataatttataattttatgttaataatttaataatttttatttaaaagtaaaaattgaagttttaaaaataamatgtcactgttagtaaacattcatgaagatattagtctgtctcagagatagtacctacctaaaatataatttttcatgtttccatcattatttatggttgcttttctttgaaaat

SEQ ID NO: 290507 - DNA, 619 bp, Homo sapiens
ggctccccaaaaggctgacttaatgacaattatcagatgccaaggaatacaccttactgtatcagcccagtgagggaagtggtctgggcaaggaatggactcattaagaaaaacagtctccagtgaattcttctcaaatcttttgtgattgaaaatcccatcagcactttatctgtaagttggttgctatgtgaggtaatgggggtcaaggcttctagaactactactgcttgcagaacatgaactgattaatttttattctagattcagctgtgttagaaatgtcatagtcctctcttaacmtctatttgtgggatcttctatttctcttcagttgttcatcatctaatgttcagagcccaggataatcacccagactcatttttgggtgtctctgtgtggatacttgaagcaaaatagggaatgttgctctaaattgttgaccatttgggaatattttctcaactccacactttacacatttggttcatattaggtagtttagagaacacagtatacatcccagcttgaatttcaattctgctgactctcactactaggatcagacacacctagacatacccagtaggcaagcaggttagtttcttcaagggatgct

SEQ ID NO: 290508 - DNA, 606 bp, Homo sapiens
gtcttcatccccatcactctgttgaaatcttaatttcttaggtcaacactgacttccatattaccaaataagtcaatcatcagtcttctgattacttggtcattctctttcttgaagcactttatttcattgctttccarggaatgcacctctcctggattttctctaaccacactggcttttctttctcagtttcaggtgttgagtcccttcatccttctgacctcaaaatgttgggttaccctagggttcagtctgggaccccttttcttttttctctttcttcttcttcttttttgtttttttttaaggtggagtctcgctgcgagacccaggctggagtgcagtggtgcgatctcagctcactgcaacctctgcctcccaggttcaaatgattctcctgccccagcctcccgagtagctgggactacaggtgcatgccaccacgcccagctgatttttttatatttttagtagagaaggggtttcaggatactggccaggctgttgttgaacttctgacttcaagtgatccatctgcgtcagcctcccaaaatgctgagattacaggcatgagttaccgtgcccagccttttttttcttttt

SEQ ID NO: 290509 - DNA, 610 bp, Homo sapiens
tggatcatatttaagtagccaagcagcattcttttctttcattaacaattaaaatgctaagatttcatgtgacaaagcaaacttcaaatcmtgttgaatattttgtgaaatatagtgtatcaagataatcatggagttctggtttgatgaatggcacttccatggttggaatggatagtgcagtcaccttgcagctagtttggatgccattaaaagctcacacaaactatgaaaggcagtatatacttgaagatagagaactgtaccttccaggagactccatgtagcctccaggcaccacccagcttctattagtctggccattaggctggccaccatagtgatgcacaacggatgaataacgtactcactgattattcagtgaaagagcagctagggtgccgggccatgcacagaaagagttgtggcagccccacgccttgactagctggccctgtgggcatttattcagcacagattaatgacaaaggctttgagtcaacaaacctgtggataattaacctgggcagccttcccagagagagccatcctgcctgcgaatgatcaaaggttagtcttaggaccacatgagtaaacaagctatttagat

SEQ ID NO: 290510 - DNA, 610 bp, Homo sapiens
tggatcatatttaagtagccaagcagcattcttttctttcattaacaattaaaatgctaagatttcatgtgacaaagcaaacttcaaatcctgttgaatattttgtgaaatatagtgtatcaagataatcatggagttctggtttgatgaatggcacttccatggttggaatggatagtgcagtcaccttgcagctagtttggatgccattaaaagctcacacaaactatgaaaggcagtatatrcttgaagatagagaactgtaccttccaggagactccatgtagcctccaggcaccacccagcttctattagtctggccattaggctggccaccatagtgatgcacaacggatgaataacgtactcactgattattcagtgaaagagcagctagggtgccgggccatgcacagaaagagttgtggcagccccacgccttgactagctggccctgtgggcatttattcagcacagattaatgacaaaggctttgagtcaacaaacctgtggataattaacctgggcagccttcccagagagagccatcctgcctgcgaatgatcaaaggttagtcttaggaccacatgagtaaacaagctatttagat

SEQ ID NO: 290511 - DNA, 538 bp, Homo sapiens
attttaaatggattatgttatttacataagcgttggaaatgtttgctcaagagcaaatggctttccttgctctttacagtgaatcagaagtaactcacctaacccttcacttaaatagctcatgggtaactccagacgagacaattggaaagggtacaggaagaccgggatggtggtgtagtcacctctcaccctagttctttgcctttagccttcctaattgtgagtggtggctgtgattaccactgactgtgttagcayggcagacagagcatgccagcgacaaaggcttgtgcctcattactctgaaagcagattaggaggattaatgtgctttggcttcactatgagagtttttcgtttttaacacatgttctgaatacaaagaacccactttttggttgccttagatctcctgagagttggatcctctgttttagaaggtctgccataaacgaaaaagcacctatatgagttgaagtgaccaatactcatcccaaatgacttctttgcaactacaggtgtattaagcagtggg

SEQ ID NO: 290512 - DNA, 446 bp, Homo sapiens
gcccaggggcaggataactgagaaggccacatctatgagggttaaagatattgtgcctgtctaaggttgaggcttaatcagaacagggaacccctcaccaccacccaccacccacaagmaaacgagcttcagtaatgacagtgtacaaagagatcctctctggggtgcaattagaaaggaacatctaaagctgagggcaagcaaatattaatatggcaagtcagtcctcattctccacataatgtttcactatgggaatacaaaggttgcattgattttaactatagaaaccacagcctcaaacctctacactaatggcctagcagatagaaagatgtaccattcccaggctaaattatatatatgaaaagccacagccatgaaacaaaacagtcatcagatccaaactcagatatagcacagatgttggaactatgtgagaggaa

SEQ ID NO: 290513 - DNA, 670 bp, Homo sapiens
aacagatccaaaaatttatagaacaccaataagaaaaataccaaaagagatgaaaacaaatgaaagaaaacagaacaaaatagaaccatatacatagacgtatcatgttcaaactgatgaaattaaaattcaaactgaaaatgctgacatcaagcagatataaaagtcacattacacacagaggaacaaagattaaaattacagtagaattcttatatgaaactgtgaaagcctgaagactatagaatgctatcttttttttataaatgttcaattctttattagtgtacatgtcattacagttggtttagatggtaaatataggaataaataaaataactacagttcattcaaaggaaattaaaatgagattaaagagtcctgataaaaaaaatacaactttcagctgaaaaactataaaagttacatacatacatacctaatggcactaggaacatacaatctgaattattggaaaaataagtgartgactcagtcataagaacttatttaatattagtattttttcttttatagacaaacataacatacacatggtttctaccttctacaagacaaagtagaaaactaaccgttactgcttttacctcaaacacagaactgactgtgccacagataacgtggtccaaaatattcaattctatagata

SEQ ID NO: 290514 - DNA, 434 bp, Homo sapiens
ttatgcaaaatctactccatctgtgctctataagtggaatgacaaaacctggatgacagcacatctgtttacagcatggtttactctagcagtcctcaacctttttggcaccagggactggttttgtggaagacaattttttcatggatggtggaggtagtggggtgttggsgaggaggacggtttcagggtgaaactgttccacctcagatcatcaggcattacttagattctcgtaaggagcacacaacctagatcccttgcagagatccctctgacagagatgtacaaagagacttgtgttgtttttatgcctgctaacccagcatccattctgaagcccatggatcaaggagtaatttggactttcaagtattattatttaagaaatacattttgtaaggccagaactgccataggcagtgattcctctg

SEQ ID NO: 290515 - DNA, 434 bp, Homo sapiens
ttatgcaaaatctactccatctgtgctctataagtggaatgacaaaacctggatgacagcacatctgtttacagcatggtttactctagcagtcctcaacctttttggcaccagggactggttttgtggaagacaattttttcatggatggtggaggtagtggggtgttggcgaggaggacggtttcagggtgaaactgttccacctcagatcatcaggcattacttagattctcrtaaggagcacacaacctagatcccttgcagagatccctctgacagagatgtacaaagagacttgtgttgtttttatgcctgctaacccagcatccattctgaagcccatggatcaaggagtaatttggactttcaagtattattatttaagaaatacattttgtaaggccagaactgccataggcagtgattcctctg

SEQ ID NO: 290516 - DNA, 597 bp, Homo sapiens
aagaaatggacagatggaaagaaaataactattttctgaaaacatatgccacagattggccttcacataaatatagaacctaaattcacactagtggtataactggaaaaatcataatcttattatttattcttaagtggtcatagattgctggtgcccaaaagcacctggcaaaacaacactcaaataatctttgaagaaaacaatccttcagttcaggactgaaaaaatcatctccaaataagtaacaacagaaaamaaggcaccatgagcaagaaatagcaagtacaacagcagatattagaattggaccccagaatatttcagatattgaaattatcaggtacagaatatgacaaacatgttttctatgtttaatgatataataagggatactttaaacactgaaataatgaggcaaaatttaaaatgaatcaaacagaacttccagaagtgaaaaatgttaccatttaaagttcaataaaagattaaacagaatgggaaagcaaaagttcagtaaaaggttaaacagaatgggaaagcaaaatttcagacaattaatgacatggaagatagagctaaagaaattacctaaaa

SEQ ID NO: 290517 - DNA, 529 bp, Homo sapiens
ttagggggaaatttggagggagctagaccagtgagagagaaaaatacttttagaaccagctaatttgtggctacaggtgaatttaccagagattctatattcaacacagtagacagtgcaacagggagtagttctaatcatatggttggttggttgtctgaaacctggacaaaatggtgatgaagaaaaaacatggtttaagagaaatttttagcattaaaatgcatgtattagaaaasagaaaaacacctaaaatcaataacatggtttcacattaggaaactagagaaagaaaagcaatttaagcctaaagtaagcagaagaaaaagaattaataaaaattagagcaggaatgaatgaaattgaaattaagaaagcaacagggaaaaacaatggaactaaaaccatcagtaactgataaacttctagccaggctaaccaagaaataaagagagccaacacaaattaccagtctgatccaattgatattaaaaggataataatggaatgctagataaaactctgtgac

SEQ ID NO: 290518 - DNA, 616 bp, Homo sapiens
cacatggtgtcactgggacattctgccaaacatttaaggaagaaatgctacaaccttggatggagctggaggccgttactctaagtgaagtaactcaggtatggaaaaccaaatgttgtatgttctcacttataagtgggagctaagctatgaggatgcaaaggcataagaattatataatggactttggggacttgaagggaagggtgggattagggtgagggataaaaaactatttattgagtacagtgtacaccgcttgggtgataggtgcaccaaaatctcagaaatctccactaaagaagttattcgtgtaaccaaaaaccaactgttgcccaaaaactattgaaataaaatagaaaaataaagtttatatggaaaagcaaaagatctagaatagccaacacaatactgaagaacagcattggaagactcacactatccatttcaaagactacaataaaacagcataaggctacattaatcaagaccaataaaatgacagtaatcaagacaccatgacatacacattaayagaacagagtagagagtccagaaaatgacatacaaataaagtcaactgatctttaataaaccggcaaaggcaattcaaggg

SEQ ID NO: 290519 - DNA, 541 bp, Homo sapiens
tatgaatatatatatacacgtactatgcaaaacaaaatttattcagcctatagctgatgatttgtgtgtaaatgaattaaaaaacgtcttctaattctgagattcccagaaacctctagtccacatgtttggaatcattaatttacatcactaatcttacatagaaaatgcattctgggttctaagtgaccaacccagaactaggaaacttaagatgactaataaactaataagctaataataagcaatggctaaacattagactaaggcagagcttctcaacgtttttaaattatcatctccccaaggaccccttatagatatttatttttcttaattgtcctccatgaaattttaatactacacatatactatatatctattttatactgttcatactgtgacctttggaggagaacraaccattgtaatacctaagttttctcacacacacactccaccaagtaccaatttttcaccaacttgaaggctatattgcttctattgagaatatatgggccaaggaactttatattcatta

SEQ ID NO: 290520 - DNA, 519 bp, Homo sapiens
ggctttttacagcaatttcagagttttttctatattatgtataaaatagaatatgtaaatttattctmtgtttctatataagtaaaaatttctaagtgtgccttcaatttatttcacatggatctattcacctggttaataaagattatgagaaatatctgtgacaaataatttggaacaaagttaaaagtatatttgttcatacagatgactaataccctttctcttatgcatcattctatataaccacaaccttttgtgtaggtgaattaaacaattagtgagtacaaaaacaattattttatcaagcatctgctgcatgttatgcacatccacagctatagtgacaaagaaataaggccatataatgccctcatttccaaagagcttcatatgagctggtaaataaagagtaaaactaaaattttacctaaaaactaaaaggaattttggtacaagtagccattaaatgcatagttgtgtaagtgaatgccacaggaattctaatgagaaaaggtc

SEQ ID NO: 290521 - DNA, 576 bp, Homo sapiens
accaccatcaaagaccaaagttagataagtccaccaagatgaggaaaaaccagcaccaaaaggctgaaaattccaaaaatcagaacgcctcttctcctccaaaggatcacaacccctcaccagcaagggaacaaaackggatggagaatgagtttgatgaattgacagaagtaggcttgagaaggtgtgtagtaacaaactcctccaagctaaaggagcatgttctatctcaatgcaagcaagttaagaaacttgaaaaaaggttacaggaagtgctaactggaataaccagtttaggaaagagcataaacgacctgatggagctgaaaaacacagcaagagaccttcgtgaattatacacaagtatcaatagccaaatcgatcaagtggaagaaaggatatcagagattgaagatcaccttaatgaaataaagcgtgaagacaagattagagaaaaaatgatgaaaaggaatgaaaaagccttcaagaaatatgagactatgtgaaaagatcaaaccaacgtttgattggtgtacctgaaagtgacagagagaatgaaaccaagctgaaaaacac

SEQ ID NO: 290522 - DNA, 573 bp, Homo sapiens
tgtatttttatattttaaggtattgtctaaatacttgactgtccacttgtcttcattgctgtaatagcaattttaaaggcacaggccctgagcttttaatcattataaattttactttgattttaacagcttcttgaactaccttttcatgtagttaaatgaaaaggacaaatgcaccaaatataagattgatttctgcttccctttaatctgaaaatgtatttggaggtggcagaggatacaaaatccaagttatctgcaattcttacaatgtataaaattgatccattgtataggtaaattaggctgttattcttaccatcagcatcatcgttatgtcaccatgttggttagagtttggtattgaaaataagtttaaagaatacagcatggattgttctaatcattacaaactgcctaagrcacatagttttttgttgttgttgtttaagcttctgatgacactaaagaaaatttatatttatttttatcataattttaggaaaaattcttttatgtggtatttctcagaaaaaaatgaatattcttggttttattttacaacattattca

SEQ ID NO: 290523 - DNA, 580 bp, Homo sapiens
actcttggtgttgtacattctatgggtttgggcgaagttataatgacatgcatccattgttatagcatcatacagagtattttcgctgtcctaaaaattcttctgtattctatgttttcatctctctcttcttcctagttcctggcaaccattgctccttatactgtttccatagttttgccatttccaaacagtatgtagctttttcagattggctgctttcgcttagtaatatgcgtttaatttccttcttgtattttcatgatttcrtagttcatttttagcactgagtaatattccattgtccggatgtaccaaagtttatttatccattcatctactatgggacatctttgttgcttccaagctttgacaattatgaataaaacaactataaacatctttgtgcaggtttttatgtgaacgtaagttttcaattcattttagtaaataccaaggagtgtgattatttgatcctatgttaaaagtacgttaagttttgtaagaaactgtcaaactgcacagactgtttctttgtgtgtggttttattgttttgttttgtttttaattactctcaag

SEQ ID NO: 290524 - DNA, 590 bp, Homo sapiens
actcatgcaagtattattatgcttatttaacgcataaagaaatgaagataaagtgtggtaattgccattaagtattaactcttcaaaacaaacaaacaaaaacctgggaataaatgatgaagaaatataaaatataaatgaataaatgaagaaattctgatcacttggaaggaagggaatttcagaagctstctgctgaactccactggcacaacatttcctgctgacataattcaaggctcattaggacttaaaagtaaatgaagcagaaaatctattcaagacactgaaatcatatatagaccagaaaaattgtactttgcctactagtacagcatcttaggccaatatccctaggaaatgaactgtgaggcagagatttgcaagccagtcagttatgtagagtactcttaaaaacaatgcatgtaagaggataaatggaaaagatttggagagaaggagacattgatttgtgactcagtagcaccagaggcctcagccaatttcaccagggactctggagctgagatgttgcctcaaaattgctgagaatttaaataagaagtgtaggccactgtattagtttgttt

SEQ ID NO: 290525 - DNA, 467 bp, Homo sapiens
ttttagtaaacacattttgtattkgcgatttgtgaaagtttagtgaaagaactgttctataaaataagtctgaagagaaaggtttatttagaaggattgagtacacaagagaaaaatctttgatgtaaaaagttatctgtattttatttggacgtttacaaaggagtgaaaaccagccaacaacagcctacctaataaaatacaaaatacaaaagttcataatacaacatttatcaaactctgaaaagatgggaactaactcaacttaaacatctaagagacacctacagccaacatcttggttaatggtgaaacattcaaaatattcccattaaagccaggaggaagccaaggacactgccgtcaaattactgattcctggtttagcggttccagtgagtcatgcactctccttgcttccgttaaccgcccccccccccccaccccaacaccttttgtctgattcg

SEQ ID NO: 290526 - DNA, 625 bp, Homo sapiens
cagtatgcatacctgaaggtgtctcttcctccattctcccatttcatcattggggtctcatttaggacccaccaatggtattgctattcttccagtcacataactttcatccccttccttggccctttatgagatacaaaaagtcatccccaaaatgatctgctgtttttagagtggcctttcagcagtaatcagggtttgattcacaagcaacatgacatcattccaggagagttcaaatacctgggttaaattcaggaaagcctctatatacacctctcaggatcgtctgcaaacttgccaagatcccccttaattttccttaagaactgtagagaaaaggggacttggaccttaatggggccctattcaccaggcatctgttgtaggggcaggagtgacactgggacctgcctaaaatatgktttttaggatgaggtaaacttggaagaccacctggatagagaggtgtagaggcagttgattccttaactggagggacctctggggtttgtttccctagttcccgagattgccccttgcagcctttcctgaggtggatgctaggaggctgaatcaatcctacaatattggcaaaggtctggactatcctgcaagacaaaga

SEQ ID NO: 290527 - DNA, 508 bp, Homo sapiens
tgagatacaaaaagtcatccccaaaatgatctgctgtttttagagtggcctttcagcagtaatcagggtttgattcacaagcaacatgacatcattccaggagagttcaaatacctgggttaaattcaggaaagcctctatatacacctctcaggatcgtctgcaaacttgccaagatcccccttaattttccttaagaactgtagagaaaaggggacttggaccttaatggggccctattcaccaggcatctgttgtaggggcaggagtgacactgggacctgcctaaaatatgttttttaggatgaggtaaacttggaagacmacctggatagagaggtgtagaggcagttgattccttaactggagggacctctggggtttgtttccctagttcccgagattgccccttgcagcctttcctgaggtggatgctaggaggctgaatcaatcctacaatattggcaaaggtctggactatcctgcaagacaaagaaggcttgcacaa

SEQ ID NO: 290528 - DNA, 625 bp, Homo sapiens
cagtatgcatacctgaaggtgtctcttcctccattctcccatttcatcattggggtctcatttaggacccaccaatggtattgctattcttccagtcacataactttcatccccttccttggccctttatgagatacaaaaagtcatccccaaaatgatctgctgtttttagagtggcctttcagcagtaatcagggtttgattcacaagcaacatgacatcattccaggagagttcaaatacctgggttaaattcaggaaagcctctatatacacctctcaggatcgtctgcaaacttgccaagatcccccttaattttccttaagaactgtagagaaaaggggacttggaccttaatggggccctattcaccaggcatctgttgtaggggcaggagtgacactgggacctgcctaaaatatgttttttaggatgaggtaaacttggaagaccacctggatagagaggtgtagaggcagttgattccttaactggagggacctctggggtttgttyccctagttcccgagattgccccttgcagcctttcctgaggtggatgctaggaggctgaatcaatcctacaatattggcaaaggtctggactatcctgcaagacaaaga

SEQ ID NO: 290529 - DNA, 481 bp, Homo sapiens
catgcatttttaataaagcatggatgaatataccaatcatttgagagttaytgacatatctatatctgtacgatagtgtcttatactatttctgctcttttcttactagggtttatacattcagtattaataatagatgaacatttttaattcatttctactgttgaatcctatttgtacttctgcaggaacattattaaaactgattttataaaacttatttctcatgacacgtgtataggcattactgttctttaaaaaaattctgtgtgactacaattctcaaattattataagtaaattattcatttgttaactgccagacataactgttttttcttgcactgttttccttgaaggtggccttagaaatgatatacttatcattatccaaggaatatgtattatctactaatctcttagaaggagacattactcaccttgcatactggttttcactgaaatgctaataaatttagcc

SEQ ID NO: 290530 - DNA, 599 bp, Homo sapiens
gaccctgggaaagatgattcccctctggctacagtttatctacatgctccctctgtagccattagctgacttctgttttgtattgtttccactgtgacagggaagcactgagttccaacccaaagtaacccagtggcttcactttctccctcccccaagcacagattctcattccatgccatgtgactactgatggaggatggcagaagggtggtgtcagagattcaagactctttyctacctgttttagtgtttctttccttgttacaatgttaaaaccaaacactgtgattgctcacctgatttttcgtgatttttgtttcttattaagctgctttcttgtgtagctacttgttcaatttggttttccagcaaggggaacaattggctgtcttgctcctcctccctcctctttagactgttctttattgatgttcatggtctttcagcatagtcttataatttgccatttccaacctttcatgtattataactacactgccttcaccttacctgaacacatacacacctttctttgtgtttataattttgctggaaattacaattatctcatttctatctgattaaataatactatt

SEQ ID NO: 290531 - DNA, 532 bp, Homo sapiens
gtggttttaaagcttaaaaaacactagttaattaaaaaaaattggcagaagatgttaagtaacttagccacagacttcaaaattgcattctacaacaatgtkgtgatcagcatggtaaatatacataattcactagtttgatttacttctgtcatcatgtaaaactttaggtttctgttatattcatactgtacagaaatcaaactataaagacaagctttcctaatacaacttatagatatgatacagaatttaatacaagcaccatttagaaatacttctcatgaattagtaaaatgaagcagaaacattactacgttttgagctctcttaacagtgtctagtacataacaaggcccagtttatatttactgtcacattaaaactaaaagtttataaaaatatcaaaatgttttaatcacaatagaaatatataatgatttttaaaacatcaacaataaaaatacattaaaaagaaaagtataaactcagtgttagatagcagagtacggtgactatacttaacaaaaat

SEQ ID NO: 290532 - DNA, 636 bp, Homo sapiens
tatgccttataaggcatataatacctttttatgtatataccttatatattacttaatattttataattatattgttatttaatacatttatatataccttatgtattaggttaatatatgtaagtttatatatgctcatatgtaggtatgtataaatatagctgtgtgtgtgtgtgcatatataggtatatatatagtgtgtgtgtatgtttctatgcatatagatatatatatgtaatgcttttaattgacaaaaattccatacatttatcatgtacatttttcatgaaacatgtatacattgtgtcatgtccaaattgagctaacgaacatatgcattacttcacataatttacatccctaaattcaaatctctttgatactatatttttttctacttctattttctaaattattaaatccatcaaaagaactaagagctagattcaagtgaatttctggaattgtctgaggacatcaattaccrtcgtgaactattaaggatgcagaatcctagtaatattttcttcagtgctagactcatctaactgatggtaaattttatttttcctttccatcatttttcatcatctttaaaatcacttctgaaataatctaattcttatcaggcaaata

SEQ ID NO: 290533 - DNA, 586 bp, Homo sapiens
gaattaaatacaaacaagtctgagggcaatgacacaaatcatacagcaaaatacatgttctgaaagaatttgcacactagagaactactacacatccataaaaaccatgcgctctatctaactccacagggtagccaacgttaagagccagatgactggcccaggtgcaggggagtgcagaggccggagacatcccttctagtgaggataagttaagaagttctcccagaggggtagaaccagcactgaacactgaagaatgtggttgagtgacagggtaggagtgggggaagaggacattgtgagctgggaagatgctgggaaaggaaaagggatatttggggcaccttaaataggctgcttaggctagagcagaggtttgtgatgggaccttgagaaaacaaaggtttctggggctgctctgtcaaggctcaggatctgtacttaatcttgttcttgttgttgttgttgttgttrgtgatttgttttatttgtttcccctcccccccttttaaataaactttattttgtaaagcagttttaaggtcacagcaaaattgaggtagaaagtatagagagttcccat

SEQ ID NO: 290534 - DNA, 556 bp, Homo sapiens
aaatagtggttactccagggggaaggatgtcagtagtcactggaagggggcctcttgaggtgctggtaagatttcacgtctgaatcagggcacacgggcatgtttacactgtgagaattaatcacacacacccagagactataaagtatgatatggtttggatctgtcgccccacccaaatgtcaaattgtaatcccgtgttggaggtggggcctggtgggaggtgagtggatcgtgggggtggtctcacgaatggtttagccccatccccscttggtactgtatagtgagttcttgtgaaatctggttgtttaaaaatgggtggaacctcccccctctctctcttcctcctgctctggccatgtgaagacgcctgttcccgctttgccttccaccatgagtaaaagctccctgaggcctccccagaagcagatgctgccatacttcctgaacagcctgcagaaccatgagccaattaaacctcttttcttgtaaatcacccagtctcaggtatttctttatagcagtgcgagaatggactaataatacaaggtac

SEQ ID NO: 290535 - DNA, 556 bp, Homo sapiens
aaatagtggttactccagggggaaggatgtcagtagtcactggaagggggcctcttgaggtgctggtaagatttcacgtctgaatcagggcacacgggcatgtttacactgtgagaattaatcacacacacccagagactataaagtatgatatggtttggatctgtcgccccacccaaatgtcaaattgtaatcccgtgttggaggtggggcctggtgggaggtgagtggatcgtgggggtggtctcacgaatggtttagccccatccccccttggtactgtatagtgagttctygtgaaatctggttgtttaaaaatgggtggaacctcccccctctctctcttcctcctgctctggccatgtgaagacgcctgttcccgctttgccttccaccatgagtaaaagctccctgaggcctccccagaagcagatgctgccatacttcctgaacagcctgcagaaccatgagccaattaaacctcttttcttgtaaatcacccagtctcaggtatttctttatagcagtgcgagaatggactaataatacaaggtac

SEQ ID NO: 290536 - DNA, 568 bp, Homo sapiens
acttttgccaagtctttacttgtatccccaggctaatgtggcctggagtgggttaagttatttcacattggggctcagaggagataacgctctttctcaaggtcattgatttggtaagtctttctccaaagtcccagacccagtccaccatacggtattatagaagagctacagggttcccatctctgctctgctgtcaacacattgtaagatgttggacaagtgaatgtatccccttgagctctactttttcatcttttgaagggaggtgttggactagaggagctacaatattctgtgattcttgggctgatttcactggttctgggtactgttgataatctgatccagccttacctatcctgacgaatccccctcatgtccttggccctttcactgtagccaatccaattttttcactgtccctagaacacagcacactcktttccattcctgactctttggcaaattcctccttagggacactaaacacatcagaatgcacatgctggtcagaccatggtctctccattgttgggagggacatgcccactaccttccctgatgc

SEQ ID NO: 290537 - DNA, 513 bp, Homo sapiens
ggagaatattttggttatctttcaagggagagctgtggctgacagagccactcagaaggcattttgtctattctcccaaccagacaaattggaagctctcctgttcattccctggtcctgcagtatggaatagcttcgtggttttttgtgttaattaaaaggtatctctatattgcacatacttctattttttgtgatgacaaaaacattccccatggctctgcagggaatgggggttggggggggggcacgctcattgcagtggaaaggttccacggtggagatcaggagacctatccctatctcagcctgggactctgggagaatggtccagagctcattgtccttgttgataaaatgatagatttggactcaatatcccrtgctgcctcttccaacttgatttttaccccagactgggctaccagactggtatgcccacacatgcccgtttcctttcttttcttctctgcatctctgcctttgtgtccagagcgtgttttccctttgcaa

SEQ ID NO: 290538 - DNA, 513 bp, Homo sapiens
ggagaatattttggttatctttcaagggagagctgtggctgacagagccactcagaaggcattttgtctattctcccaaccagacaaattggaagctctcctgttcattccctggtcctgcagtatggaatagcttcgtggttttttgtgttaattaaaaggtatctctatattgcacatacttctattttttgtgatgacaaaaacattccccatggctctgcagggaatgggggttggggggggggcacgctcattgcagtggaaaggttccacggtggagatcaggagacctatccctatctcagcctgggactctgggagaatggtccagagctcattgtccttgttgataaaatgatagatttggactcaatatcccatgctgcctcttccaacttgatttttaccccagactgggctaccagactggtatgcccacacatgcccrtttcctttcttttcttctctgcatctctgcctttgtgtccagagcgtgttttccctttgcaa

SEQ ID NO: 290539 - DNA, 550 bp, Homo sapiens
gggtccgggctctggcaagttgaagccaggtaggtgaggctgcgggcgggaggacagggggtcccctggcttccgcgcctcccgctgccacctcggcttgagagccctcatcgctgctgcgttcccgccgccagccagcttgggtccgggttgcactgggccctgccagggctgtggtcggcgcatctgggctgcagcggcgatggggacccgggacccaggcctggagaaggagacggacgagtgaggctgagggacggagggacagaggtgcggagatggaggctcagagagggccggctagtaaacagcactgagggagagtgcgggcggcgaggcgcgtgggaacgcgtggcccgcccagagtgtgaaatctcccgctcagggacgtcccygctccaccgccgccgcctgcggagccgccgcccggattcttcccagacccgcctccaggacactcttgccctgaccaggcctgcggagcgtgaactctgcccaccaggctccaggggcagtggctcagggccccgcactcccggctgggagggtg

SEQ ID NO: 290540 - DNA, 546 bp, Homo sapiens
gggtagttccgactgcccgccgcgccaggcgggagtgggccgagagtctggatggggagagaggagcgctggattctgcccgcacccctgcgatcctgcccaggctttctgcagaggggcggggtgagagcagcaggagccgggagggcgggctaccctggcatgcactccttcccggccaacggaattgggactgagggtttggaagcttgcctgtgtctagacctcaccacgatcctaccttctctggccctaaccccatctttttccttcagcccctagtgaatccgacctccttccgcttttctcaggcaccccaacccacttcggcctcrgggcctctctccacagccctccctgcctgcttgctcctcggcctccccacttcagctcatctttttaagcctgttctcttcttgacaatcagcagtggcctctcaccttttctaagccgggacagatgaccttgaggaaggggcaagaggggaacttgaaccttgtaactggacctcaagattacggaaaaggggggcagatttgaaagca

SEQ ID NO: 290541 - DNA, 427 bp, Homo sapiens
gagctcttttctccatatcaacacctatcaccaccagtttgggaaggaatggcagatcttccatcccttttctttttccaagcagccagtgccagagccttcctcctccaaagccaacagtagcgaccataatcatcaccgtggacatctaacactgtttaagcacctactatgtgcaatgcaccatgctaaatgctggtagataaaaagaggtacagggccgagcccatgcccagagaggttrgtaagttcaccagtttgatcctgagacacttgtctatgtgtttggggagggagaacatggagaggaacatgcagtggctgtacaggcagcaaggtgcctgatgacccaagggtttaggagaggaagggttaaaaaaaactcgatgactcaggtgggacagagagctgggcttattgactctgc

SEQ ID NO: 290542 - DNA, 611 bp, Homo sapiens
gacagagagctgggcttattgactctgccctgagataggacagccagcacctcctttcccactagggaggggaaaaagttcctttaccacttctagtgccagactagaaaaccagagaagccgagaggtccagcccaacactgtagattgctacctccccattaggactggaggagccccagaaactttcttgtcttaggatgaacttcctggcttgtttgaaagaccctacagtggtcacttcttattgagactcaaagctgggagaggccctggagattgtccatgtcaggggaagcacaaattcaaatgcctacagagggcaggcaggtcacagtgtgttgatcaggcaattagagtggcccagcttatggacaattgggagttcaaagccaaactggccaagtgaaatgatcctaacaaaatcaattaacagcctttaagtagcctgaccccttatatctatarataaagatattaagattctaagaagtgagctcatctgccttggatatacatgttatcttgtctccctgtaccttggggattgactggaatatctcatggcctggttctacctctgacctgttgggcccttggctcaccctcat

SEQ ID NO: 290543 - DNA, 567 bp, Homo sapiens
gtaaactcctgtgttcactcacctactatgtgccaggcactgttctaggagccatggatacaacagtaaacaacacatgcctctgatctcccaggatggggtaaatcagcatgactaagggtacacaattatcagcattgcctcaacatctgtggtgatttactgtggtgttttttcccctgtgggtttgtctgggggacctgacagctaatgtggagttgtccaaagkacttggagtccagggttttgggggagggtgagagggctaggatcccatcaccttagctgtttcctagttccaagttccctctctgtgcctcagattcctcactcatcaaagctaaacacctactttgtacctgtggtgtaaatagatgcaaagccaggctcctggagatctgggcatctggagctctggggatgcacaagtgcttggagggagtgttacttatacttaaagatctaaaccccagtgggttctggggaccatcttttgcctcattcagtcaccttgatcactagcttgtcttcatttcgtgtgtgtgtgtgtgtgtgtgtgtgtgtgtg

SEQ ID NO: 290544 - DNA, 1064 bp, Homo sapiens
tgcacgttctaagtggggacccaccactgtttgcaaagaaaaaaagagttcccgtgccctttcctggcagtgctgatagcaaagtgactctgtgaagcccagcagcccacgggtcaggggctccagggcaaaagcagaaggatcacagagacttttcaatggctccaggacgatgatgacagcgtgggaggagggataagccacatggccagggaaaggaaagggcagatctcactctgcattctgtgcccttcacctagcaggggttatgcagcaagagtacaagtgaaagcctggagcacctgtgggtgtggggcatttcggagacaccatccctccacatgctyttagacacatctctacccaaccaggagagggaagcagtaggagaaacttctccttccagggtctcctgactcctgagaaaaatacctgcagccccagctccctgatgccccacctcctcaccccctattggccctgctccctagatctcccaccccatccagttggcawacaagctccattggaatgaatgacacaggacaagtacgcctgatcatagcagtagcttgtgattagcctgctgaaattgcaggagttgtgtctgcatttcttggacagagcagatgcaagaggaacaaactggatgacaccaatggctggtcaagttagcagtgacaggtatctcagtcccawagtgtcaggataatgatttggtcttttcatctctttctaactgtaatgttcttgtttgttcatcatatatatttttaaaaatttattttctgtctttctttggcagatattacaggttactaatttacctgctatctgtagtgaacacatcaaacatgcctatgcatcatatgtacatgtttacttattagctatatttaacatatcctatgtgcaggaccagctacataatttgcatgatgtaatgtaaaatgcaaatggggggccccttgttaaaaaatacttaagaatttctattattaagaattttaagatgatgaaagaaaccagaatatgccagctctaaatatgcctcattgacgtaa

SEQ ID NO: 290545 - DNA, 456 bp, Homo sapiens
ggcacgaaacgtatcacatagctctttattgtctcaagtactagcatagtgctttgtatgcaatatttaattaatattttctgtgtgggtgaaaatgttaatgtcttttttgttggacattcatttccaaagcagaacaattaayatgactggatgtttaaagggtctggatgaataggtgagtgaaggacagaaatgtgctggtaaaaagccctgatctatagtgcttgccaatttccgtggtgtaaatacttccactatagccaattttaagctaccaacagttagagccaactcacaaaattcttgaaaatttcataatcagtggttttgtgtgagccagcataagtcagcttcggtatctctttgagggatttaataatgaactcaactaaggtaaaactgatctggaacaactgaaagcagaggttaaagtaaaataactctgttatttaa

SEQ ID NO: 290546 - DNA, 526 bp, Homo sapiens
ttaactttaccaatgcctttcaaataatattttgaaattttccctgaaaggatattgagaaaagccaaatgtaaaaattattgttttttttccttgggatttgcatgttttgaaaacgttctcaattgttagggaagtcagctgtaaaacacaggctaaatatacttttgtctaccaagaattccctttacttgtctgtttcgtgatttgtttaatctttcttagttatgcatgtaccattttaccatagttacctggagatattcttgtctctgccttagtttggcaggcttttcaagtggctcactgagctactgtttctatttcttttagaaagttgtggargcatttattactctcataactgcctcaaaatctcaagcacatggcctagttaaatcatcttgaggttctgcccatatggttgcagaaggatattagtcattggaaaaaatgggtctaaaatgataatattcaaagatgttttccaatattcttggcaatcttattcactaatttccacgga

SEQ ID NO: 290547 - DNA, 526 bp, Homo sapiens
ttaactttaccaatgcctttcaaataatattttgaaattttccctgaaaggatattgagaaaagccaaatgtaaaaattattgttttttttccttgggatttgcatgttttgaaaacgttctcaattgttagggaagtcagctgtaaaacacaggctaaatatacttttgtctaccaagaattccctttacttgtctgtttcgtgatttgtttaatctttcttagttatgcatgtaccattttaccatagttacctggagatattcttgtctctgccttagtttggcaggcttttcaagtggctcactgagctactgtttctatttcttttagaaagttgtggaggcatttattactctcataactgcctcaaaatctcaagcacatggcctagttaaatcatcttgargttctgcccatatggttgcagaaggatattagtcattggaaaaaatgggtctaaaatgataatattcaaagatgttttccaatattcttggcaatcttattcactaatttccacgga

SEQ ID NO: 290548 - DNA, 613 bp, Homo sapiens
tatcactatacaacattttgaaaaatgttttgaaaaaacagttataatgcttagaaayatttagaagaatataagcacacaggtattgtgttgaaacacattacctacactttcaatgcaggatgcttcttctcactatggggcagcactttgtgaatttttctgtttcacagtattcagaattcattagaacatgtttgattagaatgcacatgaggcaagcaaaattagcacagtctgtctatcaagccacgtagatggccttgcaaagagctgaatgctagtatatctaagaatatgagattatatgtatgattcatggtggaaatgtctcctttgttagataaattcctgcaaaccaatgcctggaatgccctctctgcctactcgaattctattagctctttaacatccatttgaattcttatctcatctacaatatcttcagcaactctgaagcctccattgtcctctcccttttcacttcaaggctgtcttgcattgttatgtaactatttcatgggcctagatctcatttttcttaataaagtttaagctgtagaaaggaattcatatatttccttgatttcttttaaacacttaacacattaag

SEQ ID NO: 290549 - DNA, 488 bp, Homo sapiens
ccccaacttgttgcacattggaattgttcatggacttacaaaaatattgatgccatatcccagccytagagattgtgacttaatttagctgtccccaacctttctgataccagggaccagtgtcatggatgacaatttttccatatactggggctgggtgaggagatggtttcaggatgattcaagtgcattacatttattctgcacattgtaatatataatgaaataattatacaactcaccataatgtggaatcagtgggagccctgagcttgttttcctgcaactatacgatcccatctgggggtgatgggacacagtgacagatcatcaggaattagattctcataaggagttcacaacctagatctctcgcatgtgcagttcacaatagggtttgcacccctatgaaaatctaatgtgactgctgatctgacagcaggaggagctcaggtggtaatatgagttagcaatgggtagtggctgta

SEQ ID NO: 290550 - DNA, 632 bp, Homo sapiens
ccaacagttccatattctgcccccaacttgttgcacattggaattgttcatggacttacaaaaatattgatgccatatcccagccctagagattgtgacttaatttagctgtccccaacctttctgayaccagggaccagtgtcatggatgacaatttttccatatactggggctgggtgaggagatggtttcaggatgattcaagtgcattacatttattctgcacattgtaatatataatgaaataattatacaactcaccataatgtggaatcagtgggagccctgagcttgttttcctgcaactatacgatcccatctgggggtgatgggacacagtgacagatcatcaggaattagattctcataaggagttcacaacctagatctctcgcatgtgcagttcacaatagggtttgcacccctatgaaaatctaatgtgactgctgatctgacagcaggaggagctcaggtggtaatatgagttagcaatgggtagtggctgtaaatacagatgaagcttcactcactcgcccaccacttgcctgctgtgtggcctggttcctgacaatcatctggtcttctcactggtattcatttgttcaattagcatttgttgaaattcacatct

SEQ ID NO: 290551 - DNA, 612 bp, Homo sapiens
gctcggcatgccaaagcagcacattcaggatatcattttctgagcccaacagttccatattctgcccccaacttgttgcacattggaattgttcatggacttacaaaaatattgatgccatatcccagccctagagattgtgacttaatttagctgtccccaacctttctgataccagggaccagtgtcatggatgacaatttttccatatactggggckgggtgaggagatggtttcaggatgattcaagtgcattacatttattctgcacattgtaatatataatgaaataattatacaactcaccataatgtggaatcagtgggagccctgagcttgttttcctgcaactatacgatcccatctgggggtgatgggacacagtgacagatcatcaggaattagattctcataaggagttcacaacctagatctctcgcatgtgcagttcacaatagggtttgcacccctatgaaaatctaatgtgactgctgatctgacagcaggaggagctcaggtggtaatatgagttagcaatgggtagtggctgtaaatacagatgaagcttcactcactcgcccaccacttgcctgctgtgtggcctggttcct

SEQ ID NO: 290552 - DNA, 632 bp, Homo sapiens
ccaacagttccatattctgcccccaacttgttgcacattggaattgttcatggacttacaaaaatattgatgccatatcccagccctagagattgtgacttaatttagctgtccccaacctttctgataccagggaccagtgtcatggatgacaatttttccatatactggggctgggtgaggagatggtttcaggatgattcaagtgcattacatttattctgcacattgtaatatataatgaaataattatacaactcaccataatgtggaatcagtgggagccctgagcttgttttcctgcaactatacgatcccatctgggggtgatgggacacagtgacagatcatcaggaattagattctcataaggagttcacaacctagatctctcgcatgtgcagttcacaatagggtttgcacccctatgaaaatctaatgygactgctgatctgacagcaggaggagctcaggtggtaatatgagttagcaatgggtagtggctgtaaatacagatgaagcttcactcactcgcccaccacttgcctgctgtgtggcctggttcctgacaatcatctggtcttctcactggtattcatttgttcaattagcatttgttgaaattcacatct

SEQ ID NO: 290553 - DNA, 622 bp, Homo sapiens
cacccatcaatttcctgctcaaaaatactctggatccttactaataacagaatgaattctgcactgcagacgtgacattagggcatgccagmtcctcctctaaagcatttaaactgtcctcttcattgtctatctgaagaccccaggtatgttttcatctcttcatttttgcttatatcattcccctgcaccagaatgtccctcctactcctttgaccatgtaactgaatcctccctttgttcagggttccttgataccactccatctctcatctcaatcttttagcatttatgtttacttttactattcttgtttgttggtaattagatggtgccctaaatatttatctatatctttactttttaatgaaattgtaaattccttacagaaaagcataggaccacattcctttatctctctttctgcatatggtacaatgccttaaaataaacaaaatttatttttattactgataacaaaactgaatgacaataatataatgagtttggaaaatggagaaaccaagcatttgcataattgcctagtctttgatcattgatgcacactacttttacataattataatgagagtatacaaattgttctgtattctgaaatttt

SEQ ID NO: 290554 - DNA, 622 bp, Homo sapiens
cacccatcaatttcctgctcaaaaatactctggatccttactaataacagaatgaattctgcactgcagacgtgacattagggcatgccagatcctcctctaaagcatttaaactgtcctcttcattgtctatctgaagaccccaggtatgttttcatctcttcatttttgcttatatcattcccctgcaccagaatgtccctcctactcctttgaccatgtaactgaatcctccctttgttcagggttccttgataccactccatctctcatctcaatcttttagcatttatgtttacttttactattcttgtttgttrgtaattagatggtgccctaaatatttatctatatctttactttttaatgaaattgtaaattccttacagaaaagcataggaccacattcctttatctctctttctgcatatggtacaatgccttaaaataaacaaaatttatttttattactgataacaaaactgaatgacaataatataatgagtttggaaaatggagaaaccaagcatttgcataattgcctagtctttgatcattgatgcacactacttttacataattataatgagagtatacaaattgttctgtattctgaaatttt

SEQ ID NO: 290555 - DNA, 576 bp, Homo sapiens
ccaatattaccaacactagcagaaccagcttcatcacctctcccacagaaaccagcaccacagagcatcagcccctctgcagaggcttgagttttagctcctagggtctttcctctacgctacagtgttttcgtttcaaccctttccattgttcctccagcccttgggatggtagctgcttccagtagttaccgtcactatgatactttagtgttctctttttaccttttctgcagtctaattaacatttatacctcctaacaattcacttattaaattctctctgttcaattaactgttgaagtttctcccctcactagatattgaccaataacaaaaattgtaatccaattcagtattactcagaaaaataatttatgactagayacagtagaaataaggcaaaagctgctttttaaagttctagttgaggaaaaggacatatccacagttttatagttcaccttacaaaatgactttcaatctcctttatttgccaccaatttatagtttttaatcatgctatgattactgaaacaaaaattcatattaaccctttaaaataacacttcctat

SEQ ID NO: 290556 - DNA, 576 bp, Homo sapiens
ccaatattaccaacactagcagaaccagcttcatcacctctcccacagaaaccagcaccacagagcatcagcccctctgcagaggcttgagttttagctcctagggtctttcctctacgctacagtgttttcgtttcaaccctttccattgttcctccagcccttgggatggtagctgcttccagtagttaccgtcactatgatactttagtgttctctttttaccttttctgcagtctaattaacatttatacctcctaacaattcacttattaaattctctctgttcaattaactgttgaagtttctcccctcactagatattgaccaataacaaaaattgtaatccaattcagtattactcagaaaaataatttatgactagatacagtagaaataaggcaaaagctgctttttaaagttctagttgaggaaaaggacatatccacarttttatagttcaccttacaaaatgactttcaatctcctttatttgccaccaatttatagtttttaatcatgctatgattactgaaacaaaaattcatattaaccctttaaaataacacttcctat

SEQ ID NO: 290557 - DNA, 550 bp, Homo sapiens
caggttggctgttctcttgcattctttccaaggggtctaggttttctctttaattagaggtgttttacacgtacatttttcctacctgcctgctatctgcaaatttccaaaaagcaaaaagaagaaaagtattttcttggatttttcctaaacagcatttaatgcattattctacacaaagtcagcgtttactaaaatgttttcctggtggaactaaaagatattgagttgtattaaaaagaaaatgacaacccaaatcctctgtaacaagggctagcacactttctttctrtaaagggccaaatagttaatattttaagctttgagtgagatgtacaactctgtcccatatttgttgctttttattaatgaccctttgaagctgtaaaaaccattcttacctcttgggctggatttagccataattttccaacccctgctctgtaagataaagtgatgtttgctcactatttaggagtttctacttaacctagataacaatgcatacaattagtggggaaattttaaaatctttaaattaactgtaata

SEQ ID NO: 290558 - DNA, 563 bp, Homo sapiens
taattaccacttgttaaaacttttttattgatatttcaggtataagatctaaatattacatayattactaaatgtcaggtagcagagagtaaaaaacagaataacttcactttttttttttttttgagacacaattttgttctatcacccaagctggagtacaatagcacagtctcggctcactgcaacctccagctccagagttcaaacgattctcttgtctcagcctcctgagtagttgagaatacaggtgtgcgccatcatacccagctaattttttgtatttttagtagagatggggtttcaccatgttggccaggctggtcgtgaactcctggcctcaagtgattcacctgccttggcctcccaaagtgctgggattacaggtgtgaggtatcgcacccggcccataataacttttctaactgggcttggaaaactgtatatatattctgtcatccaaatcaagaacgagtttctgtttgtttaatattgtggcaaatgtatgttatttgaaccccatcatggcattctgaatatttaccctgcttttattagccaca

SEQ ID NO: 290559 - DNA, 563 bp, Homo sapiens
taattaccacttgttaaaacttttttattgatatttcaggtataagatctaaatattacatatattactaaatgtcaggtagcagasagtaaaaaacagaataacttcactttttttttttttttgagacacaattttgttctatcacccaagctggagtacaatagcacagtctcggctcactgcaacctccagctccagagttcaaacgattctcttgtctcagcctcctgagtagttgagaatacaggtgtgcgccatcatacccagctaattttttgtatttttagtagagatggggtttcaccatgttggccaggctggtcgtgaactcctggcctcaagtgattcacctgccttggcctcccaaagtgctgggattacaggtgtgaggtatcgcacccggcccataataacttttctaactgggcttggaaaactgtatatatattctgtcatccaaatcaagaacgagtttctgtttgtttaatattgtggcaaatgtatgttatttgaaccccatcatggcattctgaatatttaccctgcttttattagccaca

SEQ ID NO: 290560 - DNA, 563 bp, Homo sapiens
taattaccacttgttaaaacttttttattgatatttcaggtataagatctaaatattacatatattactaaatgtcaggtagcagagagtaaaaaacagaataacttcactttttttttttttttgagacacaattttgttctatcacccaagctggagtacaatagcacagtctcggctcactgcaacctccagctccagagttcaaacgattctcttgtctcagcctcctgagtagttgagaatacaggtgtgcgccatcatacccagctaattttttgtatttttagtagagatggggtttcaccatgttggccaggctggtcgtgaactcctggcctcaagtgattcacctgccttggcctcccaaagtgctgggattacaggtgtgaggtatcgcacccggcccataataacttttctaactgggcttggaaaactrtatatatattctgtcatccaaatcaagaacgagtttctgtttgtttaatattgtggcaaatgtatgttatttgaaccccatcatggcattctgaatatttaccctgcttttattagccaca

SEQ ID NO: 290561 - DNA, 567 bp, Homo sapiens
ctgtgttcagacttctcaggaggctgcctaagggaatgaccagtctcagggcatggacaggacccagcatactgttgatgcctggggacyactggaaacaaaaaaaagaactcaggacatgctgcttcctcagaagacacatgttatgacagaaggacactggagggaacaagagattatgaattcttaaaaagaaaaagtcaactgaaaaatccctcttattgagaatttacacacacaagtccagagacgatgcatacacaggaaatgtttgagaggcccaagaatctctggcctgcctcattggtgaaactcttctcctgtacaaggctaatccttctcctgaaggctgggaaaggaatctgttttttctaatatatggataccaaaacaaacaaacaaaatcaagaaaaataaagaaacaggaaaacataccccaagcaacagaagataaagctccagaaaccagccctaatataatggagatatatgaattacttaacagactattaaaaataactcataaagatgctcaacaaattcagaagaaaaatgcatgaacaaagt

SEQ ID NO: 290562 - DNA, 580 bp, Homo sapiens
aaaaaagggacaaaagagctttaagacagaaaacaatgaacaaaatggcaaaagttagtcttgctctatcaataataactttaaatttaagtggattgaacttctcaatcaaaagacataaagtggctgaatgaattaaaaaagaaaccaaagaaaagaaacaactgtatgctaactataaaagattcactttagatttaaggacacacatagggtgaaagtgaaggaacggaaaatgatakgccatgcaaatggtagctaaaaaagaacaggggtggctatacttacatcggacaaaatatgcttttagtataaaactgtcataagcaacaaataagggcattaaatagtaataaaagggtcaatttaccaggaagatatcacaattataagtatatatgcatccaacatcagagcacctaaatataaacattaaccaaactcaagagagaaaatatacagcaatataattatagtaggaaacttcaataccctacattacattccataatggatagaacatctagacagaaaatcaataaggaaacagcagtcatgaacaacattatagatcaaacag

SEQ ID NO: 290563 - DNA, 580 bp, Homo sapiens
aaaaaagggacaaaagagctttaagacagaaaacaatgaacaaaatggcaaaagttagtcttgctctatcaataataactttaaatttaagtggattgaacttctcaatcaaaagacataaagtggctgaatgaattaaaaaagaaaccaaagaaaagaaacaactgtatgctaactataaaagattcactttagatttaaggacacacatagggtgaaagtgaaggaacggaaaatgataggccatgcaaatggtagctaaaaaagaacaggggtggctatacttacatcggacaaaatatgcttttagtataaaactgtcataagcaacaaataagggcattaaatagtaataaaagggtcaatttaccaggaagatatcacaattataagtatatatgcatccaacatcagagcacctaaatataaacattaaccaaactcaagagagaaaatatacagcaatataattatagtaggaaacttcaataccctacattmcattccataatggatagaacatctagacagaaaatcaataaggaaacagcagtcatgaacaacattatagatcaaacag

SEQ ID NO: 290564 - DNA, 560 bp, Homo sapiens
aagtggtgagtcttgcattttctttgcatttagattgtttgagggagggaacatttcttatttaaccatgctgtcataatatatattcagagtgtatgctttcacattgcaattaccaccataaagggcaaccactgtaaataagtgtggtaaaatgaaatacattatcttgtgtgaggttttctggttaaaaccttttctagtaataggataccaaaataacaaccagatgaaaatacaaatgtgcattataacctcttagcagctgtgcttatatccttgggttatttaggacaaaaaggaatctttctgtcctccgtagcatttttgcaatattctaactyaagaagaagaatggttttcagggttcatggataagcaaacaaaatgaaacaaacaaaaaacactaaagaattgtgaaagaactgaaagaagaggattgttcctaaggcataaagaagcataaaaggctggctgaactctgtacacatctttacccttcctttgtagcactgcttttgttcacattagagatgctaattattgctcattagcataca

SEQ ID NO: 290565 - DNA, 564 bp, Homo sapiens
atgttagttatctagtatagagaagtctaccatagagatccctttgttctgagyactggactttttcacttaccaaaactctcctactctatacgttcttcaccgtgataatccaagaagtctgaatcctccccatggctctcccctgtttccatccccagtcggtgggtttcccacaggtctccagtgtgctttggaagtaggaactcctaacagattcacagtttgaacatggtagtcctctgagctgttcagtattttaaatctctctgcagttagttataatcattcaactcttttagtcattcttctaatgtcagtatagataactaaaagattgtaatattagaagacctatttcccagagaccacaaagacaatctcatggaagtcccactgtagtaaatagagtctattttctacccagcatctggtagagtaattcagacatgtgttttgacagtttgcctgaaagtaacttgacaaataattttactaaagaatcctagaaagtcaatggcaacattttgttcattctaagttgttcaagccacgtccttagat

SEQ ID NO: 290566 - DNA, 487 bp, Homo sapiens
ttgatcacaacacaagtctgggatttgcttatatgtgattctatccacaagaaacgccaggtaaatgcagaaaactgcacccagctaaaccaagcagcgtaggaatacacaaaatccacataccatatccatcagctaccacacttccccacacaggtagaaaagccccacctgctcacaactgggacaacaacgactctcctcccaacacttctcaaaaactcacaagctgcacccttttgaaggccaacttcyacagggaacgttaggtctttttcaaagtaaactgccatatttattgtaaatttcttaaccattaacatgtgtaaaatattgctgtcattgttactaaattcccatattttttgtaatgtgccactagtgatatttctaggtattgtgtgcctatccccatttttttagtaaaatgtgtttttattgcccaattttgcatagtgtcgggatttttaggaacccatacatcatg

SEQ ID NO: 290567 - DNA, 597 bp, Homo sapiens
atactattttgagggctgacctttgcaatgagctggcatgatttcaggatggaaaaaaactagtatcacccaattctatcctccttgataacgtatttcttaaccagaaaacatatttcattgtacaattagaaagaagatacaaaaacaaatctcatatgaagataaacattgatcaatacagaacagtgaagtgtccatgacagatagcagaatctaagaaaataaagaacagtctttagaacactaagatgcaagaaaacatctttacatrtatgattttctacagctaatccattctcctactcatttgtatttatctgaataaattaaagagatttttctacatggttaaaatgaaataggcttttgtggataaactttgaatatctgttggcctcaaaccatccaaatgtctgactgaaacaaatgtgtaccacccccttgaattgcattcaacaaaagccacctgccaagactgtaatctggtcttcaggtctcagagctgaagcaaaccgtgctacaatatgcacagctctctgagctgtaaccccagactcattgataaataattgagcgaggtctatttaatgacaa

SEQ ID NO: 290568 - DNA, 604 bp, Homo sapiens
cttttcataacaaacactgccatytaaaagaatttaaccaatagtccagagaatctggcttctcatgaaatattactgtgggagtgagttacagaggtaagaagctactcgaaggtacaaagattaaaaataagaactagaggcctcctagataatataacttcatagttaggctggtagaattattgaaaatcatcccaaatactggaagtgattattcaaaacacatttttttcctaaggcaaatgctgatggcagtagctggaatggttaagatgcccagttgcttcatctgtaaaatggagataatagtagctactctgtaggattgtcacatccattatagaaaataatgtatgtaatgtgtttagcttagtccatggcaaatagcaagagcagtataagcagtaactattacagtagttcccccttatctgcagttttgccttccacagtttgttacaagtagtcaactgcagtccaaaaatatttaatggaaaattccagaaataaacaattcataagttttaaattgtgtgctgtcctgagtagcatgatgaaatctcatgccatcctgtgctgtccagcctgggaagtgaatctt

SEQ ID NO: 290569 - DNA, 604 bp, Homo sapiens
cttttcataacaaacactgccatctaaaagaatttaaccaatagtccagagaatctggcttctcmtgaaatattactgtgggagtgagttacagaggtaagaagctactcgaaggtacaaagattaaaaataagaactagaggcctcctagataatataacttcatagttaggctggtagaattattgaaaatcatcccaaatactggaagtgattattcaaaacacatttttttcctaaggcaaatgctgatggcagtagctggaatggttaagatgcccagttgcttcatctgtaaaatggagataatagtagctactctgtaggattgtcacatccattatagaaaataatgtatgtaatgtgtttagcttagtccatggcaaatagcaagagcagtataagcagtaactattacagtagttcccccttatctgcagttttgccttccacagtttgttacaagtagtcaactgcagtccaaaaatatttaatggaaaattccagaaataaacaattcataagttttaaattgtgtgctgtcctgagtagcatgatgaaatctcatgccatcctgtgctgtccagcctgggaagtgaatctt

SEQ ID NO: 290570 - DNA, 604 bp, Homo sapiens
cttttcataacaaacactgccatctaaaagaatttaaccaatagtccagagaatctggcttctcatgaaatattactgtgggagtgagttacagaggtaagaagctactygaaggtacaaagattaaaaataagaactagaggcctcctagataatataacttcatagttaggctggtagaattattgaaaatcatcccaaatactggaagtgattattcaaaacacatttttttcctaaggcaaatgctgatggcagtagctggaatggttaagatgcccagttgcttcatctgtaaaatggagataatagtagctactctgtaggattgtcacatccattatagaaaataatgtatgtaatgtgtttagcttagtccatggcaaatagcaagagcagtataagcagtaactattacagtagttcccccttatctgcagttttgccttccacagtttgttacaagtagtcaactgcagtccaaaaatatttaatggaaaattccagaaataaacaattcataagttttaaattgtgtgctgtcctgagtagcatgatgaaatctcatgccatcctgtgctgtccagcctgggaagtgaatctt

SEQ ID NO: 290571 - DNA, 590 bp, Homo sapiens
tctcttactttttttttagttttctttgaaacctcttttaatgaatagaaattkttttattttaatgtagtttaattcatctatttttcttttttaattgtcttcagtttctttagtcttgttttcataatcttctggatatgagtcttgcaaaacatcttttgttaattttctcatggtttttgttataatagtatttagagttattttatatatttatggttaatataaatcaaattgcatgttgttcttgctctaaattacagattcaataatttgcaacaaaaccttatctctttgtaagtccttaagttaattaagtactctggatatcttcacatataaatacttgtatcagctgtcttctctcttactactccaattaaaatccagtatctagaatagggaaaaaccaggtgaacatcacccttacagagatttattttaagacataatttagggtgtgctccatactgccttggctatgtactagtctatatattctagaagggtcatatatgtgcacaaattgatttgtgtagccaaaagctgctccagtataaatgtgccaccaggatccatttcaaaac

SEQ ID NO: 290572 - DNA, 629 bp, Homo sapiens
caacccctttgacctgagtactccgtcccttaaatggcaaactaaacattcgtgaaaatttaatggtgaggaaatgagtaccttcttaagtttcagatggtgaaatggcaccaggggagcactttcagtggcaggcagaagtgtgtggatgtgctagatcaaacctgaaatatttgttccttcatcctgcagtccctctccaaactagccagccactgagaccttctgacaggacacccccaggatgtcacccaaaaaaggtatttacaaaatcaagactgtctgtaggacactatgtctttctgagaggtataaaggtatttgaaaactttggaaagtttgttttacaatttktgttccctcttttggggctttccctttttcatttttttctgtgggtagtttccctttgtttcctgagaaattgagaagggtttaatatctctccaccttcttctcttttatggatgaatgatttcaccaactggtaagtgctaaaactgacctcgctttcactcagaaagacaatggaggaaaggaaaatgcactgagatttcagcatagcaactcaaatgcgggctttattccacagcagtgacctattgtcagattggtgtgtgagacagttt

SEQ ID NO: 290573 - DNA, 588 bp, Homo sapiens
cactccttgggtttgaaatgttcgtcagtaatgactgatggacatcaacaggtgaatagacacacaaaaaacctatgaaacttacataccataggttactattcaacaataaaaagaaaaactgttgatacatctaacaatgtagatgaatctcaaaagcattatgctattcctttggctgataaaatggtgacactcctttatttctctttctttcatcccacttttaaaatcagccttagtatactttaggcacaatatactatatacatttaaaatgacaatttgacaagttttgacaaatgtatatacattataaaaatcatgataaagatttccgccgcctcaaaatgtttcctcatgccttcttggaataaatccacacattccttccttctctacaccccaccacccatatactctacctctagacccaagcaattgstagtctgctttttgtcagcgtaaattagtttgcattttctagaatttcatattaatggaaatgtacagtaagtactcttttgtgcctgacttcttacatttagtatagtgcttttaagatttatccaaattgttgggtgtatc

SEQ ID NO: 290574 - DNA, 568 bp, Homo sapiens
ttgtatttgaaaacgttttttaatctttctcattgtcttaaacatttggagtatacttataataattgttttactgttgttatctgttacttctatcatctatgaaattactatatctgtttctattgattgatttgattactattctggttgggaggcaatattttccctacttctttgcttacttggtaatttttttatcaakgaaaatttataaaagtgaacttcatttacaattggatataatgaattttacatttttgtgtcctggatttttctgtattcctttaaatattgttggatttcttttttttcccccctccgggatgcagataagtttcttggaattagctggatgcttttgagatttgcttttaagatttgttagggtgaattcagagcagggctactttgatctaggaaatagccctctgaagggtctcatgttctgtgagataggaggtctttctcctctgactggttggtagcctaagctattcctgattcttgtaaggtctggacactgttctgcatactcttttctgatagttctttccctggccttagt

SEQ ID NO: 290575 - DNA, 1199 bp, Homo sapiens
atcaattgaattgtagaagcaatatatactgtgtattttttcacctgggtgagagggtgagactccgtctaaaaaaaaaaaaaaaactatggttgttcaccataactaaacatttmatctctttcagtctatcttactcatctacaaaatggagataatacctgttttgcagtgcaggccctgacatacgggtagagttccataaatcctagcttctattccttaactcttttaactcttttcttccttccttctttctagctaatttttaactctctatcctagacaacttttgctaaacgtgtataacatgtagtacctacgcataggaatatgttttatagaacagaattattgaaaacagcttcttacatttctgttattttttcaaaagcaagaattcatgtattccttctgagccaagtacatgcaataaaaagtaagagagattcagaaattctgatgattattctcccaagaagagtgcttgctagagtgagggtcttgcagacacagaaggagctgatggggtgaactgctggggtgttacaaaaggccttcgggaaaatacgtaatctaagtcaataaatcatagagtgwatcaattgaattgtagaagcaatatatactgtgtattttttcacctgggtgagagggtgagactccgtctaaaaaaaaaaaaaaaactatggttgttcaccataactaaacatttaatctctttcagtctawcttactcatctacaaaatggagataatacctgttttgcagtgcaggccctgacatacgggtagagttccataaatcctagcttctattccttaactcttttaactcttttcttccttccttctttctagctaatttttaactctctatcctagacaacttttgctaaacgtgtataacatgtagtacctacgcataggaatatgttttatagaacagaattattgaaaacagcttcttacatttctgttattttttcaaaagcaagaattcatgtattccttctgagccaagtacatgcaataaaaagtaagagagattcagaaattctgatgattattctcccaagaagagtgcttgctagagtgagggtcttgcagacacagaaggagctgatggggtgaactgctggggtgttacaaaaggccttcgggaaaatacgtaatctaagtcaataaatcatagagtg

SEQ ID NO: 290576 - DNA, 599 bp, Homo sapiens
atcaattgaattgtagaagcaatatatactgtgtattttttcacctgggtgagagggtgagactccgtctaaaaaaaaaaaaaaaactatggttgttcaccataactaaacatttaatctctttcagtctatcttactcatctacaaaatggarataatacctgttttgcagtgcaggccctgacatacgggtagagttccataaatcctagcttctattccttaactcttttaactcttttcttccttccttctttctagctaatttttaactctctatcctagacaacttttgctaaacgtgtataacatgtagtacctacgcataggaatatgttttatagaacagaattattgaaaacagcttcttacatttctgttattttttcaaaagcaagaattcatgtattccttctgagccaagtacatgcaataaaaagtaagagagattcagaaattctgatgattattctcccaagaagagtgcttgctagagtgagggtcttgcagacacagaaggagctgatggggtgaactgctggggtgttacaaaaggccttcgggaaaatacgtaatctaagtcaataaatcatagagtg

SEQ ID NO: 290577 - DNA, 612 bp, Homo sapiens
gatgagcatgacttttaaaaaaccacttcagctttggggaatgaataggcaataggcaagaatgttcagtcaactcacccctgcccccagaagtgaaaagtaaagtgattggttaattctcattgggagagagagaaaaaaaaagcaccctcttaaagcagagagtggaagaagaaaaatgaagagkttaagtcttaggttcagatttcatagatttacaaaagcaaaagtttctttgacggtcatttaagattcagcaccaagttgctagctttcccaatcttccaaattatcattgtcagttgcccaagaaaaaacaacaaacaccttcagtccctggctgcatcagcccatgtgttctgtcccattcagctaacattcagctaaacatctctattgaccaatgattttctggagccttctggctttgaaacattatcagtggggaagcattatcaatggaaaaggaaggttcatgggtagcaaattccagcctctacttacttagatgaggccggcctcacaggacagtaacacctctatttctggacctttgtctattctttttttgttttgttttgagatggagttttgcccttgtcacccaggttg

SEQ ID NO: 290578 - DNA, 618 bp, Homo sapiens
cctttgtctgaaaaagactgtatctttccttcatttatgaagcttaggatacaaaactgttggctgataattgttttgtttaaggaggataaaaataggaccccagtcccctctagcctgtagggtttctgctgagaaatctgctgttactctgatagattttcctttataggctacctggtgcttttgcctcacagctcttaagatttttccctctgtcttgactttagataacctgataactatakgtttaggcaatgatctttttgcaatgaatttcccaggtgttcgttgaacttcttgtatttggatgtctacatctccagcaaggctgaggaagttttcctctattattcccccaaatatgttttccaaacttagatttctcttcttccttagggactccacttattcttaggtttggtcatttaacataatcccaaacttcttggaggctttattcattttttaaaattcttttactttccagtacattttgcatttctctgtgttctttacttcctgaagtagtgattgttttatatttatgctatctatttcactgaagatttctcccctcatatcttgtatcatatttttttatttccttaagttgga

SEQ ID NO: 290579 - DNA, 618 bp, Homo sapiens
cctttgtctgaaaaagactgtatctttccttcatttatgaagcttaggatacaaaactgttggctgataattgttttgtttaaggaggataaaaataggaccccagtcccctctagcctgtagggtttctgctgagaaatctgctgttactctgatagattttcctttataggctacctggtgcttttgcctcacagctcttaagatttttccctctgtcttgactttagataacctgataactataggtttaggcaatgatctttttgcaatgaatttcccaggtgttcgttgaacttcttgtatttggatgtctacatctccagcaaggctgaggaagttttcctctattattccccyaaatatgttttccaaacttagatttctcttcttccttagggactccacttattcttaggtttggtcatttaacataatcccaaacttcttggaggctttattcattttttaaaattcttttactttccagtacattttgcatttctctgtgttctttacttcctgaagtagtgattgttttatatttatgctatctatttcactgaagatttctcccctcatatcttgtatcatatttttttatttccttaagttgga

SEQ ID NO: 290580 - DNA, 593 bp, Homo sapiens
tggacttgtttaaaacatgctcattttcaatttagagtctgggcaattcatgtattacattctaaaatgcctggccagcttcctcaggagataaaattatgaactggtcacttagacttgcatatattttctagaatttatttgcagagttatcaagtaccagttacaaagatttgagaaaggatctgcaacctgtcttactaaattaggaatcatgggcctcttatttcatrtggaatgctctttatcaaggcaaaagaataaaagcttgggacagtttgactgagagatttgaatctaaagttgtataaaactatccaaaaattaattcaaggttttcagtgaggactcacaagaatatagagccatgtacctacatacatatcacagtgggagagattacccagacttccatgaagctgtcagtcaaaatgagggaaagaagtcagtttaagaatgttaaaagaaaatccatttgttcacatttcaagtaatagtgaatgtattactttctgtgttctgaatctcttctctttttgttggggggaaatctctttctccctgctttggagaaatagtttctccttccttat

SEQ ID NO: 290581 - DNA, 569 bp, Homo sapiens
accaagaggctgctttactccctgccctgccaacagttgggacaaatggtccattaaattactcttttttttgatctaagctactttgagttggattcctttaatttgtaactaaatttatagggttgccaaataaaatagagtatgtccaatgtcttmgtctgttctgtcctgctgaaacaaaataccagagcctgggcaattataacaaatagaaatgtactggctcatagttccggacactggaaagtcaaatatcaaggtgccaacatctaaccgggcattattgctatgtcttatttgggggaaggcagaagggcaagagaccaggagagagagaaagcaagagaggggatgatcacactctcatgataacaaacccactctcctcataatcacggcactagtctactcaccagagaaggacgcttgtgacctaaacacctctcaaaagtcccacttctcaatatcatctcaatggctattaaatttcaacataagtttcagagaagacaaatattcaaaccctagtacccagataaattcaaaaccagataaacagaaggaaa

SEQ ID NO: 290582 - DNA, 1139 bp, Homo sapiens
accaagaggctgctttactccctgccctgccaacagttgggacaaatggtccattaaattactcttttttttgatctaagctactttgagttggattcctttaatttgtaactaaatttatagggttgccaaataaaatagagtatgtccaatgtcttagtctgttctgtcctgctgaaacaaaataccagagcctgggcaattataacaaatagaaatgtactggctcatrgttccggacactggaaagtcaaatatcaaggtgccaacatctaaccgggcattattgctatgtcttatttgggggaaggcagaagggcaagagaccaggagagagagaaagcaagagaggggatgatcacactctcatgataacaaacccactctcctcataatcacggcactagtctactcaccagagaaggacgcttgtgacctaaacacctctcaaaagtcccacttctcaatatcatctcaatggctattaaatttcaacataagtttcagagaagacaaatattcaaaccctagtacccagataaattcaaaaccagataaacagaaggaaawaccaagaggctgctttactccctgccctgccaacagttgggacaaatggtccattaaattactcttttttttgatctaagctactttgagttggattcctttaatttgtaactaaatttatagggttgccaaataaaatagagtatgtccaatgtcttagtctgttctgtcctgctgaaacaaaataccagagcctgggcaattataacaaatagaaatgtactggctcatagttccggacactggaaagtcaaatatcaaggtgccaacatctaaccgggcattattgctatgtcttatttgggggaaggcagaagggcaagagaccaggagagagagaaagcaagagaggggatgatcacactctcwtgataacaaacccactctcctcataatcacggcactagtctactcaccagagaaggacgcttgtgacctaaacacctctcaaaagtcccacttctcaatatcatctcaatggctattaaatttcaacataagtttcagagaagacaaatattcaaaccctagtacccagataaattcaaaaccagataaacagaaggaaa

SEQ ID NO: 290583 - DNA, 1074 bp, Homo sapiens
gagttaatttttgtataaggtgtaaggaggggatccagtttcagctttctacatatggctagccagctttcccagcaccatttgttaaatagggaatcctttccccatttcttgtttttgtcaggtttgtcaaagatcagatgattgtagatgtgtgttattatttctgagggctctgttctgttccattggtctatatctctgttttggtaccagtaccatgctgttttggttactgtagccttgtagtatagtctgaagtaaggatttttatttcaatgagctatatacctcaaagacacaaaactcataatgggtttcacagtctttctcccaacccacacctcaacagaaacattytgaccaaaatccagatattttccctaatgcctccagtatactcaatctgaacctctgaatcttccaccttttgattaatcccaaaagccagtgctgatgttgctcatttcatggttgagagcaccggaaagagatttcttgactatggctgagagtcaagtttagagtttggaawcttaggctttctaacaaattttaagtttacactttctttagttcaactagtacactaggatataacaagagtgccaaattaaatatatatatatwtttatattcgatttacatatgttatttatatatttatatatatgttgttatatatatataaacctccactactataacaaatttactcttttcaagtttttcactttctctccaggccttgtacaaaatcatatgtgaattttaaatagttccagtgaggaaagagatgccatattttagtgtggctgtttcactgctccttttttataattttcaattttaatggttgctaagattctgtcaggttgcccccattttcccctaatcaatctcctctgttgaacatttaggttgttctcaaacttttattattgaaagtaatactgcaagagaatatttataaaggaacttcttttaattgtttccttagttgaaaattttgaagaagcagagttactgggtccagagattctcttgtaactcagtattatatccccattagtt

SEQ ID NO: 290584 - DNA, 539 bp, Homo sapiens
cttaggctttctaacaaattttaagtttacactttctttagttcaactagtacactaggatataacaagagtgccaaattaaatatatatatatatttatattcgatttacatatgttatttatatatttatatatatgttgttatatatatataaacctccactactataacaaatttactcttttcaagtttttcactttctctccaggccttgtacaaaatcatatgtgaattttaaatagttccagtgaggaaagagatgccatattttagtgtggctgtttcactgctccttttttataattttcaattttaatggttgctaagattctgtcaggttgcccccattttcccctaatcaatctcctctgttgaacatttaggttgttctcaaacttttattattgaaagtaatactgcaagagaatatttataaagraacttcttttaattgtttccttagttgaaaattttgaagaagcagagttactgggtccagagattctcttgtaactcagtattatatccccattagtt

SEQ ID NO: 290585 - DNA, 559 bp, Homo sapiens
ttttcattatgattttaactcctgtctacagaagctattcmttaattcaattagtccttattgccaacgtagagggtgagttctatattgtaagccccaatgcacagatgcagaaaccgaggttcagaagctttgacatcttgccccaggtctcttagatgttagtagctaatctgggatgcaaaccagatgcctgaatcaagtctttgttctcttcattctgctgcactggttcgtctgacttgaaattgcatcagttagggtttgggttcagctgcatacaaaaaaatccgagtggctgccagttagactaaacagagatttatttttcttccatataacaataaattcagacataaacagtctgaagctggtggaaagaaaatgctttctggtttcccagtgtgattaggcacatgaaggcagttgcaattccagccctcatgactgtaatccagactgcagaaaggagttagaaacaagaaaatcacgtggcacttacatcaggaaagcacagtatttttcagaaatacacagaaataaccagaaatgtgtctca

SEQ ID NO: 290586 - DNA, 621 bp, Homo sapiens
tattcaatttattggtgtataattgttgataatagtctcataattctttttatttctacagtttcagttgtgatgtctcctttttgatctctgattttatttgaatcttctctcttttccttagtatagataaagatttgtcaattttgtttatcttttcaaataaccaacttttttctcaatctttygtattgttttgttcacctttatttactttatttccagtctggtcttaattatatcttttcttcttctaatttttggtttagtttgctcttgtttttctagttctttgaggtgaaatgttcaattgtttatttgacatttttctcctttttgataggcatttattgctatataaatgtgtagttgaaaagaatgtgtattctggggctgttgaatgaaacgttcctttttttttggcgggggggtggacggagtcttgccctgtcactaggttggagtgcagtggcatgcttactgcaaacttatgcaaacttactgcaaacagacctaaatgtctgttaggtctgtctggtcttgagtacagtttaaatcggatgtttctttattgattttctgtctgggtgatctgtttattgctgaaaggtgggtgttgaa

SEQ ID NO: 290587 - DNA, 517 bp, Homo sapiens
aaaatggaagaattgtggaaccaaaagctgaatctctagctgcgttctcctgggtaatccaggkttattaggttggtgcgaaggtgactgcggtttttgccattgaaagtaatggcaaatacagcaatcacttttgcacccatctaatagtatagttctcttttaaaatattttcagagacttatcatgtactcgaggatgtagccttctccaagttaaccatgtttagtttctttaatttggcctcatcttgtggttctgagtggccgttatagttacattcttctgggcatattataatttatcagttttcaatctttaagtaaagaaatgtgaccactgtgctattcctctgtatttctggaagctgtccttggtaaaactctaaattgctttggcaagaggggcaacttagatcaatcacaaggtgtgcccagcccacccccatctgctgttaagctctatctctgacctgcatttgtgcactggttcatctgcaaatctcagcctcagactt

SEQ ID NO: 290588 - DNA, 517 bp, Homo sapiens
aaaatggaagaattgtggaaccaaaagctgaatctctagctgcgttctcctgggtaatccagggttattaggttggtgcgaaggtgactgcggtttttgccattgaaagtaatggcaaatacagcaatcacttttgcacccatctaatagtrtagttctcttttaaaatattttcagagacttatcatgtactcgaggatgtagccttctccaagttaaccatgtttagtttctttaatttggcctcatcttgtggttctgagtggccgttatagttacattcttctgggcatattataatttatcagttttcaatctttaagtaaagaaatgtgaccactgtgctattcctctgtatttctggaagctgtccttggtaaaactctaaattgctttggcaagaggggcaacttagatcaatcacaaggtgtgcccagcccacccccatctgctgttaagctctatctctgacctgcatttgtgcactggttcatctgcaaatctcagcctcagactt

SEQ ID NO: 290589 - DNA, 533 bp, Homo sapiens
attttctcttcctgttgaataaaaactgtatttcrtaagttgcagtttaggataaaattacagtgacatcattcaatgcattacaaaaaaatctgtatctgaactattaaaataaaaacacaaatgattctgaacacagcctttgatgacttcccagatggttccagagaagatggcagtgaatgtggagactctgagaagaattatcccatagacataagaaagtaagaaaatatttctaagttaatagtatgtacatattatatatgttcctacatttttacagtacaaaattactaatttaaatataacaggtagccagtcaactattttacaatgcatcataaacatatatatttaagttagccaattactctatgaaaaacactcttcacttggaaaaattatagaatctgcaatgattttagatgcaatagaatcatgttattgatcttcataaagtaaaagtaatagtagagctgacagaagttgaaaagtagatagggaaaagaagatgtaaaagtagaaaaata

SEQ ID NO: 290590 - DNA, 576 bp, Homo sapiens
gacttcactgtctgtatcattattagcattttggtcacaaccattcaacaagtctgtgggaagttccaaactttccctcatctgtcttcttctgagcccttcaaactgttccaatatttgcccattacccagttccaaagttgcttccacattttcatgtatctttatagcaatgcccctcttctttggtaccaattttctatattagtctattctcacattgctataaaaaactagctaagactgagtaatttactggaaaaagaaatttgattagctcatggtttctgcaggctcttcaggcttctgcttctggggagacctcaggaaacttacaatcatggcaaaaggtgaaggagaagcaagtatgtcttcacacrgctggcaagagggagtgaaagagtggagggggaagtgctacatactttcaaacaaccagatcttgtgagaactctatcacaagaacagaaagggggaagtctggccccatgattcagtcacctccctccaggaccctcctacaacatcaaagattacaattctgtgtgagatttgggtggagacacacagccaaac

SEQ ID NO: 290591 - DNA, 576 bp, Homo sapiens
gacttcactgtctgtatcattattagcattttggtcacaaccattcaacaagtctgtgggaagttccaaactttccctcatctgtcttcttctgagcccttcaaactgttccaatatttgcccattacccagttccaaagttgcttccacattttcatgtatctttatagcaatgcccctcttctttggtaccaattttctatattagtctattctcacattgctataaaaaactagctaagactgagtaatttactggaaaaagaaatttgattagctcatggtttctgcaggctcttcaggcttctgcttctggggagacctcaggaaacttacaatcatggcaaaaggtgaaggagaagcaagtatgtcttcacacagctggcaagagrgagtgaaagagtggagggggaagtgctacatactttcaaacaaccagatcttgtgagaactctatcacaagaacagaaagggggaagtctggccccatgattcagtcacctccctccaggaccctcctacaacatcaaagattacaattctgtgtgagatttgggtggagacacacagccaaac

SEQ ID NO: 290592 - DNA, 500 bp, Homo sapiens
cagtaactcttctaccagttcttttactgctttgcccttttcaatcatctttttttggtacccagtggctattttccaagacatcccctgccctcttggctaatatcacaacctttgaatttttaccrtaactccttatttttgagaattatttccacttctgtcttctttccctcccttcaagatgacaatcctctaacctgaaaaactgaactgcacatatattattatgtgacaattgcataattgcctgtcatatcctatatttttggactttagcagagttctcctaaataaaaattgtaacctaaagaacttaatgatgatgagaattaaaaacagagatcggctaacatattgttaatttggtaacccaccaaacaaataatctatgcaggcagtcgtgccctacagtgcctacataaatatgaatactgacatttagatcaaatttgttaataacattcttagcataagtaattacatattattagcataag

SEQ ID NO: 290593 - DNA, 558 bp, Homo sapiens
accaagccctatggactcattgtcctctagaaagcaggtagtgcaaaggaaaaactgcacagcagggaggctggttgttggtgtagctcatctttttaagctgtgcacagcaagcaagggaaaggacactgaagaaccaagatggtaggttagatttagcatgtttaaggaaaggagaaggagaggatatctgaagtttcagagtgttcaagaggtcagggattaagagtttactgtagcctctgaacttggaaactcttgaatgcctgaggaagatataaaagatgggatttcctctttagtggtgctttgttaaatatcacatactctgccattcagctatggaaccctgcttttaaagatttcrcataaaatactaacacatagattataaattaaaaaatgcattcagcttagcttggagcctggcacacagttagcatccagcaaaagtgagttctttctgctgtggtacttgaagagataagaagccctttcttgtataaagtgaacaatttgggtgatgtttatactaaaataccagacttcaccaatacc

SEQ ID NO: 290594 - DNA, 485 bp, Homo sapiens
atcactgtctcatggtggatatttgaacacatttttctgggtatatacctaggaatcaaattgagaaatcatacaagatgcgtatcctcaatgttagaaaaaactgttaaacagtttcccaaagtggatgtaaccaatttacatacctggatgtgtttgcattgcttcacacagccagtgtttctgttttttgtacttcttttaatttagatattctggtagatattcagtagtatcacttcgtttctattatacgtgattctaattttgtttctattacacatgataatatcgagtgctcttttgtatgtttttgatcatatggacatagtcttttatgaaatcccattaaaaggctgktgtcgatttttctaattggttgccttttccttattattaatttatagaagagttttccttgaggcaagaattttacgttattgattcaatttttttctaaaagtagtggtattagtcaatgttcc

SEQ ID NO: 290595 - DNA, 583 bp, Homo sapiens
ccaacaccaaaaagggtgagaacctcaggactggctcagaacctcaggacaaatataccagccccggtcagagctggctctgcatagactggaagttagagaaggtgagggtctcattttcagggtgcactggataaattagatataacaactcagtgaaatgggagctgcttgcttttaaggacacagatcttcccgttccttctgggtttcttaatttttatagccataatcaaggacgataaaattgttttttcttgttaagcattaatgtaraagctgaatagttagtgtacattatcactgctctttttttaagcgttgtagccacattcacaaatatcaaagtcctttgcaagatgaaaacaacctcagacatgtaggagtggagtattgccaacatctaggagaaaaaataaaatgtctttcattctttcattccatcttgggccaaatttctttggagagggacttttactggaatgtggtaaaaatataaaaagtctgaatgtcgcccataagtgcctttcattggtatccctgtaaaacgagagacagagagagagaatcctaacatttaaag

SEQ ID NO: 290596 - DNA, 432 bp, Homo sapiens
agctggtaagacctgaaaagtaatcattcaaccccttgaattgaatgagtgagaaaaagatagcaatttaagttcagttccttaaatatgtttacacattatagaaagctctgcttcagtaaagctgtcagacttggctgtgctaggatggtcctactgaaagggtacgattcctaagataaggtttygagcaatcaaatctgctcccattcccccatccaaaatttccaaaagcacagatgaactactggccagtgaatgcatggacaatcagccttttatagatgagaaacgaggtcctcatgggggtgacaggcagtcagagctttggccagaacccctaaacatggcccacgtcgttctctgtacttcctccttatgatagacaggtgctttttgtacccagaaatattgtttctgccatttgcattg

SEQ ID NO: 290597 - DNA, 432 bp, Homo sapiens
agctggtaagacctgaaaagtaatcattcaaccccttgaattgaatgagtgagaaaaagatagcaatttaagttcagttccttaaatatgtttacacattatagaaagctctgcttcagtaaagctgtcagacttggctgtgctaggatggtcctactgaaagggtacgattcctaagataaggtttcgagcaatcaaatctgctcccattcccccatccaaaatttccaaaagcacagatgarctactggccagtgaatgcatggacaatcagccttttatagatgagaaacgaggtcctcatgggggtgacaggcagtcagagctttggccagaacccctaaacatggcccacgtcgttctctgtacttcctccttatgatagacaggtgctttttgtacccagaaatattgtttctgccatttgcattg

SEQ ID NO: 290598 - DNA, 558 bp, Homo sapiens
gatcagactttctttttttccatttacatcgcaactcgctgcctgcaggctccccaaatgttcagtagagaatatgcatgctttactgttgaattgcagccaacgtgtcacacaagtggctgatgacagtgacaagcagtacagagctgcccatgtggtccttgggcgagaggaattggccatgaaaatttggacaagcattaaccttgaaagctgcctgaaattagcattacataaatctttcttcacatcctccatcttttaatatttcatcccagcaaatcctccattttgatcccaacaggatgataacatgtataataytaagtttatctttccaggaaaaatgaagctcaaggccttctaaagcttgaaagtgaatgtcttaaacctgattcttagggcaagttcatttctgggtcatatgaaccttgggaataaaagggacttttcacttctcactcattttccgttataactttttaaaaatataaattgtttaagagaaacttacatctctttgaaatgagaaatatcacgataatagtttctgaatga

SEQ ID NO: 290599 - DNA, 576 bp, Homo sapiens
ctggcattgagtgcctgcagcttttccaggcataaggtgcaagctgtttgtggatctaccattctcggggcttgaggacagtgaccctcttctcacagctccactaggcagtaccccagtggggactctgtcrgggctccaaccccacatttcccctccacattgccctagtagaggttcttcatgagggctccacccctgcagcagacttctgcctgggattctaggctttttcatacctcctctgaaatctagtcagaggctcccaagcctcaacttttgcactttgtgtacctgcagccctaacaccacatggaagccaccaaggcttatggcttgcaccctttgaagcagtgacccgaactgtacttgggctcctttgggccatggctaaaactggaatggctgggatgcagggaccagtgtccaaaggctgtgaagggcagtgggacaaagggcctggcccatgaaactattcagtcctcctaggcttccaagcctgtgatggaaggggctgccttgaaaatctctgaaatgccttggaggtcttttccctattgtcttggctattagcaa

SEQ ID NO: 290600 - DNA, 574 bp, Homo sapiens
acagattttttcttttaatatcttactgtggtaatatattaagtgttaatgtgtggtaacatggtaacatattaaaaaatacattacagtaacggtaacatattaaaagaatcacattagtgaattttctaatgttgagtaattcttaatatataggatacatccaatttggttttgctgtattatcttttctccagagttggrcttaatttaaaatttttatatttagaattttcatatctatatttattaacaagtgtggttctacagtttttttgtctttctataacatttttgggtttggtaacaagcttatgctgaactcagaataaattggaccacaatccttttatttttaaagcttttgtagatctcaactttgaagtagacaaggtctggagttttcttgtgagaaaattttaaatcactatttagtttctttaaaaaccatgggactaattaagctttattattacttcatgaattaactataagtcacattttactagagatatgtccatttatctcagttttctaagttgctagcagatagttggtaatatttgtacacctg

SEQ ID NO: 290601 - DNA, 565 bp, Homo sapiens
ctatcatcataatgtaattttagaatattttcatagcccccaaaaccctattctcaatagctgtcaatgcctattctctgtcacccccaagcactagacaaccacttgtatactacttattttgacagatttgtcatttggygacattttatacacatggaattataccatttgtagtatttcatttttggcttttttttacctaacatacttcatttttttcagattcatttatatcacactgtgtgtcaatacttcatttcttttaatagttgaatgatattctattgtttagatatacgatactttgttaatccaatcattcattgattaatatttgggttgtttacacaaatattattggctattattggctattatgggtaatgctatttatatttctgtataatattttgtgtacacatatattttaatttttcttggatatgtatctaagattagaattgctgggacatgtgttaattctaagttcaattttgtaagaaacccccagactgttttccaaaatggctgtgccattttatattcccaccagctatgtgtg

SEQ ID NO: 290602 - DNA, 1200 bp, Homo sapiens
ctatcatcataatgtaattttagaatattttcatagcccccaaaaccctattctcaatagctgtcaatgcctattctctgtcacccccaagcactagacaaccacttgtatactacttattttgacagatttgtcatttggtgacattttatacacatggaattataccatttgtagtatttcatttttggcttttttttacctaacatacttcatttttttcagattcatttatatcacactgtgtgtcaatacttcatttcttttaatagttgaatgatattctattgtttagatatacgatactttgttaatccaatcattcattgattaatatttgggttgtttacacaaatattattggctattattggctattatgrgtaatgctatttatatttctgtataatattttgtgtacacatatattttaatttttcttggatatgtatctaagattagaattgctgggacatgtgttaattctaagttcaattttgtaagaaacccccagactgttttccaaaatggctgtgccattttatattcccaccagctatgtgtgwaactacaattttgttatatggacatgttctaagagtatgtgcagaggataacgattaaataaacttttccaagtaaaacacagttaaaggctacttcactgtggccaaatgactttctgtaaggccaaaattacttactgtagagagcaaccaaatgcatttgatgctctttaatgctctagaatatctaatattatgtagagcacataatatactttaagtgagtgcatatcaatacatacaagaatatcatagctatgagagaggcatataattaatatatttgaaatatcactactatccccattctagctcaaagtgtgaactgattttaaatwttttttaagcttctgcaaaactttattcttgttttctctctttaaaattgtaaatcttaaatatttaaaagatatcttgctgtcatgtaatatccgatattcacacacacacacgcacataggtacacaaatacacaaatggagacttccaatgagaaaacaaccttgtaaaaggagttttacaagggagtgctgtgttaactgacatattgctgagttagcaactaaataaccagctacatacatcccttttgtatcattgagtagcgtgcattcttaaagtgataatggaacta

SEQ ID NO: 290603 - DNA, 596 bp, Homo sapiens
ataataatgactcttgaaaagtgtatgaaaaactactgacacaataccataaaggaagagcagaggtagatgaatggtaaagacatttaagctgagatacaatggaaataaagactgagccaggcaaaaattgaaggaaagttcartggaaatggctgtcctcccacatgacagaataaagattccaatccagattttcagaccccaaattcaatgccttatttcccccatttacccatattacttggactgtattttttgccttaaataataaagacatagtaatctagataccttagcctctaaagtttatggttaatgtttatggttaaacataaaaatacaaagaagtcatttttaaataccagctctatcttttttttcttttagtaatccatccagattcagtgctaggacatggctctatgcagccaagactgcagaattgcatggggtcatacttttagactgacatgagtggtcaaggcagctgaacaaccaatttagttgattttggtttaataacttgaccggtcactggactgaattgaccagaaggcaatggcaaacagagtgagttatctttttctagaaga

SEQ ID NO: 290604 - DNA, 552 bp, Homo sapiens
ttttttgttaatttgccctttcatgttttttcttcatttctttattgggctctagatgaatttagttggtcttttaaaatgattgtatcaagtttataaattaatttgagaaaattgacatcattattgtatggctgcgtagagttaagtagttggaacagagaccatatgatctgcaaaggctaaaatatttcccacctggccctttactgaaatgctgactcctgctttagatcatttgtttttcttcattgtcttttcaaaatttattttcataaggaaaaattatcattaattttataaattatcttgttttaataatttctgatgactccccygagatttctaggtatataagatattacatgaaaataattataatttaacttttatattctcattatttgtatgtttacttctttcattgtctaggtctattgatatttacatcctttacatatatatctctttatatatattatacctatttaatttattcctattttattaaaatacattttaatcaaaatggatgttgaatgtagtcaaatg

SEQ ID NO: 290605 - DNA, 579 bp, Homo sapiens
tttatatatatatctatcctattaattctgtcttactagagaaccctgactaatacaatgttaaaaactggcaagccaaatatttctgtgactacccattggagttatgaagtgtagcaaatgaagaattaagaacaggaaataataaaaatggctgctgatacggtttgactgtgtccccagccaaatctcatcttgaattgtaactcccacaattcccatgtgtcatgggaggaacccagtgggaggtcattaaattatgggggcaggtctttgctgcattgttcttgtgatagggaattagtctcataagatgtgatggttttaaaaatgggagtttccctgcacaagctctctctttgcctgctgccatccatgtaagatgtgacttgcttcttcatgcgttccaccatgattgtgaggcctccccagccatgtgaaactgtaagtccattaaacctctttgttttataaattgcccagtctcrgatatgtctttatcaacagtatgaaaatgaaccaatacagtaaattggtaccggggtggggcactgctgaaaagatacaaaaaatatggaa

SEQ ID NO: 290606 - DNA, 585 bp, Homo sapiens
tggtatttttttctaccaggtttatattttatagctgtagtagtgtgtatatgtatgataattatgaaatttgtatccagataatgatcttttaagactttttttccaagaacaacaaatctacagatagggacaattctttgaaatctaaaaaatatctagattatcttgaagacaatcttcaggcaaaaaatctacactgtcatgcagctttctaaaacttatgcagttatccttataaaattgattttctcattgatattttggtttcatttaygcaacttcattcaaagcatctgaaaatttattcaatgaagcttaccatactgaatacagtgttgaatatatcttgccccataacactttgagatatatgacctaaattaggtgagtcttcttaaaggaaatataagggctggtatattttgcttctcttgaggaactgacagcatatttcttaggaaaaaccaaacgcaactcatttagacaagtgatttccagacttaactgaccatgagattcatctgatgtaaaaagcacacacatattgtgtactagtctgttttgtgcccttataacagaata

SEQ ID NO: 290607 - DNA, 657 bp, Homo sapiens
tgtatatgtatgataattatgaaatttgtatccagataatgatcttttaagactttttttccaagaacaacaaatctacagatagggacaattctttgaaatctaaaaaatatctagattatcttgaagacaatcttcaggcaaaaaatctacactgtcatgcagctttctaaaacttatgcagttatccttataaaattgattttctcattgatattttggtttcatttacgcaacttcattcaaagcatctgaaaatttattcaatgaagcttaccatactgaatacagtgttgaatatatcttgccccataacactttgagatatatgacctaaattaggtgagtcttcttaaaggaaatataagggctggtatattttgcttctcttgaggaactgacagcatatttcttaggaaaaaccaaacgcaactcatttagacaagtgatttccagacttaactgaccatgagattcatctgatgtaaaaagcacacacatattgtgtactagtctgttttgtgcccttataacagaataatccagactaagtaatgtataatgaacagaaatttatttggctcacttctggaggctgrgaagtctaagattgaggttccacatcttgtgagggccttcctgttgagtcataacctg

SEQ ID NO: 290608 - DNA, 497 bp, Homo sapiens
actgttaatgctgctaaatgccaaccacttgttctacagcagggaacaagctggagatgatggcaatggtgtggtgtatgttcatgtttatcaacaaagctacttccaatttaaaagaaataaggggccacccacactgtgttcaaggaccttctcattcctcaaattttccttccttttgctcgctggtgctcctgatttattaatttgaggcaggatgcttttcatttttctactggaaaaaaaatgaacaggacaaagttttaactaaaaatgggaaatgtgactgaagtgcagatgaatgcatgtttaatattagagcatcttccctgccagtgaccttgatgaatgaagaactcaccaagcccctgaaggcaaagggaagggtagcaaagtgctcaggaatttatcctcataagtygcacagtactgacttatcactcgtccctgggactggtgttcaatgttcacctctgtgcagagtgttctgaagaatt

SEQ ID NO: 290609 - DNA, 1110 bp, Homo sapiens
gtgggagatgattgaattatgggggtgggtctttcctgtgctgtttttgtgatagtgaatgggtctcaagagatctgatgattttaaaaatgggaattgccctgcacaagcrccctttgcctgctgccatccatgtaacatgcgacttgttcctccttgacctccaccatgatagtgaggcttccccagccatgtggaactttaagtccaattaaacctcttcttttgtaaattgcccagtcttgggtgtgtctttatcagcagtgtgaaaacagactaatacactagccaataacagtactaaatctttggagtttggggtgttgtgaccaggatagtattgtcccccagacaaaatgttgctgagtggtttatggtgcttatgaaaattggtgacatctaaggttatttacctcattaggtttgatgggtctacttaccagggagtgagaaattcctaaggaagttagaagaatatatttccttatcataaaaaattattaaccccatctcttcccctggacatgtgataatgaawtcagtctccaactgcgtgattgttgacttcctgctgtgtgtcaggcaccctggcatgtgcgccactgtctgaattcagaccggattcaaatatcaccttctgcatagccctcatgtcatctttatcatgcagctttttcatcttgccttatttttgtcacttgaaatattacagtttttgtctacttatttattttatgagcacccccaccccataaacacagtataaagtagtgcagaagcaggaatagaaacttcatctatcccacatattgggaacactctccagaaaacaatagatgctcaataaatattggctgaatgatcagttgagttatttagatttcctctaaacttgtaaggaggaacccaaagtcttactaagcattttttatatgctaggtactatgcatttactacatatactacatactaagctaacttagataaatttggttatctgatacatatgtcagaataaccatatgaagataggaattatcatwatttacattttatagttaagaaaaattagtcacagaaaggataagcagcctggtcaaagccacgcag

SEQ ID NO: 290610 - DNA, 619 bp, Homo sapiens
tttttaaaaaatatatgcaaacgattctagtaagtgaaactctgctttcttactcattgactaaaggatgcatttttttctcataaacttggattatttctatttctcctaatgctttagctttactttgtgtgcccccattagctccaaccttgaagtctactgatctataagaagacactctactgtttcaccaagggcaaatttacctggggataaaggattgttctgtaatgcaaatatttaccccagatgatataatattttaccagttttgattttcaaatcttggggttgcttaaaattttcctgtcatcttgttgtctcattgtaaagcctttggcattttgtacatatgaatcagaagattatttttctcattcctgaagggtgactccacgtaagcataagatattcctttgttgtggctctgttctaggtgtgacacttatccttkcagttctagtttatgtttgttgatttccctttgcattttcatgatggtcatgtgaggcctccctggctagaaaagatgaacatttgaactccctagctcctggttgggcctatttcctctgacttttttgtatctactatagcgcagttcagtaagaaatag

SEQ ID NO: 290611 - DNA, 619 bp, Homo sapiens
tttttaaaaaatatatgcaaacgattctagtaagtgaaactctgctttcttactcattgactaaaggatgcatttttttctcataaacttggattatttctatttctcctaatgctttagctttactttgtgtgcccccattagctccaaccttgaagtctactgatctataagaagacactctactgtttcaccaagggcaaatttacctggggataaaggattgttctgtaatgcaaatatttaccccagatgatataatattttaccagttttgattttcaaatcttggggttgcttaaaattttcctgtcatcttgttgtctcattgtaaagcctttggcattttgtacatatgaatcagaagattatttttctcattcctgaagggtgactccacgtaagcataagatattcctttgttgtggctctgttctaggtgtgacacttatccttgcagttctagtttatgtttgttgatttccctttgcattttcatgatggtcatgtgaggcctccctggctagaaaagatgaacatttgaactccstagctcctggttgggcctatttcctctgacttttttgtatctactatagcgcagttcagtaagaaatag

SEQ ID NO: 290612 - DNA, 462 bp, Homo sapiens
tctattctggaacatttctccaattcttccaagttgtgggtcctgggaaaagaccctggaactccccctgccacacacacacacacacacacacacacacacacacacacacacacacacactctctctttggcaacttcgacttggcctagctgaggaaactaggccgtcaggggaggccatctcctcccaggagcgggggagggcaccatctaatgcacagaggtgatgtccagatccacagaggtggattgggcctcataagcctggagtctgactaggcatctacagctgggatttcctccccatcctcctggccacatgaatgtcatcggtgcttaraaattccaccttccagaaatatcgtttctaaatctgccaactccgactatttaaaattcttcaactaaaccctttgggaaagtgagagcagagctaaacctcaactctacatcctgaact

SEQ ID NO: 290613 - DNA, 555 bp, Homo sapiens
tgtataatttccattttataacttctattttttgtttcaaaaacattcaaagttgtgtatcaaaacatttttttgatggctgctgaaaatcctcatcagataattccatcgtctgattcttctcaaagttgacatcagttaattatcttttctcactcaagccatcatttccctggctctttgtatgatgagtgagtttagattacatcctggacatttsgctgttatgttagaagactctggatcctgtttaattcttttagtttagcatgaactcaccctgtttggggtttagcatgcaggctctagattactttataggtatagggctatggttccaattgcagtttaattttgagagtctttgaggtgctattttgctctaggcgatttatctggtgcttttggggctcccactggtcctcccggtgctgcctgagagggcggagtctccccaagctaggcagcctggtattctaggtggggaaagggatgctctgttccacagggatgaagagtgcttcccaggccaggccaggccactgaatgaggcga

SEQ ID NO: 290614 - DNA, 582 bp, Homo sapiens
ctgcgtcatgaaactgaaaagcttagaggaagggtgacttcaggcatggctggatccaggtgttcagaaagcatcaccaggatctgttgtctcttaatttatctgccctacttcctctgtgttggcttcactctcagactttattctcatggctgccctcatcagtgtagtagttctagtccagtggggaaaaggcagtgacagtcctaataaaagtctcagtgtgcttctgatggaatcatatgcgcattcctgagccaattactgaggccaggggaatgtggcactccacttggctggtgcctcatgggtactgttagtgggggatgggtcctggcagccaaaatctgtgaccagttaagagcaaaatcagtagcacccattcagcaagrgtttcagcctgaagaatcaagcacttagcaggagttcaccaggagggacaggcctggccctgacttgctgagcgaccctgaggaggacacctgtcccccaaagaccctcaaagtcccatccactgcagaatactttcctccatggatgccctcaacactggcttcagttagagaccaagtgctccaccaa

SEQ ID NO: 290615 - DNA, 579 bp, Homo sapiens
gggtaaattagtaggctgatctaaacaaatattaatcttataaagtgataataaaagtaatatcagatgaaatgcagcaaagcaataacacaagctgaaacaaagatgctggactatattagtaaaagaactccagctgaaaccaaactaataaataataatgaaagaaggatgatctggaaatgaaatcacccaaaagtctgtggattattcaggaggatgaaaaccatattaattaaatttggattttgttaagctaagtatgcttatgaaaactgtgagtgtaactactaaaagaatgagcttggaacatacatccactgaagaagtagcaactaaagatgaaataaagaaaagaagtcaaaagarggcaaaaagaagaatcagaagacgtaagataaatcaaaagcacataatgaggttgtagcaataaacttaaatgcatcaggattcacaatttatacaaatggattggtatttctaaataaaagacaaaaacttccaggcagagctggatttttaaagctcaattgtatgctgatataaaaaaaacaaaaaacttagacatggaagaagtag

SEQ ID NO: 290616 - DNA, 490 bp, Homo sapiens
aaaaatttaccatttagagacccttgctgaaagaactatccaagagtggatcactgagaaaaggaatctaaacttcatagaagagagtgggattaaagaagcaatggtgagcaaatcatggaaatctaaagcaagaactgagtatataaataataattagtagtattaattctgtagcaaaaaaagggtaagacaaaacatgagaccatactaatacataattaaagcaagttaatgagtaaaacatgacatatgttttgattttaagttaagcattcttgttacaaatatttattgattcctgaaactatataagagaaatgtataacttgccaactagaggagaaatttaagaaattgtaaagaaaacagatmaaacaatccaacagaaggaagaaaaggagaaaaaaagcataaggaataaacaaggtaaagaaaatacccaaatatacactaacttttactttctgtttaagtagaaggatatgat

SEQ ID NO: 290617 - DNA, 577 bp, Homo sapiens
atacctgaccagtactccacaaaattgtcaagatcataaaaacaaggaagttctgagaaatggccatagaccagaggagactcaagagtcaggatgactaaatgcaatattgtatcttggatgggatcctgcaactgcacagggacattagtgggaacactggtgacatctgaataaactctggagtttagttaatagtagtgtaccaatgctggtttcttagttgtgacaaatgtatcatggtaacgcaagatgttaataaatgatgaactgggtgaagggtgtacaggacatctctgtactatcctttcaacttttctataaatctgaaactattctaaaaaacgttcttttttaaaaaaaaccatctatttacaaaatacaaaacagttgtgagtaaattaaataaaagatacasataattggcatactgataactagaaaatatagcttggaagaattttgaaaagacctaagtaaagagaaatactgtgttcatggattcaaagtctcaatattgttaagatatcgtttctctcccaaactgatcaactgatttaatgtaatcccaatctaa

SEQ ID NO: 290618 - DNA, 572 bp, Homo sapiens
attaaaactacaaagggggccaggcatggtggctcatgcctgtaatcgcagcactttgggaggccaaggcgggaggatcacaaggtcaggagatcaagatcatcctggctaacatggtgaaacccygtctctactaaaaatacaaaaaattagccaggcgtggtggtgggcacctgtagtcccagctacttgggaggctgaggcagaagaatggtgtgaacccgggaggcggagcttgcagtgagccaagatcgcgccactgcactccagcctgggtgacagaacaagactctgtctcaaaaacaaaacaaaacaaacaaaaaactacaaaagggtatcactacccactccagaaattttagcaacttgacattgataatacccagtattaacaacaatgtggagaaattgctggcaatgtaaaatgatgcaacaactctgagaaacagtttggtaacaacttataaagaggtaacatccactgatcatatgatccagtgattttactcctagataattatctgagagaaatgaaaatacatgttcacaaaaatatctaggacacaactttt

SEQ ID NO: 290619 - DNA, 592 bp, Homo sapiens
atataataacatcttcctctaagaaacagttttcaaagaaagaaaaggaaaatgttatggagaaattaaaggtcacaataatttgaaaatcactttaaatatggataggagatcagtaactgtcattcagttttggcaatggcatagataaaattgtttatggacttcggcctaatttccagacactttaactcctctcttttctcactcaagagtccttaccggaattataagtgaatgggaggatgctactttcaccaccatgattgacatgtgggatgtatagattgattaaaagaataggctctggagcctgagtttgaagtrtacttcctccttattaccagtgagaccttggtcaagtctcttaacctttccgtgcctcaatttcctcataattcctcataactgctcctacctcctggggttgtgaggattaaacaacatgatatacatctaacattattcagctagagcttggcacatactaaatcctccatgttagcaattattatcactagctttaatactatcagaccaaacaaaagtaatccactcataaattacatttgataactgatgacccagactg

SEQ ID NO: 290620 - DNA, 592 bp, Homo sapiens
atataataacatcttcctctaagaaacagttttcaaagaaagaaaaggaaaatgttatggagaaattaaaggtcacaataatttgaaaatcactttaaatatggataggagatcagtaactgtcattcagttttggcaatggcatagataaaattgtttatggacttcggcctaatttccagacactttaactcctctcttttctcactcaagagtccttaccggaattataagtgaatgggaggatgctactttcaccaccatgattgacatgtgggatgtatagattgattaaaagaataggctctggagcctgagtttgaagtgtacttcctccttattaccagtgagaccttggkcaagtctcttaacctttccgtgcctcaatttcctcataattcctcataactgctcctacctcctggggttgtgaggattaaacaacatgatatacatctaacattattcagctagagcttggcacatactaaatcctccatgttagcaattattatcactagctttaatactatcagaccaaacaaaagtaatccactcataaattacatttgataactgatgacccagactg

SEQ ID NO: 290621 - DNA, 481 bp, Homo sapiens
tagttcctgtttttgtatgacttcactcaattacatggatacacattgaaatctgaaaccacctaaagatttgtgatcttttcttgtgtaggcagtttctacaattctagtgatctgttggtcatttaaaagaaccactaaatgtgataatcagagagtaagaaatgctcaaaaaagcaatgggaaaagctttcagataaaataccctataactcccagacattttygtataagtttatttagcagttcagcttgagatatgtatgtgtttgtgggggtgattactatgactgttgaagggaggtagataaaggaagacattttataaattggagaaaaatggtgctaatagttcaataagataaatgcctaccttttaaagttgaattccagaagaaattgcaacacagaaactgacgcaacatttttttttccacgtcagaaaaacatgctatcttgcacccagagtggaagctgtgtg

SEQ ID NO: 290622 - DNA, 613 bp, Homo sapiens
ggatttgtgtttggggtgtcctagggctgtcagaatgcagttgtagttaaaagcaaaattttggagtcagacctgagtttggattctggatttaccccgtgctgtaagtaattgtgaattactttttcaaaagagtcagtgaaaattaatggtgaagagaagggagtatggaaacagaatgcccagttgcaacttcaactcccctacttctagatgagtgacttaggcaaatcacttaaccacactgtgttacagttttcccatctgtagaatgaggataaaaacagcacttaactgcagcaaagttgtaggatgcaacaacaacacacaaaaatcatttgcatttttatacattaacaatgaacaatctaaaaagaaaagaggacaattccatctgtaatagcatcgaaaagaataaaatacctaggaataaacaactgaagaggtgaaagatttgtacattgaaaactacaaaatattgctgmaaaaattaaagatacagataaaatgaaagacatcccgtgtccatggattagacttgatattgttaatatgtccatactacccaaagtgatctacggattaattgcaatccttattaaaatcccaatga

SEQ ID NO: 290623 - DNA, 537 bp, Homo sapiens
gggtcaacatcatagatcccaaaaagatcagagcccagggctgagaggaccattttctaacctgagggctcccaaacacattcagagatggaacatctggaagttatgttctctctgtagaaccccayggaacactgatagcaatttttttcccagcagataaccaaggaacaatttttctggctaaaactatggctgtcgtgggtatgccatttaacaactcagccctaaatattgtactttttaaaaactgtctttctgtcctataagaatgaaatcatctctatgaggacagtgacttcatcttactgctgccttcccggatggagcctgcacaagcatcctcagaggcaacatgtggtccaaatgaatacacctggtcattctagagttcttccaaaaaattcatctgccactactaaatctgttagtgacctaggtagacagcagcacacatttcagaaggaaattatgggcaagaagaatgctcagtagttaagaaaagtccaatccacaacatcatttcatcctctccat

SEQ ID NO: 290624 - DNA, 537 bp, Homo sapiens
gggtcaacatcatagatcccaaaaagatcagagcccagggctgagaggaccattttctaacctgagggctcccaaacacattcagagatggaacatctggaagttatgttctctctgtagaaccccacggaacactgatagcaatttttttcccagcagataaccaaggaacaatttttctggctaaaactatggctgtcgtgggtatgccatttaacaactcarccctaaatattgtactttttaaaaactgtctttctgtcctataagaatgaaatcatctctatgaggacagtgacttcatcttactgctgccttcccggatggagcctgcacaagcatcctcagaggcaacatgtggtccaaatgaatacacctggtcattctagagttcttccaaaaaattcatctgccactactaaatctgttagtgacctaggtagacagcagcacacatttcagaaggaaattatgggcaagaagaatgctcagtagttaagaaaagtccaatccacaacatcatttcatcctctccat

SEQ ID NO: 290625 - DNA, 1153 bp, Homo sapiens
gaagctgtgggttcagggtggacggaggcataatggtcaacattctcattttattcctcatacttattgattgtttggcttttgttttttatttttttacagtgggagtatatttatgtattgtagattttttttctaaaatgaactaaaactgggaagctggggctttcatccaacagtgttaatttttggaagtgtaacatgttatccctaagtgtgtcctgattgtgcctttttattgtgcagattttaacagtttgctcggttttccatcccagctttatctcagatgtttccaactacacttgcarcaatgagaccaataagggctttgttgtcctagacccaagagctgttctgggagtaccggaggagggctgggctgtagtgagctggcagctggatcctatcgagcacccttttttcccagacacaaaagaagaaccacagtagccacccagagtggagtctggtgctgcggggcacttctgggaggtcacagaaagggatgtgggacaaagagtccctttttgtggtgtgtcttcttgttagttccatgaccgactttgtcatcagaagatgagcccaggctcccatwctaaatttagaaccaaagatgcttaagtccattctatataaacactctactcccaggcaccttgaacacactcaggctgccaaaccacagctggaagttgtctggaccccattctcaaatgttgaccaccaaacaaagagagatagcatgatctaaaatagctgagtggtgtggagagggttaaagctagaagacaggagcactcaccactcactagctccatcctccacctattcactgcccctctctgggccttggtattcccttctttaaatacagatattgtttacatwtagtccacaggggtgtccaaagaccaagagtgataatatatgtaaaagtttgaccaaagataaaggataatttccattattattatgactactagttatccaataaaaaaaaattaattggcatggccagggccttaaccaaaattaagaagatgaatttttccagtttacaacaaagattggccatgccaaaaagatttgctgaactatctcagtttacagatgtcagcaaaactcaactcttggggtgtagttgatgtgc

SEQ ID NO: 290626 - DNA, 535 bp, Homo sapiens
ccaaaatgcaagctcccaggcaggaaacttcatatccatagtagattttccacatgtcactgtgagttgaaagcagctcccaaaagaggcaacgtttgctccctgggatcactaaagacaacaatagtgccaaaggggggttttttgaggaagagtctccgacaccaacttttttaagacatggaactgagaccagctggtgaggggcagggcaggcagtgatattttattctaaagagtttgaatacagataatcaaagtaaaaccaggaatcccttcctcagatagcagatatctgagcctcagatagctgagcaaacataggccctttctaccagtgcactaaaccagcgtcagcaaactttttcttaaaggctggagagtaagtatgttacrctttatgggtaagaggcaaatggaggatattatatggttacttctcaatcaataaggattccgaatataaaagctgttcttcctgtgcacttataaaaacaggcatcaggacggacttggcccacggccgtagtttacc

SEQ ID NO: 290627 - DNA, 535 bp, Homo sapiens
ccaaaatgcaagctcccaggcaggaaacttcatatccatagtagattttccacatgtcactgtgagttgaaagcagctcccaaaagaggcaacgtttgctccctgggatcactaaagacaacaatagtgccaaaggggggttttttgaggaagagtctccgacaccaacttttttaagacatggaactgagaccagctggtgaggggcagggcaggcagtgatattttattctaaagagtttgaatacagataatcaaagtaaaaccaggaatcccttcctcagatagcagatatctgagcctcagatagctgagcaaacataggccctttctaccagtgcactaaaccagcgtcagcaaactttttcttaaaggctggagagtaagtatgttacgctttatgggtaagaggcaaatggaggatattatatggttacttctcaatcaataaggattcygaatataaaagctgttcttcctgtgcacttataaaaacaggcatcaggacggacttggcccacggccgtagtttacc

SEQ ID NO: 290628 - DNA, 570 bp, Homo sapiens
gtagctcaaactatttggtgtgaagtttgagctctgtatttcatttcatagctggacataagcattgctattttctcgactagtggttctcaactggtggcaattttgctccccatggaatatttggggatgtctggaaacatttttggttatcactactgaagagtggggatgctactggcacctaaagtgtgaaggccagggaagctgctaaatatcctgtaatgcacaggacaatgcccccctcctcccacagmaaagcgttatctggccctaaacatcagtaatgcaaaggttgagaaatcctgttctagacagactttctacattaaagagcaacccaagggaaattattcctaaaggttttcctctgaaagggaacttgacaattaacagctcaaagtccctttagactctattctatgtggttggataacccctgggccttctaaatatatccgtatcactgtgcttgcagattagcaatccccctcccccatcatgagctcctcccccatatacaaaggagacttgagccaagttctttatggccccgccctaacactgctg

SEQ ID NO: 290629 - DNA, 582 bp, Homo sapiens
ttggtgtgaagtttgagctctgtatttcatttcatagctggacataagcattgctattttctcgactagtggttctcaactggtggcaattttgctccccatggaatatttggggatgtctggaaacatttttggttatcactactgaagagtggggatgctactggcacctaaagtgtgaaggccagggaagctgctaaatatcctgtaatgcacaggacaatgcccccctcctcccacagaaaagcgttatctggccctaaacatcagtaatgcaaaggttgagaaatcctgttctagacagactttctacattaaagagcaacccaagggaaattattcctaaaggttttcctctgaaagggaacttgacaattaacagctcaaagtccctttagactctattctatgtggttggataacccctgggccttctaaatatatccgtatcactgtgcttgcagattagcaatccccctcccccatcatgagctcctcccccatatacaaaggagacttgagccaagttctttatggccccgccctaayactgctgtctgttcaaatattgccaagacttgg

SEQ ID NO: 290630 - DNA, 617 bp, Homo sapiens
ctgctgtctgttcaaatattgccaagacttggacattgtcacaagtaaagtgcttgagaatgatgcagtaatgaaggcagtgacctgattgggtcctacctaccctgtcagtaaggcagagagagatctataggacttgtatgaaaagtgtttcagcttcaaacaaccaataaacagtgctcagcccctctgtctgccttccttgctgcagtttgacatgcaattaacacacagggattcaactggactacagctcaaggccatcgaggttttgttcttgccaacttgcagagaattcctggactagcagaccagttggacaagggcctttggagctagaaggygactttcattaaaatgactcagtactctccacaaccatccctgagatgtgtgcttcagttctgttcagactaaaccacttcacagtgcagctagcaaaaagaaggcttttaacattcacttgtagctattctgaacaatgataaaagatgttaccaagacttatttcaaacagtttactgtgtgtcagttgcatagaacttagatgatgcaagatcactcccaggaggtatattctcctgtttactccctgaatctgcgtgaggtgcacaacc

SEQ ID NO: 290631 - DNA, 617 bp, Homo sapiens
ctgctgtctgttcaaatattgccaagacttggacattgtcacaagtaaagtgcttgagaatgatgcagtaatgaaggcagtgacctgattgggtcctacctaccctgtcagtaaggcagagagagatctataggacttgtatgaaaagtgtttcagcttcaaacaaccaataaacagtgctcagcccctctgtctgccttccttgctgcagtttgacatgcaattaacacacagggattcaactggactacagctcaaggccatcgaggttttgttcttgccaacttgcagagaattcctggactagcagaccagttggacaagggcctttggagctagaaggcgactttcattaaaatgactcagtactctccacaaccatccctgagatgtgtgcttcarttctgttcagactaaaccacttcacagtgcagctagcaaaaagaaggcttttaacattcacttgtagctattctgaacaatgataaaagatgttaccaagacttatttcaaacagtttactgtgtgtcagttgcatagaacttagatgatgcaagatcactcccaggaggtatattctcctgtttactccctgaatctgcgtgaggtgcacaacc

SEQ ID NO: 290632 - DNA, 530 bp, Homo sapiens
tcagtcacacatatgtcccaaaatacattgatactttggtctttcgaygtcacctcaatggtccagccatacaacctgcctaaccgaaagctgagcacattttccatcaccaggccttggtactcatggcttcccgctcctgcactaacacccatccttctctctctgcctggctatttgactcactcaacctccaaggcattctccatgagctccttcccagtttctagagccagaattctttggtgtgtttgttcatttgtgcctccccagcattcttctgtctccctcacagacaggagaaatgcccactcatactcactagatggatgccgtggtgatcacatcctgggtaaactaccgccctattactgacagtaattacatcacaaagtgcccaccatgggccagacccaaaggaggagtcttatagacattatctttcattgctgaccactccatgtttcttcattagatagcagtgttccttgctaagtcagaccagggaaggatcatttccaaagaaaaag

SEQ ID NO: 290633 - DNA, 520 bp, Homo sapiens
gtgctccctcctcctaaagtggcctgactacctgctatttttctgtaggtttttataaatctctctgctctgtctcttaagaggtttgtcataaccgtgtcctcattaagccctttttagaacacagactggccttttcaaagaagaggtccttcaattagcctatttagaagaaatggaattttcattaggggcacagacttgtataatacacagagaggtatgaccttaacaacctctcagcctctttcacctgaggccaggccaactcccttgacactagccaaggattcgtttttacacttcccaggcatcgccctgctttgctccaacccccatcccctgcagtatttgaccacgtggcacccacagttacctaaagtaggatgcaaayaggaatgccttgagagacttgaccatagcccccaaattcctaagcttatgacttgcagcacctgcccacgaggatcgatgtgtcttttggcttcaatggggagctattggattctccaccttagga

SEQ ID NO: 290634 - DNA, 533 bp, Homo sapiens
aaggggaatattggacattggcctcaagaacccaagggatgttgatgggataagttgtagggatgggcaagggcataggagcagcmtagacaaaggcaggtcaaccacggaggtgtggggctccatcatgagacatggagtccaggggttggggaaggcatggaggaaatgtttccccaaggccttggatagtggggtcagtttatggggcgcctgtggctttgcctgtgggtggagagagaactgctaaaggcatcaagctcatttggacaaataaagatttctttctgaggcttcttgtgtgttctttagctccacagcaagaccacctagtcctggctgtacttcctccttgctccatggtgaccagtgtatatgcagttggtgtagatgtaagcactgcccccccaccaccccgtgccacacccggctctgtggtcctcccctccaaatgtctcctcagccgcagggtccacccatgatacttttccaggcaagagagaagtcgcctgaaaacatttagctgggcacag

SEQ ID NO: 290635 - DNA, 310 bp, Homo sapiens
tgagtgtgagcacagacactgcctggacagtggggcaaaggggaatattggacattggcctcaagaacccaagggatgttgatgggataagttgtagggatgggcaagggcataggagcagcatagacaaaggcaggtcaaccacggaggtgtggggctccatcmtgagacatggagtccaggggttggggaaggcatggaggaaatgtttccccaaggccttggatagtggggtcagtttatggggcgcctgtggctttgcctgtgggtggagagagaactgctaaaggcatcaagctcatttggacaa

SEQ ID NO: 290636 - DNA, 533 bp, Homo sapiens
aaggggaatattggacattggcctcaagaacccaagggatgttgatgggataagttgtagggatgggcaagggcataggagcagcatagacaaaggcaggtcaaccacggaggtgtggggctccatcatgagacatggagtccaggggttggggaaggcatggaggaaatgtttccccaaggccttggatagtggggtcagtttatggggcgcctgtggctttgcctgtgggtggagagagaactgctaaaggcatcaagctcatttggacaaataaagatttctttctgaggcttcttgtgtgttctttagctccacagcaagaccacctagtcctggctgtacttcctccttgctccatggtgaccagtgtatrtgcagttggtgtagatgtaagcactgcccccccaccaccccgtgccacacccggctctgtggtcctcccctccaaatgtctcctcagccgcagggtccacccatgatacttttccaggcaagagagaagtcgcctgaaaacatttagctgggcacag

SEQ ID NO: 290637 - DNA, 522 bp, Homo sapiens
ctgtatgtggcttaacttaataaggtttttttttttttttttttttgcttttctcatataacaaggaatagaggaatgggcagttcattatgcctgcagctgctcaaggagcgatgtttcccaatcctacctgctcctttaccctttgtatgtgtcttcattcctcaacgaccgctccaccattgggtactgaatcacatcccaggtagagggaccctgaagagcaaaaacatggycagttgagtcaatctccatgggaatagccccatccaatgacacctgcctatagttcatttgccagaaccgggtaaaacagacccctactggagtctgggaaatgagtgtttctaactggaaataccactgaactggacaaaatcattagaaaggaaggaaaatagcatagctaccgggtaagaaactagcagcaccttcagatgatattaacatccccattttaaagataagaagactgattcagagacattagcataattagaaaggaacagagatgagatttga

SEQ ID NO: 290638 - DNA, 548 bp, Homo sapiens
aaagatgacagtttccctctcctcccttctcaggaaagataccagaaccatgatcctataaactckcttctcaatgggagctctgagtttcatgtgcatagatcaaagtaggcaccaaacccgttccgccagtttcaagggccactgagttggcacaggtgcattatgggcttaactccagttccttgtcttgatataagatcaggtctccttagtgacaatcaataatgccaagtccacatgttctttaaaagtcacatatctgtcatctctaggatccaggagtgtgcaggtcctactgccaccctctttcctaaaacatcgcacagattaagaacacctctatactgaagctcatttatgagcatgtgtggatatgtcagtacttaaataaataaatttacttttatatcaaaggatccttaattatgctttatagatgcatgtaaacaaacaagcatgagtgaaaaagatgacagtgtccaagtgactctgaagacggttggcaaagtaccaaaatattccaatcccttattagatttattttg

SEQ ID NO: 290639 - DNA, 548 bp, Homo sapiens
aaagatgacagtttccctctcctcccttctcaggaaagataccagaaccatgatcctataaactctcttctcaatgggagctctgagtttcatgtgcatagatcaaagtaggcaccaaacccgttccgccagtttcaagggccactgagttggcacaggtgcattatgggcttaactccagttccttgtcttgatataagatcaggtctccttagtgacaatcaataatgccaagtccacatgttctttaaaagtcacatatctgtcatctctaggatccaggagtgtgcaggtcctactgccaccctctttcctaaaacatcgcacagrttaagaacacctctatactgaagctcatttatgagcatgtgtggatatgtcagtacttaaataaataaatttacttttatatcaaaggatccttaattatgctttatagatgcatgtaaacaaacaagcatgagtgaaaaagatgacagtgtccaagtgactctgaagacggttggcaaagtaccaaaatattccaatcccttattagatttattttg

SEQ ID NO: 290640 - DNA, 480 bp, Homo sapiens
attgctaattctttgaattctccatagcactaccttatttctttagcagagtgctcagtaaatgttaatttatatatatatcatatatattatatatgttgttatatattatataaacacatatatgttaatttatatatacataacatatatgttaatttttatatatacatatgtgtgtgtgtatgttatatrtgtgcatatataccatattttacatataacgtgttcctacactatatgccaggacagaaaaccaggcatttcatttgattgagggttgtcaaaccaataatctgccttcctactaattcctaaacatggaggcgatcttatatatcacctggtgatgcctttactttactgatgaagaagcagcccagcaaagttaattgactttataaagcagttctatggcctgaaccagaactcaggcttctcacttggggtccagtgattattttgctacagaatgctaag

SEQ ID NO: 290641 - DNA, 430 bp, Homo sapiens
gcctatctcaccagtcttctcttgctagttctgttagctcaagcaatagtggcctttttttttttttcagtccttcggaagtgctacctgactctttcttgctcctgggccgtcttgtccaacagcatcttgtctcatctgcctggagtgattttcacctccagcaccagtaacgcctccctgtttgccrgaataacttttaatgtccaggcttaaacatcttttttatccgtgaggtttttcttcccatccctgtctaggttaggacccctggtatatgctcctcagtttccctctttcttgacactcactgcattgggatgtctgttccccattagactccatgggatgtttgtgtgtttgtagagggctggggtggggaggggtaaggggcaggaggtctacttttttcagtactgtattcccaggg

SEQ ID NO: 290642 - DNA, 632 bp, Homo sapiens
tctacagggtcatttaaatgacaaattccttggccttatatggtagttcaactctcccaaatgtttttggaacccatctactttgtaaaaggaggtaagattcaatcttcaatggcttgtttcagcttgaattaaaatgtgacatacctgcttcacttgttcagaagacttcagtttaaagagatcttaaacacattttttagtgtcttctttaagcttctgcattgaaaaagatctggaagacaggaatagtgcttgctttttggaaggaatcataccagatgagaggcacagacttcactaaaaccaaaatgatgtgtagagacacaatgttccattttcaggaaggtttgtctggactggaagaaactgctgcctagtcctgtcacctggaacaaggggggatttcatttgccaatgaggggccctttaggccctgccagtcttggagtttgtgtacctgggtcagccaagcaagaatcaaggagggtacaatgcacgcattcaaagatcagtgtgttcttcttggcaagtgtgccttttgggcactgtttgtccccagcacaaygcaatccccacattctcaaccttgtgacattccaatgtctgctaactgctttcttcataccaaa

SEQ ID NO: 290643 - DNA, 632 bp, Homo sapiens
tctacagggtcatttaaatgacaaattccttggccttatatggtagttcaactctcccaaatgtttttggaacccatctactttgtaaaaggaggtaagattcaatcttcaatggcttgtttcagcttgaattaaaatgtgacatacctgcttcacttgttcagaagacttcagtttaaagagatcttaaacacattttttagtgtcttctttaagcttctgcattgaaaaagatctggaagacaggaatagtgcttgctttttggaaggaatcataccagatgagaggcacagacttcactaaaaccaaaatgatgtgtagagacacaatgttccattttcaggaaggtttgtctggactggaagaaactgctgcctagtcctgtcacctggaacaaggggggatttcatttgccaatgaggggccctttaggccctgccagtcttggagtttgtgtacctgggtcagccaagcaagaatcaaggagggtacaatgcacgcattcaaagatcagtgtgttcttcttggcaagtgtgccttttgggcactgtttgtccccagcacaacgcaatccccacattctcaaccttgtgacattcmaatgtctgctaactgctttcttcataccaaa

SEQ ID NO: 290644 - DNA, 540 bp, Homo sapiens
gaatccaggacactaaaaaaggtagcaggaagagtaatgtatccttgaaaatcattaactctccctaagggcggataaatcatggaaaattttggaccaatggaaaacaaagaaggtatgagcatgttccattctatgaaatgtagactttctggtttgagaatcagagagacttggaytttcttccatgtttcctcctcaaataacagtaaagtaaaggtgagttagaagaaatccatagactcaccctttcttgcctcatttctatcctagaagctcaaggaccaattacatatagtcatggtaagcccaaaactgcaggacagtgcagggctagggtagctgaatatgctaaataacaaaaagggcagaacaaaccaatacacattaatctcggaacttaaaaatagttattaaaaataggtttaactaaaatttggccaatacagtgttcaacactggatttatgtaaagtgtttagggctgtacaggacacagaacatgtggatttacagtctaaactacagagcaaagtcaaca

SEQ ID NO: 290645 - DNA, 581 bp, Homo sapiens
gccaagtcttaatgtgcactcgctcccttcacgagcacctttgaatttctaatccttttgtccccacatctcctgccttgtcactttcctcaaggaaacaggttataaagcactggaatggggtggagacattgtctccttcattcagttcaaagttcttttaaatctttgagtgccagatcccaggaatttcttagcctacattggtgaagsgattggctcatggatgcttcgcttgtttctgtaagaagcgagtctagaatttagtctcctaaatgtgaaagagacagcaagaagaatcattctatcagggcagagtgtagggaaaccctaaggcatagtgcagtaacctggagcaagtggtcgctgaagatagttagcacccctaagccaacaggggccggggagggactgcctggcagggggtgtggtctgccatggagggaggctgacagcctgggtccaccttactagagaggaaagaggggaaaaaataccctagcctcactctccccactcctcagatctgcctgtgttccctatgggctgaatcccacaggagttagagggaatggacccct

SEQ ID NO: 290646 - DNA, 547 bp, Homo sapiens
ataggtcttgctcttaaagacattagtatcttgtgaaagcaaaagcacaaatccattgtgagcccataagaactatgcagatggcttggtgtggtgactcatgcctgtaatcccagtactttgggaggccgaggctggtggatcacctgaaatcaggagttcgagaccaacctggccaacatggtggaacctcatctctactaaaaacasaaaaaatagctgggggtggtggcaggcacctgtaatcccagctactcagaaggctgaggcaggagaatcactttgaacccggcaggcagaagttgcagtgagccaagaccacgccattgcattccagcctgggcaacaaaagctaattccgtctcaaaagaaaaaaaaaaagaactacgcagctgtagcaactaaatgggaagcttccatgggaatgaaatcttagcaaagctctcctggcctctatctctcagcaaaagcaacccgatttgaaaatagaagagcaaatctctcagctagcttcatgtcagggatggactggaggagaggagaggag

SEQ ID NO: 290647 - DNA, 547 bp, Homo sapiens
ataggtcttgctcttaaagacattagtatcttgtgaaagcaaaagcacaaatccattgtgagcccataagaactatgcagatggcttggtgtggtgactcatgcctgtaatcccagtactttgggaggccgaggctggtggatcacctgaaatcaggagttcgagaccaacctggccaacatggtggaacctcatctctactaaaaacacaaaaaatagctgggggtggtggcaggcacctgtaatcccagctactcagaaggctgaggcaggagaatcactttgaacccggcaggcagaagttgcagtgagccaagaccacgccattgcaytccagcctgggcaacaaaagctaattccgtctcaaaagaaaaaaaaaaagaactacgcagctgtagcaactaaatgggaagcttccatgggaatgaaatcttagcaaagctctcctggcctctatctctcagcaaaagcaacccgatttgaaaatagaagagcaaatctctcagctagcttcatgtcagggatggactggaggagaggagaggag

SEQ ID NO: 290648 - DNA, 600 bp, Homo sapiens
tgataaacatgtgaattcaggtaaccctttaatacactgatttattttcctttggacagatacccagaagtgggactgctggatcctataggagttctctttttagttttttgagaaatctccataccgatttccatagtagttgtactaatttacattcccagtcgcattgtayaagagcttcccatgctccacatcctcaccaatatataagttttttttgtctttttaataatagccattctaatagaggtgagctgatttgattgtggttttaatttgtatttccctggtaagtagtgatattgagcattttttcatacacctgttgtccatatgtcttcttttgagaaatgtctattcatgtcctttgcccacattacaatgggagtattaattttttaattgttgagttgttttagttcacggtaggttctggatattcgtcctttgttggatgaatagtttggaaatgttttctcccattcaaccgtctcttcactccactgtttccactgttgtgcagaagctttttagtttaatataatctatttttgcttctgctgtctgtgcttttgcagttttagccataaaatcttt

SEQ ID NO: 290649 - DNA, 550 bp, Homo sapiens
ccacttattatcatctaactagctgtgtcaaacctttttggaagtaaaaaggtataagtaaagtaaaattaaaacacacttgcaacataaatcctgtgcatgagctgacatgaacatagccccaaagttcttcagatgaaggtttttaaatttttcacttaattccctcaacaattaatatacttccccttttctcacaaaaaattgcggctgggtgcagtgactcacacctgtaattccagcactttgggaggccaaggccagtggattgcttgagcccaaaagttggagaccagcctgggcaacatagtgaggctttgtctctacaaaaaatagaaaaaacgagccaggcacagttgcatgcacctgtagtcccagctactagggaagctgaggtgggaggattgattaagccagagaagtcaaggatgcagtgagccatgatcgcaactctacactctagcctgaggaacagagcaaggctctgtctcagaaaaaaaggatagggtatcaagttataygttgcagcacaccactgaaagagttctca

SEQ ID NO: 290650 - DNA, 513 bp, Homo sapiens
tttctttaaccacattgtctcctaagaagccaataatgaagtagtgcttatttgttataataatttcagactcccaatgaaaagagaaattccatgggatttttcttttttccttaggcgcctttactagctcataaacacagggctgaacaagggattccttttacttttgactacaagttttccctgtgtggcaacatatctgaaaatgccatgtaacaatacacagagagataactcagtaagaaacactatggtgaattactgcggcaagcaccaactatcctttgcacaccaaggttatcattaaatttataaagacaaatgaatgtagyctctagatattttcatgagatctttatcaataaccagctgctcggcaaatctcctactactaagctcaattccatagaggtagctgcagcacagggaagggggaaaaagtcacttgtcccagaaagaaaacctgtgtttgactgctgatgctgggagtgggaccatcagcaaatactc

SEQ ID NO: 290651 - DNA, 592 bp, Homo sapiens
aaagctaccaagtatttgcacttcttaattatttattcctgcagagtagacaagagctcagatctggacaaagattcagatttaatgaagtcctaattctggcacttaatggctgtgaaatcttcaaaccctcagcaccaccagatatgttttccatctgttatttccaattttgcttatcccttccaaaatagtaacaaaactacttatcttctttagtgcaaggttcttcttagagcattatgattagagcaatggcaaaaggcttgtgtattgttttttggaactataccacttgyagtatttctctgaagaggtgcaaaatatcaatacttagaaaactccctccaacaaggcactaaaagaatataatgcaaatagtgacagaaaccaaattgaggtaaatgaataaggtttatggcttattgtacttaaaaatcaactgtaagaacagagttatgtcacaggctattttctgccttctaacaagcccaaagttatgctgctaattagctgatttcattttcccatgaaaccaccttgattgttgaacttgcacatagcaataaccaactactgagattcaagtcac

SEQ ID NO: 290652 - DNA, 599 bp, Homo sapiens
ccgaacatcaccgacgtcaaggaccaaaggtagataaatccacaaagatgaggaaaaaccagtgcaaaaaaggctgaaaattccaaatccagaacacctcttctcatccaaaggatcacagctcctcaccagcaagggaacaaaactgaatggagaatgaatttgacgaattgacagaagtaggcttcagaaagtggataataaactcctctgtgctaaaggagcatsgtctgacccagtgcaagaaagccaagaacctggagaaaaggttagatgaattgctaactagaataaccagtgtagagaaaaacataaatgatgtgacagagctgaaaaacacaggatgagaactttgtgaagcatacacaagtatcaatagccaaatccatcaagtagaagaaaggatatwttgttatggaaaagcatagtgctgaatctattttctacacaaaaataaaaggaaacgttwtgtaatttaattgtatttcactagagacagaggatggctatctctgggaatgggaattggacttcaattttacgtgtagtgtttgaattctttcctaaagaacaacataaagctgatatgacaaaatgct

SEQ ID NO: 290653 - DNA, 564 bp, Homo sapiens
ctttcttctgtttctcctttcataggtctcagagctgcatcatgggctgcaggcttcctccacctcctccagctccctccactttgtcctttatctttcacaggctcttctcttagtaaaccacttgcacttctaattccagttggcatctgtctcttacagaagcagggtatgatgcttttaagtctgtatgcctggcccactgtattagccagggttcagagaaacagaagcaatatgatatatctrtatatgtagatatagcctatagatatatagatatatctatatgtgcagatatgtagatatagcctatcagtctacaggatatacatatagacatacatatagacacacacacacacacacacacacacacacacatacacacactataaggaattggatcatgcaattacaaaagctgaaaactccctagatctgtattcagtaagctggagacccaggagggccaatgtgtagttccggtccaaaagccaccaggctcaagacccaaaaggagcttgtgtttcagtccaattctgaaagtcagaagggactaat

SEQ ID NO: 290654 - DNA, 564 bp, Homo sapiens
ctttcttctgtttctcctttcataggtctcagagctgcatcatgggctgcaggcttcctccacctcctccagctccctccactttgtcctttatctttcacaggctcttctcttagtaaaccacttgcacttctaattccagttggcatctgtctcttacagaagcagggtatgatgcttttaagtctgtatgcctggcccactgtattagccagggttcagagaaacagaagcaatatgatatatctgtatatgtagatatagcctatagatatatagatatatctatatgtgcagatatgtagatatagcctatcagtctacaggatatacatatagacatacatatagacacacacacacacacacacacacacacacacatacacacactataaggaattggatcatgcaattacaaaagctgaaaactccctagatctgtattcagtaagctggagacccaggagggccaatgtgtagttccrgtccaaaagccaccaggctcaagacccaaaaggagcttgtgtttcagtccaattctgaaagtcagaagggactaat

SEQ ID NO: 290655 - DNA, 495 bp, Homo sapiens
gtgtgacaatccagatatatgtgcctcgtttacccacagaagcggtctcctgtgggggaaatgtactgtgacatccattttgataggtaacaggcacattaagatggaattacctcagctggaatatgactgtgataacaggaatagagaaacactggaccagraaaactacggggcatccttagggaacatgctcagttcccttaaaaacatgtacagtcatttgttcagaattggctggggggagttgaaatgatcaatacctcttcccaaggtatccgtgtattctgcagacatatcttcggcaaataattgctcaaaatataactgtccaagcagtatttggcaagtattggatctgaagtctgattcacttcataaatttgcaaccttagtgacatgcaacacaagctaattcactattcttctgcttatttttccatatatccaatactgaatagtaaacaaagtctgtaaagaggggcctgaagatgt

SEQ ID NO: 290656 - DNA, 543 bp, Homo sapiens
acaggcttgagccaccgtgcctggcctattttaacttctaaatatgttactatttaacttgatatagtattgactaaatagtcagtattttatgcaccacagaatacatgtgtttgccccaataatgctactggtttgaaataaaagtatatagaaaacacatgaaagtcagatgtaacaacctataggaagctaagcgttggttacaaaaatgaactgaaggctgatatcactaatatccataagagtcatttatataaataaaatattagattgttatttttcaartcagggaataaattaatttcaaaatagtaggaaaaaaagcatgaaatcaaataaaatcattattggggagaaccatcatcataaaattgagtaagcatatctactagagagttctaaaattaatacattccaaattaagcctcattacaaatttgcaatttaattttttgatagctaacccatttacatggctcaaaatcaaaacaacgtgaaaagtataaatggtgaaaaaaagctcctacccctgtccccagc

SEQ ID NO: 290657 - DNA, 494 bp, Homo sapiens
gaggaagagagcccctggcctctctcctcttgcccttcattctcctgccagtgcctcccaatgaccaactctacctagaatccggagagcctggaagcagggcagagaagactggaggatgcatctgagaatgcgagcaaagaaaatcactagcctatggggtgaactggaatggaaagctggttttaaaaaaaccctatgccttcattcattccctgctccccaaagatatgcgctggcccactcatctcttgtcaattgcattgataagctattagctgaaggtagctactagctattggaggttttagatgaggaagtggcaaaatataaagctttggaaagctttgcctatgttyacattccagctctgccactccttaactgcaaatataggctagttacttaatttctgtgcctcaattttcttttctataaaatgagggaagttatggtagctaccgcatagcattcttatacgaatcaaataagat

SEQ ID NO: 290658 - DNA, 648 bp, Homo sapiens
acattcgttttgaaattcctgcaaccaagaatgctttgcttttttgataaacaaaggacaacaacctgttcatatctttgttgaaggaaaagctgaaactccaaatgtgtttaaatctcatacaatctaaatctttatcccaataacgaaaactgtcatcaacaaatcttggtctaagatctttgaggctccataaagattattctttatyggaaaaacacctcaaatttatttccaaaaggaaagataagatgtctcttgaataatagcatccacaaaataagaaattttcctagtagtacgtattataatatgtgacatttgtatagtaccttatggtttgcaaagtatttaatatgcttcatcttatttgacaactaagcaaagctgaattttcaccagaatgttatactagataatatacttccccagagaggaaaaataacgtgtcggttttaaacatatttataaacaaataatcaatcttaggtacttaggcagtaagagggaggccatggttgtcatattgaataactgtgtagttatgtagaaatgatgacagttataagaataattaacacggattgagcctttcctattcatgtggtactggtttgtgtacttacatgtgtcaacctgcttaatgct

SEQ ID NO: 290659 - DNA, 595 bp, Homo sapiens
cataatgttatagactaattgtttgtgccctcaacagtcaartagacaagaaaagtttctgagaaaattgtcctctcaccattgctgtaactgaacaaaggaatatgaataagcagaaacaaaaagaaagaagcccaatactacagtcttaattattaaaaatttataataacttttaataatatagtccatacaatggaatattattcagccataaaaatgaatgaagttctgatacatgctacagcatggattaatcttgaaacattatgctaagtgaaatgaaccagacacaaaaaggcaaatatatgactgcaattacatgaaatatctaaaacaggccaagttcatagagaaagaaagtatattagagttaccaaagatgaggaagggggaaatgtgggggtattgcctaatgaatataaaggttctgtagggggtgatgaaaaagttttgaatgcagacagtgttgacagttgtacaaccactgctattcaacacagtactggaatttctatgcagagtaataaggcaaacaaaggaaataaaagatacagagatctaaaaggaagaaataaaactgttccatctgcat

SEQ ID NO: 290660 - DNA, 454 bp, Homo sapiens
gattatgaatgaattatctcttataattctaatcatacagttgcacagttctctgcrttttctctttagagcagtttttaaaatgtgttttggccttgtctctgctattatttgagatattaagtaaagatacatttcatgagccaaaactaacagtacagcaacattcctctccttgaagccagcattattaaagcatcacaaattaacaaaaccttcaatctcaggaaacaatattcagaactactaggattaggttaatctcccacaaaaaaaatgtgtctgtgcattgcttaatctgggggtttaacatttaacttttttaaaaaaaggcaaatatttattaatccctagtgcctacaatggtatccaatactcagtagataataagtatctattgaaagaatgccataaaacagatcagactgagataatgagagagtgtaagagaaat

SEQ ID NO: 290661 - DNA, 553 bp, Homo sapiens
cagttcaaaggcactgtgaattctgctcttgttccccattctacctgctattattcacttttcagagctgtgaaatagtggctgtgtgaattctgtccatgtagggtgtttttcttgcattgagtaggagaaacagggtagagtgtgctcactctaccttaaccagaattggaactgatttttttgtattcttactgacttgaatgaagctccaaactaagatgactcaaaaaatccttctgagtccccacatcttgatctcaacatactaattagacagasttgttcaatatgcccagatattggcatatagcatcacatcagttaaagtcaggtttaatactgctatgccaccacatccctaatagttgtcaaatcctttcacaccaaaacctataattctaaccaagaaccattgcaacccattaattttaccagctaagaaaccaagtatgctagagacaatgtttgttattaataattctcatgtcattttcctacttcgtgtgtatacagaagacatttcctaaccccattatagttaattatgtga

SEQ ID NO: 290662 - DNA, 462 bp, Homo sapiens
acagaaatgcaagaaagaagaccacaaaacaaccaraaaaccaaaaacaaaatggcaagagtacatccttacttaataataacattgaatgtaaatacactaaactcaccaatcaaaagacacagactaactaaatggatgaaagagcaagacctattggtctgttgcctaaaagaaacacacttcacctataaagacacacaaagactgaaaataaacagatggaaaaagatatcccatgccaaagaaaaccaaaaaaagagcagaagtcactatacttgtatcagacaaaagagatttcaagacaaaaactataaaaagagacaaagaaggtcactatataaagataagggtgtcaattaagtgagaggatataacaatttcaatatatatgcacccaacactggagcacccagacatataaaggaaatattattacagctaaagacaaatataggttcc

SEQ ID NO: 290663 - DNA, 574 bp, Homo sapiens
ataaaaaccgctggggatggccaagacgagggggctgtggtcttgctggggtggaaatgaagccctcaaccccatactcttcctaggcttgggaggaagcatcctctggctcttcctttccacagctcccagaatctggaagtccatttcaggctggcgaggcccctggaatccttagttcagctgcccattggatgcaggaatcccttctccaatactgccggcagcaccacaggtgggcaggccsagcccaccagaggcaggctgtcagcaggcatcctctcgagtgttcctctctccagctcatgacactccccaacccccaaaagctggccaaacccttttgccacatgtgggtctaggtcacacaggcctggttgaatcctgtccctcctcaggaggcctcgctccctcaggaggtcaggagctgggctgagcagcatagtggggatatgcgggaagcacaaggggatggggatggggacagggactgggatgggctgtcagtgctaaagatgatgaatgggggaggtgaggcgggaggcccagtgttatcggcagaggatggcgggtg

SEQ ID NO: 290664 - DNA, 392 bp, Homo sapiens
gtcttgactatttgaatctgctgtatcagcctctgctctgtgttctaacaagaccttggatatacctctatatatacttggcaaatgctcaattccttaccctcctgtcggctcctggagcctgtccccacttgtctgcagtttccgtctttgacccctttcccagaagtgagcctagagtagagaaggcaaagtgagttgagctgaggtgagaagagaggagatgaggtraggaagatcattgagacttcagcttggcccagcccaaccagacccacagtcagcacagcaattgtccggctgaaataacaagtcagagacgaaaaaactggccatccctctttgtttactcagcttttttcccccctttttctttggacaatgccctgctg

SEQ ID NO: 290665 - DNA, 570 bp, Homo sapiens
ttattttcttatttatttattcattcattcgttcattcattcattcgttcattcactcatccatccattcattcatttatttaggacaagggtctcactctgttgctcaggctggagtccagtggcatgacagcctccatctccctgggctcaggtgatgctcccacctcagcctcctgagtagctgagactacaggtgtgcaccaccacgcccagctcatattttttggtattttttgtagagatggggttgtgccgtgttgcccaggctggtctcgaactcctgggctcaagcaatccacccaccttgkgctcccaaagtgctggcattacaggggtgagccaccacgcccagccctgaatattacagtatgaccagagggaaaataactctaagaggacatagggatgattccagagaggtaagcaagggttagatgatgtagggcctagtaagctcagttttttgtcctgttggagacatgtttccatgaaatcaactaccatctatagtctattaattccaaattttctatctctatccttgagcccctcttgggaaatcagacc

SEQ ID NO: 290666 - DNA, 483 bp, Homo sapiens
aatcacccatcttgagtgcggagaactataataaaatttagaatctctgagttttgaattgaaactctaggtccatcttacatattattctcctgcctctggcataagtattttagttattatgcattgaatcaggyttacatgcaagttcttaaataaattgacaacagctgattcaggccaaaaggaacttatttaagaaaaggttgagtagtccaaataaacaacaagcaggctgaaaaatctggataggggcagcctgaaattgtaccccaaatcatcccagaaccatatatatatatatattttctaccaagtaccagatgcaataggttggatcactggcaccactggcactagacattgaatgctattgctgttattagtgtggcaggcatattgtccttgaaaacttgatcttgttgccaccaaccctgtagtcatgaccaaagggaattcttcctgatatcctcctctttgtgt

SEQ ID NO: 290667 - DNA, 576 bp, Homo sapiens
ctggcactaaaaacacaagacacagtccttaccagtcttccctgtcctttccaaaggtacaggagcctcaccctatagccaccaccaccctagccatgatgagtacttccagactaccactgatgttcccttaaggtccaagatctcttaagtctgcttctggtggatgctgcctagcctgggactcacccttcagggcagtgggctccctctgaccctgggcaggtccagaaatgccatccaacagtgaagtcctggaatcggggactctaagagtctgcttggtgctctagcaaccatggcagtgttggtaccaaaggtgmaagacaaagtcccctttacttttctctctgcttttctcaacaagaagaagttttgtcccacagccaccatagctagtaatatgctgagtcttacttgcaagcaagcctcagaggttcacccaagacccaagatgtagtacctggatatctctgctggttatctggggccaagggctcttcagttagcaggtgatgaatgctggtaggtctacatccttttcttcaaggcagcaggttcccttctggcccaggg

SEQ ID NO: 290668 - DNA, 596 bp, Homo sapiens
tgtccttgccctggttcttcctccttccctgcatcactcttcttgcccttctcacctgtgccctgggattgaactccctgaaaacatcacataagctctatgcctccatttctgggtagcacatgctgaggcacaaattggaaaagaagtgcaaaatcctcagatggatatgtgtttggcatgctaaagaacagcaagaaggccactgtagtaagatcaaacagagcaaggkggatgatataatagaattttgtccagaggtaacggaggacccatcatgtagggccttatagaccttaacagaactttgtctttggttctatttgagatgagaagttgttgacatcatctgcattatgatttaacaggatgactctgggcactgtgttaacaagagactgaaggggacaagagtagaaacggataaccagtttggagtctactgtagcaattctggtaacagatgatgacgtcggccagtaacagcagaagtgaaaatatgtggtagattatgggtatattgtgagggtaaatctatttgaacttttttatggtgtgagaaggaaagaagaagcatggacgactctcagaaaact

SEQ ID NO: 290669 - DNA, 596 bp, Homo sapiens
tgtccttgccctggttcttcctccttccctgcatcactcttcttgcccttctcacctgtgccctgggattgaactccctgaaaacatcacataagctctatgcctccatttctgggtagcacatgctgaggcacaaattggaaaagaagtgcaaaatcctcagatggatatgtgtttggcatgctaaagaacagcaagaaggccactgtagtaagatcaaacagagcaagggggatgatataatagaattttgtccagaggtaacggaggacccatcatgtagggccttatagaccttaacagaactttgtctttggttctatttgagatgagaagttgttgacatcatctgcattatgatttaacaggatgactctgggcactgtgttaacaagagactgaaggggacaagagtagaaacrgataaccagtttggagtctactgtagcaattctggtaacagatgatgacgtcggccagtaacagcagaagtgaaaatatgtggtagattatgggtatattgtgagggtaaatctatttgaacttttttatggtgtgagaaggaaagaagaagcatggacgactctcagaaaact

SEQ ID NO: 290670 - DNA, 1223 bp, Homo sapiens
tgtccttgccctggttcttcctccttccctgcatcactcttcttgcccttctcacctgtgccctgggattgaactccctgaaaacatcacataagctctatgcctccatttctgggtagcacatgctgaggcacaaattggaaaagaagtgcaaaatcctcagatggatatgtgtttggcatgctaaagaacagcaagaaggccactgtagtaagatcaaacagagcaagggggatgatataatagaattttgtccagaggtaacggaggacccatcatgtagggccttatagaccttaacagaactttgtctttggttctatttgagatgagaagttgttgacatcatctgcattatgatttaacaggatgactctgggcactgtgttaacaagagactgaaggggacaagagtagaaacggataaccagtttggagtctactgtagcaattctggtaacagatgatgacgtcggccagtaacagcagaagtgaaaatatgtggtagattatgggtatattgtgagggyaaatctatttgaacttttttatggtgtgagaaggaaagaagaagcatggacgactctcagaaaactwacacaagtaaatggaaagatatcccatgttataaattggaagaattaatattgttaaaatgtccatactaccaaaatcgatctacagattcaatgcaatctgtattaaaatcataatggcattcttcacagaaaacagaaaaacaaatcctaaaacttgtaaggaaccaaaaatgcctcaaatagcaaagtaatctttagccaaaagagcaaagctggaggcatcacactacctgacctcaaaatacactacaaagtaatagtatttcaaacagaatggcacaagcataaaaacaaacccatagaccaataggacaaaatagagaacctagaaataaatccacatatttgwggtcaattgattttcacaaagatgccaagatcacacaatggggaaggacagtctcttaaataagtagtgttggaaaagatggatatccacataaaaagaaataaattagacccttatctcacattgtatacaaaaatcaactgaaaagttatcaaagacacataagatttgaaactattggaagaaaactctgaaactataaaactaccggaagaaatcatggggtaagttccatgacactggtctgggcaatgatttttttggatgtgacccca

SEQ ID NO: 290671 - DNA, 593 bp, Homo sapiens
tcacaatacacataatagcatatggagaccattatcatattaagaacattgaaatgtcctgaagttaaggatttatttccctttttttaagttgggaaacaaatttatttgacctgagaatagccctgctactaccgcccctactaacatgcgtgcatgcatgtgcacacmcacacaaatcaccaatgacatctagtggacttggtgttctacagaacactgttgaaaatattgcagtttcttttcaaggggctcaacttgagcatccttttccaggggctcaactctaacatatgttttaggggcttggaattctcatagcctccctcctactattacaagtttctttctgaccacccactagatctacttaggttaatgtaaaacaagtctattcctcttcaacgtgatattcctttaaatatttgaaaataattgatattcacataaccacaccatctgtatcttcccttattcttcttaaatacccccatttactttccttagatttttcagcttggagccctcttattgtctttgtcactcttttctgtgtgctccactttgtctatacttcctctaaaaggggtaac

SEQ ID NO: 290672 - DNA, 362 bp, Homo sapiens
gatgcctggagctccaccactcaggccacaacaggttgagcggaaaaatctttgaccagtggttcccacttatggtcttgaagatccatgagttatttgcaaaaccatacccaccccgttattgccagtttaatcgttatatccctaatgaaacatgcaacattattaatatatgcatacatatcaataattctgctgtaattaatatagtagtaacttttactttaaaaagttaaatgccattcgcytaatttttctgtctcagtttcactatctataaaataagagtaatacctacctcataaagcttttgttaggattcagtaagaaggttcatgtaaactgcttagaacaattattgg

SEQ ID NO: 290673 - DNA, 479 bp, Homo sapiens
gagcaagaaaattctttctcttttttcttttttcttctttcttctttttctttctttttctgtctctttcccttctttccttctttctttcctttcttctttactctcaaaatccacttttcctaaagtatgttctacaaaactggaattgagaattaaggtgggcagggaggagagggaaaataaaaagataaaataaagacggataaaattatagcaaacaattkgtaaagtcacactccaggatggtaggcactgcttgaagtaatttaaaatggagcaaaagctcagatttgtattgtagtatgaggatcaaggaggaatttaacacctgaaaccattgtgcctttttattgtaaatgctgcttcctccttcctacctccatagaaaggactttttatttcgctatttcttcctctttgaggtcctctaggtgtgcatagtgagcaggaagtttgtgtcttctgggataactcaa

SEQ ID NO: 290674 - DNA, 442 bp, Homo sapiens
gagattattagaaattttgcttttctgtgttctgtaatccatttggttatgacaaacttcatacgtgactgctgtttggagtcagtgtgcaaacaagcattatcatattatgaagagatttaattaactaggtaatatgtttgaatatccagtacaaggtgaaggctgcaaaacaaattagttttacccactatctgaaaagcattccttcaaacggagggattttcaacgtacttgattctttactcatagatcaggtggtaaaataactagttttatttttttattttggctraagtgttttcatcttttcttcactacaacctaaggaagaaagctattataacataagtatatgactgggtaattttttgtctttgtttttgggattgaattgaaacatgatgtcatttacaagggtgtaaagtgaccaaacttggaa

SEQ ID NO: 290675 - DNA, 442 bp, Homo sapiens
gagattattagaaattttgcttttctgtgttctgtaatccatttggttatgacaaacttcatacgtgactgctgtttggagtcagtgtgcaaacaagcattatcatattatgaagagatttaattaactaggtaatatgtttgaatatccagtacaaggtgaaggctgcaaaacaaattagttttacccactatctgaaaagcattccttcaaacggagggattttcaacgtacttgattctttactcatagatcaggtggtaaaataactagttttatttttttattttggctaaagtgttttcatcttttcttcactacracctaaggaagaaagctattataacataagtatatgactgggtaattttttgtctttgtttttgggattgaattgaaacatgatgtcatttacaagggtgtaaagtgaccaaacttggaa

SEQ ID NO: 290676 - DNA, 568 bp, Homo sapiens
agctgctgagtgtatagtgtccttatttttacaacatacaagatctgacctgcttagaaatctttcctggtttcctcctctgtcagacaatcttgcttctctttatggctttagattcaggctacccaatattaacaaaacctgttaaagtactctttgggagcatcaataggttggtgtgtgtgtctctccgtctrggtaacatccttatgttttcatagaggtcactggaaccagaacacttaactcaaatatagactgtactctcttccctcaatattatggcagaaataggtgccattggtctcaataaggaccaacggatgcagtatattaatagatggttcccatcacccataagtagcatgaaatacctgctttttctgatgtatgattgttaagttatgggatagggttcagcaaaagcattaatagcaacagaaagcaaactatttattcctctttcataacatgaaccagaatcaaatagttggaagccaatttttgaatctgaagcagataatgtttcctgtatcctgctattatttttctccccagcatgtgttca

SEQ ID NO: 290677 - DNA, 1283 bp, Homo sapiens
atttgtttttatcctgtaaacatttatggtgcctaaatgttgttctgtcttttaatagatttgtactgatacttgcaagaaagaaaatgtcagaaagatcacggtaagataagagttaaatgtttaggaagaagaatgaacaagagaaggagacttaggaagatgtaatggtctcttatacctaaataaagagaaataacaaaaagaccacayatgcaaccactgagtgcaaatgtagtcacaactgctgcaatgagtggctgtctcccactagtttttgctttggtttacagcatgtccacactagtcttgactgaagttaaaggaagatctggtttgcacaaatatttattattaaaatgtaatatcaacaattccttaatttggaaaaatatgaggaaatcatctgtgggcagaaaacaatggctcaaggaatttttagagcaaacaattttgatatcagcaacaaattattgaagcaaaaatggaaatctcactccctttgtcttacttttttaagacaagtggaatgtttacctattatccagagcatacctttgtaaaccaaggaatcactcgagaataaaacgtccttataaataagaggcacagagggattggaagctgttccctgatatatgwatttgtttttatcctgtaaacatttatggtgcctaaatgttgttctgtcttttaatagatttgtactgatacttgcaagaaagaaaatgtcagaaagatcacggtaagataagagttaaatgtttaggaagaagaatgaacaagagaaggagacttaggaagatgtaatggtctcttatacctaaataaagagaaataacaaaaagaccacatatgcaaccactgagtgcaaatgtagtcacaactgctgcaatgagtggctgtctcccactagtttttgctttggtttacagcatgtccacactagtcttgactgaagttaaaggaagatctggtttgcacaaatatttattattaaaatgtaatatcaacaattccttaatttggaaaaatatgaggaaatcatctgtgggcagaaaacaatggctcaaggaatttttwgagcaaacaattttgatatcagcaacaaattattgaagcaaaaatggaaatctcactccctttgtcttacttttttaagacaagtggaatgtttacctattatccagagcatacctttgtaaaccaaggaatcactcgagaataaaacgtccttataaataagaggcacagagggattggaagctgttccctgatatatg

SEQ ID NO: 290678 - DNA, 595 bp, Homo sapiens
aagcgcacaaaaaacatttagtaactattgattgattgattgaaacatgaatcaaattactcttatcttcttaaaagtaataaagttatatctctgtggtagccatcccaagatggctgcctttctttctcctgtgcctgtattatgtgctattcccttaccaagagatgaagcttattccgccacayccttgaatcccaccctgccactgatttaaccattagagtactgacactatatcaggtctggtcctgacctttgggagtataacagctttcaccttggtctcttggaggccagagccacaatatataaagttcaccttcagtgctgaagaggtacttagactatatggagagagagagaggcccatcttagcccaaacttccagccacccccaccctggctcttggaatgcgaagaaagctgcctcaaaccctccagaacagctcatctagctaaatatcgcaaagtgaccacagtcaatgcctcaaggagcagaagaattatacagctgagtcccgcttgaattaaagtcagataaaatattgagatataataaaagattattgttctagattacttagtttggggg

SEQ ID NO: 290679 - DNA, 595 bp, Homo sapiens
aagcgcacaaaaaacatttagtaactattgattgattgattgaaacatgaatcaaattactcttatcttcttaaaagtaataaagttatatctctgtggtagccatcccaagatggctgcctttctttctcctgtgcctgtattatgtgctattcccttaccaagagatgaagcttattccgccacacccttgaatcccaccctgccactgatttaaccattagagtactgacactatatcaggtctggtcctgacctttgggagtataacagctttcaccttggtctcttggaggccagagccacmatatataaagttcaccttcagtgctgaagaggtacttagactatatggagagagagagaggcccatcttagcccaaacttccagccacccccaccctggctcttggaatgcgaagaaagctgcctcaaaccctccagaacagctcatctagctaaatatcgcaaagtgaccacagtcaatgcctcaaggagcagaagaattatacagctgagtcccgcttgaattaaagtcagataaaatattgagatataataaaagattattgttctagattacttagtttggggg

SEQ ID NO: 290680 - DNA, 595 bp, Homo sapiens
aagcgcacaaaaaacatttagtaactattgattgattgattgaaacatgaatcaaattactcttatcttcttaaaagtaataaagttatatctctgtggtagccatcccaagatggctgcctttctttctcctgtgcctgtattatgtgctattcccttaccaagagatgaagcttattccgccacacccttgaatcccaccctgccactgatttaaccattagagtactgacactatatcaggtctggtcctgacctttgggagtataacagctttcaccttggtctcttggaggccagagccacaatayataaagttcaccttcagtgctgaagaggtacttagactatatggagagagagagaggcccatcttagcccaaacttccagccacccccaccctggctcttggaatgcgaagaaagctgcctcaaaccctccagaacagctcatctagctaaatatcgcaaagtgaccacagtcaatgcctcaaggagcagaagaattatacagctgagtcccgcttgaattaaagtcagataaaatattgagatataataaaagattattgttctagattacttagtttggggg

SEQ ID NO: 290681 - DNA, 595 bp, Homo sapiens
ttcccttaccaagagatgaagcttattccgccacacccttgaatcccaccctgccactgatttaaccattagagtactgacactatatcaggtctggtcctgacctttgggagtataacagctttcaccttggtctcttggaggccagagccacaatatataaagttcaccttcagtgctgaagaggtacttagactatatggagagagagagaggcccatcttagcccaaacttccagccacccccaccctggctcttggaatgcgaagaaagctgcctcaaaccctccagaacagytcatctagctaaatatcgcaaagtgaccacagtcaatgcctcaaggagcagaagaattatacagctgagtcccgcttgaattaaagtcagataaaatattgagatataataaaagattattgttctagattacttagtttgggggtagtttattatgaaacaataaataactggaacacttctttattgaacaagtatataattttactttcctatttttctatattaggaaattagaaaataattctaattttctgtaagtaaaattttgctgacccccctactcttatcccaaat

SEQ ID NO: 290682 - DNA, 605 bp, Homo sapiens
atgtaggcatgacgtcagttctggtgtcatggcaagccaggaccacaagcaagtgggcagcagaagcactatagacttgctgagtctgtggataggaaaatggaactgacatgctgagaaaggcagaaatgaaggaccatgtgatcacagtaaacattagagtgagacagagccattaatagatccatgagaagaagatcatatctgggagaagggtgtgagattatacagtcagrccaaaggtagcagagacatcagccagatggggacttggtttcatccattggctctgacagttacttctgacttcagaaagagtgcttctcaggtaacctgatgtcagaatctagacactatcattaggagtctgagtctacatggagtgtctatgaaataaggcaaataaagtataatgtatactgatgatttcctattgactaaggtgatggggaatggctgcaaggatgaggaaattcaaagcacattcaaatgggccacctctctctaattatgttatgatgggctggctttccctttcttccactcaagtcctcgtattttgaggaatgatttgagctctccattcttctgagatgtgttgcttt

SEQ ID NO: 290683 - DNA, 600 bp, Homo sapiens
atatctgggagaagggtgtgagattatacagtcaggccaaaggtagcagagacatcagccagatggggacttggtttcatccattggctctgacagttacttctgacttcagaaagagtgcttctcaggtaacctgatgtcagaatctagacactatcattaggagtctgagtctacatggagtgtctatgaaataaggcaaataaagtataatgtatactgatgatttcctattgactaaggtgatggggaatggctgcaaggatgargaaattcaaagcacattcaaatgggccacctctctctaattatgttatgatgggctggctttccctttcttccactcaagtcctcgtattttgaggaatgatttgagctctccattcttctgagatgtgttgctttctcttttatcaatgatcacagctaatgctggtaatgttccattgacttaatctacttaaaactcagcaagggctgggtgtaatggcttacttgaggccaggagttcaagaccagcctgggcaacatagtgagatttcatctctaatttaaaaacaaaaaacaaaaacaatccaataaaactcagcaagtcctcac

SEQ ID NO: 290684 - DNA, 600 bp, Homo sapiens
atatctgggagaagggtgtgagattatacagtcaggccaaaggtagcagagacatcagccagatggggacttggtttcatccattggctctgacagttacttctgacttcagaaagagtgcttctcaggtaacctgatgtcagaatctagacactatcattaggagtctgagtctacatggagtgtctatgaaataaggcaaataaagtataatgtatactgatgatttcctattgactaaggtgatggggaatggctgcaaggatgaggaaattcaaagcacattcaaatgggmcacctctctctaattatgttatgatgggctggctttccctttcttccactcaagtcctcgtattttgaggaatgatttgagctctccattcttctgagatgtgttgctttctcttttatcaatgatcacagctaatgctggtaatgttccattgacttaatctacttaaaactcagcaagggctgggtgtaatggcttacttgaggccaggagttcaagaccagcctgggcaacatagtgagatttcatctctaatttaaaaacaaaaaacaaaaacaatccaataaaactcagcaagtcctcac

SEQ ID NO: 290685 - DNA, 600 bp, Homo sapiens
atatctgggagaagggtgtgagattatacagtcaggccaaaggtagcagagacatcagccagatggggacttggtttcatccattggctctgacagttacttctgacttcagaaagagtgcttctcaggtaacctgatgtcagaatctagacactatcattaggagtctgagtctacatggagtgtctatgaaataaggcaaataaagtataatgtatactgatgatttcctattgactaaggtgatggggaatggctgcaaggatgaggaaattcaaagcacattcaaatgggccacctctctctaattatgttatgatgggctggctttccctttcttccactcaagtcctcgtattttgaggaatgatttgagctctccattcttctgagatgtgttgctttctcttttatcaatgatcacagctaaygctggtaatgttccattgacttaatctacttaaaactcagcaagggctgggtgtaatggcttacttgaggccaggagttcaagaccagcctgggcaacatagtgagatttcatctctaatttaaaaacaaaaaacaaaaacaatccaataaaactcagcaagtcctcac

SEQ ID NO: 290686 - DNA, 553 bp, Homo sapiens
gtacctgagtgttagttatactgccaagaacctgagggttagctacactcttcttttgagaacaaatttggactttaaggcatcccagtagttacagattagtgtttagcaaaatgtaggctaagaattatgtctatcagaatcacctgaagtgcttgttaaaaaacataaattcttaaaccacagtcctatttactaaactacaatatttggatgtgggggtctagatctgaactgtttttttttgttgttgttgttgttttaaacggagtctcactctgtcacccaggctggaatgcaatagcgtgatctcagctcactgcaacttctgccttccacctcccaagttcaagcaattctcttgcctcagcctcccaagtasctgggactacaggcacatgctaccatgcccggctaattttttgtatttttagtagagctggggtttcaccgtgttagccaggatggtcttgatctcctgaccttgtgatttgcctgcctcggcctcccaaagtaatcctcacgcctgggattacaggcgtgagccactagg

SEQ ID NO: 290687 - DNA, 625 bp, Homo sapiens
atcaaataatctacttagtcatttgaagactgaggaccaagtcaacaaatmaaaatccagttgtgcaaccaatctcagaggtcttgtttgactgaaaaatgatattgtaaacagcctatacccaaagtttgtcaggatagtcaaattaatttatgagtgcagaaagagccttagatcaatcactaccatcaagattgtagaaatgtttaggtttatcctaaaatctttagttgcagaagaggaaacctccaaattaaatattgatacatgcaggaccatgctaagtgtaagagacccttttcagtagttgtttgacttctaagcagacttttgacattgctgaatactccttttcgaaacagtctcttctgttggtttctgtgatttaacattgtgtacgtgaaggtggctgcacttggtggcttaacataattaaagttaatttctcactcatgttaagtccaatagtgtttttccccaggggatggggaagttttctggcttcttttggaggctgacatgaactgactagatggagaagagagaaattgttatgggaagatcttacgtatcagctttgagagtggcgtttatcactattgctctcattccattagttaggatt

SEQ ID NO: 290688 - DNA, 1119 bp, Homo sapiens
caaccaatctcagaggtcttgtttgactgaaaaatgatattgtaaacagcctatacccaaagtttgtcaggatagtcaaattaatttatgagtgcagaaagagccttaratcaatcactaccatcaagattgtagaaatgtttaggtttatcctaaaatctttagttgcagaagaggaaacctccaaattaaatattgatacatgcaggaccatgctaagtgtaagagacccttttcagtagttgtttgacttctaagcagacttttgacattgctgaatactccttttcgaaacagtctcttctgttggtttctgtgatttaacattgtgtacgtgaaggtggctgcacttggtggcttaacataattaaagttaatttctcactcatgttaagtccaatagtgtttttccccaggggatggggaagttttctggcttcttttggaggctgacatgaactgactagatggagaagagagaaattgttatgggwatcaaataatctacttagtcatttgaagactgaggaccaagtcaacaaataaaaatccagttgtgcaaccaatctcagaggtcttgtttgactgaaaaatgatattgtaaacagcctatacccaaagtttgtcaggatagtcaaattaatttatgagtgcagaaagagccttagawcaatcactaccatcaagattgtagaaatgtttaggtttatcctaaaatctttagttgcagaagaggaaacctccaaattaaatattgatacatgcaggaccatgctaagtgtaagagacccttttcagtagttgtttgacttctaagcagacttttgacattgctgaatactccttttcgaaacagtctcttctgttggtttctgtgatttaacattgtgtacgtgaaggtggctgcacttggtggcttaacataattaaagttaatttctcactcatgttaagtccaatagtgtttttccccaggggatggggaagttttctggcttcttttggaggctgacatgaactgactagatggagaagagagaaattgttatgggaagatcttacgtatcagctttgagagtggcgtttatcactattgctctcattccattagttaggatt

SEQ ID NO: 290689 - DNA, 1038 bp, Homo sapiens
cagcaaacaaagggtcttattgaaatgtatgtactctgggaaaacaacatcgagtcacaaaaacttgatggttttgaatttgaatgtttattcctcctcctctcatccccaatttctccaaaaaagtgagtttctaccttctgcaaaaaacaaaattgtacgtacaaaaaacctgattttatatagggggatttatgaagggggattttatatagtggatctaaaaatacactatatgacctttctcatcatggttaagagacttttcttaaacgtatatcatgygatatttgttgactatttgttggctttgtttcttatcaaaatatgaaggcacatgaaaatatgttcaacgccactatggagattctgtgtaatagttcttacgctgctgtgtgcttatacataaggtttactggttagggattcctatctggtaacattagcaggcatttttgggagcatttgcatcagaacataaccagttggagaaattcttcagcaactacagcctcaaaagtcacagaaggtgcctctgagtgctcaggtgatctcctgtccttgaatctggtcatccwttagtaaagttatgtgtgttttcttaggcatttggaaatacagaaaagtaaaaaaaawtttaagtcattcatgatcttttttgcttcattaccctctcttgattaattcctgattatttttctgttttcagtctcaattaacttcctcagagtcaaatcaactctcatattaattagatgctattcatagcaccttattttttgttcttttttctcatattgtgttgtcatgtttctttttgtgtttattttattagcatttatatctctcattacattattagttttactgtgacaaggaccatgtctactctttctgtaaacccagtatctattacagccttaaatacagcagatattttatatttatagaatctgctgcactagcattatttctgctttgtatgcatatattttcaattaatattctattatgtatataattttcatgtgtattact

SEQ ID NO: 290690 - DNA, 460 bp, Homo sapiens
ttagtaaagttatgtgtgttttcttaggcatttggaaatacagaaaagtaaaaaaaattttaagtcattcatgatcttttttgcttcattaccctctcttgattaattcctgattatttttctgttttcagtctcaattaacttcctcagagtcaaatcaactctcatattaattagatgctattcatagcaccttattttttgttcttttttctcatattgtgttgtcatgtttctttttgtgtttattttattagcatttatatctctcattacattattagttttactgtgacaaggaccatgtctactctttctgtaaacccagtatctattacagccttaaatacagcagatattttatatttatagaatctrctgcactagcattatttctgctttgtatgcatatattttcaattaatattctattatgtatataattttcatgtgtattact

SEQ ID NO: 290691 - DNA, 1093 bp, Homo sapiens
tacataatgtttgtacatacttatggggtaaatgtaacattttgttacatgcatagaatgcataattatcaagtcagggtattttgggtattcatcatctggcacatttataatttcttttcttttctttcttttttttttttttttttgagacggattcttgctctgtcgcccaggctggagtgcaaatggcatgttcttggttcactgcacctccacctcccaggttcaagtgattcttctgtctcagcctccccatgagctggggttacaggcccgtgccaccacgcccagctaatttttgtagttttagtagagatgggattttgccatgttggccatcctggtctcgaactcctgacctcaagtgatccacctgcctcggcctcccaaagtgctggggttacaggggtgagtcactgtgcctggcygagcatttatcatttctatgtgttgggaatgtttcaagtcatctcctctagctattctgaaatacacaatacattgttgttaactatagtcaccctactatacactatatatagtatatagtcaccctactatactatcaaacattagaacttactctaactgtatgtttatacccatwaatgttggaggaagtgaaaggatatggggtaatatttcaaatttcataaagcctacttgtggtttccacaagctcagtgtgctatatggggtgacaaaaaattgtgagaaaattcatggaacagaagagacattaactagatggtatgataggaaatgtgggtttcaaagtggatgctactacatataaagcttcaaaagaccagatagcaagactggttcaatatggatattgtttgaggatgcttagtacttaggtaggacagaacattcacaatagcagccagcacagtgtgaaawgacagctggtggaccagtgtccccatcattcctcttccatgagtatttggatgaatcttgaaaaggagaaggtaaaataaaaaaacctatagcaagacaaaaatagtcctaagagggagcttaagtttgagctcattatatagttaccttgaataatattaattgaaaagtttaagactttttt

SEQ ID NO: 290692 - DNA, 537 bp, Homo sapiens
agctgggcgtggtggcagacacctgtaatcccagctacttcggaggctgaggcaggagaatcgcttgaactcatgggtggagattgcagtgaactgagatagcaycattgcactccagcctgggcaaaaagaaaaaaaaaatttaacaagattcactagtaaagccatctggaccttgatatttttttcctgtgggtaagtttttagttaacatttcaatttctgtaccttaatttgcaaagtggctttcaaaaaaaatcacaatcagttattgagttctatcaaatgcttttccttcatcagttgagataatcgtattattgtctctttattgtattaatataggaaattacattgattgatttttttttaaatcttgaaattaaaaacttggaaacctggagtaaacccaggttagttgtcatgtattatctttttaaactactgaaaatccttgcttgatgatattttgtttaggagctttgatatttattcatgagagatgttgacctatgattttccttttttaaaagtaat

SEQ ID NO: 290693 - DNA, 600 bp, Homo sapiens
ttggcttctttgctgttagatctctgtttctaggccattgcttgtaaatcaacagatgcctccaggttaaaagctggccaaatgctaggctcatttctgtactttgcttctctctaggatcttgttcttttacatcctcactgatgccttcacacagatgtttttgaaattgcatccaactattctaattattcttagtgggagtgctgttctgataaaagcttctctgccatatgtgcaggcagagagtgtccaaagtaatcttcaggtgcaaaaaaaattagtcataccacttaaagcaatattagttacatcagcgtgacagcacagtcataggtgactcattgggccagggtgcatctaactaggagtttttgaaaaagcctggagatgctgtgggcccataaaccagtccagggcagtctaactctagrctgtttctttgtgagaaaaagacattcttatgtgtttatactgttgttgttggatgtctactcccagcagctaaatgcaattcctacttgattgagaagagggcaagacaaacaaacttacttgatgaggactaaaatgatgactgtatgtttgagctagaaaagg

SEQ ID NO: 290694 - DNA, 585 bp, Homo sapiens
tatcattaccttgttgctgatctcaagaggaaggctttaaatatttcaccatcaggtatgatggctactctaggatttttgtttgtttatttgtttgttttttatagattttctttagcagactaatgaagttccctttccttcctaagaggttttttatttaaaaaaaaaattatgagtgaatgttgaattatatcaaatgctttcatagtttgttgtggtggtggttgtttttgagacagggtctcactttgtctccaagctggatcatggcgcattgcagcctcaacctcctgggctcaagtgatcctcccacctcagcctcttccagtagctgggaccacagcacatcaccacacccagctaatttttaaaaaattgttatagagacagggtctcactgtgttgtctaggctggtcttgaactcttargctcaagtaatcctcccaccttggcctcccaaagtgctgggattacaggtgtgagccactgtatctagcctagaatattttttatagtgctcaggagaaagattaaaagtatgaaaagtgtctactatgtatactttaatatcatattgtaat

SEQ ID NO: 290695 - DNA, 674 bp, Homo sapiens
tttcaattatctcccaatttatctatagattcagaacaattccaatcaaaatctcggcacttttgtgtggtaattgatatgctgagtctaaaatttataaggaaattcaagaggccaagtggcaaggaaatcttgaaggggaagagcaacgctggaggatttatactaccagatatcaaactatttataaagttacagtacttaaggcaatcttaattggtgcaaaaatacaatgcaatagaagagtaagtccagaataaatcccagacctatatggtcacctggtttatgacagaaatgtcamtgctggggagtgggcaaaggatgatcttttcaataaacgaagcaggtcaactggatatccccatgaaagagataaacccttgccttacaacatacacaaaagtcaattctgtgtggattatggatctaaatgtgaaatataaaaccagaaaacttttaaaataaaaacacactttatcaaccttggagtaggcaaagctttcttccaaaggatataaaaagcacttactgtaaaagaaaaatctagtatatcagactatattgattagaaatatctgtttattaagtaaacgaaaaagcacacagagtaagaggagatatttacaatacatgtatctgacaaggtatgctttagaacgtttacctaaagt

SEQ ID NO: 290696 - DNA, 585 bp, Homo sapiens
gttaagggtaaggagaataaatctagattggaaaacgacatttcattgagctgctttgcttgtcacagatataaaagagtagaatggtcgatgagctgtttattccagaacaagggttggcaaactatggcctgcagaccaaatccagcccgacacctgtttttgtaagtttttattgaaaaacagccttgcccacttatatattgtctatggctgccttyggattagaacagcagagttgagtaattgcaacagagaccgtatggtctgaaatatttatgatttgaccctttacaggagaactttgctgatccctgtattagagtctttaaccttgggaatccctcacattgtctcaatttttctaattaagattaattagaaatttttaaagaatgggttttgagtctctttttctcacttctcattgatcctagtgggatgaccataggtgagaaaatgaaactcaaaggaacaaacagctctgcaaaagtacagttccccttggagctgtctccctgctcggggaaggcaggcatcggttgatttatgccttagggcattgcatcccctctaccagaagcc

SEQ ID NO: 290697 - DNA, 585 bp, Homo sapiens
gttaagggtaaggagaataaatctagattggaaaacgacatttcattgagctgctttgcttgtcacagatataaaagagtagaatggtcgatgagctgtttattccagaacaagggttggcaaactatggcctgcagaccaaatccagcccgacacctgtttttgtaagtttttattgaaaaacagccttgcccacttatatattgtctatggctgccttcggattagaacagcagagttgagtaattgcaacagagaccgtatggtctgaaatatttatgatttgaccctttacaggagaactttgctgatcmctgtattagagtctttaaccttgggaatccctcacattgtctcaatttttctaattaagattaattagaaatttttaaagaatgggttttgagtctctttttctcacttctcattgatcctagtgggatgaccataggtgagaaaatgaaactcaaaggaacaaacagctctgcaaaagtacagttccccttggagctgtctccctgctcggggaaggcaggcatcggttgatttatgccttagggcattgcatcccctctaccagaagcc

SEQ ID NO: 290698 - DNA, 585 bp, Homo sapiens
gttaagggtaaggagaataaatctagattggaaaacgacatttcattgagctgctttgcttgtcacagatataaaagagtagaatggtcgatgagctgtttattccagaacaagggttggcaaactatggcctgcagaccaaatccagcccgacacctgtttttgtaagtttttattgaaaaacagccttgcccacttatatattgtctatggctgccttcggattagaacagcagagttgagtaattgcaacagagaccgtatggtctgaaatatttatgatttgaccctttacaggagaactttgctgatccctgtattagagtctttaaccttgggaatccctcacattgtctcaatttttctaattaagattaattagaaatttttaaagaatgggttttgagtytctttttctcacttctcattgatcctagtgggatgaccataggtgagaaaatgaaactcaaaggaacaaacagctctgcaaaagtacagttccccttggagctgtctccctgctcggggaaggcaggcatcggttgatttatgccttagggcattgcatcccctctaccagaagcc

SEQ ID NO: 290699 - DNA, 585 bp, Homo sapiens
gttaagggtaaggagaataaatctagattggaaaacgacatttcattgagctgctttgcttgtcacagatataaaagagtagaatggtcgatgagctgtttattccagaacaagggttggcaaactatggcctgcagaccaaatccagcccgacacctgtttttgtaagtttttattgaaaaacagccttgcccacttatatattgtctatggctgccttcggattagaacagcagagttgagtaattgcaacagagaccgtatggtctgaaatatttatgatttgaccctttacaggagaactttgctgatccctgtattagagtctttaaccttgggaatccctcacattgtctcaatttttctaattaagattaattagaaatttttaaagaatgggttttgagtctctttttctcacttctcattgatcctagtgggatsaccataggtgagaaaatgaaactcaaaggaacaaacagctctgcaaaagtacagttccccttggagctgtctccctgctcggggaaggcaggcatcggttgatttatgccttagggcattgcatcccctctaccagaagcc

SEQ ID NO: 290700 - DNA, 571 bp, Homo sapiens
tggtgtgtgaagtgaaataactttgatgttaaggagtttttttttttttgtcttttgcagaacactggagatgatcagacttcctgaatagagaaagcttatgtgctttgttacattggggaacaactgaagagattcttgactcaaccttttagagcttagtccatgttgcaacgaggagtgttggctttgtttttccacttaaaaactatttataaaaaggaaaagtagttttcatattaagtttttatttcctttccagcagttggggctagaaagtatrtgttggcactagaaacattgtcaagatttgttctgtggtgtaggtatgcacattccataggtatgcacacggccatgtaatatcagtatatcccaagttaatgaaagtgttcatttacataggcaatggagacctttgcattttgatccatagaacataggaggatgttcttagtctgtctcaaagctctatatgtttacatattatttctgtagattgttttcaggagaaagttttgcttctatggtaagagtgagcactttggcttatgtataagttagaaataat

SEQ ID NO: 290701 - DNA, 571 bp, Homo sapiens
tggtgtgtgaagtgaaataactttgatgttaaggagtttttttttttttgtcttttgcagaacactggagatgatcagacttcctgaatagagaaagcttatgtgctttgttacattggggaacaactgaagagattcttgactcaaccttttagagcttagtccatgttgcaacgaggagtgttggctttgtttttccacttaaaaactatttataaaaaggaaaagtagttttcatattaagtttttatttcctttccagcagttggggctagaaagtatgtgttggcactagaaacattgtyaagatttgttctgtggtgtaggtatgcacattccataggtatgcacacggccatgtaatatcagtatatcccaagttaatgaaagtgttcatttacataggcaatggagacctttgcattttgatccatagaacataggaggatgttcttagtctgtctcaaagctctatatgtttacatattatttctgtagattgttttcaggagaaagttttgcttctatggtaagagtgagcactttggcttatgtataagttagaaataat

SEQ ID NO: 290702 - DNA, 1143 bp, Homo sapiens
tggtgtgtgaagtgaaataactttgatgttaaggagtttttttttttttgtcttttgcagaacactggagatgatcagacttcctgaatagagaaagcttatgtgctttgttacattggggaacaactgaagagattcttgactcaaccttttagagcttagtccatgttgcaacgaggagtgttggctttgtttttccacttaaaaactatttataaaaaggaaaagtagttttcatattaagtttttatttcctttccagcagttggggctagaaagtatgtgttggcactagaaacattgtcaagatttgttctgtggtgtaggtatgcacattccataggtatgcacacggccatgtaataycagtatatcccaagttaatgaaagtgttcatttacataggcaatggagacctttgcattttgatccatagaacataggaggatgttcttagtctgtctcaaagctctatatgtttacatattatttctgtagattgttttcaggagaaagttttgcttctatggtaagagtgagcactttggcttatgtataagttagaaataatwtggtgtgtgaagtgaaataactttgatgttaaggagtttttttttttttgtcttttgcagaacactggagatgatcagacttcctgaatagagaaagcttatgtgctttgttacattggggaacaactgaagagattcttgactcaaccttttagagcttagtccatgttgcaacgaggagtgttggctttgtttttccacttaaaaactatttataaaaaggaaaagtagttttcatattaagtttttatttcctttccagcagttggggctagaaagtatgtgttggcactagaaacattgtcaagatttgttctgtggtgtaggtatgcacattccataggtatgcacacggccatgtaatatcwgtatatcccaagttaatgaaagtgttcatttacataggcaatggagacctttgcattttgatccatagaacataggaggatgttcttagtctgtctcaaagctctatatgtttacatattatttctgtagattgttttcaggagaaagttttgcttctatggtaagagtgagcactttggcttatgtataagttagaaataat

SEQ ID NO: 290703 - DNA, 345 bp, Homo sapiens
ttttaagtccattaaatttaccacccttatattttaattttctttataaattaccaatgaactatgtaattcctttgatccattttatcataagtaaaactatcatgattattagtaaaagaataaatagtgagtaacgacaatattgagcttttctctctaaatggaaaactattaatacaaagaatgtagcttattacaaagagccaaaaaatccaaaaacrcatataatttccaggcaaaagtgttagaatgaacccatgtgaaacctttctttttctttttttttttttttttttttacctgagaatcaatctaatgtttaaaacaatacaccgaagggta

SEQ ID NO: 290704 - DNA, 345 bp, Homo sapiens
ttttaagtccattaaatttaccacccttatattttaattttctttataaattaccaatgaactatgtaattcctttgatccattttatcataagtaaaactatcatgattattagtaaaagaataaatagtgagtaacgacaatattgagcttttctctctaaatggaaaactattaatacaaagaatgtagcttattacaaagagccaaaaaatccaaaaacacatataatttccaggcaaaagtgttagaatgaacccatgtgaaacctttytttttctttttttttttttttttttttacctgagaatcaatctaatgtttaaaacaatacaccgaagggta

SEQ ID NO: 290705 - DNA, 608 bp, Homo sapiens
aagagccaaaaaatccaaaaacacatataatttccaggcaaaagtgttagaatgaacccatgtgaaacctttctttttctttttttttttttttttttttacctgagaatcaatctaatgtttaaaacaatacaccgaagggtaaacttcagttgctcatttaataaatatttattgagtagctacttattgcaagmtaggcccttttctaggcacacaaacatcctactcatgggagtgaaataaacacaataaccatagatagattaggcaaaatatacagtgttaaaggagaaaaactaaagcaggaaaatgaaatgtttacaggtttgagaggagggatagtgggaattctaggatggccagaaaagtccttattgagaaaggggcttttaagtaaagaactgaaggaatggaaaaagaaagccaggaggctatctgaggaaaaggcatcccaaacacagggaactgcccagtacagaggtgtgcctggggtgtttaagcaactgtgatagataatgaagagcaagaagtttagtgtagctgaagcacagcaaagggaataagaaacagaagtttaagtgagagagagaacaggtcatattgtg

SEQ ID NO: 290706 - DNA, 608 bp, Homo sapiens
aagagccaaaaaatccaaaaacacatataatttccaggcaaaagtgttagaatgaacccatgtgaaacctttctttttctttttttttttttttttttttacctgagaatcaatctaatgtttaaaacaatacaccgaagggtaaacttcagttgctcatttaataaatatttattgagtagctacttattgcaagataggcccttttctaggcacacaaacatcctactcatgggagtgaaataaacacaataaccatagatagattaggcaaaatatacagtgttaaaggagaaaaactaaagcaggaaaatgaaatgtttacaggtttgagaggagggatagtgggaattctaggatggccagaaaagtccttattgagaaaggggctttkaagtaaagaactgaaggaatggaaaaagaaagccaggaggctatctgaggaaaaggcatcccaaacacagggaactgcccagtacagaggtgtgcctggggtgtttaagcaactgtgatagataatgaagagcaagaagtttagtgtagctgaagcacagcaaagggaataagaaacagaagtttaagtgagagagagaacaggtcatattgtg

SEQ ID NO: 290707 - DNA, 608 bp, Homo sapiens
aagagccaaaaaatccaaaaacacatataatttccaggcaaaagtgttagaatgaacccatgtgaaacctttctttttctttttttttttttttttttttacctgagaatcaatctaatgtttaaaacaatacaccgaagggtaaacttcagttgctcatttaataaatatttattgagtagctacttattgcaagataggcccttttctaggcacacaaacatcctactcatgggagtgaaataaacacaataaccatagatagattaggcaaaatatacagtgttaaaggagaaaaactaaagcaggaaaatgaaatgtttacaggtttgagaggagggatagtgggaattctaggatggccagaaaagtccttattgagaaaggggcttttaagtaaagaactgaaggaatggaaaaagaaagccaggaggctatctgaggaaaaggcatcccaaacacagggaactgcccagtacagaggtgtgcctggggtgtttaagcaactgtgatagataaygaagagcaagaagtttagtgtagctgaagcacagcaaagggaataagaaacagaagtttaagtgagagagagaacaggtcatattgtg

SEQ ID NO: 290708 - DNA, 598 bp, Homo sapiens
gatcttgtgcccactggtgtaacaaccagctctgtgcagatcacagaaggatcacagagtatgaacttggcttcttaggtctgatccccatacatcatgtatatgatgaagcaggggagttctgagaatagaggggctggggagacaacccagaaggtatctatcataaagtcttatctcctctgtcttcttgaggcattcagtgctagttttggctattatcaaggctaagtggcaaccctgcctttactgcagtttggtcaytcattcatttaacattgaacaggctggattccagacatcaagcatggagcaatggactaagctgggagtcactgccctcagaggtcttatgctttcccccttcaggtatatatggtctcctatatccttctaataagtcatccctttacctaagcttatttcagatgggtgtttgtcacttcccatcaaaggagttttgactagtagagaaatgggtgctggaagtggaacgttcccactgacagccccccatagggagttgttaggatgctgccatatggaattgggatatttgccatctttgttaggtggtatgaaaatcagttggttaaag

SEQ ID NO: 290709 - DNA, 598 bp, Homo sapiens
gatcttgtgcccactggtgtaacaaccagctctgtgcagatcacagaaggatcacagagtatgaacttggcttcttaggtctgatccccatacatcatgtatatgatgaagcaggggagttctgagaatagaggggctggggagacaacccagaaggtatctatcataaagtcttatctcctctgtcttcttgaggcattcagtgctagttttggctattatcaaggctaagtggcaaccctgcctttactgcagtttggtcactcattcatttaacattgaacaggctggattccagrcatcaagcatggagcaatggactaagctgggagtcactgccctcagaggtcttatgctttcccccttcaggtatatatggtctcctatatccttctaataagtcatccctttacctaagcttatttcagatgggtgtttgtcacttcccatcaaaggagttttgactagtagagaaatgggtgctggaagtggaacgttcccactgacagccccccatagggagttgttaggatgctgccatatggaattgggatatttgccatctttgttaggtggtatgaaaatcagttggttaaag

SEQ ID NO: 290710 - DNA, 598 bp, Homo sapiens
gatcttgtgcccactggtgtaacaaccagctctgtgcagatcacagaaggatcacagagtatgaacttggcttcttaggtctgatccccatacatcatgtatatgatgaagcaggggagttctgagaatagaggggctggggagacaacccagaaggtatctatcataaagtcttatctcctctgtcttcttgaggcattcagtgctagttttggctattatcaaggctaagtggcaaccctgcctttactgcagtttggtcactcattcatttaacattgaacaggctggattccagacatcaagcatggagcartggactaagctgggagtcactgccctcagaggtcttatgctttcccccttcaggtatatatggtctcctatatccttctaataagtcatccctttacctaagcttatttcagatgggtgtttgtcacttcccatcaaaggagttttgactagtagagaaatgggtgctggaagtggaacgttcccactgacagccccccatagggagttgttaggatgctgccatatggaattgggatatttgccatctttgttaggtggtatgaaaatcagttggttaaag

SEQ ID NO: 290711 - DNA, 593 bp, Homo sapiens
  misc_feature (1)...(593): n = A,T,C or G
agtattggctctagagtctgtgcttattattatcattattttttaaagagacaggtttttactcgggagtgcagtgccaataatagctcactacagccttgaactcctgggctcaagctatcttctggcctcagcctcctgagtatctaggactacaggtgtgcaccaccatgcccagctaatttttattattttttgtagagacaggatctctctatgttgcccaggctggccttgtattcctggcctcaagcaatattcccacctccgcctcccaaagtgctggtattacaggtgtgagccactatgcccakgctctgtgcttattactcttcaccctggtgtactatacagcctcagcaagaatgcagagcccaactccaagtgactttcaagaattccaattagatctgagctaaagcttanggtaaaagttgaaatgtgaaaaagaataaaaagaagaatttctgagccaaacatacaagtatataggcaacgatattgcagggccatagcaattaatgtgctaattgctaacaatcctcctcttaagttaacaaagatttagtgaatgtgttcttctgaaaaaaaaa

SEQ ID NO: 290712 - DNA, 593 bp, Homo sapiens
  misc_feature (1)...(593): n = A,T,C or G
agtattggctctagagtctgtgcttattattatcattattttttaaagagacaggtttttactcgggagtgcagtgccaataatagctcactacagccttgaactcctgggctcaagctatcttctggcctcagcctcctgagtatctaggactacaggtgtgcaccaccatgcccagctaatttttattattttttgtagagacaggatctctctatgttgcccaggctggccttgtattcctggcctcaagcaatattcccacctccgcctcccaaagtgctggtattacaggtgtgagccactatgcccatgctctgtgcttattactcttcaccctggtgtactatacagcctcagcaagaatgcagagcccaactccaagtgactttcaagaattccaattagatytgagctaaagcttanggtaaaagttgaaatgtgaaaaagaataaaaagaagaatttctgagccaaacatacaagtatataggcaacgatattgcagggccatagcaattaatgtgctaattgctaacaatcctcctcttaagttaacaaagatttagtgaatgtgttcttctgaaaaaaaaa

SEQ ID NO: 290713 - DNA, 723 bp, Homo sapiens
ataacagtcatgatttacacctggcaattttcaaagagctgtccactctcacagccttcttgaggttaaggattacatcctattctcatgaggctggggtatcttagaaggagctctgctctaaaaggacaagtgactcctatttctttgcctcagttttctcatatttaaatcacaaaggtagagtaaataattccttgagcctttcttagatctgagatccttgcatttttctggaaatcagtgtcccaaggcatgctgtcttttctaggagttctctcatctctaactagcagcaacctgaccactagaataccttgctctttcttttgctaatctgttttatgtctaaaacttatatcctacccctttcttggcctcctcgctctggggttctcattgcccaagatttcacaacttagttaataaaagtacacttgttggcattgtcattgatcaatggtatttctcattttktattcagtaatgtggacaatctcacacagtttgtcaatttacgatttttgctgtgtgtatgcagaggtgcactcataatttaattttgaaaaaccttgaagaagatgttatccaaacagacgaaagggagttcatggttgtaaaaataatgatctagccttctctgactctctgctgttttaaagaactactacgtctggcatctgtccagtatttgtgtggcctgaacccattttattcacccat

SEQ ID NO: 290714 - DNA, 580 bp, Homo sapiens
ctgttcaaatggtcaagcagatggaaaggtgttcaatttcattagctataggagagaaattcaagataaacccacaattaaaaaccattacaaacccaccagaatggctaaaattaataagcctgacaatatgaagtactgtcaaagatgtggagtaaccggaactcctcttataaattagtgatgtcattgtaaattggttcaagcgctttggaaaacagttttttagtatcaattaaaacttggatacagcaattccaattgtggtatttacttatgaaaaataaaatgatatattcattaaagacatgcacaaaaatatttagcaactttatcataatggctgcatactaaaaacaacatgagtgtccagcaggagggtgagtaagcaaactatgatagattcgtacaatgaatgactgattcatacaatataatagaacacaataatataaaagaacaagctattrttatacaccaaaaatggatgaggcttacaaacattaagcttgatgaaaggattagtcacaagagaagacctactatatgatttctttatatgaagttcttgaaaaggcaa

SEQ ID NO: 290715 - DNA, 1011 bp, Homo sapiens
aggagatatatataagttaggggcaagaagacttgactttgtctgmgggattagggacagctgtcttgaataagtgacattgaacaggcaatcacaaggtgaagaccagagatgctggaaagagcaactctaggcagaaggaagacatgtgacaaagatcctgaggttgagggaccatagcaagacggtggctctgaaaggaccaacctacttctagtctttctgggtctcagttgaagaccacaagacccctttgtgctatcccaatcaggtaatttacctgcttacagctcttctcttactccctacctaccacctactgcagcacttcccaactgccctagcatgcactgccctgccacagggggcttacagtcgcttaagataccagtcttctccctggggccaagcatccttctccatttawttcttttgttgtgcttttgaggtcatatccaaaaaatcaatgccaaatccaatgtcatgaacattttctcwtatgttttcttctaaaacttttatatttttaactcttttgtttaggtctttgatcaattttaagtttgaatatggtgtaaggtaaggatccagcttcatttttttgaatgtggacaatcagttttcccaatactatttgttgaacagattgtcttttcccccattgactggtcatgacacccttgttgaaaatcactggaccatatatgcaagggtgtacttctgggctctctattctattccatttgtctatgtctatctttatacttttataccagtacatcactgttttttgtatgtgctttttgtttgttcatttttttaagagacgaggtctcgctctgttgcccaggctagagtgcagtggcatgagcatagctcactgctgccttgaactcctgggggatcctcttgactcagcccccctcattgatgggactacaggcatgagccaccacccctgcactcactgttttactatagtttaccataagttttgaaatcaggaagttg

SEQ ID NO: 290716 - DNA, 408 bp, Homo sapiens
ctcagttaattgagttttaaaaatgaataatggactcattctcttaaaggaagaaacaatcacctacacaatcttcatttcttgtagcctgtattttatatctttattttaatcagagatttttaaacctgggtatccagggatgccattttttttaatagaattcagagagtcactaaaattttattcaaaatkttgtgtgtgtgtgtgtgtgtgtgtgtgtgagagagagagagagagagagagagagagagagagagagagagagagagagaaatggtccacagctagctttatactcctgaaaaaattaagaaaccctagatcaatttcctcattttatcttgattcagatattcactgaatgctgagctatgtgctaaatactatcctaaatattttaactaa

SEQ ID NO: 290717 - DNA, 571 bp, Homo sapiens
aaaaccagctccccaagttaagaacacatggtttcaggagacatattttaaactcacattgtgctttgcaagctgtaccaatcaactttatattgcaatggctaaagaaaaaaaagcattctaaattgtctgtttctaccaataataatttaaaataattacatgtgaggtattaatgaataactcagaagactatatgcattgtatcttggcttatttaaaacaaataaacaacaacaaaaaaactctacacattcaaagaactgcgaattayttcagtagaacgttgtgtcctaggtcaccatgctttctttctctattattgtcaagatcaatttgccaaaaagcctcttacaataaacacagatataaatttcaaggttagtaagctaaactactactgggaataatgatacattaatttactgatgaagttaaaattggtatagagagaagtagaaagacagagctcttaagaaaaatgtattttacatggagaaaaagcaaatattcacctgaggaatatataaaaccataactgaattatgtttcaaccatataatgtgcagta

SEQ ID NO: 290718 - DNA, 568 bp, Homo sapiens
tcaggcacagaagggcaattattaagtttgtctgaagaaatacagctttcctcaggyaggtggagaaaagtggggctaggtggagtcaaagacaagaaaggaaatactgcctttgtttcggccaaacaacacaatctcaaaccctttataaaagtcatatctaaatgtcagtcaatcaagctttataaaacttaattatgacacattatgaatccaaatgacacaggaaagcagttttgtaatttttttaatattgcttctcaatgagaaaggctgcagtgactaagtaattggtcacaaaaaaatatgtcaacgtaagttcatttagagaatgacagaaatgtataggaaagtataacattaatcagatacatcatatatttagtgaaagatgctaaaatataacctaaaattataactcaacacaatatttacagtttaaatataaacttctatatttataacaacttaaaaatttaatttttagattaaggatagattccaagccatgacactacagtacatggtttgcaggtgacataaacaagatacatagtatctccatata

SEQ ID NO: 290719 - DNA, 568 bp, Homo sapiens
tcaggcacagaagggcaattattaagtttgtctgaagaaatacagctttcctcaggtaggtggagaaaagtggggctaggtggagtcaaagacaagaaaggaaatactgcctttgtttcggccaaacaacacaatctcaaaccctttataaaagtcatatctaaatgtcagtcaatcaagctttataaaacttaattatgacacattatgaatccaaatgacacaggaaagcagttttgtaatttttttaatattgcttctcaatgagaaaggctgcagtgactaagtaattggtcacaaaaaaatatgtcaacgtaagttcatttagagaatgayagaaatgtataggaaagtataacattaatcagatacatcatatatttagtgaaagatgctaaaatataacctaaaattataactcaacacaatatttacagtttaaatataaacttctatatttataacaacttaaaaatttaatttttagattaaggatagattccaagccatgacactacagtacatggtttgcaggtgacataaacaagatacatagtatctccatata

SEQ ID NO: 290720 - DNA, 569 bp, Homo sapiens
ttgtactgaagtatgttcaatgggcgtttaaatatactagtctagaatcctggagagatgaagactgcatcaattcagtaagtagttttgtattcttggtttcctggttcgaaccttgtcaccatatagtctattctcagcacagaagtaacagaagtcacttaaaaacctcactcagattactttcatcttctaatcaaagccctgtactgcttccccattttactcagagtaaaagctaaagtccttttratggtccatatagcctagccccactttattctttcatcttgtctctgacagcatggactagggaccccctcagtttctcagctccaacccacttgtcctcctaccattccttaaatgtccctgaccagtttacccttggtatccttctatttgctatatgttcttgcagagagctgcatggctaactgttcacgttcaagtccctgttcaaagtgcaccttctcagcaaagcctaccactctcatactatttaaaattgcagacttccttgttatttgctattgcttgtgtcttccccatagaatataggttcaata

SEQ ID NO: 290721 - DNA, 1121 bp, Homo sapiens
gaaagagactgaaaaaggccattacayacaacattcagaaagtactgtgatactaaaaaccactgaaatgcacaatttaaaaggacaaattttatggtatataaattctatttcaaaaaagcagttattacaaaagaaaaagcactggcagctgagctgttttcatagaaggtgggaggtaagcaaggaaagtgagacaggaatcaagtcactctttcaaaaagttcggccacgaagaaaagaaaaaggatggggtaatgctttaaaacaacaaacaatacctaatgttaaatgacgagttgatgggtacagcacaccaacatggcacatgtatacatatgtaactaacctgcatgctgtgcacatgtaccctaaaacttaaagtataaaaaacaacaacaacaacaacaacaacaacaaaacctcattccagcatagaggttgagtactctgaagtcaagcagccctgtgttttcttctttcttcagttacactgtaagttacatatgtgacttagtttcctcatcaaagaaatggatttaatgttagtacctgcatcactgggaatcaataattcawctcacttacctttaactctaaggttctttgttctcaagtaataaataatttgggctcccaggaccccacaggaaaatcatacataagtctaccaaccttactgctgccactttattgtaatacatacccattattagtatgagaagtattggctgctcagttaataaataggtcatttgttcttttcaactgaaataatgttgtatgtaagttgtaaacatggaataaactaaatccggaaaccatagcaaagaatgggtctttttaaacttttatatgacatcacataaaccaaatggcaaactaaactaaagcactttatcatttatcaatagaaattgwtcttaaattcatagtgcataaaatacacataaccataaccaataataaaacaactatgtttaataaaataaggtaataatgaagaatgaaaagcatccagaatatcaagttatttttgttatagttgttgctaattgaacctatattaaaaattaaaacttcactgatttctcatcatgtttaataataataggtgggtt

SEQ ID NO: 290722 - DNA, 593 bp, Homo sapiens
gcaataagaaagtatccctacttttcatatgaggaaagtgaacttcaaagcaggtaagggaatagcccartgtgtgaatgttcgaaagaaatatagatagaaactgaattcaggtcatctcaccttaaatcttgggcccttactactatatctttcagtaacaccacaggaacaaatctcagcaaaattattttcctataggaaaacacaataattaccatggaacagaacgaagtcttccaatttagggcatatatatttttgttgacaatggccaacacacacacacacacacacacacacacacacacacacacacacacacagctgttattttggtttctctggtgttggttaatggcagtatcattacttagtcaaccacactaaaaatttcagtgtctcacttctgctctcccctatttccaattagttactatctactcgagattcttgagtatattctgaatctctggagcttgtctccttttctttcctctgttcctactgaaattcagacttagcttttatctaactttaaatactgaaatgatcacaatctagtctccctggcaccactttcctttctcctc

SEQ ID NO: 290723 - DNA, 593 bp, Homo sapiens
gcaataagaaagtatccctacttttcatatgaggaaagtgaacttcaaagcaggtaagggaatagcccagtgtgtgaatgttcgaaagaaatatagatagaaactgaattcaggtcatctcaccttaaatcttgggcccttactactrtatctttcagtaacaccacaggaacaaatctcagcaaaattattttcctataggaaaacacaataattaccatggaacagaacgaagtcttccaatttagggcatatatatttttgttgacaatggccaacacacacacacacacacacacacacacacacacacacacacacacacagctgttattttggtttctctggtgttggttaatggcagtatcattacttagtcaaccacactaaaaatttcagtgtctcacttctgctctcccctatttccaattagttactatctactcgagattcttgagtatattctgaatctctggagcttgtctccttttctttcctctgttcctactgaaattcagacttagcttttatctaactttaaatactgaaatgatcacaatctagtctccctggcaccactttcctttctcctc

SEQ ID NO: 290724 - DNA, 607 bp, Homo sapiens
gtcttcccttgtctagtagactatattgttacaaactttgatttgacaatgatttgtattcattcattcactaatttttccaacccacctattccaattcagggttttgggtggccagaacctatctcagyagctcagggtgcaaggcgggaaataactctggacaggacaccattacctcacagaatgcacgcacacacccacactcattctgactgggacaatgcacatatgccaattcacctaatgcacacatctttaggatgtggaagaaaattgaagtacctaaaggaaacccacacggacatggggagaaagccagactccatacaaagaggggccttggctgggaatcaattttttttctcatcaatgtcactgaagaaaacaatgctgaacaaggcattacttgaggacctgttgtatatcacagaggaatttaccagagggtgagtggttgaggcaaaattagggctacaacatgaaataagtaatcctatttggaacttaacttattctattataaccatgctttgcctatattttagaaaatcattcaaactatagttaattcacaaagaaacactgccttcaattttgtgatgaa

SEQ ID NO: 290725 - DNA, 531 bp, Homo sapiens
tctccagttataagaaatgccataaaaagagttaagyttggtggaatgtctgctatgtgccaggcttttgatatatgttagctcaactaatacaacgatatacacaagaaatatgagatgagaactctgtaggtaagcagataaagctaactaaggtgacaacaaaagatactatgtacagtgttccaatagaatatataactttcataaggtaaataacgtacatatggcaagaatgtgtcttattattttaattattaggatatttaaggtaagcaaaataggtaggggttaatgtctgactaatccacttgctaaaatatatgaatctgagtggtactgggaagctccgcacatcaagttctagtttatgtgctgtggacaataaagtgatagatgcaaaacacagaggtatagcagaagatttcttagatgagttagaagtcagcatggtcttgaaagaaattcagcattagaataggcaggggcaagggtactctggtaggagaataccatttgtgtgaagaccaa

SEQ ID NO: 290726 - DNA, 531 bp, Homo sapiens
tctccagttataagaaatgccataaaaagagttaagtttggtggaatgtctgctatgtgccaggcttttgatatatgttagctcaactaatacaacgatatacacaagaaatatgagatgagaactctgtaggtaagcagataaagctaactaaggtgacaacaaaagatactatgtacagtgttccaatagaatatataactttcataaggtaaataacgtacatatggcaagaatgtgtcttattattttaattattaggatatttaaggtaagcaaaataggtaggggttaatgtctgactaatccacttgctaaaatatatgaatctgagtggtastgggaagctccgcacatcaagttctagtttatgtgctgtggacaataaagtgatagatgcaaaacacagaggtatagcagaagatttcttagatgagttagaagtcagcatggtcttgaaagaaattcagcattagaataggcaggggcaagggtactctggtaggagaataccatttgtgtgaagaccaa

SEQ ID NO: 290727 - DNA, 553 bp, Homo sapiens
tcaacatttctattttgaggagcaacttcttcttctgcctgaaatggaatatcacctttcaggtttgagaattttcagaccatgattttctattatttccttaaaaccsgaactatctctgccccagtaaatgaaatttgaaggtttactagtaatactgggagcaatttcattctgcaattctcccggctacatgaggatggacctattctctcctgaagctctctctgggccttttggaaggcatgacactgtctttagtttgctagggcatcacttaatttaccacagcagtcaacacggccacagcaactagctggtttttttgacagacttcaccaaattaattacataaacagcatttttggaatatgtatcctgaatttttatttgctaaccaatatcattttgactcttgttacccaaataaacttatgagttcagcaaatatctattttcatggttacacacacacacacacacacacacgcacaacactgattggtcctagaaaaagaaacaaaataattttttaattattattaccaatatg

SEQ ID NO: 290728 - DNA, 557 bp, Homo sapiens
tctgactacacatcctatattttaattaaattttcatttttcactgctgtgtatattaagctcaagtaatcacatggatataccgtccttataagaggagatcatgagacacagtttctgctgtcttctccagttctcaagcctcaagccctgaaggaagcaactctcttcagagcagttgacagaaattgaatcatcttcagctaacactagttataggcaaggyagaagatgctaaacaccataacggtactgatcacattcccacttttcaggtgccttccagtttaactacagagatagaaatatgcatactataaagcaacataagttctaagctaaatcatacacccactacaattcttgctgtttggaagtctaatgatggaaagattaaaagtataagggggttaggaaagacctaatggagacagactgtgaatgtgaagggtaagtcttatataataataataacagtagtaagaattaccagtaaaagagcatttagcatcatgttaaataattttcatacaataagcaaaacagctaatatatat

SEQ ID NO: 290729 - DNA, 557 bp, Homo sapiens
tctgactacacatcctatattttaattaaattttcatttttcactgctgtgtatattaagctcaagtaatcacatggatataccgtccttataagaggagatcatgagacacagtttctgctgtcttctccagttctcaagcctcaagccctgaaggaagcaactctcttcagagcagttgacagaaattgaatcatcttcagctaacactagttataggcaaggcagaagatgctaaacaccataacggtactgatcacrttcccacttttcaggtgccttccagtttaactacagagatagaaatatgcatactataaagcaacataagttctaagctaaatcatacacccactacaattcttgctgtttggaagtctaatgatggaaagattaaaagtataagggggttaggaaagacctaatggagacagactgtgaatgtgaagggtaagtcttatataataataataacagtagtaagaattaccagtaaaagagcatttagcatcatgttaaataattttcatacaataagcaaaacagctaatatatat

SEQ ID NO: 290730 - DNA, 590 bp, Homo sapiens
agccatctgtttattcacattagcatctagccaaacaataatattttttcttatattactaagggacttgccaaaaaaaaaaacaacycagccttccacttaatttgcatgacaacataggaggagggcccgcccaatgctgtctcaaaagaatcaaccagaaattagaatgagatttcaactcttaaaaatatttttagtttatcaagatgaaaatgtaactgatctgccttcatgcacaataataccagtttctgcctacaccttatctcgaggaaatttataaaagaactacacacacccattcggaagatttgcagctacaaacatttttaaaaataaacagtggtgcatgcctgtagtcctagctacttgggacgtggaagcaggagtatctcttgagtccaagagcttgaggttacagtgagctatgatcataccactgccctccagcctgggcaacatagctttatttctctttctaaaaaaaaaaaaaatacaataaaacagaaaataaaataaaaaataaccacatacacatatttaatcatttgacgagactttcgcctactagagcaatataagaaaaa

SEQ ID NO: 290731 - DNA, 631 bp, Homo sapiens
taaattggaaggataccaaaggctttgatgtagcagccaaagttcagtggcaataaattattcaaattaacataaacatgaagaagattttttggctcacatcactgaaaagttaagtagtataagcctcaggtaaggcctgattcagtggttcaacaaataaccaaagactcacatcctcagtgatatgtgtcatacrgtatgtgtgtcactgtatgacacacatcactatagcaagaaacgttaaatacactgattgtcttgatctaagttgcacacatgatgtgaagtcagcttccctgaaaatttatgaatactcagaaggaaaccatggactgtcttgttggagagaagtggcaaatgaatgttggaggtcagtaaaacagtccaccttaacatgcatgtctgggacacattctgatcctacacctgaggcttctgtccccactctttatcatagtccttgttttgagagcagtgatggggtaaacaaggatgtatttattgtcaaaagatgaaaaatgcccccaagtatccttattcctaattcagggagtagtagactaggtatcctaataggttctccaactactccaagttttataatgttgagaaagcaaaatgtaatgca

SEQ ID NO: 290732 - DNA, 551 bp, Homo sapiens
tttcacagacataagttccagttcttgaaggcagagaggacaagcatgatctaatatgtattttgtatacctcaaaacaaactcttcacttaataggtgaggaaactacagtctaagtggccaggagattttacttctaggaaagtaagttaaattggaaggataccaaaggctttgatgtagcagccaaagttcagtggcaataaattattcaaattaacataaacatgaagaagattttttggctcacatcactgaaaagttaagtagtataagcctcaggtaaggcctgattcagtggttcaacaaataaccaaagactcacatcctcagtgatatgtgtcatacggtatgtgtgtcactgtatgacacacatcactayagcaagaaacgttaaatacactgattgtcttgatctaagttgcacacatgatgtgaagtcagcttccctgaaaatttatgaatactcagaaggaaaccatggactgtcttgttggagagaagtggcaaatgaatgttggaggtcagtaaaacagtccaccttaacatgc

SEQ ID NO: 290733 - DNA, 630 bp, Homo sapiens
agctaacagtgcactctgaggtcatattgtacctcaaaaatatcctgtttcaatatctggaggaaagacaggttcaaaacgccaagcagattccgtgaggctgagaaaaatcaatgtcaaggcctagtgagggtgtaggagtcttaatgctaccactacagctctttgttaaagttcagaaaaagttacttttattagtgtgggtacatgcaatttaatggttaaaatgggtaaaaacatacttccttaatcttctcggaagaaaaaagataagcatacaactttgaacatattattccaggactaaatgttcacagataaccaggatgagtttggtctccttgaaagaacacataaaaatatttagttagttgtatctttttagccacttggaaaacaataatttaccaatgccaaagcttgaagtgagcactcaaattaattatgkagctatttgtgatttgaatttctcccaaaaatgtaatgaagtgagtattctctgaaataggggtcactatttaaaatcagccagcatgtggcatgttttgtggttctgcttatgctccttggcagcaacattacagctaaccaggactttttttagtactcgctcttggtgtgtttgacaac

SEQ ID NO: 290734 - DNA, 501 bp, Homo sapiens
ggctcatagttctgccagctgtacaagacccatgctctggcatctgamaggcttctagggaggcctcagggaacttttactcatggcagaaggtgaagcaggagcaggcatgtcacatggtgcaagcaggagaaagagagtgaggagggaagtgccacacacttttaaatgaccagatcccacaagaactcactatcaggaagacagcatcaagtcatgaggggtcagcccccatgatccaaactcctcccaccaggtctcacctccagcactaatgagagttaggtgaggacaaatatccaaactgtattattccgccctggcccttcccaaatttcatgtcctcctcacactgcaaaatataatcatgccttcccaacagtcttaactcattccagcactaactcaaaaatccacagtctgaagtctcatctgagataaggcaaagcccttctgcctacgagcctgtaaaatcaaaaacaagttatttacttccaagat

SEQ ID NO: 290735 - DNA, 586 bp, Homo sapiens
tccagcccaaatctctcttcaaggcctatatattccaacccaatattacaaaaccaaactcatttgcttcacccgtaaatctggtcctttatcartgttctctctcttagtgggtaggcctcatctcttcagttttacaagcaagaaatctagaaggcatcttcgagaccacctagctgcacaacattttttcaaaacaattgccagatcctgtccattttctactctatccttcaaatttgtccacttctccccatctctaccactcaaacttaagcttttaatgacctgcctgtattagtgaaataaacctctataggtgctcaaagcattttatctacctccttcctatcacttgttagacttgaaatttcacagttttaccatgattatttgaataatgtctgtatttccataggacctaccctatccaataagatagccaccagccaagtgtagctatttacatttaaatgaattcaaattaaataataattcagttccttagcagcactagctagatttcaaaagctcaatagccacacatggctagtggctatgatgatgaacagtacagatagacaca

SEQ ID NO: 290736 - DNA, 919 bp, Homo sapiens
gattgggtagtttggtagagagtgggggttcaacaactggctttgcctttacatcttcatattatgtttgtcacaacaasaagcatgtattactgataaatttggaggaaaaaattaaaaattagtattttaataagcaaaaatggagtccatattgatttcgccagttatcagcaaattctgaaaattagactttatattccaatactacttactgatatttcatcactgattctatttttttcaagagaaaacctcagaaagtgaaaggttagtgtaacctttcttttttaaattgtaaatgtttctgagtatgctttttcaaattaaaagaggcttaataaacaattctaaattacgattcttaattacaattgagcaactcctaactgtttgtcatttaagctttttgatgtgaatttcaaaaacagctatccacttttggtgagagagagcttaaagaagtgactggggtttacctggtttaaaaggttggaagtgggcaattaaaggtagtaatatcccagttggatttcataactacttaataatataagcttttatgttggtgtagtaggcatgtgtaacawacagctcttctcctgtttgcttttccccaccccttccattctgaggctttcttacttgctgcttgtatgcttgatcctttgatgacacaccttctctatctgctataggcctcttggctgccaactatataggcactgaactwtgccttggtaggctctcttgtatatatatatacatatggtaggggagggagagagaaagggagagaaggaggagggagagagagagagagcgagtgagctaacatagctggatcatgaagataaatagaggagtacagtggtatttggcctcctagatggcccccaatgatccccaccccctggta

SEQ ID NO: 290737 - DNA, 611 bp, Homo sapiens
caaaaaggtcctaaagtgttatactctggatcagtaattcttaagtgttaagagtacaaaagattaacctggagtgcttatttaacatgtatgttactgggccccaattctagtggttctctaacttcagcgcacatgaatatctcctggagccttcaataatgcagattcccaggccctgtcctcagaagtttggacaggttgagttggggcccaggcatctccgcttttaataacaaattcttctcctaaatgattcttcagtaagtaaactgaagatttctctttgaaatcagtgttttacaagtgaactatttttcagctctccaacccttcagtgatcattctactgaattcctataacactrgactaacattcttaatagtaatatagtatagaggtcataaggtaaatagaaatagcattggtccctcttagaagggaccaagttgtgtgccaaattcttcaacttaggccaacttgaatacacagtttgtattctaggattttgttgagacccagagctctttacttactttctattatgtaaaagagcaacaagaaactgaagccctaccacaaatttattgcaagtagtccccaagtttta

SEQ ID NO: 290738 - DNA, 611 bp, Homo sapiens
caaaaaggtcctaaagtgttatactctggatcagtaattcttaagtgttaagagtacaaaagattaacctggagtgcttatttaacatgtatgttactgggccccaattctagtggttctctaacttcagcgcacatgaatatctcctggagccttcaataatgcagattcccaggccctgtcctcagaagtttggacaggttgagttggggcccaggcatctccgcttttaataacaaattcttctcctaaatgattcttcagtaagtaaactgaagatttctctttgaaatcagtgttttacaagtgaactatttttcagctctccaacccttcagtgatcattctactgaattcctataacactagactaacattcttaatagtaatatagtatagaggtcataaggtaaatagaaatagcattggtccctcttagaagggaccaagttgtgtgccaaattcttcaacttaggccaacttgaatacacagtttrtattctaggattttgttgagacccagagctctttacttactttctattatgtaaaagagcaacaagaaactgaagccctaccacaaatttattgcaagtagtccccaagtttta

SEQ ID NO: 290739 - DNA, 645 bp, Homo sapiens
aacaataaaagttcttgtacatacaaagaaatagtaagatgtagtccacagtaaaaagaaaaagtaggcaataaaaacagatcttaagatgactctgatatcagaatgagcagataaggactctagagctgctgttatacatttttttttaagatttgatgtgatttattatgcagcaatgtatcatcaaatcatggagtatcaaaatattcagacattgcatgtccatgcttctaaatattttaggtttttaaatagatgaccaaaagaaataccaataattttgcataatgggtaacacttaagctatggtgattcacaaactcagaaagcttgtaattgaaaaaagaaatcatatttacttgattttgtctctgaatttccttatgacttgtactcacttctaatatactctctgctaatacaatatacctaaattataaattgaattatacttctctttcctacagcgagcctccatttaacaaatgtaaatagaaatctgaaaaatacataggatattctagattaagaatttctgtttatattttaagtaaaattttcaatgytttaagtaaatatattcatattgatcagtccttaaaattaacagaaacctttagtaaatcttcacattttgacaac

SEQ ID NO: 290740 - DNA, 452 bp, Homo sapiens
ccacatcctctgaactgggcacaaatggatggccggtattgattatagacaaaacaaatcagccacataccttccctgcagcatttccctcctcctctccctgacaccctaagaggcgggttttgccatgtgtagctggctcttctttcttccaacaagtgggaagaacctggtctggaaggtggctcctgccaagagcagagccagcacatggacctgtggatgggggttctgagcagctgtctgtggtgaggggcttataccagataaaaacgctagggctgccctctttggcagaaggaagggagccagggtccagacacggtggctcrcacctgtaatcctatcactttgggaggccaaggcaggcagatcacttgaggccaggagttcgagaacagcctggccaactggtgaaatctcatctctactacaaatacagaagtcagcca

SEQ ID NO: 290741 - DNA, 450 bp, Homo sapiens
cttcagcagacttaaacatccctgcctgatggctctgaagagagcagcggatctcccagcacagtattcaagctctgctaagggacaggctgcctcctcaagtgggtccctgacccctgtgtctcctgatggggagacagctcccagcaggggtcaacagacacctcatagaggagagctctggctggcatctggcaggtgcgcctckgagatgaagcttccagaggaaggaacaggcaccaatatttgctgttctgcagcctccgctggtgataccaaggcaaacacgatctggagtggacctccagcaaactccagcagaccagcagcagaagggcctgactgttagaaggaaaactaacaaacagaaaggaatagtgtaaacaccaacaaaaaggacatccacaaagaaaccccttccaaaggtcaccaacatcaaagaccaaaggt

SEQ ID NO: 290742 - DNA, 433 bp, Homo sapiens
acaaatgttggcaagggtgtggagaaactggaatttgtgtgcactgttggtgagaatgtaaaacggtacaattgatayataaaacagtatggcagttctccagaagagtaaaaatagaattatcacataatcctgcaattccatttctgggtatatatgaaatagaattgaaaggagggttctcaaagagtcacttgtataccatgtttatagcagcattattcacaacagccaaaaggtagaagcaacccaagtgttcatttacaggtgagtggatgaaacgtattttatgcatacagtggaatattatgcagcctttaaaaggaaggaaattctgacacatgctacaacatggatgaccttgaggacataatagtaagtgaactaagacggtcataaaagacaaatactgtaagattctacttatatgaga

SEQ ID NO: 290743 - DNA, 1647 bp, Homo sapiens
cagcttaaggatctgtgacttgtgctttttccaaagacggtttggggaacttcaatatttgaaggggaaagggcagagaggaggggaagagggaaataaaaaaggagggaaggtaggcagtgaggcaagtggttacattctcctgaggctttaattagtgctcagtgaatctgcatttcacgtatgagaagaggggagtgggggaaaagtcaattatgcattcatctcacactcaagtaaatctgcattccacataagataatgtaagcatgtgaaattatagctatctgtytggaaacaaaaggaaggtagttttttgtgtaattggactcagttcccaagcttaactttccctttggcatagtgattttgggttccaagattttaggtttctttcacgtcatcaccaaacctatgaccacattggcccttctgtccagcagaatgttggctacatacttcagtagccaagacctaaatttactgcacatctgcttgagccaataaaccgcaaaaaagaagcctgccaccagccctcacagtccagtgggtgttgggawttgtggacagcttaaggatctgtgacttgtgctttttccaaagacggtttggggaacttcaatatttgaaggggaaagggcagagaggaggggaagagggaaataaaaaaggagggaaggtaggcagtgaggcaagtggttacattctcctgaggctttaattagtgctcagtgaatctgcatttcacgtatgagaagaggggagtgggggaaaagtcaattatgcattcatctcacactcaagtaaatctgcattccacataagataatgtaagcatgtgaaattatagctatctgtctggaaacaaaaggaaggtagttttttgtgtaattggactcagttcccaagcttaactttccctttggcwtagtgattttgggttccaagattttaggtttctttcacgtcatcaccaaacctatgaccacattggcccttctgtccagcagaatgttggctacatacttcagtagccaagacctaaatttactgcacatctgcttgagccaataaaccgcaaaaaagawcagcttaaggatctgtgacttgtgctttttccaaagacggtttggggaacttcaatatttgaaggggaaagggcagagaggaggggaagagggaaataaaaaaggagggaaggtaggcagtgaggcaagtggttacattctcctgaggctttaattagtgctcagtgaatctgcatttcacgtatgagaagaggggagtgggggaaaagtcaattatgcattcatctcacactcaagtaaatctgcattccacataagataatgtaagcatgtgaaattatagctatctgtctggaaacaaaaggaaggtagttttttgtgtaattggactcagttcccaagcttaactttccctttggcatagtgattttgggtwccaagattttaggtttctttcacgtcatcaccaaacctatgaccacattggcccttctgtccagcagaatgttggctacatacttcagtagccaagacctaaatttactgcacatctgcttgagccaataaaccgcaaaaaagaagcctgccaccagccctcacagtccagtgggtgttggga

SEQ ID NO: 290744 - DNA, 588 bp, Homo sapiens
acccgggtcacagcagggcctagcaaagtgtttgctgggtgtaatgggctgaactttgtgttccctcaaattcatacattgaagttctaaccctcagtacctcagaatgtgactgcttttggagccagagtctttaaagaggtgatttgggtgaaataaggtcactggggtgggccttaatccaatatgactggggtctttataaaaagaggagatcggacacagaaacatagaagactgtgtgcagacagaagagacgcagccatcagaagacaaggagagaggcctcagaagaaacccaccctgctgaccccttgacctcrgacttctcacttccagaactgtgagaaaatacatttctgttgttgaggccacccagtctgtggtcctctgtcctggcagtcctggcagactgctagactgtgtgaatatcgagtgaccatgttggggtcctagcacaaggcctggcacagagctggtgtgtggcgaaatctctgacatccagaaaccaccctctgagtatggagagccacactggtcgtttgtttatcttccaggaatgagtggataggctcactcacgagtgcc

SEQ ID NO: 290745 - DNA, 539 bp, Homo sapiens
atcattagccagagtaaaccacattaaatagaacactcaagcaacatgcagggaccrgctagaagcatgtgtcccctgtaaatctggtcagaaatagtaaatacaggaaacggagacaatatgctgccctattagttcattctctttcataattaacagcagatgaatgtaagcagtgatacaatctttatcttacccaaagcaccttaatcctctgagaccccagctttactgtctgcagaaagtgagtcctttttaactcatttaacagacatcaattgagcaactactatttgccaaaaactctgctaggagctagcgtggaatgtaagcctaagtaagacatgatgttggttcccaggagcccaggagacagacatgcaaacaaataattataacgcactctgggaaaagctgtaacagactctatgcaaggtgcatgggagctcagagcaagcagtaattagtttggctgctgagttaggaaagacctcaaggagaggcagcatctgaaataacatcacagatggatgggtcca

SEQ ID NO: 290746 - DNA, 530 bp, Homo sapiens
atcccggtatctacctctatccttctaccagaagtattctagtgtctactgcttgatcaccacccagggtagcatcccatgccctggtcytatctctcctccttcagcttgcgagcctgccttgggtgatcaatttttcgtgcaattttttgtgcaggcatacaaatcagagaaaaagccatgtgcaaaaaagaattggtctgggcagcacaggcaattacagaccagggcagagtacagtgaaggaccgtttgaggattagacaggaggggcagtaagcttatctccagtggaggaagcctctccataggtcgtgggcatgagggagaattcagaactggagtgtctttggacaccttacatattgtatcacacagtctcctgcctacttcaccacggttttggctgctcattctcttcacaatcagtgcaaggtcaaacaaattttaccaaacaatcctggaagagcaggattatttccctgaacattgcatccccttcctactctgttggtgtgcgggacaaatgca

SEQ ID NO: 290747 - DNA, 466 bp, Homo sapiens
ctctcatactggtttatttaagacaacttcctcttgtcttagccaagaaataatctgtggatcatcctcagtttgtaactgccttcagagtgatctatgttttctgggagagagaaagcttaaccccaatcccccaggactgcagggatccctgcaggtagaggggggacagtctgccaaacacagaacccctctgagagaagaacaaagggcagagctgaaattccmgcagtcatctctccttaaaggttgcccttgttgcctccattcatggaggagagagttggccccattcactcagcagcacaagtctgattctcctgatagtgtggtgagtagacagtgcagagggcctgggagacagaagacccaggttctattcccagttccacctctaattcactttatgaccttggtcatgttgcttgacctctctgggcctcaaattcttttccagaaaatgaga

SEQ ID NO: 290748 - DNA, 530 bp, Homo sapiens
atcccggtatctacctctatccttctaccagaagtattctagtgtctactgcttgatcaccacccagggtagcatcccatgccctggtcttatctctcctccttcagcttgcgagcctgccttgggtgatcaatttttcgtgcaattttttgtgcaggcatacaaatcagagaaaaagccatgtgcaaaaaagaattggtctgggcagcacaggcaattacagaccagggcagagtacagtgaaggaccgtttgaggattagacaggaggsgcagtaagcttatctccagtggaggaagcctctccataggtcgtgggcatgagggagaattcagaactggagtgtctttggacaccttacatattgtatcacacagtctcctgcctacttcaccacggttttggctgctcattctcttcacaatcagtgcaaggtcaaacaaattttaccaaacaatcctggaagagcaggattatttccctgaacattgcatccccttcctactctgttggtgtgcgggacaaatgca

SEQ ID NO: 290749 - DNA, 489 bp, Homo sapiens
accttataaactaggagagactggggtactatttttagcattcttaaagaaaagaaatttccaccagagatttcatatcccaccaaagtaagcttaataaacgaagaaataaaatctttaccagacaaaccagsattgagggaattcattaccactagaccagtattagaagagatccttaaggaagttctaaacacagaaacaaaagaacaatacctgctaccacaaaaatacacttaagtacatatcctgcagaccctataaaagcaaaaacaatagaaactacaaaacaaacagctaacaacatcataataggaccaaaacctcacatattaatgttaaccttgaatgtaaatggtctaaattcttcacttaaaaggcacagagtagcaagttggataaaaaagcaagacccatccatctgctattttcaagagacccctgtcacacgtaatgacacccataagccagaagtaaagggttgaagaa

SEQ ID NO: 290750 - DNA, 537 bp, Homo sapiens
gttggccaggctggcctcaaactcctcatctcaagtgatccacccacctcggcctcccaaagtgctgagattacaggcatgagccatcgtgcccagccggatttgtgttcttaacattagcttgggcaacartggagtagactgaggggatagattctacttttacaattagaaagccttgggctcaagtcctgggtctttcacttgctcgttatgtggtcttgcacaaattacttaatcttcctcaatctcatctgaaaaacaactggagataaaaatatctaaaagtgttgtcaagaggattaaaataactaacacccttgatagcatccacttttctcagtattgctaaatcatttctacccaggttaatttgaagattatctgtgaatttatttagcatgcaggcataatgttttttacttattttccttgtttatttggtgtatatttgtgaagcttttgctgtgtgccagacactgcgatttttagaacacactgagcactccctgatggtatcacctgctcacatggtcc

SEQ ID NO: 290751 - DNA, 565 bp, Homo sapiens
ttccacatgcttctccttccccaatgaaagcaatcttctttttctaatagagtttgcttccatttctgtctacccctccctcaaaaaagaaaattacaagattagctaaaaattagattgcagtatatttcacaagttagtacttaactgaccrcgtattgattcatgacggttaatattgactcctaagtacactacgagacccttagcagtagaaacaccatccggagttttccctgtgttctcccacatatccagaacagtgtttctcaatcagggcaactttgccctcggggggacatttggcaatgtccagacacattttgatggtcacgactgggtcatggtagatgttactggaatcaagtgggaagaggtcaggatgctgttaaatgtcttacaatgcttgggacagcccccacaacataggattatcctacccaaattgtcaatagtgctgaggtggagaaattctgatctggaatcattctgggcccataaaaaatgctcaaaatgtttgttgatggaatacaactggctcgtgttcacaggaagacaaatgaca

SEQ ID NO: 290752 - DNA, 592 bp, Homo sapiens
tttacacttctgagcaatcagcacctttatgtgcaatttatttccagttttaaaaaaaatgaggtgggtggttcctccgtcaaagttacctccctgacttttaacggctcattaaacgggaaaggattgagaggatccttaatggtgaatggggctggaggctcsgccactgaaaaggactgggtagactgaacctagaaaggagaagctaatagggcccagagtggctgccttcaaatatctgcagggctgacagtgtggacaggaattaaatatgctatgtgtaggagcaagttgcagagagcaggtttcagtgcaacataccaaatgtttttctgctacttagaatagtctaaaaatataatcccctgtcaaggagtagtgagtttcccatcattagagttatgcaagcagaggctgcatgaccattttgcagggatgtagtaattatttcaaacattaaagccatttccaattatatagttcccaaatttaaaacttccattgcctatttggacataaggggtagattcagcttatttgctttgccttctgcaggcttgactccataccagtgatagaaagagtttcc

SEQ ID NO: 290753 - DNA, 583 bp, Homo sapiens
atcattttcttcccttggagctgatgttgactgtaccctctccgaggtaaagcagtataagctacagcctaaagaagaggtggaccaattatgataataatctatcctaaatcgtggtagttaaatgtgttgttgatagggaattagaaggactaaggtttgaaaggaaactaatgctgtaatgctgaaaaacaatcccttccttgaagccataagaaaatagtgtgtctcagcagaagagtagtggtctgaatggggataaaaatggggaaaaaaacatttagaattgttcagcgcttatacagcgctgtctaaaggacagtgagctaagaatatccttgtttctaaatgagtattttctactgtgggagagaaagaacttgatagcaaaatacattattgctttgctaaactcatatgctaaataaatattttgtgattmttttgtttgggggagggtaacttggtactaagaagaagagtcaccaaacagaagcttgagtcttcccattaaaaatgatgaaacttcattttacagttaattagttggtgttttcacctgtctcattatgagtgccttctc

SEQ ID NO: 290754 - DNA, 549 bp, Homo sapiens
ataatagctttctcttatttacagtggtactcaagtctattttctctttgctcccactgcagaattcctttaagtgtatattcaccctgtctttttaaagcactattacaaggtaacatataattcagtgttcagtcttcgacattaacaataattcatagcatagtagaggaattaaatgtaaaatttcaaggtccctgagtggcaagccatcaactgcttgacttttaatagaaatatatagagttgttcctcagtttctggatcagaaactaatagctggctggaaagggctcgcattttttgtttgtatgcaaygtaaatggttatctactgaaatctcaatgccctttaataatatagagtaaacatcagcagatctcgtcagtaaaaacaaagcagtaagtattttagctttgtgattcatatgatctttgttgtaactacttgactatgccattacaacatgaaagcagccatagagaacattgaaaggaataggtatggatgtgttttaataaaactgtatttataaaagcacatgccaga

SEQ ID NO: 290755 - DNA, 626 bp, Homo sapiens
tgatgtgtctttctcagtacagtatgtcagaaaatatggaatgttcatgtgtcttattactggtaacgttaactttaattacttagctaagatgatgcttgatagacatttcaactataaaggtactattttttggctttacaaaaaaacttcaagtctatgtaattatcctatttcttatcatccaatttcgcatttaattttagcattcattgatgattcttgcttgygataattattactgtgctgtctgccaaatggtgactttctatggtcatcatgcattctacatttattaattagcactttacagtgggaaagagttatactttgtccttctttctttctttgtgagttttattaatattgttcaatgacatatattttattttctgggttattgtccaatattatcattatatagttgctaaaatttacccagaaatagcccttgggagctccttcaaattggttccagtgtttttgataagatcctatttcttaattttatcactgtttaactttctggtactacaagatattctgggatcatcttatttttttctgtgcttcagtcctggaatcagccatttttctaagccatggtattttttattggaaaatga

SEQ ID NO: 290756 - DNA, 1182 bp, Homo sapiens
gcaaaattgactttgatagggggtagaaaaaagggacttattgcttattagaaaattgtcttcctgtaatcccagtactttgggagaccgaggcagatggatcacctgaagttagaagtttgtgaccagcttggccaatatggtgaaaccccatctctactaaaaatacaaaattagcygagtgtggtggcacaggcctgtagtcccagctactcagagcttgagacaggagaattgcttgaacccaggaggtggagactgcagtgaaccaagatggtgccactgcactccagcctgggcaagacagaaaactgtcttaaaatgcaaagaaatactataatggaatttcaactatagacttaaattatgtgaactttgcttgcagggttttatagggaaaaatccttactttaaataagcgtgtgaggccttaacaagttaaaaatgcaacagttttaaggctcactcactgaggtgatagagaagccacttttggaaatcatagctggaaawttaagtgcagatgcatcttccagcaatttcactactttgtgataagtagtgaatagggtcaaaaaattaaaaaaaagaagggtaatgaaagcacaaaagaaacacagcttagcctctgacagagtaggataagataaggcttgtcataagaagcaacttcagtaatattcttagaataattattcaggagaagaagaaaagcataggtaagaataaacagacaaaaagtcaagatgagggaaatgaataaagtcccagaaaatagaagaatggaaacaaagacacaggatgaataatgttcaagccatttaaggaacaacaacagcaacaacgaaccaaaaacccaacwatacagcaaagaaatctcaaccaatctgagcagaaggaattaaatctaaagtgatggtaagttgaaaacacaaataagaagacaggagtaagtccaaagatatctatagtcacaaaaatgtgttcaggtaaatttcatctattgaaaaacatactgataaggttgtccaaaaggtagttgagtagttatggctaagaaagggttcagccttggtagtaaaataattggacaggctaaaagttaagagcttctcctgcaaccaagcatttgctctctttgttttacttatctgttccaataatgctgctacacctgggggc

SEQ ID NO: 290757 - DNA, 619 bp, Homo sapiens
gaatcatacacagcagagcagacactagttaagttacagcaagatttaaatccatttgaataaatatgtgagctaaggagtaaatgtagaagatacatttttattttaaaaaatatgttgaaacaggttttaaaatggacatgaaatatccaattttcttcctcagaaatcaaaaatmcatacagaaaaaaatgtaaaaaatataattttaactcctttagctgagagcaggacaacttcaatagtgaattctaatgtccatgctttgaacctggattaaaaaaaaaagactgcattaaaatactcagtaattttttaaggcttgtaaaatggatggtgatttatgaaataaatagtatgtgaaagagtctttatattaatttttcatcaagttgtatttgcagataatatattttttaataaaagatttctctaactaaatcctacgctactgtgaaaaacacatatgacaggaaagctgacctttatgcttcagtgaaggaaattattaaggaaaatttagagaaaaatacatatgacaatacataaaaatgagcacgaagatgaaaatattctaagaaaatggtggagatgtttatcaataataagttaaaataat

SEQ ID NO: 290758 - DNA, 1281 bp, Homo sapiens
cacatcctgttggcagagcaagactccctgtctctcaagatactataccaatagcaactgcctgtaataatggatcctattagatctttcaaaaatcttttcccctcttgttctccagaacaatttacttactscttgcctctctaaattgctttagatactggatttgtgcccatctgctcactgttttcaagtaatttgtataaaatctcaacacttttataaatctgttttgagagactgaatgaaacaaaagtcagtgacttaggtgtcctgggctgtagttggtcttggcataaagttatattctggcaataagaaaacccctatagagagttatataactgagagagttcagttagataacatgaaaaaggctactggcattcattaagaagtcagtacattttagccatttataactaaaataaattttattaggatttttaagattgaacatcaccaaagcttttgttcctttgttttgagattctaaccatttactttaaataaaaatgatttattttcattgtcagaaatttttaaagtaaatcacaaaacttcaataagatattcatgtatgaattgacgtagaaaaaactgtcaattattgagtgatttccatatagtaagcaatttacttggcagtttaaatattcaaatctgwttggtctgtgtgcatcaatgctctgatgtaaggcattattgcacaatataattctaattgtactgcctttaatctttttgaacacacagtgaatcactatgttttttatgaaagaactaatacagtctgtaaagtatgaggaatacaaggctgtcaccagatattgawccatagccaggtttctactggtgatattaaattaaatttcatctctcctcattctaggtctggaaaagagaataataaataacaccaacccctcttctaggcacagtgttagctttacatcaaaataaattcaatgataacttaagtagtttttattctataccatggatgtattttatagaatttaaaatataactcttaactatcatacttcttctgttatcttgccgacaacacccacaaagccttaggaaggtaaccattagagcatttaatattttcatatctttccctttttcagttagattttgtaaattgtgttatatctaagccctgagagcaacgcaaagagcactgaatatatttaacccttccatttcagttaatgcgtgcaaaagattagcaaaaataataatatacacttgtatgggattgtatgtgaatgt

SEQ ID NO: 290759 - DNA, 516 bp, Homo sapiens
tagcatctcacaaggcaaagtcactaaactgataggtactagggagcaagaaatacaaattagtcttcctcacatgctaaactctgagcacagtgcttggtggattccaggtaaactgatgtttattatgattaattaaaataaaagctaaattcattactttatcatcccactttgtatttatgtatcatatatatccaaaagaactcaagtctggcttaactaatcatgtagaaagaaaggtggtatacaaccaactaatttagactccaggccaattccagtcccaacatttatttgagtcatgaaataattyaactggctgattccttttgggaaaatgatgctgtcagtgtagaatcctaaagactcgttctactgcataaaagcctatgagccacaaagatattcctagttttgagctgtagaatccattatgccaatgtattgcatacgtatgcgtgcatgcatgcacacacacacacacacacacacacagtgcaaatacatgtttgt

SEQ ID NO: 290760 - DNA, 508 bp, Homo sapiens
acatgaaactctggacaagattggttttgagcctaraaaactctgcaatgagttataatggtataatgttatatttattatactatattctacaggtgttttgtactatatgtcaaaagtcactacctactaaaatgctggtctcaatttattagcagcctcatcgttcaacatagccaactagagattttgaaataaagttaaaaatgatgtaaagctaccctaaaaaaatgttgccaataattagattccctatatttgattacctatcttctccggctgtaagcttcttatggagggagttagtatcctacatttagattgctttgtaactcaaaatctaaagaaattaaagtttacattttaattctcctgctcttttgagttaatattccaagaaatttaaattgaaaatttgtcccatatcattttctcttttgctgaattcagcaagaaaaatcctaagatctatataagagttggggttctttctgcagttgtagccttg

SEQ ID NO: 290761 - DNA, 589 bp, Homo sapiens
tgaaaatgttatctcagtggaattccctttgtttcatgatgtgtgtttgtggcacaaaattaactttacaataaaaatgctcaatctaatgtttacattggaaataacctgaaactaaaaggtaatgtcttttgttttagggcttgtgcttttttaaaaaattctatttttaagcacctgttacaacaggtttggaatcaatcttgagcacttactccaaattaaatttaaccatactaaattagcactatttctgctgggttagtgttataaaactatcaacataagttgcattaaacactacttttgtgaaacagagcaaatgctttttaagctggcagagacttttgtatgggagaactaagtatccaaatgaggtarataaagcaacctacattaaaaacatctatatcagaaaataatatttggagacaagaaggaatttgaggcaaaatattagtgaaacctttgactgtgtgacaacaaagttgttcaaaagaaatcattaaaacctaattaatttgggaaacaaaagatgctgtaatgtcagcccaccaagattcaatattctttcatgtgagcaagagaa

SEQ ID NO: 290762 - DNA, 1207 bp, Homo sapiens
attactaatcactcaaaagaatgagctatcaagccatgaaaaacatggagggaacttatgcaaacttagtaaggcatattactaagtgaaagaagccaatgtggaaaggctatatactgtatgattacaaccctgtgacattcaggaaaagccaaaactatggaggcagtaaagagattagtggttgccaagggtcaaggggrtgggagggatgaatagaagcacagaagatgtttaggtaatgaaagtactctggtggtactatacggtgtaatggtggatacatgtaattatggattcctccagactcataaagcatacaacactgagagtgaaccctactgtaaactatggactccagtaataattatttgtcaatgtacattcattaattgtaacaaatataccctctgctagggtatatccgtaatggagaagtctatgcatttatgggggcagagtatatataggaaatctctgtaccttcttaattttgctgtgaacctaaaactgctctaaaaatatagtccattaaaattaaaaataggcagatttgtgtaatatttcttagagatagagatgggtwacatctactagcatcaacaccatccaggaaaacatgacctaaacaaatgaactaaataaggcatcagagaccagccttgcagaaacagagatatttgatttttcagacagataattccaaatagctgtattgaggaaactcaaagatattcaagataacacagagaaagaattcagaattatatcagataaatttaacaaagagattgaagtgatttttttttaaaatcaagcagaaatgctggagatgaaaaatgcaattggcatactggggaatgcatcggagttctttaataacagaatagatcaagcaaaagaaagaattagtgagcttgaagacagacaacttagaaatatacaaaagagacaaaagaaaaatgaataaaaaagaatgaaacatgactataggttgtagaaaatagcctcaaaagggcaaatctaagagttattgtccttaaagaggaggtagagagagagacagagacagaaatttattcaaatgggataataacagaaaactttggaaacctagagaaatatatcaatatccaagtacaaccaggwtatagaacaccaagaagatttaaccgaaagaagattatctcaaggcatttaataatgg

SEQ ID NO: 290763 - DNA, 510 bp, Homo sapiens
ccatgggacaaaagagtctgaacaacagacttcagccctagaccttccctctgacagagcttacccaaatgagaatgtagcaggacgagctgcagacaaaacctctcaggcaccgagttatggaaggaagggctttattcacctgggagcatcggcaagctactgcctcaaaatccgcgctccccgaatgctcaatttctgtccctcttaagggctcacaacactaaagatttcacatgaaagggtcgtgattgatttgagcaagcaggcggtacgtgacaggggctrcatgcacggatggtcagagagaaacagaacagggcagggagtttcacaatgctcttctatacaatgtctggaatctatgaatgacatcggtttctaagttatgaattgatttttaactactggatttaggccaggcaggcccaggcctggtttcaggcctggtgccaggctgcctgtctttggttttacttccttgttgtttttcttaaaacaggtactgag

SEQ ID NO: 290764 - DNA, 510 bp, Homo sapiens
ccatgggacaaaagagtctgaacaacagacttcagccctagaccttccctctgacagagcttacccaaatgagaatgtagcaggacgagctgcagacaaaacctctcaggcaccgagttatggaaggaagggctttattcacctgggagcatcggcaagctactgcctcaaaatccgcgctccccgaatgctcaatttctgtccctcttaagggctcacaacactaaagatttcacatgaaagggtcgtgattgatttgagcaagcaggcggtacgtgacaggggctacatgcacggrtggtcagagagaaacagaacagggcagggagtttcacaatgctcttctatacaatgtctggaatctatgaatgacatcggtttctaagttatgaattgatttttaactactggatttaggccaggcaggcccaggcctggtttcaggcctggtgccaggctgcctgtctttggttttacttccttgttgtttttcttaaaacaggtactgag

SEQ ID NO: 290765 - DNA, 510 bp, Homo sapiens
ccatgggacaaaagagtctgaacaacagacttcagccctagaccttccctctgacagagcttacccaaatgagaatgtagcaggacgagctgcagacaaaacctctcaggcaccgagttatggaaggaagggctttattcacctgggagcatcggcaagctactgcctcaaaatccgcgctccccgaatgctcaatttctgtccctcttaagggctcacaacactaaagatttcacatgaaagggtcgtgattgatttgagcaagcaggcggtacgtgacaggggctacatgcacggatggtcagagagaaacagaacagggcagggagtttcacaatgctcttctatacaatgtctggaatctatgaatracatcggtttctaagttatgaattgatttttaactactggatttaggccaggcaggcccaggcctggtttcaggcctggtgccaggctgcctgtctttggttttacttccttgttgtttttcttaaaacaggtactgag

SEQ ID NO: 290766 - DNA, 573 bp, Homo sapiens
ggaccattatggtaaagaatcgaggatatctgagaggcagggaaatgggtggtgcatgagggaaatttaagacagaaaggtcagtggtctacttggctggcagaagtgcacgatgagagtcaagaatgtaacagatcagtgaagcatcaaaaaaatctgacaatgagcttttggatctcaatagtggggaactgagattcaagacaactccagcaccttggaggaactggccagtatatcaagaaaagcctctggcatggtcaataaggtaggttcccaggaactagaagytgggttataagaaataaagattaaaatgttgacctagtaatggctaatacagtagtccccactcacctgaagtttccatttctacagtttcagttattgtggtccaaaatattacatagaaaattccagaaataaataattcataagttttaaattgtgcattttttctgagtattgttagaattgttctattttgctattatttatcaatctcttactgtgcctagtttaaattaaactttataataggtatgtctgtgtatatgtgtatatgcatatacg

SEQ ID NO: 290767 - DNA, 538 bp, Homo sapiens
taccagttacgttttcactgcggtgtgttcttgttatctacatcactgaatgttatttattttaaaatatattttacacagtgcattcatgttcacaaaatgtgtcctggttcacaaaacgttttctgttccccttaccttcataactgcttcattctatgagcctgcattgatacaccacgtacccttactgctttacttgatgatttttaaaaactatatattgcttttccaagtagattatatatttttacctaggacaaagtaacaatacttgtaggtccttttatcatgcctttttaaacaatcatgttgaagtataattgatataaaatttatcaatattaaatgtacaattcaatgrggttgaaaaaatatgtacagtgatgtaaccaacaccaacacaatcataaaatatttttaccccttcccccatcctagcccatgaaaactactgagaagatttctgtcactatagttttgcctctttctataattttatataattagaatcataaaatatacatcatagagatag

SEQ ID NO: 290768 - DNA, 1875 bp, Homo sapiens
ttggctatagtatagggtacagcaaagaagaaataaaaactaaaatgtaaaatgtagagtctaaaagtcctataatgcttaagctagaagagatctcaataaccctttgtcttatctcgtgtttttacagatgtggaaaacaaatgtcccttttcacatgttcctttgtttatatgccctgttctaaacactgatttttaatttgtttgtgttgtcgcatcgccattgataggctcaaatgtaattttgatgcaaatagcttgagtaaaatttactcaacaaattcatccatgaaatatatacatatatgagaaacggtaatcacatctttctttttccagccctgacagccaaaatttgaacatgatgyatcttttccccagaattcagctggttaagtttgtaaatttatttggctgcacaagagaatgaggctaagctatactttaagtttcataggccatgttcttcgtttttactattcttgcatttcaggacactgcacaagaatcaatagcattggcttcagcctattacctaagaagtacatgtcctttagatttgcccttgcagattttgcctggtgtcctcaaatctgagtcccagtagwaattttagcatatttaatttaattcctaacagttcctcacataagcagatctcacataaaagcagagtgtgttaaatattacaatcaaatctttaaagtattactcataatagatcttctgaatatactactaagaatttaggtgcctgttgactttaactttattaactcactatgatgtaaataaattatgtttaaaagaaaagtttwaaaaaatgaatatattgcacttaaaatgactcaaggtttctaagcattgcacactgccacctagtgctaaatgtctctttaacaccaaatgcacaatggatgtcttccacaaagtggaaatgctatattttaaacaaaatttattcagaacaacaggtctaaaatactttattcataattccttcaaaataagaatgctattggagataaatgcaatgacatataccataaaatcacacccatctcaaattaaaatttaaaagatctgaatggattagttaatataaaaaattgcaagtcttgttaataaagacatcctctttttaaaaacaaagtgatttacaggttttgttaaggaagacaagaaatttttacttttttaaaaaaaagtgatttttaactactgcgcatcaattatgcagwaattttagcatatttaatttaattcctaacagttcctcacataagcagatctcacataaaagcagagtgtgttaaatattacaatcaaatctttaaagtattactcataatagatcttctgaatatactactaagaatttaggtgcctgttgactttaactttattaactcactatgatgtaaataaattatgtttaaaagaaaagttttaaaaaatgaatatattgcacttaaaatgactcaaggtttctaagcattgcacactgccacctagtgctaaatgtctctttaacaccaaatgcacaatggatgtcttccacaaagtggaaatgctatattttaaacaaaatttattcagaacaacaggtctaaaatactttattcataattccttcaaaataagaatgctattggagataaatgcaatgacatataccataaaatcacacccatctcaaattaaaatttaaaagatctgaatggattagttaatataaaaaattgcaagtcttgttaataaagacatcctctttttaaaaacaaagtgatttacaggttttgttaaggaagacaagaaatttttacttttttwaaaaaaagtgatttttaactactgcgcatcaattatgcag

SEQ ID NO: 290769 - DNA, 543 bp, Homo sapiens
ttctgtaagaattagtaatagcatgcataaagagacagtcacatagtagttgttcactttgtattagcagttgttatctacacagtgaaaggcttttaacaagtgattttttttttttttttttgagactgagtctcactctgtctctcaggctggagtgcagtggcacattctcagctccctgcaacttccaccatctgggttcaagcgagtctcgtgccgcagcctcccgagtagctggaactacaagtgtacactgccacacccggctaatgtttgtgtttttagaagagacggggtttcaccatgttagccatgctggtcttgaactcctgacctcaggtgatccacctgccttggcctcccaaagcgctgrgcttacaggtgtgagacattgtgcccggccttaacaagtgaatttcaaggttgctttctttgtcatgtttctgtgatctctatgtgatatatttgctcagaatatcatagaattgcagagtccaagggaaccttagaggttttctagtccactccctgttgagggca

SEQ ID NO: 290770 - DNA, 543 bp, Homo sapiens
ttctgtaagaattagtaatagcatgcataaagagacagtcacatagtagttgttcactttgtattagcagttgttatctacacagtgaaaggcttttaacaagtgattttttttttttttttttgagactgagtctcactctgtctctcaggctggagtgcagtggcacattctcagctccctgcaacttccaccatctgggttcaagcgagtctcgtgccgcagcctcccgagtagctggaactacaagtgtacactgccacacccggctaatgtttgtgtttttagaagagacggggtttcaccatgttagccatgctggtcttgaactcctgacctcaggtgatccacctgccttggcctcccaaagcgctgagcttacaggtgtgagacattgtgcccggccttaacaagtgaatttcaaggttgctttctttgtcatgtttctgtgatctctatgtgatatatttgctcagaatatcatagaattgcagagtccaagggaaccttagaggttttytagtccactccctgttgagggca

SEQ ID NO: 290771 - DNA, 620 bp, Homo sapiens
ttggcctcccaaagcgctgagcttacaggtgtgagacattgtgcccggccttaacaagtgaatttcaaggttgctttctttgtcatgtttctgtgatctctatgtgatatatttgctcagaatatcatagaattgcagagtccaagggaaccttagaggttttctagtccactccctgttgagggcaagtgtcccttttacaactttcctgattttattctatactgtcatgggcctctggaggaacttacaattatgacagcattcactcttttccaaaaagagtccttttcattgctgaatatttaatggcttgaaaaattttctatctattgatctgagattcttttgcctggtaatgttcatacattaattccctaattcttttatttcagagataacaaatgacagcaactcttcacatgtcaaaccttaactattcaayataaatatgttactttctttcatgagttccccctatgtcctttcacttctagaccaaatatccttggtctttcatctattcatcctatgctatgattgcaagattcttcacttttatggttggcttccttcggctgcacttcaatttttaaatatctttttaaaaactattatcc

SEQ ID NO: 290772 - DNA, 616 bp, Homo sapiens
tgcatgttcttactagcgagagcattggaccagagcttttgggccttctattatgatgaactgggctggaccatgtagaagattgaaggattcattctaccacttcaacttaagacttatactagaagcagaacaaagaactatccaatttcacccacacccacatatctgactttggccaaacagatgcaacactgggggaagatgagctccattccttcttcgcaaggcrttgtgtgaagaacgcctaagtgtcttctcaaggtttctctctctctgctctctgccccgcaccctgacctagcttacccttccaaaactggaggcatcccccaagtggaagatacttagaagctctattttaacccataagtttcacgcatcttggagaaaagacagcacaaagaaagatccgaggagaatgcacatcctgccttttattttatttatgatacttttatccttcctactaaaaattatagtcaattgtgtacattttgacatggctgtgtgtgtgtggtctgtgtgtgtgtgtttgtgtgtgtgtgtgtaaaaatattgggaatacagagctcctcctagtggttagaactcatggccaatgggtttaaaacta

SEQ ID NO: 290773 - DNA, 616 bp, Homo sapiens
tgcatgttcttactagcgagagcattggaccagagcttttgggccttctattatgatgaactgggctggaccatgtagaagattgaaggattcattctaccacttcaacttaagacttatactagaagcagaacaaagaactatccaatttcacccacacccacatatctgactttggccaaacagatgcaacactgggggaagatgagctccattccttcttcgcaaggcgttgtgtgaagaacgcctaagtgtcttctcaaggtttctctctctctgctctctgccccgcaccctgacctagcttacccttccaaaactggaggcatcccccaagtggaagatacttagaagctctattttaacccataagtttcaygcatcttggagaaaagacagcacaaagaaagatccgaggagaatgcacatcctgccttttattttatttatgatacttttatccttcctactaaaaattatagtcaattgtgtacattttgacatggctgtgtgtgtgtggtctgtgtgtgtgtgtttgtgtgtgtgtgtgtaaaaatattgggaatacagagctcctcctagtggttagaactcatggccaatgggtttaaaacta

SEQ ID NO: 290774 - DNA, 568 bp, Homo sapiens
tttaacccataagtttcacgcatcttggagaaaagacagcacaaagaaagatccgaggagaatgcacatcctgccttttattttatttrtgatacttttatccttcctactaaaaattatagtcaattgtgtacattttgacatggctgtgtgtgtgtggtctgtgtgtgtgtgtttgtgtgtgtgtgtgtaaaaatattgggaatacagagctcctcctagtggttagaactcatggccaatgggtttaaaactaaagtcccaagtttgctgtattcacttgttaatttagaaatatttgaaaggcaataaaattgagggctaaagaagcaatatcaaaaaagaaacgggagaattactgaaggagggaatagttatcttggtctctttttgcaggaagaactgggaatgtcagtcaggccagtgaaaactgtattaagtggataattttagaaaatcaacatgtaaagctgaaaaggcttccttccaaattatcaaatatgatcatcctagcagtgagtaaagatcatatctatgtttttcccaggaattgagaaaaatactaata

SEQ ID NO: 290775 - DNA, 616 bp, Homo sapiens
tgcatgttcttactagcgagagcattggaccagagcttttgggccttctattatgatgaactgggctggaccatgtagaagattgaaggattcattctaccacttcaacttaagacttatactagaagcagaacaaagaactatccaatttcacccacacccacatatctgactttggccaaacagatgcaacactgggggaagatgagctccattccttcttcgcaaggcgttgtgtgaagaacgcctaagtgtcttctcaaggtttctctctctctgctctctgccccgcaccctgacctagcttacccttccaaaactggaggcatcccccaagtggaagatacttagaagctctattttaacccataagtttcacgcatcttggagaaaagacagcacaaagaaagatccgaggagaatgcacatcctgccttttattttatttatgatacttttatccttcctactaaaaattatagtcaattgtgtacattttgacatggctgtgtgtgtgtggtctgtgtgtgtgtgtttgtgtgtgtrtgtgtaaaaatattgggaatacagagctcctcctagtggttagaactcatggccaatgggtttaaaacta

SEQ ID NO: 290776 - DNA, 586 bp, Homo sapiens
atcaactggtttgtagccctgtacatttcagtctttctcctctactactcacatatttccagaagtaggtgctacaggccgtgttcatgctgacgtataatctctggccttacaccttcccatcacaaactacatcactgcaataggcagtaagaatattccyggaagactttcctacattgagtctgcgaggaataacttaactatacatgcaatttattctcaatcttgacatatgtcctactaaactgtaactaaatgattccccaagtcaacttccccttagacaggtatcaaaaatgcctgagggcaagtataatggcaaggaagtcaaagtggaatgagaaaggggatgtgacatttaaaactgatggaagttaaaataccttacttttgcctatcataattatttctggatgtgtaaaaacagaattttcctttttacatacatccaacttctttcaccaattccttctacacttggaagaccaggcaagagaattgcggtatttttcctggcccactctgttgttgctaagccaggctgttgttatgctcttagttacagctatttttagctgcagtg

SEQ ID NO: 290777 - DNA, 504 bp, Homo sapiens
tggcaaggaagtcaaagtggaatgagaaaggggatgtgacatttaaaactgatggaagttaaaataccttacttttgcctatcataattatttctggatgtgtaaaaacagaattttcctttttacatacatccaacttctttcaccaattccttctacacttggaagaccaggcaagagaattgcggtatttttcctggyccactctgttgttgctaagccaggctgttgttatgctcttagttacagctatttttagctgcagtgtggatcactacattgtcagcgatttttccacctactcaatgaaaatactttgtctctttaaaatgtagtacaattttcaaagctctgctcttttgttaccttaacgtggcaccctccaatgcaaaaacaagaaacagaataccatttaaattgtcttcactataactaccactcttttccaaaaacaaaatcagaacagagatacataaaactctagcttgagagattagaccttcg

SEQ ID NO: 290778 - DNA, 590 bp, Homo sapiens
ttatcaaaatccagaaagtaacattggtgcaatactattatctaacctgcagaacctattcacatttccccatatttgtcaattatccagataatgctctttctaggaaaataacctctgaccattatcacacattgcatttagttgccacatctcttaaatctcaatctgatactgttcctcggtttatatttttctttcattatcttgactatttttaagagacacatcaagctattttgaggaaggcccctcaattcggctttgtctgatgtttccttactatcaggttaagactatgcatttttggcagtattgacacagatgtggcgctttatccacctcagtgcatcgtattaagaaatatgtgatgttggtctgcactcattactatgacattaactttaatcacttggtttctccaatgtcaaattcctatttctcatttatttaatatgtgttttctagaaagatgctttggaactatgtaaatgtactgttcytgataaacttttacccattagtgttaacatttattgatgatcttttcataaatccatactaccaagatgtttgctaaaaggtgattt

SEQ ID NO: 290779 - DNA, 1257 bp, Homo sapiens
atcagcatacttaaagataaataaatagaaatcacacaatctaaattgcagagagaacaaagattgaaaaagctttaacatagtttcagggatctgtggtatgcaataagtttattgtctatgtatttggaatcccagaaagagataagagaaagaatgggatgaaaaaaatatatataagtgaataatgcctgaaaaagctcaccaaaacctaagcagcattaatacaaagaaaaccacactgagacgtattttttctyttaatattttttaatacatatgatggtttaaagcaaaaattatagtattgtattatgggttttataatgtgatatgtaagacataatacaactgtaatacgaaaatgaaggaggagtatttagacctctactgctaaaaaccttttatattttataagaactagtacagtaacaattctaactagactgaaaggataaggatgtatcataaaatccctagaaaacctactaaaaaataatgaaaagatgtttagctaataagccaataggtaaatttaaataaaactctaaaaaatattttaattattttttattcaaaaagaagacagaaaagatggaacagagaaacacacacacaaaaagaggatwatcagcatacttaaagataaataaatagaaatcacacaatctaaattgcagagagaacaaagattgaaaaagctttaacatagtttcagggatctgtggtatgcaataagtttattgtctatgtatttggaatcccagaaagagataagagaaagaatgggatgaaaaaaatatatataagtgaataatgcctgaaaaagctcaccaaaacctaagcagcattaatacaaagaaaaccacactgagacgtattttttcttttaatattttttaatacatatgatggtttaaagcaaaaattatagtattgtattatgggttttataatgtgatatgtaagacataatacaactgtaatacgaaaatgaaggaggagtatttagacctctactgctaaaaaccttttatattttataagaactagtacagtaacaattctaactagactgaaaggataaggatgtatcataaaatccctagaaaacctactaaaaaataatgaaaagatgtwtagctaataagccaataggtaaatttaaataaaactctaaaaaatattttaattattttttattcaaaaagaagacagaaaagatggaacagagaaacacacacacaaaaagaggat

SEQ ID NO: 290780 - DNA, 616 bp, Homo sapiens
ttctcatttaaagttcagggaggaatgaagaagaggaacccaacacagtcattcagggacccaggttgatgaaggctctgcagtcttcaacaacggactgccaaagttaccctcagagtcaacatccagccagcagatggagcaagggaagaggggtacatcacaaagtgttcacggatcaggtcctaggccttctgaagtgacattgtgctatccacttctatccacattctgttggcttgaactcaggactatagtagtataaatctaaaggcaaaggaggctggaaaatgtgatctagttatgtgccaaagaggaaaggaacctggcttaggaaactgctagccagtttcagccaaactacacrtgccctcttaaccttccattcaaaaaaagaaaagaaacaacagcgacaccaaagaaatgttctcttctagtaggacaatttagtctgacttttccagaacttccatttctccaagccattcaaaccctgttcttactattatattggacggtatgtccattcacatgacattagataaaagaagaatcataaaatatggaaataaaaggcagaccagaaacttatgcaatttaatgctcagaagtttgt

SEQ ID NO: 290781 - DNA, 645 bp, Homo sapiens
ggattacaggtgtgagccactttgcccggcccctaagtcattattatactactaagctctttaggtaaaaccaataggtgtttttgctgagtgataggtttaaatataactcctttgtcaccaattctgaatttaggaaacagctttactttgtaatctgtatggacataataaaagtaaaaatagaaactgtattttaactggtggaagagatggttatagccataagccacttaaaaaatatctaccgcaagggcagactaacatcaacacatcttctgcaaagcctgagataaggggaggctgatgtagagagtctttctttagcaagcccctgtctccaccctaaaaggataggaaccaggtagcaggccaataagaaaaagaattcaaagatcaacctctttgctttcacagcattggccacattattcaccatccatgaatcamacgagactccaggttccagctcaggaaaagtgatgccagggacactgctggagttacagccattcaatcctgtgaaagtttttacaggcaattgggtagctccgcactgctgctaagtacctcttttattcacctcttcttaatctattcacatatttatcttaacaatttcttgaatttttctcccttttcatg

SEQ ID NO: 290782 - DNA, 575 bp, Homo sapiens
gtgaattctggagaagactgaaacatttcaaatctttatagcattttaatgttctgttgtcctttttgataatcagatcttgattaagaggtagaattaacacccagtaggacatcaacatttcttgacttgaatcctctgcgtatcttttgtctttaggacagttgaggaatgatttatggactttgtgactctgaaacaaaaaaagtatctaaaatgcgtatttgttattttctacaagccaattacatcttgtttagagtatgacacacaaggtaaacctrgaaggaaaaataattaaagtgctgtcattttttcacattgccttattatgatgttttaattcattcttacttttatagagcagtcattcccatgtccttctcctttggggtctattcccttagttaccggcaatttgccacttcctctcccagcaagtttccttaggtgaagacaatagtgactcctaccatatagaacattgcacactttatggggtgcttacactcatattcttggtatttttcacaatccctagtttttaaaaatagttttattgagctatatttcat

SEQ ID NO: 290783 - DNA, 471 bp, Homo sapiens
tgtgggtgctttccgctggtcagattggttaggaatgacactggcaattaattggcataatagggtccaaagaggctaaatgccctgcagtgcatgggacattcccaccaaagtaaaatttccaaatctcacaatgggcatttatagaagtgacaagcctacttactrttgttgagcccagaatttgccctgtttaatatataaacacaaagtattttatatagtttcaataaattctgaattatccaggaatgtacattaagggaagaacacactttgtttcatttaagagttattcattatttctgaaaatcaacaatcgagtcagtgccactcataaaatttaaatctccctaatcagcctgtatttgtagttattgcatttaccagactctatatataggtatatctgattatttcattatgtcttcagtgtagacagtctatgtatttacatatagaattactgta

SEQ ID NO: 290784 - DNA, 545 bp, Homo sapiens
gcataattctattatattacatgtattttgtatttttatacatatgaaaaaagaaaactatgtatgtacactttgggttttatacaagatgttcataggactattcacgatagcaaactcctgcaggcaatttgaatatctctcaaggtaaactgtagttctttcatacaatggaatgttatgtagcagcaaaaatgaataaactaaataaagctgcacacaaaaaatatgtaaattttaccaatataatttgcagcaaaaagcaagcccccaaagattacatatagcatgattctctttttatcgtggttaaaaactaaaaatatgtgtacctactgtttagaaatacaaatagaggtataataatagaaattggagggttcactacaaaggtgggagtcacagtggagtcattgcctgatgtctacatttggggaatcaaggtccaaaaactkcatacacgacttttctgttccaattcacatctctgcttccaggcttttggtatctcagttttggcactgttgtcatactaggccagataa

SEQ ID NO: 290785 - DNA, 607 bp, Homo sapiens
cagtctggttgctttttggtatagcaggtgtgctgttctagggggtgcccttccttctctggacgatttgtattctccagagctggcaggctggaatggctgagtcaaccaaactgcagagatggygcctgcccatcctccctgggaactcagacccatctcaggcagattccagtctgttgccatcagctggctggaattctaagccagtgggacttaacttgtggggtgtcatggttgtgggatgtgcagaacgaggctgcttggctccctggattcagaccccttcctagagatatgtatgaatggatttctcacctcactgggaatcctggggctgcagtatataaaactctgtgtgtgcctgagtggctgatctactaagactccacacagctctgtgtattggacccaaggcccggtggtgtgggctcatgaggtgatctcctgatccacagattgcaaagatccatgggagaagcatggtttcccagaccgtgttgcacaatcactcactgcttcccttggtggggacgggagttcctttggctttatgctactcctgggtgggctgttgtcctccccaaccccaaaagctttttttcat

SEQ ID NO: 290786 - DNA, 570 bp, Homo sapiens
aggttgattcttggaaacttgaaactcatcttagtgatgtgtattagttyttatgctctcattattagactctcacattagcatggcctaatttctactaccaggaataagatgtgtgctgtgctaatgggaaatgatatatttagtgttttgtatgatcattctttagggtctgtgtccctttaattggatgagagcccacgcggagtgggtagataatagtgtcctttctgcttacccctgcattaggaataaaagagaaagaaaatatgtgtgtgctcaggaaaaaaatccattatttttgatattcaagatattataatcaatataataactttcaagtaccttccagttagtaagcttttcagagtataaattaattccatatcagctgaaaccagtggcttttcccatgttgggttcaattgtagttatggatgacataagcttttccatcaagtgtaataactaagttctaattttgttggccagtgtaactttaacacaataacaaaacataattaaaaataagggctatttttttcagaccttatataaatatattgtgct

SEQ ID NO: 290787 - DNA, 570 bp, Homo sapiens
aggttgattcttggaaacttgaaactcatcttagtgatgtgtattagttcttatgctctcattattagactctcacattagcatggcctaatttctactaccaggaataagatgtgtgctgtgctaatgggaaatgatatatttagtgttttgtatgatcattctttagggtctgtgtccctttaattggatgagagcccacgcggagtgggtagataatagtgtcctttctgcttacccctgcattaggaataaaagagaaagaaaatatgtgtgtgctcaggaaaaaaatccattatttttgatattcaagatattataatcaatataataactttcaagtaccttccagttagtaagcttttcagagtataaattaattccatatcagctgaaaccagtggcttttcccatgttgggttcaattgtagttatggatgacataagcttttccatcaagtgtaataactaagttmtaattttgttggccagtgtaactttaacacaataacaaaacataattaaaaataagggctatttttttcagaccttatataaatatattgtgct

SEQ ID NO: 290788 - DNA, 437 bp, Homo sapiens
tgagttttagggagaaacatattctccctaatgtagccccttttaatatstatagaaaacacagcactataaccctctctcccagcctattaaatggaaagtttgactgggagtaatgatggtttgagcaggatgactaaggaatagggtattttcctgaaattgagacttcagtgttccagagattggcttagagttgttccacaaactgaaagtttacctgagaccctgggggattcactctctagtcttcctctttgatccaacattggtcacccaaagatgaaatgtttagatgtgcatcatttgttctcatgctccaaagcagccacttctattgactaacacacttgaagactttaaagagtagagcataatgtctgcatggtgtttgatatctactggtgggtggccagaattctgaagtagaagcttca

SEQ ID NO: 290789 - DNA, 1073 bp, Homo sapiens
tggggcataagaaagggagggaggcagcaagccctcaaaagaatagagcaagaccactaggagtcacggaaccagctcttgattaagagggaaaactcccatagamcttgctttttccagtgtgagtttgggccttacttgccaactgaagttgatgggcagaaggttcttcctctttgaccatctactccacttttgcacacctctcagaacactactgaagcagagtgaagccagggtaccagggaaacagtacaaacagcaaatacagttgaaaacttgggcttcagtacctctgatataaaaagcaatcccactgctggtctaggtcttgataaacacaattcaaagagaaaagggactgcaaaggcaaatatgaaatcagcacattgtcattaacttccattagatagaaagtaagggacaaatggatgactccaagagcccttgctgtcagcacacttaaggtgactgtgtcagccagggacccatgctctacctgcaagggccatgatggtttccaagtgaacagtatcwtggggcataagaaagggagggaggcagcaagccctcaaaagaatagagcaagaccactaggagtcacggaaccagctcttgattaagagggaaaactcccatagaacttgctttttccagtgtgagtttgggccttacttgccaactgaagttgatgggcagaaggttcttcctctttgaccatctactccacttttgcacacctctcagaacactactgaagcagagtgaagccagggtaccagggaaacagtacaaacagcaaatacagttgaaaacttgggcttcagtacctctgatataaaaagcaatcccactgctggtctaggtcttgataaacacaattcaaagagaaaagggactgcaaaggcaaatatgaaatcagcacattgtcattaacttccattagatagaaagtaagggacaaatggatgactccaagagcccttgctgwcagcacacttaaggtgactgtgtcagccagggacccatgctctacctgcaagggccatgatggtttccaagtgaacagtatc

SEQ ID NO: 290790 - DNA, 263 bp, Homo sapiens
ggagcatagagacgcagagaaagttgatcagtaaagaggggtgatggagactgtaacgccctataggagagagagcccgagagtggtagctgccttcttgccagcattccaggctccgcgtctagtcctytgagacctggccacattctctccctggggttctctgactctgttttcttaaaataaatcctccttttttgcttaagcaagtttgatgtttctattactttaacccaaggaactttgatcataagagaataacg

SEQ ID NO: 290791 - DNA, 602 bp, Homo sapiens
aactcagttaatatttttaaagtcatcctgcatacatggacagacgaccacaacaatgtggtagtacttggttaagcatcttcccagcactctctcattccattctctcaacaactttataaggtgggtactatgatgagctacattttagagatgaggaagatgaggaagttgaggaatatagaggtcttccagattataagtgatggagctgtgattctaacccaggcaatttaactaagcaacggtgggtaacctctcgtcttatacatattcgtctgtttgaggcagtttcaaggtttctgtgttccacagtcatgagaagggacatgggctagactccttctttacacactgtgtttcatttaatctgccccaattctgcaagttacttcctgcacattttgtagatgaaaacacaggagcttgagcagacagtgcatgcccagagcccccccscagctagtaggagccgagtcgcagttaacccagatttgcctgactccagggctggcatcttcagcccctctatagcactgcctttctccatggctctctctggtcatatatttttaagagggcttgaataaattgttgattaa

SEQ ID NO: 290792 - DNA, 566 bp, Homo sapiens
atccatgagtttaggcatagtccctaggaggtggatatacacattatatgtataagaaatcaaatatgttctcattcaggtaccccttggccaagatggacacagattcctttcatcatatgttggttagctaggttctcataccaagtccagaaaccattggatatcaaatataggcggtccctactttgcaagattctatatgaataagtttcagttaccatggcttacttaatcaacagcagcctcccaaaaatatagttcaaatttcattcactatggcatattaactgtgaataattgcataaagtagaaacgttgaggctggctcttcagtctaccaatcactatgtaaataacaggtatgcattatgatcagtgaccaagcacatcatttctttcaaaatctgtcagtgatttgtctcagaggatctgttattcagctcatgcgcagacagtaaagtgtctagttgcattgcctccttatcttttttcttttcactcaccaaatatttattgcatactcaccatgctgcrtactagacataaagtcgtaaacaagacac

SEQ ID NO: 290793 - DNA, 573 bp, Homo sapiens
tatcatttacaaaggttggaagctgctctatccttaggaggggtaatttatcaagacatagaaaagatgcttatgtgtatgtgagaagaaggcaagtactgttatatcataatgagttttgacaaaggaataaaacataaatatttctaatgtttttaattatggtatactaggtaaatattagttttactatttttcactttattatgcatttatgacttagagtaagggagtttttaacattttgacagaaatttttatgtgtcatgggaccatcatattttttcttcttcattattaagattgctttgcatgatttcagcttgtaagatcttttttcatggtctcaaactaccatacaaagtgaggactgctggcatattaaaaatggtgcccatacctctacaccacagaatactacrcagccataaaaaagatgagttcatgtcctttgcagggacatggatgaagctggaaaccatcattctaagcaaactatcacaaggacagaaaaccaaacaccacatgttctcactcgtaggtgggagttgaacaatgagaacacatggacac

SEQ ID NO: 290794 - DNA, 346 bp, Homo sapiens
agcctatatataaacaatgtttccctactaatattctgatgccacaattactattcaagatgtggcaattaaagaagcaactttgccaagggactagggaggtaatccgagccccactggaaatatcggactctatctgcactacagcgtgagactagaaatgccactgttagactgcgaatattctttttaggmtgaagttacctccataatgtcttcatcatattcagtaaaaccaggcagagctgggatgagggtgtggctgatggagtcgatgccttgggctaattggctgactattcactgtcattcattcaaccaataatttctaccaatagtttctacc

SEQ ID NO: 290795 - DNA, 568 bp, Homo sapiens
agcattgcagaatagagcagcatttatttgtatttaattaaggtagaccattccctaggaaattttgcacagggacccttaaaatatttgaacaactcatcctattcctaggctagactagaaaatggacaaaaatgaaatgatgatcaaccatgagcttgctttctaaattccctgaggcaagtaggacgctggggagttgagacaagaggcaggaatggagtctggccccgtagcggctgtggggcttggagctgaggraatcaaagacaaaatcctagggaaacggtggaatcaggactcaccaggctgatttaaaacaatgctacccaataaaactttctgtgatgatgagaatgttctctgtgtgctgtctattatggtagccactgactgtcaacctgtggctgggatctctcaaaatgtggctagtgccactgaggaaataaaattttaattctatttgattgtatttaatttcagctaatttaaatttggatattggctatcacattaaatggcaaggtctaaagtgttagaactatgaggtctaagctgaaaagtaaaa

SEQ ID NO: 290796 - DNA, 516 bp, Homo sapiens
ctctttttctacttacaaggtgatagcaaggtttgaagggtttttgcctttccctcagtcgtatctctgatccatccatggtctctaagatgatcccttttayggtttgaagacagacccgtgctggcaagacagttacctagttatcaaatgtggtgaggccttgtcctccttataatattatgagttcaggataagccaccaaatcaaagcactgtggatgatattcttatttcttgcttaaattcttctcatccatgcacttcccatgccactattaaggaaagtctggaagagaggggaggtgcagcatgaagagctgggtaggaacataaaagaatcttggagctgggtagggacataaaagaatcttggagaatatttgcctggtgtcagtttgcagaatgactgaaagcagtggagagtggtggtgaggacacagtacctgtcttgtgggttctcctttagaaggctcttgcaaacctggattagcttagtgacaacatgaatggaaaa

SEQ ID NO: 290797 - DNA, 1065 bp, Homo sapiens
aagatgatcccttttatggtttgaagacagacccgtgctggcaagacagttacctagttatcaaatgtggtgaggccttgtcctccttataatattatgagttcaggataagccaccaaatcaaagcactgtggatgatattcttatttcttgcttaaattcttctcatccatgcacttcccatgccactattaaggaaagtctggaagagaggggaggtgcagcatgaakagctgggtaggaacataaaagaatcttggagctgggtagggacataaaagaatcttggagaatatttgcctggtgtcagtttgcagaatgactgaaagcagtggagagtggtggtgaggacacagtacctgtcttgtgggttctcctttagaaggctcttgcaaacctggattagcttagtgacaacatgaatggaaaacaggagagctaattttttaagccagaaatgattgacctcagtattagattagatggagggactgaaagagaaggagtgaaagatgatgtttctgtttttgacwaagatgatcccttttatggtttgaagacagacccgtgctggcaagacagttacctagttatcaaatgtggtgaggccttgtcctccttataatattatgagttcaggataagccaccaaatcaaagcactgtggatgatattcttatttcttgcttaaattcttctcatccatgcacttcccatgccactattaaggaaagtctggaagagaggggaggtgcagcatgaagwgctgggtaggaacataaaagaatcttggagctgggtagggacataaaagaatcttggagaatatttgcctggtgtcagtttgcagaatgactgaaagcagtggagagtggtggtgaggacacagtacctgtcttgtgggttctcctttagaaggctcttgcaaacctggattagcttagtgacaacatgaatggaaaacaggagagctaattttttaagccagaaatgattgacctcagtattagattagatggagggactgaaagagaaggagtgaaagatgatgtttctgtttttgac

SEQ ID NO: 290798 - DNA, 532 bp, Homo sapiens
aagatgatcccttttatggtttgaagacagacccgtgctggcaagacagttacctagttatcaaatgtggtgaggccttgtcctccttataatattatgagttcaggataagccaccaaatcaaagcactgtggatgatattcttatttcttgcttaaattcttctcatccatgcacttcccatgccactattaaggaaagtctggaagagaggggaggtgcagcatgaagagctgggtaggracataaaagaatcttggagctgggtagggacataaaagaatcttggagaatatttgcctggtgtcagtttgcagaatgactgaaagcagtggagagtggtggtgaggacacagtacctgtcttgtgggttctcctttagaaggctcttgcaaacctggattagcttagtgacaacatgaatggaaaacaggagagctaattttttaagccagaaatgattgacctcagtattagattagatggagggactgaaagagaaggagtgaaagatgatgtttctgtttttgac

SEQ ID NO: 290799 - DNA, 532 bp, Homo sapiens
aagatgatcccttttatggtttgaagacagacccgtgctggcaagacagttacctagttatcaaatgtggtgaggccttgtcctccttataatattatgagttcaggataagccaccaaatcaaagcactgtggatgatattcttatttcttgcttaaattcttctcatccatgcacttcccatgccactattaaggaaagtctggaagagaggggaggtgcagcatgaagagctgggtaggaacataaaagaatcttggagctgggtagggacataaaagaatcttggagaatatttgcctggtgtcagtttgcagaatgactgaaagcagtggagagtggtggtgaggacacagtacctgtcttgtgggttctcctttagaaggctcttgcaaacctggattagcttagtgacaacrtgaatggaaaacaggagagctaattttttaagccagaaatgattgacctcagtattagattagatggagggactgaaagagaaggagtgaaagatgatgtttctgtttttgac

SEQ ID NO: 290800 - DNA, 596 bp, Homo sapiens
ggctaggggctgcgttaagagcttcatagagatgctcatccctctgagattggcactacagtgactcacagattgcagagaaaaggggctttaagactagttctatgtccaagttacacagttaacaagcttctaataagggctgggacacaaatctgggtctgcctaattctaaagccaaagttgttaatagacaatgcaatgctaaattatctgratcaaaaagaaatatccctatagtcctaaaatacaggcatttaagattttttaaaaacataatcaaaagctctggcagaacgagtattcacataaaattgccgtttacttatggccaagccctattaatgagagcttcatatcttccatttcctgtgttctgttgactcactttattatttctaaatgggcacaattaattgcgaggaagacttgcatgtgctcatgctacctatgaaaatgctgtaaagattccccattcactacaaagtgtagactgtgctattgaaagtaaagtactgtcaagataaatcagggaaaaacccctcagaaccgaacgctgtgttggagagtatctttaaaagcttatgcttaagagg

SEQ ID NO: 290801 - DNA, 421 bp, Homo sapiens
ctcatccttccccaattctaaccatctgtgaatgtgcaaccagttgaaatgactatctttccatctcttttctgtgattaccctttattctgtggcttcacacattccttgatggattatcattgattctgttcatttttgtctcctttagaagacaacaaatcctttgaagtctggaactgtgcctttatatsccctccagtgcctagaaagttctagattgtgtggaacgcaagcaatatctctttgttaaacagaattcaaataatactttttcttcctgccttccaaataagctaatttatttttaaaataggtaataccttcaaatgttataaatgtcataagttacaaattaactcacaaaaagtaattcttcttcccaccccttctccctgtctctcatttttcctccaggaaa

SEQ ID NO: 290802 - DNA, 583 bp, Homo sapiens
aattgattctttacttttctgtctctctcgcatgtctgtgtgcttcttgaggacccagaatctatcttattgggctttttttttcatagtatccaatcaaatgcttgtggagtgatgggaaggaaggaaaggactagttctgtctcatctcatagtgctttcgtgttattaccactgggggacgtgggctacagctacaggcaattctctgagtgcctagagagttttgctctgtatctcctgtctaggattagccctgaggagatcaccagctaaatgtgaaagaaagtttgctcagaattttcatcatagcattgtttaggaaaaaaaattaaaagcactaaacctgatgaggaagatacatgaaaagatatttgtgatatattgctgtgtgaaaaagcatcttacctactaataagagcactatgatcatatttttgtaaggtatatgcatagttatgtgaatttggacaaattattaataattaccctcttcacrcctcactttcctcatgtgtaagctacatctacctcagagggttgttctgaggagtaaatgcacagtatacaagatagctcgtac

SEQ ID NO: 290803 - DNA, 512 bp, Homo sapiens
gcacatttaattaggggaaagggtaaatggagggctcttcaggagcagtttgtgtgatatgataggcactcgaaaaggaaaggagatatatctgataaaagacttgccatccatcagatggcttgatttctttccctcacccccctaggattttcccagcctcatcttccttctcatttccaacccttccatcaactaactctacctctctaaaatttgctccaaagccatgacaataaaattatgaaagcagacctgtcaacaagggagggccgggcatagaactatttaagaggatcgtgtggttttcagttcccctgctgccccccaaagggaagattaacttgttcttttaaataatgagaaacataggaaaccatcgccagtctccctgtttaatgcatgcattaagcacacaggctgagsggcacagagctacacaaacttggcttgctgttgcgaacagggtgggcaggggaagggccggggatgaatttctggtcatagatcct

SEQ ID NO: 290804 - DNA, 515 bp, Homo sapiens
agcagagttataggtttgaaaaaatatcttgagggtggatcggaaccatacaaatgtttattctactcaaaactgtaggacctatctatccttcaattacaattgccctaagaccctacacttgatcattctgtaataacagtatcagagttaatttgatgacaacttagaatggacaaggcctattgccaagtacaatgcatatttagaaatatgttgccatttaaatatcacaacatccctgtgaagtagattktttccattttttcacataacaaaaccacatcttgctttacaagtgttacttttcttactaaaatatttgctgtttttaataaataaacagtataaaagacatcttaagattacaagtaattcatgtaagttatatatatcatttaccttgttccttggagaaattacaaaatagtatttgcatttgggggtctaaatctgttcaaggcaagattttcacaatgcattgtgtttttggtctgcagactgtgagacttatt

SEQ ID NO: 290805 - DNA, 465 bp, Homo sapiens
ctttaggtttcagaccacttctgtttaacaataacaagagtctggtcctcctctctctgataatgctttcattaaggtaaacagtatattattaatgctgagggtttctccagcgggctctgtttgcttccactttatctgctgctttgcagtgaattataaactcaggagatgtaagttaraaatatgctcccagccagtcaaaatcaatgaaagcccttaacttcagctggaaagaaactatagtaaaatgaagttgaaagaaagagtgttctttctatcaatgctcttgggctcacaatggatcggactttaccagaccctccaatatgttaatgcagtgtgttttcaagcacatacatatagcatgtatggtgaaaagatgctctcactcctacagaggcacgcttcagcagccccttggaaagaaagcacatcccatggccatagatatctcagggtatc

SEQ ID NO: 290806 - DNA, 507 bp, Homo sapiens
tttctctgtcacagcataatattcactttatcagcctttcatagcaactgtgccttagcaaaattaaaatgttctttataagcaaattcagctatgaaaataaacactcaccaatacaccctagtaatacatggcttagagtactctaatcccagctgcagtgtttagaattgcagggkcctcaaggcaagatgtgaaatatccttctgccaactcttctcaaccacatattgaggaaaatgaacctgcctctcaggattggtatgaagaatagcttataaaaatgagtgcgaaaccctttgcaaataccaaatgctgtatgaatgttaagtaataataaagatctgtataaatgcagcgaagcagcccaacctccaggtgctttttcaaactggacaccagccatttaagattcatccatcattcactttcgggcatccttttctttatgaaaaaataaaataggctgtctacattgcaaggaaatggaaaaatcgaatttcaaag

SEQ ID NO: 290807 - DNA, 609 bp, Homo sapiens
agctattaaaatatactcataaaactataaaagtaaaagccaaataaaagacatttcagttcttgtctcaacaaaaaactgagtaagtctttgggagggtggggacacagggaaaaaagtgcctgtagtcatcagtcaaaaatcagtcaagatgccgcatgttgttttcarctctctgaactccttaggaaaaaaaaaaatacacctctcaagaatcttttcaagaaactgtttgcccacaacataattgataaaattgatatataattctgaataattttctggtttcaatgaattttcacatacatttccccatttaatcttcataataagtctgaaataggcagagcatgtgcgtctattcttactttttagataaataaactgaaatttggaaatgttaaccacacagttagaaagtgacatttttaagaccaatcaggaggatagaaacaataggaaataataacaaggaggcttttcatgcaaatatttctaaagtttaggttgtcaataaatcttttacgaattccaacaaatctatatttttgtttcttcccttagatagctgaggctgttgtttacctgccacaattacatcagaccaaa

SEQ ID NO: 290808 - DNA, 1219 bp, Homo sapiens
agctattaaaatatactcataaaactataaaagtaaaagccaaataaaagacatttcagttcttgtctcaacaaaaaactgagtaagtctttgggagggtggggacacagggaaaaaagtgcctgtagtcatcagtcaaaaatcagtcaagatgccgcatgttgttttcagctctctgaactccttagraaaaaaaaaaatacacctctcaagaatcttttcaagaaactgtttgcccacaacataattgataaaattgatatataattctgaataattttctggtttcaatgaattttcacatacatttccccatttaatcttcataataagtctgaaataggcagagcatgtgcgtctattcttactttttagataaataaactgaaatttggaaatgttaaccacacagttagaaagtgacatttttaagaccaatcaggaggatagaaacaataggaaataataacaaggaggcttttcatgcaaatatttctaaagtttaggttgtcaataaatcttttacgaattccaacaaatctatatttttgtttcttcccttagatagctgaggctgttgtttacctgccacaattacatcagaccaaawagctattaaaatatactcataaaactataaaagtaaaagccaaataaaagacatttcagttcttgtctcaacaaaaaactgagtaagtctttgggagggtggggacacagggaaaaaagtgcctgtagtcatcagtcaaaaatcagtcaagatgccgcatgttgttttcagctctctgaactccttaggaaaaaaaaaaatwcacctctcaagaatcttttcaagaaactgtttgcccacaacataattgataaaattgatatataattctgaataattttctggtttcaatgaattttcacatacatttccccatttaatcttcataataagtctgaaataggcagagcatgtgcgtctattcttactttttagataaataaactgaaatttggaaatgttaaccacacagttagaaagtgacatttttaagaccaatcaggaggatagaaacaataggaaataataacaaggaggcttttcatgcaaatatttctaaagtttaggttgtcaataaatcttttacgaattccaacaaatctatatttttgtttcttcccttagatagctgaggctgttgtttacctgccacaattacatcagaccaaa

SEQ ID NO: 290809 - DNA, 1213 bp, Homo sapiens
agctattaaaatatactcataaaactataaaagtaaaagccaaataaaagacatttcagttcttgtctcaacaaaaaactgagtaagtctttgggagggtggggacacagggaaaaaagtgcctgtagtcatcagtcaaaaatcagtcaagatgccgcatgttgttttcagctctctgaactccttaggaaaaaaaaaaatacacctctcaagaatcttttcaagaaactgyttgcccacaacataattgataaaattgatatataattctgaataattttctggtttcaatgaattttcacatacatttccccatttaatcttcataataagtctgaaataggcagagcatgtgcgtctattcttactttttagataaataaactgaaatttggaaatgttaaccacacagttagaaagtgacatttttaagaccaatcaggaggatagaaacaataggaaataataacaaggaggcttttcatgcaaatatttctaaagtttaggttgtcaataaatcttttacgaattccaacaaatctatatttttgtttcttcccttagatagctgaggctgttgtttacctgccacaattacatcagaccaaawgagagaatatatcaaagtacatcacacagaataagggaaggtattattttgtggaattttatttcagacaagtgtgtgtgtgagtctgtgtgctgtgagttgtagtgcacattaacwgtgtctcaataatacttgattatgttttgagcctgatgaacctggttataccctatgtgaatacctggctgccagatcaatagcatatgaaatacctgaaatgcactcacggcctgcacaagccattgaccagtggctcatgcacacctttatccagcttatctagctccagaaagtctaagactttatatgtgtgctgaaccactaaaatgggaattctgagagagaatgctttcaaaaacataaagttagctaatgggacaatttcaagtaggctatatactttagaaacacatgaaaggataagtgcaaataaaacatagtatatatatcaaaagagcagaaacaaggaatcataaaatatgaaataggataacagaaataagatgctaaatgtcagttgtgaattaatgaattcatatggattatggttttgtattaaaagacagaaacttttagattgagtcaaaagagataggttacaac

SEQ ID NO: 290810 - DNA, 603 bp, Homo sapiens
gagagaatatatcaaagtacatcacacagaataagggaaggtattattttgtggaattttatttcagacaagtgtgtgtgtgagtctgtgtgctgtgagttgtagtgcacattaacagtgtctcaataatacttgattatgttttgagcctgatgaacctggttataccctatgtgaatacctggctgccagatcaatagcatatgaaatacctgaaatgcactcacggcctgcacaagccattgaccagtggctcatgcacacctttatccagcttatctagctccagaaagtctaagactttmtatgtgtgctgaaccactaaaatgggaattctgagagagaatgctttcaaaaacataaagttagctaatgggacaatttcaagtaggctatatactttagaaacacatgaaaggataagtgcaaataaaacatagtatatatatcaaaagagcagaaacaaggaatcataaaatatgaaataggataacagaaataagatgctaaatgtcagttgtgaattaatgaattcatatggattatggttttgtattaaaagacagaaacttttagattgagtcaaaagagataggttacaac

SEQ ID NO: 290811 - DNA, 1180 bp, Homo sapiens
gagagaatatatcaaagtacatcacacagaataagggaaggtattattttgtggaattttatttcagacaagtgtgtgtgtgagtctgtgtgctgtgagttgtagtgcacattaacagtgtctcaataatacttgattatgttttgagcctgatgaacctggttataccctatgtgaatacctggctgccagatcaatagcatatgaaatacctgaaatgcactcacggcctgcacaagccattgaccagtggctcatgcacacctttatccagcttatctagctccagaaagtctaagactttatatgtgtgctgmaccactaaaatgggaattctgagagagaatgctttcaaaaacataaagttagctaatgggacaatttcaagtaggctatatactttagaaacacatgaaaggataagtgcaaataaaacatagtatatatatcaaaagagcagaaacaaggaatcataaaatatgaaataggataacagaaataagatgctaaatgtcagttgtgaattaatgaattcatatggattatggttttgtattaaaagacagaaacttttagattgagtcaaaagagataggttacaacwaatagttcaggaaaggtagcaaggggagaacttttgtggtctttttcctagcaaaatgcaatttcagtgccatgatctctattctcagttgcctcaaatagctgtactattcatgttttatgttttgtatttatttccttctattttggttttwaaaaatataatgatgactgggaaataagtgataacatcaaaaggaggcctccagaatttaaaaacattttctatagcccatataaaaaggagcaaaaggctaacataacagccacacagttagagttccttagctgcaccacgtgaggaagacagaccgtcaaccttcattaaagtcttcagcttggtgaaagcacaagcagaacactgagtgacaatgttgtaagagtaacggagccaatcctggaacatcactaggtatggtacaggcaacataacatattctccaagtgcacagattctgcagtggaactgcctaggctcaaactgattcctctagcaactacctgagaccttgcaaaattaacttgatctctatatttttgttccatcattatacatggattagtctctaccttatag

SEQ ID NO: 290812 - DNA, 547 bp, Homo sapiens
gcacattgtttagactctgtgtgtaggagcattgtgataaaytgtaaggaaatgacacagcaaacactattctactagcataataaaatattctctaccctggtttttatagacagcctgtacatagtatttatattcctttccaagtcgcttatttacctgtgatgctgtttcctacttttgctgacagttcaatcagtcggttaaaaaacatatggggtaaagtagttttgcaaaaggtgacttaaattaatggtaagcttgatgctattttcccttgtttggctagttgaacattacatgcgttccaaacttagtgtctaccagtgtgtggcaggttacatccatgtgtagaacaaagcccaggaggggggcaactgcatcaacacagggagcatgccctttctgaaataacaaaaacaaaaatgagaaaaaatgctgctaactattttgttgtcatgaggagttgtgggccattattcgtggaccttctgatatttcaagagaagtaaaaatattttgtatgaagtctactgtttacaaaata

SEQ ID NO: 290813 - DNA, 547 bp, Homo sapiens
gcacattgtttagactctgtgtgtaggagcattgtgataaattgtaaggaaatgacacagcaaacactattctactagcataataaaatattctctaccctggtttttatagacagcctgtacatagtatttatattcctttccaagtcgcttatttacctgtgatgctgtttcctacttttgctgacagttcaatcagtcggttaaaaaacatatggggtaaagtagttttgcaaaaggtgacttaaattaatggtaagcttgatgctattttcccttgtttggctagttgaacattacatgcgttccaaacttagtgtctaccagtgtgtggcaggttacatccatgtgtagaacaaagcccaggaggggggcamctgcatcaacacagggagcatgccctttctgaaataacaaaaacaaaaatgagaaaaaatgctgctaactattttgttgtcatgaggagttgtgggccattattcgtggaccttctgatatttcaagagaagtaaaaatattttgtatgaagtctactgtttacaaaata

SEQ ID NO: 290814 - DNA, 547 bp, Homo sapiens
gcacattgtttagactctgtgtgtaggagcattgtgataaattgtaaggaaatgacacagcaaacactattctactagcataataaaatattctctaccctggtttttatagacagcctgtacatagtatttatattcctttccaagtcgcttatttacctgtgatgctgtttcctacttttgctgacagttcaatcagtcggttaaaaaacatatggggtaaagtagttttgcaaaaggtgacttaaattaatggtaagcttgatgctattttcccttgtttggctagttgaacattacatgcgttccaaacttagtgtctaccagtgtgtggcaggttacatccatgtgtagaacaaagcccaggaggggggcaactgcatcaacacagggagcatgccctttctgaaataacaaaaacaaaaatgagaaaaaaygctgctaactattttgttgtcatgaggagttgtgggccattattcgtggaccttctgatatttcaagagaagtaaaaatattttgtatgaagtctactgtttacaaaata

SEQ ID NO: 290815 - DNA, 547 bp, Homo sapiens
gcacattgtttagactctgtgtgtaggagcattgtgataaattgtaaggaaatgacacagcaaacactattctactagcataataaaatattctctaccctggtttttatagacagcctgtacatagtatttatattcctttccaagtcgcttatttacctgtgatgctgtttcctacttttgctgacagttcaatcagtcggttaaaaaacatatggggtaaagtagttttgcaaaaggtgacttaaattaatggtaagcttgatgctattttcccttgtttggctagttgaacattacatgcgttccaaacttagtgtctaccagtgtgtggcaggttacatccatgtgtagaacaaagcccaggaggggggcaactgcatcaacacagggagcatgccctttctgaaataacaaaaacaaaaatgagaaaaaatgstgctaactattttgttgtcatgaggagttgtgggccattattcgtggaccttctgatatttcaagagaagtaaaaatattttgtatgaagtctactgtttacaaaata

SEQ ID NO: 290816 - DNA, 504 bp, Homo sapiens
gtatgttttacttcaagaaggaggtaggatggttgtctccagagggtagggtgtgggggagggagggaatggggagctgttgatcaaagggtacaaagtttcacataaaaggaagaataggtttttgagatctattgcacagcagggtgactatagccaataataatgtatttatgtctcaaaataactaagaacaaatttgaaatatctyaccataaaaaataatgggtaatcaaggggatgaatatattaattagtttggtttaatcattccacattgtattcatgtagcaaaacatcacattgtatcccataaatgtatataattgcaatttgtcaatcaaaaataatattaataatttaaaatttttatttctttgtcttgactttatccttctaagtaggaattgtacatatgtcatagctaatattattttttcttagtcttaaaaatacatctacagtttctctgttaagtgtgatgtttgttataaagttttggta

SEQ ID NO: 290817 - DNA, 542 bp, Homo sapiens
atttcacagtgaagaatataccatttctcaaactgccttctttccaaattttatgactagagttcagcctgagttcacataatcagctgatgaacatcactcaatggagcatattaactagaattgttgtctctatctgggtctcttccagatggtcttgtcaaatgctatcagagcatcatatattagagaatatgttatatcagcctccacttaagttactcatagattgttcttgacccttctcatggctcttctctcttgtaggttgtgttattggtaacataatttgctctgacaaaagcaaataaaggaaattttagacctktattattcaactggataaaactgaaggttcagaagtgattgcaaatattgccaaccaggtgaaaattatttccattctcagctgaacgctattacctttaaatcaaaagtaatcagtttaatgtaagtcttacctaagtctattaaaatttttctaggcctagcaaagcataaaaatgctgtatattttaatgtcctcagattaaagtatcccc

SEQ ID NO: 290818 - DNA, 576 bp, Homo sapiens
cagaagtgattgcaaatattgccaaccaggtgaaaattatttccattctcagctgaacgctattacctttaaatcaaaagtaatcagtttaatgtaagtcttacctaagtctattaaamtttttctaggcctagcaaagcataaaaatgctgtatattttaatgtcctcagattaaagtatccccatctctgaatattttgaaattttaaaaagaaatcactaaaaggtgaccagcagaatttattcttactaaaaagaatggatgagatggcatggaatatagtaacagccccacagcttgtctccctgtctctactcttgttttttatattccctccttcacagagcaattttttcaaactatcaattagatcatgtatttctcctacttaaaatctccagtaggtttttcactgcaccagaataaaatcaccacttgttagcatgctctctgaagttctgacctgtccacatgctcagctcacctggcctgcccccccaaccctctcccactctctcctgtcatttggttgcaaccactgaacttttccccaaaactccaacttactaagctt

SEQ ID NO: 290819 - DNA, 406 bp, Homo sapiens
tgtggaatgactgatatggtttggctgtgttcccactcaaatctcatcttgaattgtagttccaataatccccacrtgtcatgggaggaacccagtgggaggtacttgaatcattgcggtggtttcccctgtgctattctcatgatagtgagtaaattctcacataatctgatagttttataaaggagcttcccccttcactcagctctcattcttctccttcctgccactatgtaagaaagatgtgtttgtttcccctttggtcatgattgtaagtatcctgagaccttcccagccatgcaaaactgtagatcaataaaacctctttcctttataaattacacagtcttgggcagttttttataacagcatgagaacagactaatacagtaagttggtactagag

SEQ ID NO: 290820 - DNA, 813 bp, Homo sapiens
tgtggaatgactgatatggtttggctgtgttcccactcaaatctcatcttgaattgtagttccaataatccccacatgtcatgggaggaacccagtgggaggtacttgaatcattgcggtggtttcccctrtgctattctcatgatagtgagtaaattctcacataatctgatagttttataaaggagcttcccccttcactcagctctcattcttctccttcctgccactatgtaagaaagatgtgtttgtttcccctttggtcatgattgtaagtatcctgagaccttcccagccatgcaaaactgtagatcaataaaacctctttcctttataaattacacagtcttgggcagttttttataacagcatgagaacagactaatacagtaagttggtactagagwtgtggaatgactgatatggtttggctgtgttcccactcaaatctcatcttgaattgtagttccaataatccccacatgtcatgggaggaacccagtgggaggtacttgaatcattgcggtggtttcccctgtgctattctcatgatagtgagtaaattctcacataatctgatagttttataaaggagcttcccccttcactcagctctcattcttctccttcctgccactatgtaagaaagatgtgtttgtttcccctttggtcatgattgtaagtatcctgagaccttcccagccatgcaaaactgtagatcaatwaaacctctttcctttataaattacacagtcttgggcagttttttataacagcatgagaacagactaatacagtaagttggtactagag

SEQ ID NO: 290821 - DNA, 406 bp, Homo sapiens
tgtggaatgactgatatggtttggctgtgttcccactcaaatctcatcttgaattgtagttccaataatccccacatgtcatgggaggaacccagtgggaggtacttgaatcattgcggtggtttcccctgtgctattctcatgatagtgagtaaattctcacataatctgatagttttataaaggagcttcccccttcactcagctctcattcttctccttcctgccactatgtaagaaagatgtgtttgtttcccctttggtcatgattgtaagtatcctgagaccttcccagccatgcaaaactgtagatcaataaaacctctttcctttataaattacacagtcttgggmagttttttataacagcatgagaacagactaatacagtaagttggtactagag

SEQ ID NO: 290822 - DNA, 532 bp, Homo sapiens
tggccacaggaaggtgggcctggaagataacagctagcaggctaaggccagacactgacacttgcagttgtctttggtagtttttttgcactaacttcaggagccagctcgtgatctcaggatgtatggaaaaataatctttgtattactattgtcaggtaagtgattttatttcatcttgggtctgttatattgggtatgagatcatagaataaaatgtaaactaccctattttagttctatcttatttaaatgcataaatgagtagtatttcctcttccagtctggtggatggattttactggaactcagctaccaatgtgggggaaatggcacaagggagcccagtatttatggccgaatccagttttctastatgagaagcttacttcaattctaagtctagctagaattaaactaattttatcaaatgctatgagaaatagctctctgtgaataaatgtattgctttgtttgagttataaggagattcatttccaaactaaagagttattaacaaaggtgttatatg

SEQ ID NO: 290823 - DNA, 524 bp, Homo sapiens
tatagtagcatattggttgaataagcaaggaaggaggtgaagggagggagaaggagagataagcagagagggagagaaaggaagaaggaaaaggaaaaaggaaggaaagaagagaggatggagagagagagggaggcaagaagggagaagagagaagggaaaggaagagacaggaggaaggggaggaggaaaggaaagaggaaatatttgttttcatctggttagacacagtgagtgctccgcatagacagatcattattgccctgtgcatctgactmataccacagcaggtacatcagtctgaaaagcacatgttaagtgaagaaacaaggcatctcttttttttttttttttttcagggatccaagaagagagccttgctagctgtctatttaattggcacaggaaagagttacaggaactgtatgccagggaatacatgactataaattctttaaaagccaaacctgtgtctttgcttatgtgtcccacacattgtcagccacatagtaggcagtcagtat

SEQ ID NO: 290824 - DNA, 387 bp, Homo sapiens
ttggggctccagccattctgcacatctgttttctctatgactgcaccatacccttttccgtgtcctaaatcttgtgccatctcctcccttygtctgaaatatttccctccctatctttgcctaactactggcttttcaagtctcagttcaatgccacttcctttggaggtctttgctggcctctctaataagatttagactaaaagctctctgaagtccctggtgcttaacatggtgttgtaaaaccttatgattatttagaatccagatatgcattccttaggccttgatgtttactgggggccttgggtgtttcttaatttgttcaattatttacaaaaggttttttttggggtgggaggtataggctgtgggctatgtactagg

SEQ ID NO: 290825 - DNA, 635 bp, Homo sapiens
agcaagcattggggcatattgtacatacaaaaaaggacagctaaattcctgagctccctggacatcctaaaagctagaattttagtaaaaaccatgtagtcttcattttgatgatttttccacactaatttattgtattacttagattatatctcttacccctcagtgtccttatactatagccactatgagaaattatgttttgctctagcaatacggagatgagagtcagtttcttaatcccttcacatcttctggcaggaacacatccagtctatacctgcaaaatttcacctctctctmcaagtgaagtatatttaccttgtggtgttatgaaagatgtgtccagcatctggctacccaggaatagacagaccttgtgccaacactgcacattttcttagctgcatgggcctctgagaaacatactctgaagaccttaccccatgcctacttgcaaatgaatcactggatgaaccctgaaggatgggcagagttttaggtgaagatgcagaggaggagggataaagaaatagcatgggcctaacatatggagaaaggggagtataacatgcattgatgtggaggcttagggcacctagcaggcaagtgttggcaaatctctcagattgata

SEQ ID NO: 290826 - DNA, 549 bp, Homo sapiens
gtcagtttcttaatcccttcacatcttctggcaggaacacatccagtctatacctgcaaaatttcacctctctctacaagtgaagtatatttaccttgtggtgttatgaaagatgtgtccagcatctggctacccaggaatagacagaccttgtgccaacactgcacattttcttagctgcatgggcctctgagaaacatactctsaagaccttaccccatgcctacttgcaaatgaatcactggatgaaccctgaaggatgggcagagttttaggtgaagatgcagaggaggagggataaagaaatagcatgggcctaacatatggagaaaggggagtataacatgcattgatgtggaggcttagggcacctagcaggcaagtgttggcaaatctctcagattgataagagtttaatgattaagtggcaaattagtgcaaaataaaatataaaggtatgttttgtcatattagtgaggcctcaaactcctactttaaatttatgtttttcagttttcaggcactgaaatggcatttgctatggtactt

SEQ ID NO: 290827 - DNA, 1099 bp, Homo sapiens
gtcagtttcttaatcccttcacatcttctggcaggaacacatccagtctatacctgcaaaatttcacctctctctacaagtgaagtatatttaccttgtggtgttatgaaagatgtgtccagcatctggctacccaggaatagacagaccttgtgccaacactgcacattttcttagctgcatgggcctctgagaaacatactctgaagaccttaccccatgcctrcttgcaaatgaatcactggatgaaccctgaaggatgggcagagttttaggtgaagatgcagaggaggagggataaagaaatagcatgggcctaacatatggagaaaggggagtataacatgcattgatgtggaggcttagggcacctagcaggcaagtgttggcaaatctctcagattgataagagtttaatgattaagtggcaaattagtgcaaaataaaatataaaggtatgttttgtcatattagtgaggcctcaaactcctactttaaatttatgtttttcagttttcaggcactgaaatggcatttgctatggtacttwgtcagtttcttaatcccttcacatcttctggcaggaacacatccagtctatacctgcaaaatttcacctctctctacaagtgaagtatatttaccttgtggtgttatgaaagatgtgtccagcatctggctacccaggaatagacagaccttgtgccaacactgcacattttcttagctgcatgggcctctgagaaacatactctgaagaccttaccccatgcctacttgcaaatgaatcactggatgaaccctgaaggatgggcagagttttaggtgaagatgcagaggaggagggataaagaaatagcatgggcctaacatatggagaaaggggagtataacatgcattgatgtggaggcttagggcacctagcaggcaagtgttggcaaatctctcagattgataagagtttaatgwttaagtggcaaattagtgcaaaataaaatataaaggtatgttttgtcatattagtgaggcctcaaactcctactttaaatttatgtttttcagttttcaggcactgaaatggcatttgctatggtactt

SEQ ID NO: 290828 - DNA, 608 bp, Homo sapiens
acccattcactcagatgctcttttgcaatggtcaaggagagtaattttagacattaattcctcttagaagatttaaacaatgtagtagtttgtaacatcacataattagatctcaaaacaagccttctgtattagtccgttctcacattgctataaagatctacctgagactgggtaatttatgaagaaaagaggtttaattgactcacagttccacaggctgtacaggaagcatggctgagaggcctcaggaaacttaygatcatggcagaaggtgaaggggaagcaaatacatcttaccatagtggagcaggagagagagagagtgaaggggaaagtgctacacacttttcagcaatcagatctcatgggaactcactcaccatcatgagaaccgcatgtggaaaatccactcccgtgatccaatcacatcccaccatgtccctcccccaaaacttggaactacaaattggcttgagatttgggtaaggacatagaaccaaactgtgtaattctgtccctggccccacctaaatctcatgttcttctcacatttcaaaacaaaagcagcaagacttctcaacagtcccccaagtcttagctcattt

SEQ ID NO: 290829 - DNA, 1628 bp, Homo sapiens
agtagtttgtaacatcacataattagatctcaaaacaagccttctgtattagtccgttctcacattgctataaagatctacctgagactgggtaatttatgaagaaaagaggtttaattgactcacagttccacaggctgtacaggaagcatggctgagaggcctcaggaaacttatgatcatggcagaaggtgaaggggaagcaaatacatcttaccatagtggagcaggagagagagagagtgaaggggaaagtgctacacacttttcagcaatcagatctcatgggaactcactcaccatcatgagaaccgcatgkggaaaatccactcccgtgatccaatcacatcccaccatgtccctcccccaaaacttggaactacaaattggcttgagatttgggtaaggacatagaaccaaactgtgtaattctgtccctggccccacctaaatctcatgttcttctcacatttcaaaacaaaagcawacttctttggtaacaattatctttattagtwtattctcacactgctataaagaactacctgagactgagtaattccacaggctgtataggaagcacagctgggaggcctcaggaaacttaaaatcatggtagaagacaaaggggaagcaagcacatcttaccatggcagagcaggagagagagagtgatggggaaagtgccacatatttttaaaaaaacagatcttgtgagagctcattcactatcacaagaacagcaaggagaaaatccacccccatgctccgatcaccttccacctggtccctccaccatcatggggaattacaatttgacatgagatttgggtgggagacatagagccaaagcatattaccttcttttatgacttgatttttataagtttttaacccctcattttcttttatgactagactccctatgtgactaatctgagctacttttgtgctgtgatgccaggaggtgaatttctcaaaagaagctggcatctctgattcaaagagcaacacaagtgaggaggattcccaaaggtctaattacatagcatagcatwacttctttggtaacaattatctttattagtatattctcacactgctataaagaactacctgagactgagtaattccacaggctgtataggaagcacagctgggaggcctcaggaaacttaaaatcatggtagaagacaaaggggaagcaagcacatcttaccatggcagagcaggagagagagagtgatggggaaagtgccacatatttttaaaaaaacagatcttgtgagagctcattcactatcacaagaacagcaaggagaaaatccacccccatgctccgatcaccttccaccwggtccctccaccatcatggggaattacaatttgacatgagatttgggtgggagacatagagccaaagcatattaccttcttttatgacttgatttttataagtttttaacccctcattttcttttatgactagactccctatgtgactaatctgagctacttttgtgctgtgatgccaggaggtgaatttctcaaaagaagctggcatctctgattcaaagagcaacacaagtgaggaggattcccaaaggtctaattacatagcatagcat

SEQ ID NO: 290830 - DNA, 1141 bp, Homo sapiens
acttctttggtaacaattatctttattagtatattctcacactgctataaagaactacctgagactgagtaattccacaggctgtataggaagcacagctgggaggcctcaggaaacttaaaatcatggtagaagacaaaggggaagcaagcacatcttaccatggcagagcaggagagagagagtgatggggaaagtgccacatatttttaaaaaaacagatcttgtgagagctcattcactatcacaagaacagcaaggagaaaatccacccccatgctccgatcaccttccacctggtccctccaccatcatggggaattacaatttgacatgagatttgggtgggagacatagagccaaagcatattaccttcttttatgacttgatttttrtaagtttttaacccctcattttcttttatgactagactccctatgtgactaatctgagctacttttgtgctgtgatgccaggaggtgaatttctcaaaagaagctggcatctctgattcaaagagcaacacaagtgaggaggattcccaaaggtctaattacatagcatagcatwacttctttggtaacaattatctttattagtatattctcacactgctataaagaactacctgagactgagtaattccacaggctgtataggaagcacagctgggaggcctcaggaaacttaaaatcatggtagaagacaaaggggaagcaagcacatcttaccatggcagagcaggagagagagagtgatggggaaagtgccacatatttttaaaaaaacagatcttgtgagagctcattcactatcacaagaacagcaaggagaaaatccacccccatgctccgatcaccttccacctggtccctccaccatcatggggaattacaatttgacatgagatttgggtgggagacatagagccaaagcatattaccttcttttatgacttgatttttataagtttttwacccctcattttcttttatgactagactccctatgtgactaatctgagctacttttgtgctgtgatgccaggaggtgaatttctcaaaagaagctggcatctctgattcaaagagcaacacaagtgaggaggattcccaaaggtctaattacatagcatagcat

SEQ ID NO: 290831 - DNA, 536 bp, Homo sapiens
tacattaccattctcttttgaattctctagaggttgtccacacaaaatactttgaaaactttagraaagtaagtgttgcaatggtcagagtgattgtggaaaaagggctacagggtgactaatgaaaagttcaagataaatagctagaatttttctttcccttttcctttcaatctgaatttttcaactttaaacattttcttcaaattttcattctgttaataaagtgaacttttagacaatcaaacagcttacctcattctataagagtaacatttaataaaatggcaattaaacctctttgctgcttaatttacatattaattgacaattattatattcacatttttgccattattgatgctacaaaatactctaactcaacacaaacaataattacaacagtttacaataactactcagttttaattgggaataaatgatgtttatgttcctgaacttgtgcttttaaagaaaagccatatcaatagccaaactatacaagagttgactcagctcagcttcaaaccacaaat

SEQ ID NO: 290832 - DNA, 575 bp, Homo sapiens
aataaatgtttttgaatgatacaaaatcagttttatattcatttaaaagatgctaaagaacaaaagaccaagtctaattacttagatacctaaagttccatatttttaacttcatttacttctgtaaagacaagtatttgcatagaaaaatttctctacagaaaatgccagtttcctgaaggaggaaattgattcctgaaagcattaaaaaggtgaatagagatgagaaggatttttaaggacagtaggccatagaactacatggcatctccaagagacctcaaatttctttttgggctccacagccttttcttagmgatcagatcctgctctcaaagttttttctgaaacccaaaggaaccccatctccttgggtccagagtagatagggtgagtatacttaacaataatttattttgtatatttcaaaataaataactataaaagtagatttggaatgttctcaacacaaagaaatgatcataaatgtttgaggtgatgaaaatcctaattaccaagatttgatccttacacatggcatgcttgatcaaaatatcgcatgtatcccataaata

SEQ ID NO: 290833 - DNA, 575 bp, Homo sapiens
aataaatgtttttgaatgatacaaaatcagttttatattcatttaaaagatgctaaagaacaaaagaccaagtctaattacttagatacctaaagttccatatttttaacttcatttacttctgtaaagacaagtatttgcatagaaaaatttctctacagaaaatgccagtttcctgaaggaggaaattgattcctgaaagcattaaaaaggtgaatagagatgagaaggatttttaaggacagtaggccatagaactacatggcatctccaagagacctcaaatttctttttgggctccacagccttttcttagagatcagatccygctctcaaagttttttctgaaacccaaaggaaccccatctccttgggtccagagtagatagggtgagtatacttaacaataatttattttgtatatttcaaaataaataactataaaagtagatttggaatgttctcaacacaaagaaatgatcataaatgtttgaggtgatgaaaatcctaattaccaagatttgatccttacacatggcatgcttgatcaaaatatcgcatgtatcccataaata

SEQ ID NO: 290834 - DNA, 575 bp, Homo sapiens
aataaatgtttttgaatgatacaaaatcagttttatattcatttaaaagatgctaaagaacaaaagaccaagtctaattacttagatacctaaagttccatatttttaacttcatttacttctgtaaagacaagtatttgcatagaaaaatttctctacagaaaatgccagtttcctgaaggaggaaattgattcctgaaagcattaaaaaggtgaatagagatgagaaggatttttaaggacagtaggccatagaactacatggcatctccaagagacctcaaatttctttttgggctccacagccttttcttagagatcagatcctgctctyaaagttttttctgaaacccaaaggaaccccatctccttgggtccagagtagatagggtgagtatacttaacaataatttattttgtatatttcaaaataaataactataaaagtagatttggaatgttctcaacacaaagaaatgatcataaatgtttgaggtgatgaaaatcctaattaccaagatttgatccttacacatggcatgcttgatcaaaatatcgcatgtatcccataaata

SEQ ID NO: 290835 - DNA, 575 bp, Homo sapiens
aataaatgtttttgaatgatacaaaatcagttttatattcatttaaaagatgctaaagaacaaaagaccaagtctaattacttagatacctaaagttccatatttttaacttcatttacttctgtaaagacaagtatttgcatagaaaaatttctctacagaaaatgccagtttcctgaaggaggaaattgattcctgaaagcattaaaaaggtgaatagagatgagaaggatttttaaggacagtaggccatagaactacatggcatctccaagagacctcaaatttctttttgggctccacagccttttcttagagatcagatcctgctctcaaagttttttctgaracccaaaggaaccccatctccttgggtccagagtagatagggtgagtatacttaacaataatttattttgtatatttcaaaataaataactataaaagtagatttggaatgttctcaacacaaagaaatgatcataaatgtttgaggtgatgaaaatcctaattaccaagatttgatccttacacatggcatgcttgatcaaaatatcgcatgtatcccataaata

SEQ ID NO: 290836 - DNA, 435 bp, Homo sapiens
gtaaaaatatgattagggccctttttcttcacttgagaaaagaggagacaataattcatgtgataaatcaatattattccaaataaaaccaaaaagcaaattctagaaagggcaaaccaatgttagatttggacaagactttgtggaacttaagatgattgagatctgtctagtgtctcaggtgccctcttcaattttggcagaggcaaaggtggaaatggggagaggactctggctcaaggtggagaggggcttccacaaattggcaaatgtcactctacatagttttgaaaacagaaaacgaccttgctttataaaattctgtggtttgatgttctgttgctttgtgaaatgctttttasaatatatattagatacctatatataattttatattatatgataggaagaggggcagaaaaagaattgctttct

SEQ ID NO: 290837 - DNA, 500 bp, Homo sapiens
tatgtatgttttacttcaagtaggaggtaggatggttgtctccagagggtagggtgtgggggagggagggaatggggagctgttgatcaaagggtacaaagtttcacataaagaggaagaacaggtttttgagatctattgmatagcagggtgactataaccaataataatgtatttatgtctcaaaataactaagaacaaatttgaaatatctcaccataaaaaataatgggtaatcaaggggttgaatatgttagtttggtttaatcattccacattgtattcatgtagcaaaacatcacattgtatcccataaatgtatataattgcaatttgtcaatcaaaaataatattaataatttaaaatttttatttctttgtcttgactttatccttctaagtaggaattgtacgtatgtcatagctaatattattttttcttagtcttaaaaatatgtctacagtttatctgttaagtatgatgtttgttataaagtttt

SEQ ID NO: 290838 - DNA, 500 bp, Homo sapiens
tatgtatgttttacttcaagtaggaggtaggatggttgtctccagagggtagggtgtgggggagggagggaatggggagctgttgatcaaagggtacaaagtttcacataaagaggaagaacaggtttttgagatctattgaayagcagggtgactataaccaataataatgtatttatgtctcaaaataactaagaacaaatttgaaatatctcaccataaaaaataatgggtaatcaaggggttgaatatgttagtttggtttaatcattccacattgtattcatgtagcaaaacatcacattgtatcccataaatgtatataattgcaatttgtcaatcaaaaataatattaataatttaaaatttttatttctttgtcttgactttatccttctaagtaggaattgtacgtatgtcatagctaatattattttttcttagtcttaaaaatatgtctacagtttatctgttaagtatgatgtttgttataaagtttt

SEQ ID NO: 290839 - DNA, 500 bp, Homo sapiens
tatgtatgttttacttcaagtaggaggtaggatggttgtctccagagggtagggtgtgggggagggagggaatggggagctgttgatcaaagggtacaaagtttcacataaagaggaagaacaggtttttgagatctattgaatagcagggtgactataaccaataataatgtatttatgtctcaaaataactaagaacaaatttgaaatatctcaccataaaaaataatgggtaatcaaggggttgaatatgttagtttggtttaatcattccacattgtattcatgtagcaaaacatcacattgtatcccataaatgtatataattgcaatttgtcaatcaaaaataatattaataatttaaaatttttatttctttgtcttgactttatccttctaagtaggaattgtacrtatgtcatagctaatattattttttcttagtcttaaaaatatgtctacagtttatctgttaagtatgatgtttgttataaagtttt

SEQ ID NO: 290840 - DNA, 601 bp, Homo sapiens
acacagtgctcaaaagctgatctgccagccacagtcaccatcagctagctgtttgtcacagtcttttgctcccatccttctttttttgagacagagtctcgttctgtcacccaggctggaatgcagtggcgtgatcttggctcactgcaacctccacctcctgggttcaagcgattctcctgcctcagccccctgagtagctgggattacaggtgcytcccactgcacccgggtaatacttgtatttttagtagagatggggttttgccatgttggccaggctggtctcagactcctggcctcaagtgagcctccagcctcagcctcccaaagtgttgagattacatgcatgagtcactgcacccagctgcatccttcttgttgatggtctttctatgaaacctcatgatgcctcattattgctgctgcattctctactcaccttagaatgacaatatcaaagctacagatattattacctgatgctccccaaaccagcagctttcaaggtggccataagacacttgtttcatcttctcttgtggatttcatattttatcacttaagaacctagcaaggcttctatccagagtctcatata

SEQ ID NO: 290841 - DNA, 671 bp, Homo sapiens
gtcattgtaccctgcatcccagcccctctagctccagccatggctaaaagcgccaaggtacagttcgggttattgcttcagagggtgcaagccataagtcttggcaacttccacatggtgttgagcctgtgggtgcacagaagtcaagaactggggtttgggaacttctgcctagatttcagaggatgtgtggaaatgcctgattgtccaggcagaagtttgctgcaggggcagaggcctcattgagaacctctggtagggcagtgtagaagggaaatatgtagtgggtgcccccacatagagttcccactggggcactgcctagtggagstgtaagaagtgggccaccgtcctccagaccccagaatggtagatccacaacgacagcttccactgtgcacctggaaaaatcgcagacactcaatgccagcctgtgaaagaagccaggttgggggatgttccctgcaaagccacaggtgtggagcttcccaaggccacgggagcccacctcttgcaacagcatgacctggatgtgggacatggaatcaaaataatcattttggaactttaatatttaatgactgccttgctggatttcagacttgtatgggtctgtagccccttcgttttaaccacattttccccatttggaacaggtgtattcacccaat

SEQ ID NO: 290842 - DNA, 671 bp, Homo sapiens
gtcattgtaccctgcatcccagcccctctagctccagccatggctaaaagcgccaaggtacagttcgggttattgcttcagagggtgcaagccataagtcttggcaacttccacatggtgttgagcctgtgggtgcacagaagtcaagaactggggtttgggaacttctgcctagatttcagaggatgtgtggaaatgcctgattgtccaggcagaagtttgctgcaggggcagaggcctcattgagaacctctggtagggcagtgtagaagggaaatatgtagtgggtgcccccacatagagttcccactggggcactgcctagtggagctgtaagaagtgggccaccgtcctccagaccccagaatggtagatccacaacgacagcttccactgygcacctggaaaaatcgcagacactcaatgccagcctgtgaaagaagccaggttgggggatgttccctgcaaagccacaggtgtggagcttcccaaggccacgggagcccacctcttgcaacagcatgacctggatgtgggacatggaatcaaaataatcattttggaactttaatatttaatgactgccttgctggatttcagacttgtatgggtctgtagccccttcgttttaaccacattttccccatttggaacaggtgtattcacccaat

SEQ ID NO: 290843 - DNA, 548 bp, Homo sapiens
gctggaagctcactactgtcagccctctctgggaattgccctcagcagaggaaagtcatgtcaccaaggtcacagtccccttcccaagggacaacttgcatccaatttctggccattgcaggaatataaaggcctggcctccataccccaagtcaaggcaatcagaaggcccatccctgctttccagttccccatggagttggcagaggcccaactgtgcctgcttcggagcccatcttctctctctacccaaccctgcttccttcctcagaagactctgaatgaacttcctgcacttcaatctccatctcagattctgctgcctgcacatctgacctacagaattttcctttattctgctttattttttctccatagcacttactacatttattgctctatcacatattcacatatcacatattcattactgacctattacatattcattttctactgtattattggccctctccctcctcccgttggattgtaagctccggtrgggcaggaattttgttttacttgctgctgtaaccacaggcctt

SEQ ID NO: 290844 - DNA, 576 bp, Homo sapiens
aattatagttaacatataattagacaagcacactagagggaagtgtctattggtaatggttagtcttttagggcattagagcagcaggtcagggttctaagaagtgaatcactctctttgataattatcaaacctaacaacgaccataccttctaagcacatctcagtactaaagttcattgactgtcagacttttctcactgattgctcagacaaaaggaagaggagctttgaaagctgtgatgggacttgagacactcctttatatgctaccagcatataaacaaaaacatcacmaaaaatcttggctttccactgaccatcatcccaggtaacagaccctaagctaggttcaccacctaggctatatcattcaaataacataactcagtgaggctggcactttcattatccccattcttaagataacaaataataaaataaaataaaataaaataaaataaaataaaataaaataaaataaaataaaataaaataaaataaaaaaagatgtggctttaaaagtaacctggccaggtgaaaagccaagagctgagaaaagttccaaacacaaat

SEQ ID NO: 290845 - DNA, 547 bp, Homo sapiens
tgggattagtgcctttataaaagaggctcaagggagctcatccaccccttctgccatgtgaggaagggaagcccaattctagtagggacagagaacagggaataagaaggtagtaagtaaaatgtaataggttggcttgggataagtgccaaggagaaaaaataaagcaaggagggagaagagtaattgtgtgtggagggagtattgagagaagagagatgcaattgtagacaagattttctggaaaagcttaattgcccttagcagagacctgaaggagaaaaggggagagccatgtgaaaatctgggggaaaggcactccagaaagaggaagagcatgtggaaagaccctcagatgttggcacaggggctgagtcacagggacagcacgaagcacagaatggctgagagcaatgatcaggaggagagtcacagggaatgaagtcagagaaaagrgggtcagggtcagactgtgtacggcctctgagaaagacaatataatggttaatactgagtgtcaacttgattagattgaaggatgcaaagt

SEQ ID NO: 290846 - DNA, 546 bp, Homo sapiens
ctcatttcatctttgggttacatttcccatcactccagtatttgccctaagtgctcaggaattttggaaatgggcagcatgtgtgcacttccatttgtggtgaccctacctcatctaatcctttttttctcagctcagaaaataaaagagggggagagatctctgggggcaygacaaatcttagatctcttttttttatgtttaacttttctaaaatattttctttggagaggtactggaccatgtcttcacaaggcagtttctttgcccctcatcctttccagacctctttttaggccggggcaattttcttgacattggaaggaaaggcagactctttgttttcatttggaaccatcagtttcttcctgctttacagctcaccactcattcctaatccttctcccttctctttcttctttcctctctctgatatatttttagtcctgtttcgcccttagaaaacctaagccataagatcatctgccaagatgggtttggccatagggataaagtgtttaagtgccctaccacttttcccagggg

SEQ ID NO: 290847 - DNA, 546 bp, Homo sapiens
ctcatttcatctttgggttacatttcccatcactccagtatttgccctaagtgctcaggaattttggaaatgggcagcatgtgtgcacttccatttgtggtgaccctacctcatctaatcctttttttctcagctcagaaaataaaagagggggagagatctctgggggcatgacaaatcttagatctcttttttttatgtttaacttttctaaaatattttctttggagaggtactggaccatgtcttcacaaggcagtttctttgcccctcatcctttccagacctctttttaggccggggcaattttcttgacattggaaggaaaggcagactctttgttttcatttggaaccatcagtttcttcctgctttacagctcaccactcattcctaatccttctcccttctctttcttctttcctctctctgatatatttttagtcctgtttygcccttagaaaacctaagccataagatcatctgccaagatgggtttggccatagggataaagtgtttaagtgccctaccacttttcccagggg

SEQ ID NO: 290848 - DNA, 588 bp, Homo sapiens
gcactcagggccttccatccatgctgtggtccttgcctgccaaagccatccctgcctgcagtaggtttcagaatagtcatcctccaaagatactcataccctaatccccagaacctgtgaatatgttatctggcatggcaaaagagattttgcagatgtgattaagggtacagacattgacatagagagattatcttggattatccaggtaagcccaatttaatcacatgaatcatcaaaagtggagagactttcccagttctggtcaaagaaagagtagggtcacagagatgctatatgggtggctttgaagatgaaaggagggggccactagccaagaaatgtgggcagtctctaggagctggaaaacacaagggaacagattctcccgccgagcctccagaacaaaatgccacctcaccacaccttcttttagcccagggagacccctgtcaacttctgagccccagaactatacaatataaaytttgtgttgttttaagctactaagtgtgggtattttgttgtgcaaagactagaaaacaaatgcactgtctaccctttgttctacttacattctatgcagac

SEQ ID NO: 290849 - DNA, 493 bp, Homo sapiens
agagccctttgtaagagactggctcccatctgtaggccatttgtgccataaaaccctctgcccttggtaagtaccaaaacacctatgccatccttttctcttttgaatctttgcaactttcagaatttagctgggtattatttctccaggtgccctgcctacatgtcatgttgatgatttcatctgacctctttcctccctgtcacaagtcatgccaaatccaggatatcttggaacataaaytgtgggccagttatctagttacagggttcaggaagcattgaggattttttttttttttttttttttgagacagggtctcactgtgttgcccaggctagagtgcagtggcacaaacagtgctcactgcagcctcaacctcctgggctcaagtgatcctcccacctcagcttcctgagtagctgagactacaggcatgtgccactacacctggctacttaaaaaagaagagaaaagaaaaaaaatgttgtag

SEQ ID NO: 290850 - DNA, 649 bp, Homo sapiens
caaacatttattaagcaccttctacattctaggaactttgcratttgactgagaagcagagttaatatgactcagtctcagaacttaatagataagtggcatccaggacatttatataaataacattttatgaattgcttacaaaacaatttgaaatgtttaatttaatacttgcagtaattctttatcactgacattgagtggaagttagtaatatactaaccactctccagaagtcactatgctatcaataccatcaccccgtcagtgaatccagttctataacagcatctcctaccatcagccacagcctacagagagagttgttactaagtgtttaatcaatgctggtcccctctcaatgatgcctttcgtatctcattgataagtaaagtgtcttctgggctttccaacagaacatggtgggctggtgggttttcctaaatgacgtggtatagctactctcacaggtccagttcacatagtttctctgctgttatctgccatggcaggtatggcatctttagtgttgtcttcctccaaacttctaagagccatcatcaagacagcaatcacaggcagcatcacagacagcagcaatactgtatcatagagtactttccatggtgctaaataatttattattcca

SEQ ID NO: 290851 - DNA, 649 bp, Homo sapiens
caaacatttattaagcaccttctacattctaggaactttgcaatttgactgagaagcagagttaatatgactcagtctcagaacttaatagataagtggcatccaggacatttatataaataacattttatgaattgcttacaaaacaatttgaaatgtttaatttaatacttgcagtaattctttatcactgacattgagtggaagttagtaatatactaaccactctccagaagtcactatgctatcaataccatcaccccgtcagtgaatccagttctataacagcatctcctaccatcagccacagcctacagagagagttgttactaagtgtttaatcaatgctggtcccctctcaatgatgcctttcgtatctcattgataagtaaagtgtcttctgggctttccaacagaacatggtgggctggtrggttttcctaaatgacgtggtatagctactctcacaggtccagttcacatagtttctctgctgttatctgccatggcaggtatggcatctttagtgttgtcttcctccaaacttctaagagccatcatcaagacagcaatcacaggcagcatcacagacagcagcaatactgtatcatagagtactttccatggtgctaaataatttattattcca

SEQ ID NO: 290852 - DNA, 496 bp, Homo sapiens
aagcatgatactggcaactacttggcttctggggaggcttcaggaacttacaatcatggcagaaggcaaaggggaagcaggctcctcttacatggccagagcaggamgaaggggtgcagcgtgccacacacttttaaacaaccagatcttatgagaactcactatcaccacgacaacaccaagtgggagagtgttaaaccatgagaaatcacccacatgatccaatcacctcccaccaggccccacctccaacattgggggttacaatttgacatgatatttggatggggccacagaaatgaactgtatcactggccagagctaatggaagatataaaaaggtctgcctcagtgagaggttcctgaacaggcaacgccagtgtcacgcttgttattcacaatgagttccttgtctcctgtctcattgtttccagacacacaatcttcccccaaggtagcactaagctaggtcacctgttgctccactgctaattac

SEQ ID NO: 290853 - DNA, 495 bp, Homo sapiens
tccactgctaattaccatttacttcatttgcatgtgttatgaggttcctgtaaccaaggcaaccagaagtggtacttgtaccgtcaatggaacaatcttttctccatctggtcaggctgcaatggcattcttgctcactgcccctcactctcatggcagcaaaaaaatacacgttcagcagaatccttctgtgtcatcagtttctctacaaggactcaggaactgtacacttcactctagatttatcaggtaacttaattgatttctttttaacaaatcttgatatgtttttctcctccaagcaagctgctacacttgacatatttcaaaatcagcagaaargaatgcacacatagactcgcacataagcacacacctgttttggatccctgccagtgaatgtgtggggaggaaacaaacaaacaaaaaatctttgaatgatgttcattttttgagcattttcccttgaaaagggacagactgtcatgccagtga

SEQ ID NO: 290854 - DNA, 573 bp, Homo sapiens
attgtttatctagtacaataaagtcaggcagttatatcattgcataggagaatattggtaatagacaaaacccagagaaacagaaaagactcaaaggaaaaaaaatggaagtaaagtgaaatttaggagaaagaattggaaataggatgcagrcagttttctcttctgagattttattaccaagtccctggtgttgtacaggtggcataacctccgaagtttctttcctgtccagataagcatgaagttgaactcttccaaggtagcctctctatagtttaaattaagttcagcctgggtaaatcttttattaggttggaactgtggacagtcaaacagaaaaatgtgatcccaaagaaaagccagaaagtagtgattcaaaaggttaagctaagaattagaatatttaaagcactcaggagggtttgaaatattttttccaaagaaacatttaaaaaacaagaagaaagctcttttctgatgtaaaagtagtggctgtagaaatatttattagttcacagagttctgctggcttgtaagaaagttattccaaaatgaaatccaagtaattat

SEQ ID NO: 290855 - DNA, 417 bp, Homo sapiens
cttttagttacacagataaaacacaagtacacacccatttctcttggagaaccttgcttccaactagatattaaaggttcagtttagtaatacaaactaggtatgtgattgtatctttacagattgagattttttttcactagacatctctgtttacaaaaaaatattgtagtgttcttatgagggatgtgtgtgcatgtgtggatgtgggtgtatgcacacacatattatgtccaagaacaacacacaaaaaattggaagctgacactggttgatggcagaaaagatgaggtagcaaatctggcatgtcttcaccttgtgctagaggctgcgtcataaaacagacargataggatttgccaaagcccactctctgctgatcttcttcctttctcccttcctggaaaaaggggcata

SEQ ID NO: 290856 - DNA, 413 bp, Homo sapiens
agagtaaaactgggcatgttttacatttctgctgcattacttttagcattagaaagatccagaaactcagcactcaaaaacataattttcaataaagatctgattagagagagaagtgagacagttggatatcaaaatgtgttcagcaggtgaggggaaagggaaatacactaattattatcccygaaaaaacataaacaaagatacagaggtacatataaaatcatagccttcttttaggtagaaagaaatatttagccttatggagctcatctctttgaagtagcaaaaacaaaacaaacaaatagaagtaaaaccctagtctggacataaaagtttaaatttcctttaatttttgctcttgcacttggcttgtgatcaggaaatataagttaataaaaatgtattttttc

SEQ ID NO: 290857 - DNA, 611 bp, Homo sapiens
cattgttactcattctcagagacattttgacatgaaatacagatgtaatttaaactacagtagaatttaagtatagaatcaggaaggggtggtgggaaattagaggtccagatgattatatagtccagtaacctaggattaattgcctctgcacttctgcctttggcagaaccttaacctctctaaaccttagttttctcacctatattatgggatcataattgttcctatctcataaaggactgccaaagaaaaactagagctgcatagtaattaaagtggtaaaagcagattttgattaggaactattgcaataggggaaaatgtgtctagcctagtatagcactaggctcaattctgaatacagcaagcacaggtgaagatttatagccaaagagcakggtgggagtcagtggataaaaaatttctaagaggaaacatcgggggtgtaagccaaaaataaaattgtaagcccctcaaccaactgaatggaaccccctcttgaccaaaggcattccaaagtaaacctgaaaaatgagttcaggccatgataggaagggaggatcagacatacctcatttttataccctccctgctttgtaattcagaca

SEQ ID NO: 290858 - DNA, 597 bp, Homo sapiens
aaccagggctaggatggaggtgaccttgtgggtgacagggagtgaataccatttagagtaatgagaactctcggggaatagkgccattaggcacaaaatatatgactattagaattggctactaaccttctccacccatatggagagcccagttttcaatactctggtgaatcagagacttaaaagaataaaataaaaagcaaccaaataaggtatggaaatctgaccctgactttcaggaccgtgttctgacttcaaccttattaaccaggaggtaggtccctgagactggagtttacagttctgacattcaggcacaggaaatgggcttcctccttctgatacagaagaatgatgaacacagtgaagatccctgatgggcaaagatacgcccatgcagtgaaaggaaaatcctgttattcataatagtagctgctattaattcactgttcactctgtgccctgtactgtgcagaaaaatttacacacagcttctctttatcctttcaactattctcagaggtaagtattatttccatttcacagatgaggactcctagacacagagaaattttcccgaggtctacggacaagatc

SEQ ID NO: 290859 - DNA, 578 bp, Homo sapiens
ctattaattcctctggtgtggtatctrttagctcctgaatttctccaagatctgatattgaaatccctcactcaccctttacctttatttattattttttttgccatatccacaatttctttcatgattttcttgactggctctatggtaaattctgtgaagtcgtgcacaacatctggacacagtttttttccagcaggaattcattgtttcaggcctgatggcttcacagctttttctgtatcaacaatgacatctccaatggtgtaaaccttccagcttttcataatgttttctctatctgggttctcttctacaaccttgacaatcctttccataaagtaccatgtgtaacaatcctttaaggtccttatgaccacctgatctagaagctgaattagagactttgtgtttggagacaagttaactagtttgacgactctgatgttaaacacatggggttttcagtggccaggggcattatccaacatcaaaagaactttaaaagtcagtcttttactggcaagttacttcctgacttcagggaaaaagtatcaatggaaacagtctagagaaaa

SEQ ID NO: 290860 - DNA, 578 bp, Homo sapiens
ctattaattcctctggtgtggtatctattagctcctgaatttctccaagatctgatattgaaatccctcactcaccctttacctttatttattattttttttgccatatccacaatttctttcatgattttcttgactggctctatggtaaattctgtgaagtcrtgcacaacatctggacacagtttttttccagcaggaattcattgtttcaggcctgatggcttcacagctttttctgtatcaacaatgacatctccaatggtgtaaaccttccagcttttcataatgttttctctatctgggttctcttctacaaccttgacaatcctttccataaagtaccatgtgtaacaatcctttaaggtccttatgaccacctgatctagaagctgaattagagactttgtgtttggagacaagttaactagtttgacgactctgatgttaaacacatggggttttcagtggccaggggcattatccaacatcaaaagaactttaaaagtcagtcttttactggcaagttacttcctgacttcagggaaaaagtatcaatggaaacagtctagagaaaa

SEQ ID NO: 290861 - DNA, 1237 bp, Homo sapiens
agctttggtttttctcctatgtagagtgagggtaatatgtgacctacctctcacccatggtcattgtcaggattaagtattccttaaaatatatctaaactataaagtggtatccaaatatcaagtgtaaggaataacccacagactgaaaatcactctacaaagagaaaggaacagagctcttttctctcttactctaggatggattcagaaaggtgacagacgagggagtaattgttctccttttgttattcaactgatagggtcaggcaggccatgggctgcattcttctgtcaagaatagtaaataggcattgtcacgagtgccaatgctaaaccgattatgaatgcctgcctgaacgctgtgttaggggtctgaggaccccatctgagtagagagggcagacgtctgtgatcagttagtaatggtgcatgagcatgacaaggagagatggcagaactaatgccacatgtctgtttttctgtcctctgtttkgggttcgcttcatgggaaagcagtagttgagctgctactgctattgaccttgtgatgtttttccagttttctccattgccatagcctgactgtgwtcctattctttccagattctcctcactaacagaaaaatctgcccaataagttaatgctagtataggtcattggtgatagatcactgtgttacatttcaacaaataattttacattwaaaacaaccccactgattgactgtgtaaaacaaaatatttgtggctacaggaaagcaggatgaatgagaggtcgttctgactttctctctcatttttttttctagtcaaagtaacaaaatgacatcatgcaatgtgatcatccactcggtcttgacttcaaatgaacttgactctccaatattaaatctaccttggatgatcagctgctaccagtggagttacttgaatgaacatgctgccaattctgaaagtaaattctaacggagataatcactttagttgaaataacacaggctttggcacatctggacagatgggctgaaatctaagtttgctagatggctaatgttaagtgacttaaaatacttctaagtctcggatttctcatctgtgtacagggaataaaattacccacctcatagattaaatataaaaggtttaacagcacatagaagtgtctcaagtaatgccctttcttaacaaaatatttcagcatcttaaataagtatagtttccttagttgaccctc

SEQ ID NO: 290862 - DNA, 335 bp, Homo sapiens
tgagtttcagcatgtcttcttttctgagacaggcatttaagattgttttttgtttgtttgttttgccttggctatatcttcayatcttgatatatcatattttcattgttatttggttaaaatattttatatctgtgacttctttgacccatgggtttttagaagtgtattacttaatttcctaagtctaatcatttttttgctagttatttttctgtttttagtttcgagcttaatttcactcctgtttgaatacatagtatcaaatatttgcctttttgaaatttattaagactttctttacaacttcacatatgtctattttggcaaatatc

SEQ ID NO: 290863 - DNA, 538 bp, Homo sapiens
ttcccaaataatctatttcaagcaactagtcacttcatagccttccatgtttctcaccataggcgattgctttctttccctccccagtcagagaagttagtgagcgtagagttcctaacacccaactcagacacttcataatgaattgccacaatctggcagatttggagttataagcctagtccctttcttgaacaaaagactgagactcttgctctaatctactgaccacaaacattcctaagtagcttctgctacttaggaaacaattaatcaacccccaatataaccaaaacacatttcccagataaccagttttaaggcctgtgatkctattcaacattttttgtttttctcaagaagtaaattagttactacaaatagagagatccagaatccaacattgccatttaatttactcgtggaaatatggagtttttgacaaatattttaggcctccaatcatgggtcaagattattataaataaacttaatgtccaattattaaagaatggttaattaaattatagtgcataaa

SEQ ID NO: 290864 - DNA, 505 bp, Homo sapiens
tactagttttcagctacagagtaaccataaacacataaaattctcagagattatcttacttgggattttttaaggagtattctagtgaccccttttcatgatctgcatgagaaycatgaaaagatacttatttaaaaacataggttttggggactcacctcaaagttaattatatgcaatctcaaggtaggtagtcaagaatttccacttttaaaaatttcttctctggttgatttttatgaccactaaaatctgaatgaatattagtgttctaaattttcaaaaaaagaaattccataaaaacaaaatgatgataagcaaattataaaattcaatactagaagagttaacttgccccaactcatccactgtcagtggatttgtcagagaaggtctatcttaaatgaaaagaggcatatccaaggtgttcctggagaggtgctcaaggatatatttggccccattaacttagaagtgacaaggacacattgaagtttcatttacg

SEQ ID NO: 290865 - DNA, 1127 bp, Homo sapiens
tactagttttcagctacagagtaaccataaacacataaaattctcagagattatcttacttgggattttttaaggagtattctagtgaccccttttcatgatctgcatgagaatcatgaaaagatacttatttaaaaacataggttttggggactcacctcaaagttaattatatgcaatctcaaggtaggtagtcaagaatttccacttttaaaaatttcttctctggttgatttttatgaccactaaaatctgaatgaatattagtgttctaaattttcaaaaaaagaaattccataaaaacaaaatgatgataagcaaattataaaattcaatactagaagagttaacttgccccaactcatccactrtcagtggatttgtcagagaaggtctatcttaaatgaaaagaggcatatccaaggtgttcctggagaggtgctcaaggatatatttggccccattaacttagaagtgacaaggacacattgaagtttcatttacgwcaatcttttgggcattattgtttaatcaaattattccgacagtgtgtggactgcacgagcacctagaacaatagtgagcatatagttgaagcgaagacaatgtccagtgaacatcaacaaactgttgggctgatttgactgaatcaaccaatggtaactgtggcttgctgttttcttattatgtaggacttctattttatgttgaaggtaaaaatcctatgcaactctacgggtattgaagacttcattcctgtagggaaactactaattgtaagcaacaaagactaacaattcctcttttgttctcttgaaggattttaaaacaaaatcttcttccacctttcctctataccaatggttcctaactgagggcaattttgtccccagagaacaggtggcaattcctggagatatwttcaacagcatgaccaggaggggcgctattggcatctactgaatagaggccaaagatgctactaaacacataaaatgcacagaacagcccctacaacaaagaattacgttgtgcaaagtgtcaacagtgctgaggctgagtaattctgttctgtatgcatagtctaagtcaccatataatatgtaaaggtgctaatacccagagtg

SEQ ID NO: 290866 - DNA, 621 bp, Homo sapiens
ggaaggaggaacgcagaaacagttttctgcagaattacctggcagtagtttcttctcatgctgcaacacagtgaaaaaagagtaattcagattcccttcacattctactctcccagcttttctttcttacctgatagtctccctaatagtctcatcaataggaacatctccatttcttccagggaacagaggtgaaggtatgccacttactagggcccataagcaccttttgtttggcagtaagataaagggagagagatttttgccacccctcggacacagctatcagcagatttcacggagtayccctagcaaattcatattggtttatataaatctgttggaagatgtaaaactgcttatacccaggaaaggcatggtgggcattggaaattctccttccagggatcacagaatccggagggggtagggttcttaatcctagttgcatattaagacaacctaaggagatttctaacaaaagcaatgcccagcccaaccctacaccagtgccatcagactctccgagagcagagcccgggtgcctgcatttttaacatcacctgggcaccccaggtgattctaatatgcagcttaaggaccactggcatagtgttaagg

SEQ ID NO: 290867 - DNA, 601 bp, Homo sapiens
tccagcgatctgacaaaggaaaatactgtcgggtcccagggggtttccgatcaatcggggtactattttagtaccttcagggttrtaataaaaacatgtttcctcttgaacaaaaataagaactagctaatagaaatattaatatttattcaattaaacccttctcatgatcatctcccttcaagtctcaacctctaggagactgatgctcaccattgcccacagacatgatctggaatgtcattggtttacacctgaatccctgtgtaccctttccatctcaacacagtccccatggacaatggcaccatctggacgtcaaaattacagaggactgcatcaaggtaccagagacctttgctcctcagtgacagaaaaaatgagaatgttcatgtttactcagaatgttagtgtgtggtttaaatgaggactgggaggtccaaatgaaacatccaaggccagaccaaggttcttgtgatttggacattactactgccctcttttctctcttagggaagaactcagagttcttggaaaatctggactctaatttgtgctctatctgtcccctgatggctcagagacactgctcaatgcaagt

SEQ ID NO: 290868 - DNA, 601 bp, Homo sapiens
tccagcgatctgacaaaggaaaatactgtcgggtcccagggggtttccgatcaatcggggtactattttagtaccttcagggttgtaataaaaacatgtttcctcttgaacaaaaataagaactagctaatagaaatattaatatttattcaattaaacccttctcatgatcatctccyttcaagtctcaacctctaggagactgatgctcaccattgcccacagacatgatctggaatgtcattggtttacacctgaatccctgtgtaccctttccatctcaacacagtccccatggacaatggcaccatctggacgtcaaaattacagaggactgcatcaaggtaccagagacctttgctcctcagtgacagaaaaaatgagaatgttcatgtttactcagaatgttagtgtgtggtttaaatgaggactgggaggtccaaatgaaacatccaaggccagaccaaggttcttgtgatttggacattactactgccctcttttctctcttagggaagaactcagagttcttggaaaatctggactctaatttgtgctctatctgtcccctgatggctcagagacactgctcaatgcaagt

SEQ ID NO: 290869 - DNA, 572 bp, Homo sapiens
gaccttggtaatgatgaggaaacatttcttacacaagatgaaaagcacaatctatgcaagaaaactgataaatatggctacattaaaatataattaaaatctatgcatcaaaagacactggagacaaagtaaaagcacctagggaaaatatttgcaaaacaagtatatttttcatctcatgtattgtaattttcacctctagaatttcaataaggatatttttatatcttccatatttataatgttcaatctttcctctagctttttgaacatatggaatatagttataataatttttaagtgcttgtctgataattgaaacatttatacatctgagtcagtttcaattgttaatttttattcttgttgagrgctactatattttcctgataagctttgataggaatggcagacattgcaaattttaccttgttaggcattgaatacttttgtattcttgttggaaatagtttgattgcttggggcaatacttttattgttttcaggtcggccataactacatttattgtagggataattaaattcattgctgaggtatgtgccttctgact

SEQ ID NO: 290870 - DNA, 522 bp, Homo sapiens
cttatctttatgtaaaactaattgcttcttagcagtaaaactactgaatgatgctaaaagtttcatatagaaattattctgtggttttttttttcctctagaacaaaatcattagcaaaataataaaaaggtaattttctctcctcatcccccctaacagaattgggctttgtgcttcctgttcctggattcctgattccaggaggaacagcctttttgagtacrgtgatgtatatagagttgtgccaacatgagatggtccccatcccagtcttggtttggaaggtctaggccaggggttccagactcaaatgccttcttagcattatgagtaatgtagatgaatgtagtgtttaagacatagtaagagaagtggtgaggtctgtggtaacctggatcatatatccttcttaaaagggctgtgcagctgccgccctgctctagctaatgattgccacctagggaggtagatccaggtcatcacattgaaatagaaatctggaagtaaaaatactgctatgg

SEQ ID NO: 290871 - DNA, 843 bp, Homo sapiens
cttatctttatgtaaaactaattgcttcttagcagtaaaactactgaatgatgctaaaagtttcatatagaaattattctgtggttttttttttcctctagaacaaaatcattagcaaaataataaaaaggtaattttctctcctcatcccccctaacagaattgggctttgtgcttcctgttcctggattcctgattccaggaggaacagcctttttgagtacagtgatgtatatagagttgtgccaacatgasatggtccccatcccagtcttggtttggaaggtctaggccaggggttccagactcaaatgccttcttagcattatgagtaatgtagatgaatgtagtgtttaagacatagtaagagaagtggtgaggtctgtggtaacctggatcatatatccttcttaaaagggctgtgcagctgccgccctgctctagctaatgattgccacctagggaggtagatccaggtcatcacattgaaatagaaatctggaagtaaaaatactgctatggwgaaacctgaagataaaataaatagagaaatcacaatccaagaactgggttaatttaaaaactctgaatgagactatgaaataagtattgtcttgatgtgtttgggctgctatgacacaataccgcagactgggtggcttacaaacaacagacatatatttctcacagttctggaggctggaagwgcaagatcaagtggcccacagatttggtttctgatgagggcactcttcctggttcatagaggacagtcttcttgctatgtactcttatggccaaaagggtgagggagcgcgctgggctctcttttataaagacacg

SEQ ID NO: 290872 - DNA, 320 bp, Homo sapiens
gaaacctgaagataaaataaatagagaaatcacaatccaagaactgggttaatttaaaaactctgaatgagactatgaaataagtattgtcttgatgtgtttgggctgctatgacacaataccgcagactgggtggcttacaaacaacagacatatatttctcacagttctggaggctggaagascaagatcaagtggcccacagatttggtttctgatgagggcactcttcctggttcatagaggacagtcttcttgctatgtactcttatggccaaaagggtgagggagcgcgctgggctctcttttataaagacacg

SEQ ID NO: 290873 - DNA, 530 bp, Homo sapiens
ccagggaggtgaaagatctctacaataggaattacaaaacactactgaaagaaatcatagatgatacaaacaaatggaaaaacattccatgctcatggataggaagaatcaatattgttaaaataaccatactgatgaaagctatttacagattcagtgctatacctatcaaactaccaatgatatttttcacagaattaaaaaaaattytaaaattcaatttggaaccaaaagagagccaaatagtcaaagcaatcctaagcaaaaaaaaaaaaaaaaaaaaaaagctggaggtatcacactacccaacttcaaactgtacaaggccgcagtaaataaaacagcatggtcctggtacaaaaatagacacatagaccaatagaacaggttagagaacccagaaataaagctgcacacccacaaccttttgatctttgaaaaagccctcaaaaacaagcaacggggaaaggattccctattcagtaaatgctgctggaataactgactaaccatatacagaagattgaaac

SEQ ID NO: 290874 - DNA, 539 bp, Homo sapiens
ttggggtggggggcatccccattctttctgcagagagctctgaggaggggcccgcctgcccaccacagaaggatgggggcatgaggggctgctgggtggccgaaactcctcggggactttcctccaggaacaccccacagtccgtagtgaggctcccagcctggggccggggccgagtcctaacactgagacctggctcgggcttcagggttaggcaggtgcaggcggcccaggctcagtctctgtccctctgggcctccgctaatgtgaagygaagggtagaactagaaggctgcccctccgacctcctgcggcgcctccatggtcacaccctccggtcatcgtcgcagctccaaatgccagccccagctcgaaccctctccttccagggccacagatgtcgtgctcctggccccgttttgccagcccaagactaggagccacggcacctgtcctcccacagagagagacccccggggcgaaggtgcgggaggaagctgggacccccaagagttgtgaggccgggctccatcaggccc

SEQ ID NO: 290875 - DNA, 600 bp, Homo sapiens
tttctcaggctcctacttgtaagtttcagatattatggttctgcaaaaaagggtcacctctctccctcttcctgtgttggaaggtgacrtcctccctttagtttgtggccaacacttgtttctgaaactttttacagcaaacagagtatctgtatgaggttatgttgagggtcgcttgttaaaagctgctgcctgacagctgttaattctggggctagtgagacacataattatggtgtttatactctaaaatttttgccaaaagaatctctaccccttttgtaaatatatagacataaatgttattctatgtaaatacagatgcacaattttataaagtatatgatcgcacatcaatgtatgtaggaatcatgctggttctcagggcattgcctgtcagctccagattcatcaggacctgctcagcagcggggtcggggagctgggcctgggaacagccctggcttggttcaggccgctccagggcagcatggccagtccagggcacagaagcatctgcaggaagagcagctttcttcaagtcgctctttagccctttgtggttaatctctcagtactagttaataaatcttaatgaaa

SEQ ID NO: 290876 - DNA, 600 bp, Homo sapiens
tttctcaggctcctacttgtaagtttcagatattatggttctgcaaaaaagggtcacctctctccctcttcctgtgttggaaggtgacgtcctccctttagtttgtggccaacacttgtttctgaaactttttacagyaaacagagtatctgtatgaggttatgttgagggtcgcttgttaaaagctgctgcctgacagctgttaattctggggctagtgagacacataattatggtgtttatactctaaaatttttgccaaaagaatctctaccccttttgtaaatatatagacataaatgttattctatgtaaatacagatgcacaattttataaagtatatgatcgcacatcaatgtatgtaggaatcatgctggttctcagggcattgcctgtcagctccagattcatcaggacctgctcagcagcggggtcggggagctgggcctgggaacagccctggcttggttcaggccgctccagggcagcatggccagtccagggcacagaagcatctgcaggaagagcagctttcttcaagtcgctctttagccctttgtggttaatctctcagtactagttaataaatcttaatgaaa

SEQ ID NO: 290877 - DNA, 600 bp, Homo sapiens
tttctcaggctcctacttgtaagtttcagatattatggttctgcaaaaaagggtcacctctctccctcttcctgtgttggaaggtgacgtcctccctttagtttgtggccaacacttgtttctgaaactttttacagcaaacagagtatctgtatgaggttatgttgagggtcgcttgttaaaagctgctgcctgacagctgttaattctggggctagtgagacacataattatggtgtttatactctaaaatttttgccaaaagaatctctaccccttttgtaaatatatagacataaatgttattctatgtaaatacagatgcacaattttataaagtatatgatcgcacatcaatgtatgtaggaatcatgctggttctcagggcattgcctgtcagctccagattcatcaggacctgctcagcagcggggtcggggagctgggcctgggaacagccctggcttggttcaggccgctccagggcagcatggccrgtccagggcacagaagcatctgcaggaagagcagctttcttcaagtcgctctttagccctttgtggttaatctctcagtactagttaataaatcttaatgaaa

SEQ ID NO: 290878 - DNA, 640 bp, Homo sapiens
tgcaactactatttctctaagttttcatttacttctcttttttttttttttttttttgagacatggtcttcctctgtcacccaggctggagtgcagtaggatgattatggctcacttcagcctcaacatctggagctcaagtgatcctcccacctcagcctcctgtgtagctgagactacaggtgcgcatcaccacacttggttaattttttactttttgtagagacagggtctagctatgttgccacgctagtctcaaactcctggacccaagcgatcctactgcctcagccttccaaagtgctgggagtacaaggcattagccacagcacccagctctcatttacttcaattacagatcactttattatctaaatcacttttatctattatagtctcatatataatctggaataatttacaagtgtcaaacaccacatttcagyattcagcatgcaagtctatttcatgaccaattacttaaataaataaacaaagaaagaaagaaagaaatggatataaataataatgaagtgcatggaatgatagacaagagtttacctccaaagttacaataacctgtttggacatatcctgtgcaaatccctttccactcagacacattctgagaggcactaag

SEQ ID NO: 290879 - DNA, 640 bp, Homo sapiens
tgcaactactatttctctaagttttcatttacttctcttttttttttttttttttttgagacatggtcttcctctgtcacccaggctggagtgcagtaggatgattatggctcacttcagcctcaacatctggagctcaagtgatcctcccacctcagcctcctgtgtagctgagactacaggtgcgcatcaccacacttggttaattttttactttttgtagagacagggtctagctatgttgccacgctagtctcaaactcctggacccaagcgatcctactgcctcagccttccaaagtgctgggagtacaaggcattagccacagcacccagctctcatttacttcaattacagatcactttattatctaaatcacttttatctattatagtctcatatataatctggaataatttacaagtgtcaaacaccacatttcagtattcagcatgcaagtctatttcrtgaccaattacttaaataaataaacaaagaaagaaagaaagaaatggatataaataataatgaagtgcatggaatgatagacaagagtttacctccaaagttacaataacctgtttggacatatcctgtgcaaatccctttccactcagacacattctgagaggcactaag

SEQ ID NO: 290880 - DNA, 1131 bp, Homo sapiens
attatctatgtttccggactttatggctgccctgtagtgatatgccattaatatttctgcttggcattttctgtcccatcacyattttcttatttttttttctttttaccttcatatattttcttctttcttctttaatattttctacttttgtccaactccagcttggccttgacttatgaccccaagcatatattgtgaatgctccctatatgtcctttgacgtacctccaatttctctctgcatttcctaatttggtttatatgaaaaaagtatgattggcctgtacatttttttgtaccaggacacattgtagataattggctcatctctggatttgggtagggaagactatggggtcacacagtatacctgccctgtaagctgtgaacaaagaattttcacttaggagggacacagggcctggtaccaacactgctgggactaacatacagtcctctacttcactcatgtaataagaaagggtccagttctcctaacatgctccctcttaagaaaaagaaaaagtaaaatttcatcttctgagttttaggtggattttccwattatctatgtttccggactttatggctgccctgtagtgatatgccattaatatttctgcttggcattttctgtcccatcactattttcttatwtttttttctttttaccttcatatattttcttctttcttctttaatattttctacttttgtccaactccagcttggccttgacttatgaccccaagcatatattgtgaatgctccctatatgtcctttgacgtacctccaatttctctctgcatttcctaatttggtttatatgaaaaaagtatgattggcctgtacatttttttgtaccaggacacattgtagataattggctcatctctggatttgggtagggaagactatggggtcacacagtatacctgccctgtaagctgtgaacaaagaattttcacttaggagggacacagggcctggtaccaacactgctgggactaacatacagtcctctacttcactcatgtaataagaaagggtccagttctcctaacatgctccctcttaagaaaaagaaaaagtaaaatttcatcttctgagttttaggtggattttcc

SEQ ID NO: 290881 - DNA, 565 bp, Homo sapiens
attatctatgtttccggactttatggctgccctgtagtgatatgccattaatatttctgcttggcattttctgtcccatcactattttcttatttttttttctttttaccttcatatattttcttctttmttctttaatattttctacttttgtccaactccagcttggccttgacttatgaccccaagcatatattgtgaatgctccctatatgtcctttgacgtacctccaatttctctctgcatttcctaatttggtttatatgaaaaaagtatgattggcctgtacatttttttgtaccaggacacattgtagataattggctcatctctggatttgggtagggaagactatggggtcacacagtatacctgccctgtaagctgtgaacaaagaattttcacttaggagggacacagggcctggtaccaacactgctgggactaacatacagtcctctacttcactcatgtaataagaaagggtccagttctcctaacatgctccctcttaagaaaaagaaaaagtaaaatttcatcttctgagttttaggtggattttcc

SEQ ID NO: 290882 - DNA, 620 bp, Homo sapiens
tcattgaaagcagggactatgtctctcttattcactgctctgccccagacactagtgcgatatgtgatacatagtatgcgttcaatatatttttcaaaataaataatcaatcaattaattcatgactaccatatctacttgcccacaacttctaaacaatgggaagcatggagatgagagtctrgtgagggccatttttgtaaatatcaaagagtacctctaggttctacagaataacttagtagaatattaaacgagaagtggaataggtttaaatgcaggtcttctaattaaaaatgagttcctagataaaagcaagagtaaaacaaaaacttgcagaggtacttaattattcttagcctctctgtctctctctgtctctctctctgaaggtaacttctaccagccaaagcttaatgtttactgtttggtcttcttagaagaaaagattctttaaaacagccatgaaacccctcatcaggccagggcaagatctatcctccagcaggagttagagtctcattgcccatcttggagctgagtttgaaggaaaagtccctgctctggggtacctctctcatctcacttggtcaacacagagttattagattactaagctc

SEQ ID NO: 290883 - DNA, 570 bp, Homo sapiens
aatgtgatattatataatttctagttagctagcactttgactcttaaaattgtcaagtgcccyaagggagaataggtggatcgcaagcattatatcagaaaagccatcttcccaagttggctaccaaaagcatttcagctatccatacgaggatcaacaccagacagttggttagcataatgaatgtcagatatatttctttaatttgtgacatttgtggctaggtaacatgatggatactagaaacaggctcacattgataacattaaagttattcaagacatgtagtttggctaaaatatttttaaagatacttcccacttttgcataaagaaattctaacaaataataaattctataacctgttctttaagaatgttgcttgaagcttaattcctaagtaatactgtgtctagccattaagtaggaagatttcaagtaggttaacactaatgtcagagaacctggaccctaccttctgaaaattgtgtccacctcacaaaaacctttcatggaaggtgatggtttgacaccaaaaggagatctaggacttcactgaactcacagaaa

SEQ ID NO: 290884 - DNA, 562 bp, Homo sapiens
tggtttattcccttctttttgccatgttaacacatacccaaataagattcagtcaactattgacagtggtttacagtgtacatttcaactatagagagcttgggaaaggggtgaaatcaagaaggacttttcataacagtctaattcctcccactggttggagacccactgcccagcccttctgtggcaccccatgtgaatgctttmtagttagttgagaatattccacacacacacccatatttcatcctactaactcctttccccaatgccccacttcttttagcatcctcttctagatcaaaatccttataccttcccttttttaaacacagttggattatttacctagtgggtagcaagctctaagttttcctgttccttagaaatttttccagcttcctgagctgtgggtcacagctattctttctaactctcattctgctataggatagagaaacagaaagtttgagtggaaagggaagaaaagggcattggggtggtcttgtgccagtttcctgatagtcttttctttggctgactgaaaaatataataataata

SEQ ID NO: 290885 - DNA, 526 bp, Homo sapiens
agctaactatgacataaaccccaaaattcctgttccctggaaggtggaatccaagagaaaatactgtcatgtggtcataaggtcaagttcccaaggacctaaaacaagacagagaccctatctagtttttttgtttgtttcagggacttgcaggaaagtttgttattgaccagcttgctgggccgtctggagcagcaagcttatgagggcctaagcctatgttttatcctaaggtacccctcaacccagaaaaacaaattcatagtacaaatacatcagtttaagactagcctcagaattcttttcaacattaatcaaaaccttacagaagagataaacagtgatttttaccattcattcaactgtacagagagagagaarccaaaaatctgactggtaagaaattcttacccttttgccagcatgccaggcttctgggttccctttccctgagcggccctagtgactcagcttgctgtatcattgcaatggggccaagctgcatgataaaggaaaattatatttt

SEQ ID NO: 290886 - DNA, 593 bp, Homo sapiens
tcctaatttgagtctgctttatgttcaattattggtgatgtcatctgacaagtcatttcccatttgccttttgggcttttgtctcagaaagaaggattagtaactcagagtgatgagatgagcagctgttgctttaggagaatccaggtgaaagatgatggtaacaggtctttgtgtgtcctgatttcacctctcatcctccatcagctggggttttcttggcagccacagctggagccactgggtggaagtaggaagayagtcagagccaacaccatcaggaagcagatacatcaccctgagaacgggaagtgctagtcatttaatagtctgtgccagatgacctgcaagagagagagaggcactaagttttctagacaaagcgcatgttgcctgggaaagtggaaattaagacactttaagaactttatctttacaattatctatattttacagtttccagctcaatttatatgggtaatacaagtttccttgaagataaaatcagggtttggaatatgcagttatcattgactgttagaacatgttcaggcaaggcttgggtatgtaagttcttggaactaccacattcc

SEQ ID NO: 290887 - DNA, 400 bp, Homo sapiens
agtgtacctacataaacctagattgtgtagcctactatgctcctagggtattgctcataggctgcaaatctgtacagcatgcgattgaactgaattttgtaggtagttgtaacaaaatggtatttgtgtgtatctacacatagctcaatayagaaaaagtacagtaaatataggttataaaatattaaaaatgatatacctgaatagagcacttaccatgaatggaggttacagaactagtattggcttgggtgaatttgtgagtgagtaatgaatgaaggcttaggacaatactgtacactacagtagtgtcagtaatgtttaaactgtgcacacttaggctatgctaaatttattctttttagttttcttcagtagtaaattaaccttagcttactgt

SEQ ID NO: 290888 - DNA, 600 bp, Homo sapiens
ataaatgtaatacatcacatcaacaaaatgaaggacaaaaccatatgatcatctcaatagactcataaaaaattttaataaaaatcattataataaaagccatatatgataagcccacagcttacatcctactgaatggggaaaagttgaaagcattttctctaagactggaacaagacaaggatgcccactttcaccactcctaataaacrtattactgaaagttcaggccagactaatcaggcaaaagaaaaagaaaagaaaaggcaccaaattggaaaagaggaaggcaaactcactctctttgttaatgaaaggatcttatatctagaaaaacctaaagaatccactaaaatactcttagatctgataaataaattcagtaaagttgcggaccacaaaatcaatatacaaaaattaacatttccatatatcaacattgattgagctgagaaaaaaaatcaagaaaacaatccttgggctgagtgcagtggcccacatccgtaacctcaacaatttgggagaaggagatgggaggattacttgaagccagttcaagtccagcctgggcagcatatcaagaccctgtctttacaaaaa

SEQ ID NO: 290889 - DNA, 562 bp, Homo sapiens
agtagcacaatactatcattttgtccagtggctgtcatttctattcttcatccaagttatttaacatttgaaataatccaatttatgaatagaaaaaataaccctgagtacatccctcatggaaagtaataaaaccgttttcgtgggttcctgctcratttccccagcatgtgctgtctctctgaagtcatggtgataacagaagataccagaaaatcaaatctgtttaccatttgccaatttcttaatcccttggtcagggaaaagctccatttggagacagaattcaaaaaaatcccattttgttttcttatacttctctttccttttactctcctttttaataatctttactttttgcccctccttccttccttccttccttccttccttccttccttccttccttccttcctttcttctttccttccttccttttttttgtgactgcagaaggaagaactcattgtacagagggagtcatgttgtggtgtaatgatgtgagctcaagtcactttgtgaccttctaaattacatgggcccttcttagactcctgcattg

SEQ ID NO: 290890 - DNA, 527 bp, Homo sapiens
acaacaaattgagatgagatgtgctttgaaaacttgaaatataatgaaagtactagctgtaattaaaagaacgtagatgcttttcctacagtatctagttaagataaaagtttctgaatttgtgattataagaatagtctaaggtycccattaaaaaatacatactcttgggtcttatcattggaaattttggtttagtagtctgggggaactatatatgtacgtacaatatatgtaataagcacccctaaatgatccttgtaattgtgtcacctgcattttacagatatgatgttgttaaccgatctaactccaccaacaactcctcgggttttgaccaaaaacaggcgcactcaaagagtgaatgaaatagtgagaagttaagaaattctgcattgaacaatggaatttagtgcacacaagagaactctacctcccatcaccagtttaattatgccagatagtacgtctataccattaccattactacaaatgactcatggcaaatccttcccactcacttagct

SEQ ID NO: 290891 - DNA, 562 bp, Homo sapiens
tgaagtgggatatcccatgaatgagtttgctagatttctgtttattgagtttaggtaaagagaaatttttattgagtttagataaaacattaagataattaaaaaatacttcaaaaataagaaaaaatacatcattaaatttaaattccattatatattctcaaagaagtggttctcaaaattaaatgtgcrcaaggatcacctgacaagcttgctaaaaatgtgggtttctaggccctaatatgagaggcttagggtaaggttggagatacttgtttgaaagaaagaaaagaagattctgatgtagatactctactattcacactttgggggaaaaatatagccacatgaacacatatgtgccataaaacattttcattaaatatttggagttgaacactaatttatcactacgaaaataaaacaaccaataagatgaagaaagtactaaaaaatatttgatgttgcctcccaaaacatagttttgcttttccttttttggaaatctgtaaggaaaactcatcaccaagctgtagatgatgtcaacccttctattcctggc

SEQ ID NO: 290892 - DNA, 548 bp, Homo sapiens
ctaatgcctgatagcctccttgtacatttcccctgttggtcagagttttcagtaactgaagctgttgtggccaacactgagcggccayagcacattgtcactgttgcatataggctcccgtacttccttgttctataaaaagtcacatgaggttgtggggccagattgtaaattttctccaggcaaccataaactcttaatgttttcacacagagaaaggaaagggcctgtcttagtgatgaaaataggagtgtacgtttttcttttctttcttttctctctgatgcagagatggatcagagcaaggtctctacatggtgaagcagttactcaaaaaattgaggctgggactggagaactggtccgcggttcctgtctttgttgttggtggtgttaggcatgtgtgtttcgagaactttgaacatgcagaagagtttgtactttttgtggcttgtctgggttcaaacaaatgtacagccttgtgaagagtcattttcattggctaaaaacgaactctgctttattattatcagatagtgtaaacagag

SEQ ID NO: 290893 - DNA, 548 bp, Homo sapiens
ctaatgcctgatagcctccttgtacatttcccctgttggtcagagttttcagtaactgaagctgttgtggccaacactgagcggccacagcacattgtcactgttgcatataggctcccgtacttccttgttctataaaaagtcacatgaggttgtggggccagattgtaaattttctccaggcaaccataaactcttaatgttttcacacagagaaaggaaagggcctgtcttagtgatgaaaataggagtgtacgtttttcttttctttcttttctctctgatgcagagatggatcagagcaaggtctctacatggtgaagcagttactcaaaaaattgaggctgggactggagaactggtccgcggttcctgtctttgttgttggtggtrttaggcatgtgtgtttcgagaactttgaacatgcagaagagtttgtactttttgtggcttgtctgggttcaaacaaatgtacagccttgtgaagagtcattttcattggctaaaaacgaactctgctttattattatcagatagtgtaaacagag

SEQ ID NO: 290894 - DNA, 605 bp, Homo sapiens
cttttccttgtcattatccatacttaactttcacagtttcatattattaaaaataaattgtgatttacctctaccaacttccaaaaagaaatcaaagcagaatgcaaaagcattgtcaatgcagtgyctcatgttgatgccactgtcctaagatcttccttgcaaagaaaggatgaatttttttctcagcaaatttcttcttctggcaacaccttacacaaggaatactgaatactttattttttaaagtggaattgtgccaaactctaccagttctatccaagtagaaaaaatagatttcctcattttacactgcctcatgaactatatgtatgtatacatgtgtttcctaatcttcataaatgtgaagttttctattttgctttctctttcatatgacagaaccatgtgatcaatggaggtttctgtggcatttcctagtcctctgattctttctagctctttgcatctgaaaagatagaatgagtatgagtggtttaatgtcttgtgccagtatctttctgtttatattctgtagttgggcatagttcattgcatttattaatttttgttggctaatttcaaactggtaattttaagcctga

SEQ ID NO: 290895 - DNA, 576 bp, Homo sapiens
cactattaaacaagcagatgttgtggctgggcacggtggctcatgcctgtaatcccagcactttgggaggcggaggtgggtggatcacgaggtcaggagttcaagaccagcctggccaacatagagaaacccagtctttactaaaaatacaaaaaattagccgggcatggcggcaggcacctgtaatcccagctactcaggagactgaggcaggagaatcacctgaacccaggaggcagaggttgcagtgagccaagatcacaccattgcactccagcccaggggaaaatgcgagactccatctcaaaaacaacaacaacaacaacaacaacaacaacaacaacaasaagcagatcttgtaagaacgaactcactgtcatgagaacagcaaggggaagtctgttcccatgatccaatcacatcccaccaggcccctcttccagcactggagaattcgacatgagatgtgggtgaggacacagatccaaaccatattaggctcttactgttaatctttcctcaatgcattaaaagacttgggttacaaatccaagctaagattttcactcaggaaat

SEQ ID NO: 290896 - DNA, 590 bp, Homo sapiens
cacagtgaaatggaattaataaaacaggtaagattaataatgacaggtcttaggtagttggggaaatgtctgagagcttaatcaatgaagtgatagaatctgaagtttaaatttatgatttagttatcttctgaatgttctcattatgatacagtgagtctcccagactgtggcttttaggctaagcaatattatgcgtattaagggacacaagggatttgactgtgtcargtttcagtaatgatgattctgagagctccattaaacatctctgctttcctctgagctagaaggcaaattaggcagcagtaaatgaggcttgaaggaaatagaaatgagcagcaatggtcacagcgaaagtgagatgaggccatgcacacacaggcatacagggaatgagaagctatttgaaaacgtgactgggaggaaatgctttgtgagaggagccttggaggagagatatgtgtgaatcatggccaaaaatcagctcagtgggaacctaaaaaaacatgatgtacaaaacttaaggagctcaattccgcttcagcactgtagggtgactatagttaacaataatttattgtatattt

SEQ ID NO: 290897 - DNA, 590 bp, Homo sapiens
cacagtgaaatggaattaataaaacaggtaagattaataatgacaggtcttaggtagttggggaaatgtctgagagcttaatcaatgaagtgatagaatctgaagtttaaatttatgatttagttatcttctgaatgttctcattatgatacagtgagtctcccagactgtggcttttaggctaagcaatattatgcgtattaagggacacaagggatttgactgtgtcaastttcagtaatgatgattctgagagctccattaaacatctctgctttcctctgagctagaaggcaaattaggcagcagtaaatgaggcttgaaggaaatagaaatgagcagcaatggtcacagcgaaagtgagatgaggccatgcacacacaggcatacagggaatgagaagctatttgaaaacgtgactgggaggaaatgctttgtgagaggagccttggaggagagatatgtgtgaatcatggccaaaaatcagctcagtgggaacctaaaaaaacatgatgtacaaaacttaaggagctcaattccgcttcagcactgtagggtgactatagttaacaataatttattgtatattt

SEQ ID NO: 290898 - DNA, 591 bp, Homo sapiens
atccaaatgagatgtacaaaaaactgcttctcttcaatatttggcccacatttttccaatggaagcatttttctcatcagactggtgttaactgccaacttgtaaataaaatataagcttagttttgagctgattatgggcaatatcataacctcatttattcagacaagctacccaaatcacagacgttctttaactggccacttttaagaaaatacttgccaaataatgggcttgttaaatagcaaatgtcaaaaacagatttctaatgtgactaacaggcatttacygaagctgaagcaagtgtttgaacccaatggaatgttaatctaatatgaatatgcttatgctagcaaacactaaagctggatgaaaaaagcatgacatagttttaaaaacagtaatctcatatagatatgcttatgctagaaaattttaaaatttagatggattgtattttttaaatggtaaactatgcatatttttacatatatatgcaaaacattgtgtaatttaaatgtattttaaatctcaatctatttcagggttcagtgttttgattagtaactatcaaatccagcccagagaaat

SEQ ID NO: 290899 - DNA, 586 bp, Homo sapiens
gtgctctgaagcattatgagaaaatgaaataattggcaggactctgcagtcagtgtttcgtttggttaaaaaataatttgaagtatatagtggataatacatatcagaagacaaaaaacgaaaaatacatgtctgctttataaatctctataaaatctaattggagtcagttgttgtataagcagagaatgaacagaaaagctaaatataaaattgaaaatttaaaaatactctaaaaactcttaygaaaaaaattggtcagcctctcctggaatgactcagacaagctcttctttttggtaatgggcctggaatcatatcaaaaaatataagttaagaaaacactatcttttttatattatgaaactaaaattcatcaaaagataatttggagatctatgggaactattttaaaataacaaatgccaaaaaaattatagtccttaatttgttatgttaatgatttgaaacatatgtggtaatatcaaaatatttaactcaaatgtggcaactccacatgtgttttaccaagaataactttgtaaaaacagactctctaccccacgctcctagaaaaaggagagaa

SEQ ID NO: 290900 - DNA, 503 bp, Homo sapiens
gtttctcctgaagcccctctctttggcttgcagatgatcaccttcttgtttttttttctcacatgatctttcttctgtactcacacactcctagtgtctttctgtgtgtccaaatttcccgtgtttataaagacacagattaggctggattagggcccatcctaataacctcatgttaatgtaatcacctctttaaaggccctgtctccaaatatactcacattctgaggtaatggggattagggcttcaacatgtgaatttggtagagatacacatcagccaaaaacagagggaaatactggttttgttgaaccctagccccatctcttctccctttcacatcccaaaatcttagstgggagattagatctgagagatgaggcatggtcaagggtcccagaccctcaagtgaaatgagcaatggcactaagaagtctctccagctcttcctctaggacacccgactggctacatagacagagtcataagtaccaggagggcc

SEQ ID NO: 290901 - DNA, 605 bp, Homo sapiens
taaaattgaacattagcattgtcctaagttaaaccaagatagttagacttttatttgccatctgtcattggacatgggtcatctaggaaaggatttgaccttgggcaagatggctatccacaacagargcaagccctggagtgttgacaacagaaggatatctgctgacggcattaccaacaagtccttcattaaggggtatctggactgtgcatcacctaagttcacatcatgtaaatttggaacataataaccctttgcaagtacatcaggtaatgatattgtaggttcactgccaactctggtcgtggtatttacagacacaagaatgctgtttacagaaacaagcatgctaaagctcctttaaaaaaaaagtcttgtggactttttcatgaagtctgtcaagctggaagcaactattaggcatctgaaagcacactttaatgcatgctccagggttcctgctggtgcctccttgaggaagactgtgggagtacatggaattgagctggatgtatcagacagttctccataatcctattattaatgtgccactgataggacagggcaccgccattcctaagtgtggtcataaaaaaaaagtg

SEQ ID NO: 290902 - DNA, 504 bp, Homo sapiens
cttagagctcaaggaatagatcttggaagctaatgtaccaagagtgctataaaagacacacacatactggaattttggcgagatattgtacccttttgccagtatgctatgtgttcttcagagtgcagcttcttataaaagctcttttgtgcctttttctttctagtttatgttagagttgatcattttttcctagcactacaagtcccaagtttgtgatcattcaatgcyaaaacatttttacttttcttatcaaaagttttttgcaattttttttggtagtgcctctttttttatgcattgaaaatagtgagccaacatatatactgcttgttaattattctcctgtgatcattaattgctgaatgattaatcagaacccatttattattgctgttgtttaagtataattcaacagcaccttttttattaagtcattacctacttcatcataatctttagtcacccttacatctaccagagtcaacatggatgtcctagcct

SEQ ID NO: 290903 - DNA, 519 bp, Homo sapiens
agctgtgtagaatgtatggaagctgtacagaattgttcttccaaaagatgggaaaggagatatatagccaccaattccaattctcactgggcacaggtttcccattagcattaatttctacttccagtttgcacagaattactgcagaggtttccgaaagcatttcacctgtgccatcagagacacctcatggcagaaaaaatatatatacatgtgcacatgggtaagcttttgctgcagcaagagcttgcagagattgaggtgaatgaagaggtcatgaggctggacacaagaggaatctaatatagttaaaagtttagtttaaacataagtgarcaaataagttgttcatataaaatcattggtacttctacctctcgcattatagacagccattccacctaatgggtaacaattatattataatgatttgtataatgatttgtataatgaaaatgctttatatttatttatttcatataaatatgctagtatttcaatatggctaacataggattc

SEQ ID NO: 290904 - DNA, 542 bp, Homo sapiens
aagctggtgctcttacactgaggcaatatcagaggctaagattttcagaaaagcagtgtgcccacaaagtgagctgatcagaggaaccccaaatacgaaagttgaagtgcttacaagttgtccttttgttctcttgtgaagtacaatgaaggctttggaagctgtggtctgtcccagttacactgaggggaatagtcagtgtatttcccttagggaaggaaagggtctgtgttcaaacagtcagaagacccccatggtgcagcagaaagagccgaggatggacccaggcccactacacgtaggtttttttttttttttttttttttttagagactgggtctcactgtattgcccaggttggtctccaactcctggactcaatcctccagcctcagccgcccacagtgctgggattacaggcatgagccactgtgcccagctatgttattattcctaatcttgaattcctatttttgatgatggcasaaagcacttaatcaggattttgttcttttggaagaaagtgcgaaggaaacagagag

SEQ ID NO: 290905 - DNA, 549 bp, Homo sapiens
acactcaccaatgtgggtctgaatcatccaatctgagaacaaaaagacaaaggaagaagaatttgcccttttgtttcctgcctrcctgttgatctgggacatctcatctcatcttctgtgtcccttggactgggatttataccatcagctcccccagttctcaggctgttggacttggactgaaatataccactgactttcctgggtctccagcttgcagacagcagactgtgggacttgtcagcctccataattgtgtgagccaattcctcatagtcaatcaatccatccatccttctggttctgcttctctggagaaccctgattaatacactgccttgataagcagattctacatgggcaggaacagagtgtgagggtcaaacagagatagcctaccagcaatgtgttcttcagaagaaatgcaaagtgttggctaggagtgaggaggttataatgagtatgtgtaagtcaggttggctgggaatggagagtaggtaattgttctttctgactatggaaatcagaaggcttcccagtggcggtgat

SEQ ID NO: 290906 - DNA, 1099 bp, Homo sapiens
ctccagacccaccctccacctttctcctccctgctctgtgtcctgagggctgatctctgccctcaactttacccrctgccttgtcctctggcttctagttggactcagcccacaggggcattggcaggagtacagggggtcagagtatttgcccagcttccttcctaccagccttggttttagcagagctgctttcctcttcccctggccacaggtcccaccctcggcccctctcccagggctctagctgccaccactttcttcacatgccccttgcccttgctcctgacccctccagtcccagaggttgcacagccttctggggctgccccgtgctttgtgggttctgcacacacctctgtaaacagcccctcctgcaaactctgctcaaacatccatctcctgtgggaccctgctcaacatcactcatctggtaagagctagaggcggaattcaaaccctggccgtccagctgcaggctgccaagagcctctcagccactatgcccgtgcccctcatcagtaagtgttggcaactcctgagcctgctgtgwacaagcccatttccagagagttctctccagaaccactcctcctaaagagggcacatatccctgggccctaaaggaggccaagaggtgggtgctttctggaggggtgtggacagactggaacatgaaagccgacatgtccccatgcatgtgcaccaggaccctcaggaggcaagaaatggagatcggcctctccaggggcctgcccttggtcttgtgctgggctagcattagaccgaacggctatccccccggtcccccaccwgcctccattgattgggttttctaaattcccacagccatttctccacagtgttccagatatatctgtcaaatgtctagcaacaattgcaccaatacctcaaaccatctcatccatccattctatttcccccttttgtgtaaaaaaaactaaagaagaaacacccaacagccactgggtgccaggcagtgtgcccagtgctggagcacgtgtgatgcataaggtcggctcctgtcctctggaagcttgcaatctggtgagagggcaacatgaagcctgaggttatc

SEQ ID NO: 290907 - DNA, 546 bp, Homo sapiens
acaagcccatttccagagagttctctccagaaccactcctcctaaagagggcacatatccctgggccctaaaggaggccaagaggtgggtgctttctggaggggtgtggacagactggaacatgaaagccgacatgtccccatgcatgtgcaccaggaccctcaggaggcaagaaatggagatcggcctctccaggggcctgcccttggtcttgtgctgggctagcattagaccgaacggctatccccccggtcccccaccagcctccattgaytgggttttctaaattcccacagccatttctccacagtgttccagatatatctgtcaaatgtctagcaacaattgcaccaatacctcaaaccatctcatccatccattctatttcccccttttgtgtaaaaaaaactaaagaagaaacacccaacagccactgggtgccaggcagtgtgcccagtgctggagcacgtgtgatgcataaggtcggctcctgtcctctggaagcttgcaatctggtgagagggcaacatgaagcctgaggttatc

SEQ ID NO: 290908 - DNA, 546 bp, Homo sapiens
acaagcccatttccagagagttctctccagaaccactcctcctaaagagggcacatatccctgggccctaaaggaggccaagaggtgggtgctttctggaggggtgtggacagactggaacatgaaagccgacatgtccccatgcatgtgcaccaggaccctcaggaggcaagaaatggagatcggcctctccaggggcctgcccttggtcttgtgctgggctagcattagaccgaacggctatccccccggtcccccaccagcctccattgattkggttttctaaattcccacagccatttctccacagtgttccagatatatctgtcaaatgtctagcaacaattgcaccaatacctcaaaccatctcatccatccattctatttcccccttttgtgtaaaaaaaactaaagaagaaacacccaacagccactgggtgccaggcagtgtgcccagtgctggagcacgtgtgatgcataaggtcggctcctgtcctctggaagcttgcaatctggtgagagggcaacatgaagcctgaggttatc

SEQ ID NO: 290909 - DNA, 546 bp, Homo sapiens
acaagcccatttccagagagttctctccagaaccactcctcctaaagagggcacatatccctgggccctaaaggaggccaagaggtgggtgctttctggaggggtgtggacagactggaacatgaaagccgacatgtccccatgcatgtgcaccaggaccctcaggaggcaagaaatggagatcggcctctccaggggcctgcccttggtcttgtgctgggctagcattagaccgaacggctatccccccggtcccccaccagcctccattgattgggttttctaaattcccacagccatttctccacagtgttccagatatatctgtcaaatgtctagcaacaattkcaccaatacctcaaaccatctcatccatccattctatttcccccttttgtgtaaaaaaaactaaagaagaaacacccaacagccactgggtgccaggcagtgtgcccagtgctggagcacgtgtgatgcataaggtcggctcctgtcctctggaagcttgcaatctggtgagagggcaacatgaagcctgaggttatc

SEQ ID NO: 290910 - DNA, 582 bp, Homo sapiens
tctttgtgcatattcaaagtagtgagccaaatacattttgttacatgtagataatcaatcaacctagcaccatctattgaaatgacaatcccttctcatgctacactatagtgtggcctttatcataacaggtaacagaatatgcatgaatctcttcatgggctstcttatctgtttcattactctgtatatctgccacactgctataattactatagctttatgatagcttgttacctggtagtgaaagtcctccagtttagttcttagagattgttttaaatattttagatattttccctttgtaaatgaattttagaagcaagttgtttatgttcaccaaacttatacatacacactgattttgattggaattatattgaatttatagattaatttagaaaaattgacatttttgtaataatgaatctttccattttcaatccatgaacatggcatatttctcacttcatttaggacttttacactttttctcaataatattgtatagttttcagagtagatcttgcacatattttgtgagacttattcctgagtagttggtgtttgttgatactaatg

SEQ ID NO: 290911 - DNA, 583 bp, Homo sapiens
cctcacataaaaatgaacccaaaacaggaaaaagatctaaaggtggaagataaaactgttaaactgataggaaaaaaaaatagaagaaaatcttttcaactttggggtaagcaaggattgcctagctgggaaagaaaaattaaaaaaccacaaaagaaaaaattcataacttggtttttctattaatttgttagggctgmcataatagaataccacagactgggtaacttacataacaagtacctgttgggggctgttaagtccaagatcaaggggctggcaggtttggtttctactgaggcctctgtctttggttttcaaacagatgccttctcactgtgtcctcccacggccttttctctctgcacacacctctctggtgtctcttcctctttttgtaaggaaatcaatcctattgtatgagggccctaccctatgacctcatttaatcttgatcatcaccttcaagaccctgtcttcaaacacagtcacactggaggttagagcttcaacataggaattttgggggaccatgattctgtcgaaaacagaactttaagttggtgccttttactaggtacac

SEQ ID NO: 290912 - DNA, 356 bp, Homo sapiens
tgctagatcctcagtagcacttctgtagaggaggtgagcctgttttccattttccgcctctctttcatacatccccttgcccccttaaccatgaggcacagctgctaaagctgccggcaaaccctgtggtttctgaaggactcctgccctaactagccttaggaacacagagccccggagaacttctagcccygtggcatttctcctggctatgttttaaactttatttgattgtatgtaatttagtaagttaccttactttctttataggatgagaaagagaagaaagccagaaaaagggaagaaagagtggagggaaggaaggctctgatgcagggccctgagcatgcacagga

SEQ ID NO: 290913 - DNA, 589 bp, Homo sapiens
gcctgcaatcccagcactttgggagactgaggtgggaggattgcttgagttcaggagttaaagaccagcctgggcaacatagggagaccttgtctctacaaaaaattttacaaattagccgggtgtggtggcacatgcctggtctgtagtctcatctacttgagaggctttcgtatttttttcattggagacggggttttgccatgttggccaggctagtctcaaattcctaacccatctacttgcttgagccygggaggtcgaggctgcagtgagccactgctgcactccagcctgggtgataaagtgagaaagaaaaaaaaaaacaaaaaagaaaagaaaagaagtctatagtgaaaagacacataccttcaaaagcacaataaaaagatgaaagccagaagacaatggaatgatatcttcaaatttataaaataaaaataattgacaatctaggattctgtagccagtgtaaaaactttcaaagtgtatgcgaaataaagttatttctagacaggcaagagtaaaatgaccccagatggcaaaaaaggaaatgtaagaaggaatgaagaacaacggaaagggtgaa

SEQ ID NO: 290914 - DNA, 393 bp, Homo sapiens
ggcccaatgtcacaaaattgtcagtggcagtgccaggcttgcatgattttcttcttgatgccccaggggcaatgggcaagcatggaagccctccctgtaacttccaagggtctggcctggacagttgaaatcttccaattatcccccctgtataaacttggttgctttcactgatgaaaataaactgttttyccctagagagaaaagagaccacaggtcaggggagagtcccgcaacactgtccctcggatgctctgaccccagtcagactccagacacacaggagcaagagaggtcttgccaagctctccttcatacctcctgcacagccagttggaggaggaggcaaattccctgcgaacttctttgagtcctcgcttagctgccagccca

SEQ ID NO: 290915 - DNA, 589 bp, Homo sapiens
gcctgcaatcccagcactttgggagactgaggtgggaggattgcttgagttcaggagttaaagaccagcctgggcaacatagggagaccttgtctctacaaaaaattttacaaattagccgggtgtggtggcacatgcctggtctgtagtctcatctacttgagaggctttcgtatttttttcattggagacggggttttgccatgttggccaggctagtctcaaattcctaacccatctacttgcttgagcctgggaggtcgaggctgcagtgagccactgctgcactccagcctgggtgataaagtgagaaagaaaaaaaaaaacaaaaaagaaaagaaaagaagtctatagtgaaaagacacataccttcaaaagcacaataaaaagatgaaagccagaagacaatggaatgatatcttcaaatttataaaataaaaataattgacaatctaggattctrtagccagtgtaaaaactttcaaagtgtatgcgaaataaagttatttctagacaggcaagagtaaaatgaccccagatggcaaaaaaggaaatgtaagaaggaatgaagaacaacggaaagggtgaa

SEQ ID NO: 290916 - DNA, 599 bp, Homo sapiens
caacacctcactactctataagtgaagcagctgaggctcagataggggaagggacctgcctgagatcataccaccatgagtggcagctacaacttaggagccagaaagagcctctgcatactcagagaaagtcttcaaagtctgtcacttgtcagccagggatctcagtgggaaatcctttccagtgtgtaacagaggagtcrtcagacccagctgtcatgggggaggaagaagatatttcagctggtgtctctggagtatattcccagagtctttacaacccacacctcacatacaaaggttcttcccttggtttgtccttggcactgaccttttgtggtctagcacccatcacactgtattgtgcccacatcatggctgtctcctccatcagaccgtgagcttttaaaaggccatcttcacagtgccagcaccattcacataggatgcactcattaaatgtctgttgaatgagtgaacaagtgagtgaacagatgcattcatgtttagagggagggatgaatggataaacaagccagcactttcccaatgaacaagatctcaggtcagtgtagtggaaagttcccagcacctggaaa

SEQ ID NO: 290917 - DNA, 521 bp, Homo sapiens
ttttcagggataatacattcactcattatttaagcccatttgggttcagttttctggagcttgaagacaaagcatcacaattgatgtaatycttcctgtatttggcactcttaccctcttcctattgcaatcgatagttgtcaattttcctgtcaatctctcatgtcatttcagttgtagctttttttttcttttaatttgtccttctctctgtctagacattaaactttttgagagagggagggtgtctgtgctccctagatctgtgcctgggacatagcacacacccaacaaatatgtgatgaataaatgaatgaacaaatctcctagtcctcaagttgttattagataagaccgaataaaatcactatgccagcagtaggtggttttgaattggaaattctagaagattcaccagaagattcttgctgagttttatgagatattatcaaaggccatcattaggaaatgacattgtcatattttgattttcacttccaagtttggaagcttgagtaatc

SEQ ID NO: 290918 - DNA, 521 bp, Homo sapiens
ttttcagggataatacattcactcattatttaagcccatttgggttcagttttctggagcttgaagacaaagcatcacaattgatgtaatccttcctgtatttggcactcttaccctcttcctattgcaatcgatagttgtcaattttcctgtcaatctctcatgtcatttcagttgtagctttttttttcttttaatttgtccttctctctgtctagacattaaactttttgagagagggagggtgtctgtgctccctagatctgtgcctgggacatagcacacacccaacaaatatgtgatgaataaatgaatgaacaaatctcctagtcctcaagttgttattagataagaccgaataaaatcactatgccagcagtaggtggttttgaattggaaattctagaagattcaccagaarattcttgctgagttttatgagatattatcaaaggccatcattaggaaatgacattgtcatattttgattttcacttccaagtttggaagcttgagtaatc

SEQ ID NO: 290919 - DNA, 451 bp, Homo sapiens
gtccatgcaaacactaactgaaaaaaggcagtgaaaacgtgttcatatcagacaaaatagactgtaaggcaaaaagcattattaaaaataaagacccttgtaataatataaggttcaatcactaagaagatatgataattcaaaatctgtacacatctaactacttagcctaagcatctataaagcaaaaatcaacagaactacaaggagagacacaattctacaatatttgagggagataattttgcttattttgttataagaaaatagcactttgttaactaygggccaagcacttttccacacacttcacatgtgctagctcattcaaccctcacaactgtggcatgcagtaggcaccctcacttactaggtgagaattctgaagcacggaaagcttaagtaacttgcccaaagtcacagaattggtaaagtatcagggctgagattt

SEQ ID NO: 290920 - DNA, 579 bp, Homo sapiens
agtctgttgcatgctgtttcatgtgttgttaataataacagctaacatttattgagagcttgtcatgtggcaggcactgtgccaagcccttccaaggctgtgtttcatctcttcctcacagtggcccaagatgcagagcggtcaagggcactgcaaccagattgcttgacaccatctccaggccccaccatgttaccagctgagtgtccttgagcaagataaggttcctttcgtgcctcggtttcttcatccgtaaaatgagaataacaataacaccaacttcatagagctgtgattattggatgagttaatgtatgtcaagtgcttagaagtgcatctggcactctgtaagagtttgctgttttatcatttttattttataggcagtaaattgttgtaagtggcaagtcacccagctattgaggggccaggctgggattctaatccaggtctctctgaccacagagcctatgtttaactactaaacttcctasccagcagccccaggagcaacttcagaggccatcagccatttgcagagcctgttttgaggctctgcaaagaccagggaaaatgcta

SEQ ID NO: 290921 - DNA, 529 bp, Homo sapiens
cccacactcactaaaaaatcatatcttttctcttccctattaaaactcctcctctgttcagggaacttggggaagaaaaggatgtgataaataagttcacactacaggtgagtggttgatattagtttaataggttaatckacttcccaaagaggatattctttttcaaggggtgtacccagagccagaaactcaaacagcagagtttctggcattcccagacatcccagttgcttggacagatgtaggcaagtctggaggcaatataattagcatggtttggaggcactatcagtgttgctccctcaactctggggttcaaatcctgacactgccactttctcgctacaaaaattggggcaagttgcttcacttctctaaaccgtttgccataggttgggctttcttggaagtagactctgatataagggcttaagtgtaagttgttttttggaggaagtgatcccagagagcactgtcaaggcaatgaagaaataagacaaggaaggaagctaagggtgcagcagtg

SEQ ID NO: 290922 - DNA, 585 bp, Homo sapiens
attgttaccagcgagaccagcagcagcgcagctaggacagccactacagtgcgccccttcagcaagcagcatgcagactctgagcacaagctgcagaccacccacacgtcagargtgcctggggcacccaccagcatgccctgatccttggggaatttgcattctttgcacgtgctccaggtcgttctgatgcacctggagatttgtgcaaggcaggaatgtgggctgcagcccattccctagctgtaggggtgttctacattcaactcagctggcttaaactcaactcagtgaagaggactcactgtcgtataactgataagtcccaaggggagtggggttaaggggtggcttcattcaggagttcaacaagatcctccattctgtcatccagtgtccacctcatctcaaggccagatcctccttccctaccctgaccctgtcaacttctgagcctacaaagttccttgtcccaggctgggagaggaggcaggagtgggagaggtgaggagagagagttagttcatttgtttgtttgttctaggggctcttttagaaaggcaagaaagcttgcttcccaaaaaa

SEQ ID NO: 290923 - DNA, 563 bp, Homo sapiens
ctagacgcgcgccgccgcctaatgcactccaggtgtcggggcgcggcaggaacctccggcccgaggggcgcgcggctgggagcgggaagccagccctgagctctccgccctagggtaccctggccccggccgtcccacaccgggctccccggctccaccctccacgcggggcggctgccagtgatgctgttctgcggaagacggccaagtgctccggcaagggccagcgcctcggttactggccgggtgtgggcgctcaaccttgcctccccttctgcgtgggctccaggcccgagctggggccagtagtgggggtcagatgcggtggtagtgggagaggtgccctcagggagctcaggtggagacccctatcccgcagccgcttgcccyagtccccgggtaccacgcgaagcaagtccaccctcctgtcggcctacagaggagcttctcagagggcccatggttgaaagggcctctggctagtggaatcctagagtcacagtttaaaacaatcattgatacattgagttgtgggggcttggaagggagagcaggggaagaac

SEQ ID NO: 290924 - DNA, 258 bp, Homo sapiens
aaaaaccacaaaatgttgttgaaggaaatattaaaagacctaaataaatggaaaggaattccatgttcatgttccacattcatggattggaagacttaacagagttaagatggcagtaatcccaaattgatctatagatttgttgcaatctctatcaaaatcccagcaggmtctctctctctctctttttttttttttttttttttttgtgtgtggcagaaattgacaagctgctcttaaaattcaggtagaaaagca

SEQ ID NO: 290925 - DNA, 258 bp, Homo sapiens
aaaaaccacaaaatgttgttgaaggaaatattaaaagacctaaataaatggaaaggaattccatgttcatgttccacattcatggattggaagacttaacagagttaagatggcagtaatcccaaattgatctatagatttgttgcaatctctatcaaaatcccagcaggatctctctctctctctytttttttttttttttttttttgtgtgtggcagaaattgacaagctgctcttaaaattcaggtagaaaagca

SEQ ID NO: 290926 - DNA, 661 bp, Homo sapiens
caatgcaattctaataaaaatcccagcaaattattttgtggatttttataaactgattctaaagtttatatgcagaagcaaatactcagaatagccaacacaatattgaagtagaagaacaaagttggaggacactatgtgagtaaacaagacagtgtgacattggcaaaataatagaaatatagatcaatggaacagagtagagagtgcagaaagagacccacataaatatagccaaaagacattttgcaaaagaaaatatacaaatgacaaataagcatatgaaaaaatactcaacatcatacatcattggggaattgcaaataaaaacgayaataatgtactaccacatacctattagaaaggccaacaccaacaccaaatgctggcaagaatgcagagcagtcgaaattcttattcattattggtggggaatgcaaaaatggtggccacactggaagacgagtatttcttacaaactaaacatactcttactttaccatccagcaactggggcttcctggtatttccccagagttgaaattttacattcacacaaaaccctgcacatgaatgtttatggcagcttttttcatgatgaccaaaatttggaagcaaccaaaatgtcttttagcaggtaaatggaaaaacaaactgtgac

SEQ ID NO: 290927 - DNA, 661 bp, Homo sapiens
caatgcaattctaataaaaatcccagcaaattattttgtggatttttataaactgattctaaagtttatatgcagaagcaaatactcagaatagccaacacaatattgaagtagaagaacaaagttggaggacactatgtgagtaaacaagacagtgtgacattggcaaaataatagaaatatagatcaatggaacagagtagagagtgcagaaagagacccacataaatatagccaaaagacattttgcaaaagaaaatatacaaatgacaaataagcatatgaaaaaatactcaacatcatacatcattggggaattgcaaataaaaacgacaataatgtactaccacatacctattagaaaggccaacaccaacaccaaatgctggcaagaatgcagagcagtcgaaattcttattcattattggtggggaatgcaaaaatggtrgccacactggaagacgagtatttcttacaaactaaacatactcttactttaccatccagcaactggggcttcctggtatttccccagagttgaaattttacattcacacaaaaccctgcacatgaatgtttatggcagcttttttcatgatgaccaaaatttggaagcaaccaaaatgtcttttagcaggtaaatggaaaaacaaactgtgac

SEQ ID NO: 290928 - DNA, 549 bp, Homo sapiens
atctttgtccaccttttcttctattttcttaaaactattaattatagttatttaaartcctggccaattctaatatctagttctgtttctattaacgtttttctcttagtgtttagtcatttggatttgatcttttgcatggctcataattattttgtattggatcccagatattgtataagacaaaattgtagactctggataatgttacctacctccatagagtttctactttctactcctggaaagtagaaagaatagtggcagataactttgatcctgaaaaggcttggtttcaagctttgttagatctattttatttcagtattatattgctcttactccaaggatgtgctgagatctcaactgaaaaccctgggtatctaggtaccttatcaaggcttgaagtccaacttctgttggatgctgaaatcttcacttacctcattagaccctaaactgctgttttctgatttttttttttttggcatctttctttgtgcatgctgagtgtaggaacttagatcactatcatgatggcaatttgca

SEQ ID NO: 290929 - DNA, 565 bp, Homo sapiens
ttgtaagtttcctgaggcctcccagtcattcttcctgttaaacctgaagaactgtgagtcaattaaatctcttttcttcataaattatccaatctcaggtagttctttatggcagtgtgagaacagactaatacagcctcttattcctcagcccagaaaaactgctgtattttttttttggcttttattgtcttgcacttagttttgagcattccctcargagaaatattccagggtaaacactgagttcacctcatgtgccttctctccaggatcatagctttaagttccgcctggtttagttactcttcaatgcctccaaagaattatagatatagatatatagatactcctaggcttatgatggggttatatctcaataaacctaagttgaaaatattgtaagtcaaaaatgcacttaatacacctaacctaccaaacatcatagcttaacttaccttaccttaaatgtgctcagaacacttatgttagcctacagttgggcaaaattatctaatgcaaagcctattttacaataaagtgttgattatgtaatttgttgaat

SEQ ID NO: 290930 - DNA, 565 bp, Homo sapiens
ttgtaagtttcctgaggcctcccagtcattcttcctgttaaacctgaagaactgtgagtcaattaaatctcttttcttcataaattatccaatctcaggtagttctttatggcagtgtgagaacagactaatacagcctcttattcctcagcccagaaaaactgctgtattttttttttggcttttattgtcttgcacttagttttgagcattccctcaagagaaatattccagggtaaacactgagttcacctcatgtgccttctctccaggatcatagctttaagttccrcctggtttagttactcttcaatgcctccaaagaattatagatatagatatatagatactcctaggcttatgatggggttatatctcaataaacctaagttgaaaatattgtaagtcaaaaatgcacttaatacacctaacctaccaaacatcatagcttaacttaccttaccttaaatgtgctcagaacacttatgttagcctacagttgggcaaaattatctaatgcaaagcctattttacaataaagtgttgattatgtaatttgttgaat

SEQ ID NO: 290931 - DNA, 565 bp, Homo sapiens
ttgtaagtttcctgaggcctcccagtcattcttcctgttaaacctgaagaactgtgagtcaattaaatctcttttcttcataaattatccaatctcaggtagttctttatggcagtgtgagaacagactaatacagcctcttattcctcagcccagaaaaactgctgtattttttttttggcttttattgtcttgcacttagttttgagcattccctcaagagaaatattccagggtaaacactgagttcacctcatgtgccttctctccaggatcatagctttaagttccgcctgstttagttactcttcaatgcctccaaagaattatagatatagatatatagatactcctaggcttatgatggggttatatctcaataaacctaagttgaaaatattgtaagtcaaaaatgcacttaatacacctaacctaccaaacatcatagcttaacttaccttaccttaaatgtgctcagaacacttatgttagcctacagttgggcaaaattatctaatgcaaagcctattttacaataaagtgttgattatgtaatttgttgaat

SEQ ID NO: 290932 - DNA, 565 bp, Homo sapiens
ttgtaagtttcctgaggcctcccagtcattcttcctgttaaacctgaagaactgtgagtcaattaaatctcttttcttcataaattatccaatctcaggtagttctttatggcagtgtgagaacagactaatacagcctcttattcctcagcccagaaaaactgctgtattttttttttggcttttattgtcttgcacttagttttgagcattccctcaagagaaatattccagggtaaacactgagttcacctcatgtgccttctctccaggatcatagctttaagttccgcctggtttagttactcttcaatgcctccaaagaattatagatatagatatatagatactcctaggcttatgatggggttatatcycaataaacctaagttgaaaatattgtaagtcaaaaatgcacttaatacacctaacctaccaaacatcatagcttaacttaccttaccttaaatgtgctcagaacacttatgttagcctacagttgggcaaaattatctaatgcaaagcctattttacaataaagtgttgattatgtaatttgttgaat

SEQ ID NO: 290933 - DNA, 481 bp, Homo sapiens
tctatgttcaggatagctatatttgtgaactatgaaatttagcctattcactgacaattttattttttcataacactatccactgtttatgtcagaaaacagactcacattcagttaatagagcttaaataaatcacatgtcttctaaggaacccataakaaattactgctcttaagaaagaattaagcaaaaagtattcattgtttgatttttttataaagtaaaatttttattgccttatacaaattacttttatagacctaattacttttttaaaaaagcatatctatgggatgttaattattttataaaatactttgaaattttatttaaagcttagaacaaaaaaattaatctgaatgtgtatttataattccaaggctctttaatcaccttacgcacacggggtgaattcttcttatctggaaagcagcattaatcctgcagaatttaaaatgaattatgactccttatcacaag

SEQ ID NO: 290934 - DNA, 481 bp, Homo sapiens
tctatgttcaggatagctatatttgtgaactatgaaatttagcctattcactgacaattttattttttcataacactatccactgtttatgtcagaaaacagactcacattcagttaatagagcttaaataaatcacatgtcttctaaggaacccataataaattactgctcttaagaaagaattaagcaaaaagtattcattgtttgatttttttataaagtaaaatttttattgccttatacaaattacttttatagacctaattacttttttaaaaaagcatatctatgggatgttaattattttataaaatactttgaaattttatttaaagcttagaacaaaaaaattaatctgaatgtgtatttataattccaaggctctttaatcaccttacgcacacgrggtgaattcttcttatctggaaagcagcattaatcctgcagaatttaaaatgaattatgactccttatcacaag

SEQ ID NO: 290935 - DNA, 594 bp, Homo sapiens
ccagacattttaaaattttgctgtggtaaataaacattatcagttttttcttttatggttctgcttttaatgtcatatctaagaaatcattacttaatccagattacaaaaatattctatttttttctagaagttttatagttttgcatttttacatttaggcctatgatccatttgmgttaacttttgtatattgtgatcaaggtgtttttttttttcttttttatctttttttttttttgcatgtagatgtacagttgttctaacactgtttgttaagagcactatcctttttccatttaattgccttagcacctttgttcaaatcaattgaccacatatataatcgtctgtatctgggtttctattgtgtttgactgatttatttatccgccttttttttttctttttctttttttgagatggagtctaactctgttgcccaggctggagtgcagtggcacaatcttggctcacggcaactttcgcctcctgggttcaagcaattctactgcctcagcctcccttatccatctttagactaataccaaactgatttggttacagtagctttatacgttttgaaatcacgta

SEQ ID NO: 290936 - DNA, 644 bp, Homo sapiens
accatgggccatatcaccagtgcccattgtgttctatgcatcctaatattttcattaatctgaaggggagagggttttaactttgaaggatactcaggaggactttcttatgaactcagatggaaagtgtcctgaaatttgtccttttaaaaatatctgtgcatttttttgtgctatgacattcttacatgtatcattctgtgatcaaatctccagcttactataaatgatacctacattctaaagagccaattctagttgtaccagcatggccttagagaaaagtaagggaatacaatttgtatttatcttctatttggtcggagttaagtatttaaaacagtaaggtagatctcagatccaccaccattaaaaataaataaataaataaataaataaataaaatagtaaagtagaaagaagagacaaagatccaaacctttcaaaatgaaaaatgaattttaaatataaggttatattttattacctactgctgagaccatcattgcataaatgaataaatagaactaaatagtccagtcacagtggctcacgcctgtaatcccagcacttttggaggcygaggcacgcagatcacgaggtcaggagacagagaccatcctggccaacatggtgaaaccctg

SEQ ID NO: 290937 - DNA, 644 bp, Homo sapiens
accatgggccatatcaccagtgcccattgtgttctatgcatcctaatattttcattaatctgaaggggagagggttttaactttgaaggatactcaggaggactttcttatgaactcagatggaaagtgtcctgaaatttgtccttttaaaaatatctgtgcatttttttgtgctatgacattcttacatgtatcattctgtgatcaaatctccagcttactataaatgatacctacattctaaagagccaattctagttgtaccagcatggccttagagaaaagtaagggaatacaatttgtatttatcttctatttggtcggagttaagtatttaaaacagtaaggtagatctcagatccaccaccattaaaaataaataaataaataaataaataaataaaatagtaaagtagaaagaagagacaaagatccaaacctttcaaaatgaaaaatgaattttaaatataaggttatattttattacctactgctgagaccatcattgcataaatgaataaatagaactaaatagtccagtcacagtggctcacgcctgtaatcccagcacttttggaggccgaggcacgcagatcacgaggtcaggagacrgagaccatcctggccaacatggtgaaaccctg

SEQ ID NO: 290938 - DNA, 491 bp, Homo sapiens
ttaattatgaggcttttcccactttagtagatgatgaaacaaactacttccagccttgtatgagccaagaggattgtttaatctgattctcttgtgtggttcttaccccaaccttggtagtttcctgatataccgatcagtattcagctgaatattcaaggagactctccacagatctctggaattttctattctttctgktactcttccccatgaactctacctgccttggccttctcaaatctctgcatgatctcttcaactcaggcagatcaccaggctctgcctggattccctctctgtgagctctggggcagttaagtaggacagttgtatggcttactttgcttgtttctctcttctcttggataactttcctatgttgtctgacatccagtgtctgaaaataattattttatatatcttgtcctattttttagtaatttctgtcaggggtgaaggggaatgaataccaaccctattaccgcatg

SEQ ID NO: 290939 - DNA, 553 bp, Homo sapiens
gagaacacaggcatacagcggtcagtagtccacagcaattttgaaatctagctgagtacatattaccagttccttgattagggcccagtcctgctcctgggaatgattccctctggctatccatcagtcctctgggctcttggttccattctttgagccgttcttctttttccctaagaagtaatccttgtttttggctgggtaactttctcagcctgcttctctgaggcaggttgagggtccaaaggcatcttttcactttgtactctcttcatccttttcagtcagtccatgctggtataattcacttaaaaatgttaaggcgtcttatatactaattgataaygaactttactaggcaaaagccacacccacatttcattctgaagccagctttttcaccttgcttggactaactgtgagtctgacatgggataacagaaccttaaaattcttagaaactcttttgtccaatggagaggtacattgcccaagattgtagaaggctttttgtttaactgaaaggatatatgaggcaccaccttaattgagg

SEQ ID NO: 290940 - DNA, 553 bp, Homo sapiens
gagaacacaggcatacagcggtcagtagtccacagcaattttgaaatctagctgagtacatattaccagttccttgattagggcccagtcctgctcctgggaatgattccctctggctatccatcagtcctctgggctcttggttccattctttgagccgttcttctttttccctaagaagtaatccttgtttttggctgggtaactttctcagcctgcttctctgaggcaggttgagggtccaaaggcatcttttcactttgtactctcttcatccttttcagtcagtccatgctggtataattcacttaaaaatgttaaggcgtcttatatactaattgataacgaactttactaggcaaaagccacacccacatttcattctgaagccagctttttcaccttgcttggactaackgtgagtctgacatgggataacagaaccttaaaattcttagaaactcttttgtccaatggagaggtacattgcccaagattgtagaaggctttttgtttaactgaaaggatatatgaggcaccaccttaattgagg

SEQ ID NO: 290941 - DNA, 553 bp, Homo sapiens
gagaacacaggcatacagcggtcagtagtccacagcaattttgaaatctagctgagtacatattaccagttccttgattagggcccagtcctgctcctgggaatgattccctctggctatccatcagtcctctgggctcttggttccattctttgagccgttcttctttttccctaagaagtaatccttgtttttggctgggtaactttctcagcctgcttctctgaggcaggttgagggtccaaaggcatcttttcactttgtactctcttcatccttttcagtcagtccatgctggtataattcacttaaaaatgttaaggcgtcttatatactaattgataacgaactttactaggcaaaagccacacccacatttcattctgaagccagctttttcaccttgcttggactaactgtgagtctgacatgggataacagaaccttaaaattcttagaaactcttttgtccaatggagaggtrcattgcccaagattgtagaaggctttttgtttaactgaaaggatatatgaggcaccaccttaattgagg

SEQ ID NO: 290942 - DNA, 531 bp, Homo sapiens
gagccagcgagagaggggtcggggagacgcgagggtggttcagggggcgtgyaacctgggccgattctgccccagcacactggttgtcgggagccccgcctccgctcgcggttgacagctcagctggtgccgagcaactcgtgccagccagtcgtgtctcagcctggagagtgcgcgcaccgccgcccgggcagccgctggctccagctcacgaaacagccccgggcgccgcgccgctctgagtccagcctcctactgagaacagtccctcccttgtgcgggtcgcacggctagccgcgggttcggccacgtcaaatccattttctaaaaaagcagggagcagagctctctcttcgccgccgacgcagaaaggagctggggaggaaaaagctgctgccttttgcgctggagattcgtgggcaaggcttctcattttcccaggctgcttcccctcccgggtgaggagcgtcctgagactaaggaaagagcctggaaaatggagcagacctggacgaggtaggtgggctgttt

SEQ ID NO: 290943 - DNA, 531 bp, Homo sapiens
gagccagcgagagaggggtcggggagacgcgagggtggttcagggggcgtgtaacctgggccgattstgccccagcacactggttgtcgggagccccgcctccgctcgcggttgacagctcagctggtgccgagcaactcgtgccagccagtcgtgtctcagcctggagagtgcgcgcaccgccgcccgggcagccgctggctccagctcacgaaacagccccgggcgccgcgccgctctgagtccagcctcctactgagaacagtccctcccttgtgcgggtcgcacggctagccgcgggttcggccacgtcaaatccattttctaaaaaagcagggagcagagctctctcttcgccgccgacgcagaaaggagctggggaggaaaaagctgctgccttttgcgctggagattcgtgggcaaggcttctcattttcccaggctgcttcccctcccgggtgaggagcgtcctgagactaaggaaagagcctggaaaatggagcagacctggacgaggtaggtgggctgttt

SEQ ID NO: 290944 - DNA, 531 bp, Homo sapiens
gagccagcgagagaggggtcggggagacgcgagggtggttcagggggcgtgtaacctgggccgattctgccccagcacactggttgtcgggagccccgcctccgctcgcggttgacagctcagctggtgccgagcaactcgtgccagccagtcgtgtctcagcctggagagtgcgcgcaccgccgcccgggcagccgctggctccagctcacgaaacagccccgggcgccgcgccgctcygagtccagcctcctactgagaacagtccctcccttgtgcgggtcgcacggctagccgcgggttcggccacgtcaaatccattttctaaaaaagcagggagcagagctctctcttcgccgccgacgcagaaaggagctggggaggaaaaagctgctgccttttgcgctggagattcgtgggcaaggcttctcattttcccaggctgcttcccctcccgggtgaggagcgtcctgagactaaggaaagagcctggaaaatggagcagacctggacgaggtaggtgggctgttt

SEQ ID NO: 290945 - DNA, 531 bp, Homo sapiens
gagccagcgagagaggggtcggggagacgcgagggtggttcagggggcgtgtaacctgggccgattctgccccagcacactggttgtcgggagccccgcctccgctcgcggttgacagctcagctggtgccgagcaactcgtgccagccagtcgtgtctcagcctggagagtgcgcgcaccgccgcccgggcagccgctggctccagctcacgaaacagccccgggcgccgcgccgctctgagtccagcctcctactgagaacagtccctcccttgtgcgggtcgcacggctagccgcrggttcggccacgtcaaatccattttctaaaaaagcagggagcagagctctctcttcgccgccgacgcagaaaggagctggggaggaaaaagctgctgccttttgcgctggagattcgtgggcaaggcttctcattttcccaggctgcttcccctcccgggtgaggagcgtcctgagactaaggaaagagcctggaaaatggagcagacctggacgaggtaggtgggctgttt

SEQ ID NO: 290946 - DNA, 445 bp, Homo sapiens
gacatttatttttctctgaatttatggtgagttagtagagagtcctgtttacaaagacatagttacaaccagagatatatggccactgaggttaaagtggttaaatgatttgctggcattcacacaactagtatgtgttgtatgaaggcctagttaattccartacctttacttattatggtgctggtgctttgcatgtaacacttcatattaggaaaatgcttgttttcagaattctattattgaaacatctttggaagttgaatttcctgtttaatattcagcactgctagcaactaattatctgaattttaagaaggaaattctgccttggcaactccagtctacttttaaatgggcctatacttggatttcggcttggggaatttgccagaatcaatgctttcactcctacttgcttattttccacacactagatcagtct

SEQ ID NO: 290947 - DNA, 572 bp, Homo sapiens
tcctgggaggctcgcctgactgtggctgagggatcatattttcaaggctaagtggagcatccatccattcagtggatgccccaggacactacttctattgaaatctaccccattttataaataaaattccaaactgggctcagaacattccacaagytgtctctggcaaaaattcaaatagcatttaaagttagaagaaagtccagaatacaagagatgtcatattgacccaaggtggctctatgtgattctattttaaaacactcaaatgcactgaggacttgttttcctctgcctcagagcattttctgagttctgtggccagcaagacaagcatgatctgaatttcttttttctgaacgcttatggctaaagtgctaaattagtcatagactatttataataaattgtataataatactgttttattttcatagcactttcacagcctgtgattcatctttccttaatctgtctcattatcttcagtccttttctgcttgttacattccacagaaacgtctttctttcttgtcttttccaaggccagtgagggaagaggtaacttgcaa

SEQ ID NO: 290948 - DNA, 462 bp, Homo sapiens
aatttaagaatgaatttattttccacttcataatgtggtatattatcattcataatgtagaataacatgctgtggatttacagtgtcttttaaatcattacgcctaacccaaaggatgtagacttccaatttttaactattataaataatacttgataaatgtctaggtgcataaagcatcttcttccacagcattattttttgaatgagagatgttcagaagtagaataactatgtcaacatttccagttcttgaaagtacattgcaaattacttaaagttatagtcccataagaargatattgcattcaatttaaatatctttttcaagacctgaatccctgtattgtaaagggggaaactgaggcacactgacattaaagtggcataacctatgtgaatcaatagcaacatttccaacttttacccttctctagggtaaaatgcttcactgttgctgtt

SEQ ID NO: 290949 - DNA, 570 bp, Homo sapiens
gcactccagaaaacagcctctcagagtgatggtcactgtcagtgaatagactttgagtgaagggtgtaattgcagcctatactggaataaagtggatgtttctgtatcggtgccaagtcrgcccacacttagtcagcatgcagaaggaggctcaccgtgatgctctctctcctctgggagctttgccaattaagcatcctcacttgcagaggttataatgatagatcttgagatgagaaaaaatgataatttcactgtattatataatagtcttaacgttctgcatctggggcttttaccctatttgcatttgaatatgtgtttttacaattcgggtgccacattgtgggagggtatttggcaacatttggaacatagaaaatatatccagtgtctctccttggcaagaggaaaaaaacacatctgagaagtctcagagcttgttcactaatgccttttccactttgattgtttctgtttccaccacctttcccgcgtttcagtttattcccttgggtagggacaatgccaagtgttaacacgggaggggttggagaaagatgtaaatat

SEQ ID NO: 290950 - DNA, 570 bp, Homo sapiens
gcactccagaaaacagcctctcagagtgatggtcactgtcagtgaatagactttgagtgaagggtgtaattgcagcctatactggaataaagtggatgtttctgtatcggtgccaagtcagcccacacttagtcagcatgcagaaggaggctcaccgtgatgctctctctcctctgggagctttgccaattaagcatcctcacttgcagaggttataatgatagatcttgagatgagaaaaaatgataatttcactgtattatataatagtcttaacgttctgcatctggggcttttaccctatttgcatttgaatatgtgyttttacaattcgggtgccacattgtgggagggtatttggcaacatttggaacatagaaaatatatccagtgtctctccttggcaagaggaaaaaaacacatctgagaagtctcagagcttgttcactaatgccttttccactttgattgtttctgtttccaccacctttcccgcgtttcagtttattcccttgggtagggacaatgccaagtgttaacacgggaggggttggagaaagatgtaaatat

SEQ ID NO: 290951 - DNA, 623 bp, Homo sapiens
atttggaacatagaaaatatatccagtgtctctccttggcaagaggaaaaaaamacatctgagaagtctcagagcttgttcactaatgccttttccactttgattgtttctgtttccaccacctttcccgcgtttcagtttattcccttgggtagggacaatgccaagtgttaacacgggaggggttggagaaagatgtaaatattctgaaaaaagtgggttagagatagagaagtataaaatgatggatgactcacttttcacgataggacctatataaaaagtcacactagccacttccgttttgggattttaattattttgtcacatggcatctgttacaccagtactcaaatactcaagtgtaagctgtgcccatcagggataagttgatagtctaagaaacaaatttgtgtcagggtttgagacaaaaatcccatctcatcagcacagcaaaccgtccacccttcctttcgcctcagcttctcaggggtgagttccctggagtcaaggcaggtacaaaggaggttccctgtaaatgtgtggttagaaatagggcatattgggaagagtaaaagtttggagtcaaatagacagttttcaagttcaggctctgacaccaa

SEQ ID NO: 290952 - DNA, 1194 bp, Homo sapiens
gcactccagaaaacagcctctcagagtgatggtcactgtcagtgaatagactttgagtgaagggtgtaattgcagcctatactggaataaagtggatgtttctgtatcggtgccaagtcagcccacacttagtcagcatgcagaaggaggctcaccgtgatgctctctctcctctgggagctttgccaattaagcatcctcacttgcagaggttataatgatagatcttgagatgagaaaaaatgataatttcactgtattatataatagtcttaacgttctgcatctggggcttttaccctatttgcatttgaatatgtgtttttacaattcgggtgccacattgtgggagggtatttggcaacatttggaacatagaaaatatatccagtgtctctccttggcaagaggaaaaaaacacatctgagaagtctcagagcttgttcactaatgccttttccactttgattgtttctgtttccaccacctttcccgcrtttcagtttattcccttgggtagggacaatgccaagtgttaacacgggaggggttggagaaagatgtaaatatwatttggaacatagaaaatatatccagtgtctctccttggcaagaggaaaaaaacacatctgagaagtctcagagcttgttcactaatgccttttccactttgattgtttctgtttccaccacctttcccgcgtttcagtttattcccttgggtagggacaatgccaagtgttawcacgggaggggttggagaaagatgtaaatattctgaaaaaagtgggttagagatagagaagtataaaatgatggatgactcacttttcacgataggacctatataaaaagtcacactagccacttccgttttgggattttaattattttgtcacatggcatctgttacaccagtactcaaatactcaagtgtaagctgtgcccatcagggataagttgatagtctaagaaacaaatttgtgtcagggtttgagacaaaaatcccatctcatcagcacagcaaaccgtccacccttcctttcgcctcagcttctcaggggtgagttccctggagtcaaggcaggtacaaaggaggttccctgtaaatgtgtggttagaaatagggcatattgggaagagtaaaagtttggagtcaaatagacagttttcaagttcaggctctgacaccaa

SEQ ID NO: 290953 - DNA, 623 bp, Homo sapiens
atttggaacatagaaaatatatccagtgtctctccttggcaagaggaaaaaaacacatctgagaagtctcagagcttgttcactaatgccttttccactttgattgtttctgtttccaccacctttcccgcgtttcagtttattcccttgggtagggacaatgccaagtgttaacacgggaggggttggagaaagatgtaaatattctgaaaaaagtgggttagagatagagaagtataaaatgatggatgactcacttttcacgataggacctatataaaaagtcacactagccacttccgttttgggattttaattattttgtcacatggcatctgttacaccagtactcaaatactcaagtgtaagctgtgcccatcagggataagttgatagtctaagaaacaaatttgtgtcagggtttgagacaaaaatcccatctcatyagcacagcaaaccgtccacccttcctttcgcctcagcttctcaggggtgagttccctggagtcaaggcaggtacaaaggaggttccctgtaaatgtgtggttagaaatagggcatattgggaagagtaaaagtttggagtcaaatagacagttttcaagttcaggctctgacaccaa

SEQ ID NO: 290954 - DNA, 623 bp, Homo sapiens
atttggaacatagaaaatatatccagtgtctctccttggcaagaggaaaaaaacacatctgagaagtctcagagcttgttcactaatgccttttccactttgattgtttctgtttccaccacctttcccgcgtttcagtttattcccttgggtagggacaatgccaagtgttaacacgggaggggttggagaaagatgtaaatattctgaaaaaagtgggttagagatagagaagtataaaatgatggatgactcacttttcacgataggacctatataaaaagtcacactagccacttccgttttgggattttaattattttgtcacatggcatctgttacaccagtactcaaatactcaagtgtaagctgtgcccatcagggataagttgatagtctaagaaacaaatttgtgtcagggtttgagacaaaaatcccatctcatcagcacagcaaaccgtccacccttcctttcrcctcagcttctcaggggtgagttccctggagtcaaggcaggtacaaaggaggttccctgtaaatgtgtggttagaaatagggcatattgggaagagtaaaagtttggagtcaaatagacagttttcaagttcaggctctgacaccaa

SEQ ID NO: 290955 - DNA, 561 bp, Homo sapiens
atctatgttcaaatcaaggagaattattcatgtaattcacacaagtcttccctcactattccaaccccctttccagaaatttacataccatatttcttgcatgatttcccctctcccaacgtcagatacagataaatagtgggtgttgaaaggataaaggggattgtgtgagtaaattaccaycagctgtctgaaggcttggttgtaatttctttccttgaggtttgaggtttttgttatggctgacagacaaggctaaccattgaaagggatggatctgaataaacacacacacacggttcacagtaattatttattgaatgaatgaatgaatgaacgaatgaatgagataatgcatcagaaatactgtgtacattttaaggcattgtcccagttgtctattcctgcataaacacacacacacacacacacacacacacactcacacacacacacttcctcaagacagatacaagatgggggaaatgtccaccttttctgctccctagacctccagccagcaagtgaggaaatccacttattcagcttccttgccaatgc

SEQ ID NO: 290956 - DNA, 561 bp, Homo sapiens
atctatgttcaaatcaaggagaattattcatgtaattcacacaagtcttccctcactattccaaccccctttccagaaatttacataccatatttcttgcatgatttcccctctcccaacgtcagatacagataaatagtgggtgttgaaaggataaaggggattgtgtgagtaaattaccatcagctrtctgaaggcttggttgtaatttctttccttgaggtttgaggtttttgttatggctgacagacaaggctaaccattgaaagggatggatctgaataaacacacacacacggttcacagtaattatttattgaatgaatgaatgaatgaacgaatgaatgagataatgcatcagaaatactgtgtacattttaaggcattgtcccagttgtctattcctgcataaacacacacacacacacacacacacacacactcacacacacacacttcctcaagacagatacaagatgggggaaatgtccaccttttctgctccctagacctccagccagcaagtgaggaaatccacttattcagcttccttgccaatgc

SEQ ID NO: 290957 - DNA, 567 bp, Homo sapiens
caaccccctttccagaaatttacataccatatttcttgcatgatttcccctctcccaacgtcagatacagataaatagtgggtgttgaaaggataaaggggattgtgtgagtaaattaccatcagctgtctgaaggcttggttgtaatttctttccttgaggtttgaggtttttgttatggctgacagacaaggctaaccattgaaagsgatggatctgaataaacacacacacacggttcacagtaattatttattgaatgaatgaatgaatgaacgaatgaatgagataatgcatcagaaatactgtgtacattttaaggcattgtcccagttgtctattcctgcataaacacacacacacacacacacacacacacactcacacacacacacttcctcaagacagatacaagatgggggaaatgtccaccttttctgctccctagacctccagccagcaagtgaggaaatccacttattcagcttccttgccaatgctttggtctcacatgataaatcagaaagatgagaaatggaaaatctgggtcactggcctagccctagg

SEQ ID NO: 290958 - DNA, 561 bp, Homo sapiens
atctatgttcaaatcaaggagaattattcatgtaattcacacaagtcttccctcactattccaaccccctttccagaaatttacataccatatttcttgcatgatttcccctctcccaacgtcagatacagataaatagtgggtgttgaaaggataaaggggattgtgtgagtaaattaccatcagctgtctgaaggcttggttgtaatttctttccttgaggtttgaggtttttgttatggctgacagacaaggctaaccattgaaagggatggatctgaataaacacacacacacggttcacagtaatyatttattgaatgaatgaatgaatgaacgaatgaatgagataatgcatcagaaatactgtgtacattttaaggcattgtcccagttgtctattcctgcataaacacacacacacacacacacacacacacactcacacacacacacttcctcaagacagatacaagatgggggaaatgtccaccttttctgctccctagacctccagccagcaagtgaggaaatccacttattcagcttccttgccaatgc

SEQ ID NO: 290959 - DNA, 511 bp, Homo sapiens
ttaaatctaatttttctaataattatctctctgaatcatgtgcctgcttccctcaatagattctgagtactttaaccacagggtatatatactttttcacctttgtatttccagtacctggcatataagcaacttctcaataaatgtttacaaaatggaattataaaaaccctaaaaatagcaatgaaggcccaggttttcgctctaggtattgctatagcagattgttttttctccttctgaatttttgttcataataataaaatatatatatatatatataaagaagcttgaaagctagaaaacrcctctgggagatggccctggtcttcaggcttagaaatgttaagcaagggtggtggttagtgatgaagtaggagggccagactatgtggttctcagaacaaactaaatacctgtgattggcctgaagagagggcctgaaaatcaccattcctttgggagtttagacactcatatgggaataaataaccttaggttaattatttta

SEQ ID NO: 290960 - DNA, 573 bp, Homo sapiens
ctgtttctgacatccccatcagacagtcagttgtcaagacagtagacagtccccctttaaaacattagtcactgagtccgtctttctttttgattcacaagactctagtggctaaatgcctctccatgtcttgaaaggcttcaaacagtctgcgccccctgcccagtcttcccattacttccctgacctcacctcctactgctcaccacgtgctcactgcacccagccactaactagyatgctccctcttatgggcctttgcattttatgttctctgcttagaagactctttccctagagacccccatgcctgtccttatggcttcatagagcagccttgtctactgaaaattgcaatcccctctacctcctcctacctccagctctccctatccacattccccactttccttttttttatagcacttgttcccaactgctactatacaatttatttattgtctccccttactgtaaaaattccatgagtgcagggatttttgtctgttttgctcactgctacatttgtggagcttacaacagtgcctaaaagcacttgtcaagcatgggctt

SEQ ID NO: 290961 - DNA, 573 bp, Homo sapiens
ctgtttctgacatccccatcagacagtcagttgtcaagacagtagacagtccccctttaaaacattagtcactgagtccgtctttctttttgattcacaagactctagtggctaaatgcctctccatgtcttgaaaggcttcaaacagtctgcgccccctgcccagtcttcccattacttccctgacctcacctcctactgctcaccacgtgctcactgcacccagccactaactagcatgctccctcttatggrcctttgcattttatgttctctgcttagaagactctttccctagagacccccatgcctgtccttatggcttcatagagcagccttgtctactgaaaattgcaatcccctctacctcctcctacctccagctctccctatccacattccccactttccttttttttatagcacttgttcccaactgctactatacaatttatttattgtctccccttactgtaaaaattccatgagtgcagggatttttgtctgttttgctcactgctacatttgtggagcttacaacagtgcctaaaagcacttgtcaagcatgggctt

SEQ ID NO: 290962 - DNA, 597 bp, Homo sapiens
ttacaacagtgcctaaaagcacttgtcaagcatgggcttgagaagtatttgttgaatacattttgagatactgtcccctctctgctagggatggtggtatttactatgctgaacagatacacctcttgctactgaatcatggtgttattaacatttccactcataaactttgtctgtttttcaaggtttctgtgtcaattctactttctaaacatatctyaaatttttaaaatttcccctttgttaaaccatcacaacttcctatttggaatatagattctcaccatccatttttgcccctccacagtctcactgtgtagagccagaatgcagctggaatgacctatctaaaatataaatctgatcattgccattctttccttaatttaaaatccttcattgatttcccgtagcttttcacattagactcagtggccttaccccataccacaaggtcctgcgtggcctggttgcaacattggctttctttgttcctctaacaggccagagtcctttctgactcagggcctttgctgttctctcatgatggaacactcttccactcccattctcccattctacacctggttgacatcc

SEQ ID NO: 290963 - DNA, 564 bp, Homo sapiens
ctggttgcaacattggctttctttgttcctctaacaggccagagtcctttctgactcagggcctttgctgttctctcatgatggaacactcttccactcccattctcccattctacacctggttgacatcctcccatctacgtttaaatgttcctttccctgagtttctctgagtccctgtgctagttaagttccctctgcattttccttcacaacatttactacaatagtagttaattcttgtgaaattatttaatggctggctctcatgtacttattgagaataggaactcttctgtggtgtttgcctttgtatccctagcacttgacacggtccctgatacataatagaagcttagtaaatacttgcagagagataaayagaaatgacaaataggtaggtgtcttctcctcgatccctgggatgggagccttgtggggtagtatctcattaattaatgatgtgtttgcctccacagagattattttgcagaggatgatggggagatggtacccagaacgagtcacacagcaggtaaggatgctgtgggccttgccttgtta

SEQ ID NO: 290964 - DNA, 598 bp, Homo sapiens
acaaggcagctggagctctcagtctgaacaggtagactctcattaccttttagggctacaggagagctagtgggcattctgaaattcttcrcaaagtgatagttctctcactggcctttggtaggagcgtttctatgagaaaacgtgtttcaagcatagaatttcgggatggccaaagatcttaaaagccctctagagctaactcctagctgatgtgggaaaacttttaacagtatccctgaaaggtgattcttgagttttggtcaagcaccttttgtgacaggaagtttattttgtctcatgatgtatgtactcagtaaaaatttgatgtataaacatatggatagagtgtggcaatatctttattacatctaactctactagagaattcatccttatatctaattgataactgcctccctgtaattcctactttcattccctttaaaatagttttaaaaattataagctgttttacaaacaacaggaatatacaaagaataattaaacacttgtccatgtgttgaatatctaaatgttagaaaacattatttttagtttattttcctcaggtgaaaaaacaaaagttaccattaca

SEQ ID NO: 290965 - DNA, 598 bp, Homo sapiens
acaaggcagctggagctctcagtctgaacaggtagactctcattaccttttagggctacaggagagctagtgggcattctgaaattcttcacaaagtgatagttctctcactggcctttggtaggagcgtttctatgagaaaaygtgtttcaagcatagaatttcgggatggccaaagatcttaaaagccctctagagctaactcctagctgatgtgggaaaacttttaacagtatccctgaaaggtgattcttgagttttggtcaagcaccttttgtgacaggaagtttattttgtctcatgatgtatgtactcagtaaaaatttgatgtataaacatatggatagagtgtggcaatatctttattacatctaactctactagagaattcatccttatatctaattgataactgcctccctgtaattcctactttcattccctttaaaatagttttaaaaattataagctgttttacaaacaacaggaatatacaaagaataattaaacacttgtccatgtgttgaatatctaaatgttagaaaacattatttttagtttattttcctcaggtgaaaaaacaaaagttaccattaca

SEQ ID NO: 290966 - DNA, 598 bp, Homo sapiens
acaaggcagctggagctctcagtctgaacaggtagactctcattaccttttagggctacaggagagctagtgggcattctgaaattcttcacaaagtgatagttctctcactggcctttggtaggagcgtttctatgagaaaacgtgtttcaagcatagaatttcgggatggccaaagatcttaaaagccctctagagctaactcctagctgatgtgggaaaacttttaacagtatccctgaaaggygattcttgagttttggtcaagcaccttttgtgacaggaagtttattttgtctcatgatgtatgtactcagtaaaaatttgatgtataaacatatggatagagtgtggcaatatctttattacatctaactctactagagaattcatccttatatctaattgataactgcctccctgtaattcctactttcattccctttaaaatagttttaaaaattataagctgttttacaaacaacaggaatatacaaagaataattaaacacttgtccatgtgttgaatatctaaatgttagaaaacattatttttagtttattttcctcaggtgaaaaaacaaaagttaccattaca

SEQ ID NO: 290967 - DNA, 598 bp, Homo sapiens
acaaggcagctggagctctcagtctgaacaggtagactctcattaccttttagggctacaggagagctagtgggcattctgaaattcttcacaaagtgatagttctctcactggcctttggtaggagcgtttctatgagaaaacgtgtttcaagcatagaatttcgggatggccaaagatcttaaaagccctctagagctaactcctagctgatgtgggaaaacttttaacagtatccctgaaaggtgattcttgagttttggtcaagcaccttttgtgacaggaagtttattttgtctcatgatgtatgtactcagtaaaaatttgatgtataaacatatggatagagtgtggcaatatctttattacatctaactctactagagaattcatccttatatctaattgataactgyctccctgtaattcctactttcattccctttaaaatagttttaaaaattataagctgttttacaaacaacaggaatatacaaagaataattaaacacttgtccatgtgttgaatatctaaatgttagaaaacattatttttagtttattttcctcaggtgaaaaaacaaaagttaccattaca

SEQ ID NO: 290968 - DNA, 523 bp, Homo sapiens
caggcaagtggtgactccagtgcaggtgacgcagaggtgacactagaatgaagtgaaatattctgttgagggctaagttcatgtttttgctgacagtggtrgataaatgtcatggcttccccctgcatagtgcttaggacatttcttttgatatgtgttttagagaaaacataaaacttgtaatcaggaaaatgcaataacggaagaaatgcttacttgagtaactaatgtgagttaggcaaagaagatacaaatacttcccatttcctacttctaaattacagtcaaattgtcctaagcaaatctctcattgtctccatgtaaaagatatagagaagccgttagaaaaaggtggctggaacaactttatacatacagcctgaatgaactgcctcatcatttatatgtttgaggaaagtgtctgtttgataatttaaattaagtttaaactgtcataaacggagagctgtacagattctgtgggagaggatactggggtaccagatactcattactaggctct

SEQ ID NO: 290969 - DNA, 1158 bp, Homo sapiens
aatgtctgcctccccttctaggttttataaaagttcttggctcacagtaactcttagtataagtttctgaaataaacactttgttatcacttttgaattgatggcttacatttttgttttggcatttaacttcacatttgtgcattcatgtgtatgcatttcaactcatctgcaagcttatatccctcaaagtttgctgctgggctaagagcagccactcaaaaaataataataggccaggcgcagtggctcacgcctgtaatcccagcgctttgggaagctgaggctggtggatcacttgaggtcaggagttcragaccagcctggccaacatgatgaaacctcatctctactaaaaatacataaattagccgggcgtggtggtgggagcccagctactcagggctcctcagctactcagctattcagctactcaggaggctgaggcaggagaattgcttgaacccaggaggcggaggtttcggtgagcgaagattgcgccactgcactccagcctgggcaagagtgagattccatctcaaaaaaataaatgaataaataaaaacaaaaaaaaataaatagtttttaaaaaatcttgacagcataccwgctctccactctgccttcttcaatactctggatcggtgccctttattcatttttttcacaacttcctcccctttgctcacattctttacaagcttccaggattttttwattttattttatttctttccacaatgactctcatggctgttgctatagttgctataaaaggcaaggtggggaacagacaggtgaatgagcacagaggtcatttgtaaaccgtttgtggttagtgctcctctgtttactgtctgtctgtctctctcagtgtctctgggtatgtgtctgtttacaacataaaatatatgcacacaaatctccaatttttctagagtaactattaacacagttaaaatctggaagaactctatcttttaaaggaaataccaattagcaaataaaacagttgattccccccaactctcattccccagagcttgcttaagtgtgtggtttgcacacattccctaaataaaaacattgctggctcataactatgcttcactttcataagccttccaaatgttagtaacttagccttctccttttgaa

SEQ ID NO: 290970 - DNA, 549 bp, Homo sapiens
gctctccactctgccttcttcaatactctggatcggtgccctttattcatttttttcacaacttcctcccctttgctcacattctttacaagcttccaggattttttaattttattttatttctttccacaatgactctcatggctgttgctatagttgctataaaaggcaaggtggggaacagacaggtgaatgagcacagaggtcatttgtaaaccgtttgtggttagtgctcctctgtttactgtctgtctgtctctctcagtgtctctgggtatgtgtctgtttacaacataaaatatatgcacacaaatctccaatttttctagagtaactattaacacagttaaaatctggaagaactctatcttttaaaggaaataccaattagcaaataaaacagttgattccccccaactctcattccccagagcttgcttaagtgtgtggtttgcacacattccmtaaataaaaacattgctggctcataactatgcttcactttcataagccttccaaatgttagtaacttagccttctccttttgaa

SEQ ID NO: 290971 - DNA, 608 bp, Homo sapiens
aatgtctgcctccccttctaggttttataaaagttcttggctcacagtaactcttagtataagtttctgaaataaacactttgttatcacttttgaattgatggcttacatttttgttttggcatttaacttcacatttgtgcattcatgtgtatgcatttcaactcatctgcaagcttatatccctcaaagtttgctgctgggctaagagcagccactcaaaaaataataataggccaggcgcagtggctcacgcctgtaatcccagcgctttgggaagctgaggctggtggatcacttgaggtcaggagttcgagaccagcctggccaacatgatgaaacctcatctctactaaaaatacataaattagccgggcgtggtggtgggagcccagctactcagggctcctcagctactcagctattcagctactcaggaggctgaggcaggagaattgcttgaacccaggaggcggaggtttcggtgagcgaagattgcgccactgcactccagcctgggcaagagtgagattccrtctcaaaaaaataaatgaataaataaaaacaaaaaaaaataaatagtttttaaaaaatcttgacagcatacc

SEQ ID NO: 290972 - DNA, 1170 bp, Homo sapiens
aatgtctgcctccccttctaggttttataaaagttcttggctcacagtaactcttagtataagtttctgaaataaacactttgttatcacttttgaattgatggcttacatttttgttttggcatttaacttcacatttgtgcattcatgtgtatgcatttcaactcatctgcaagcttatatccctcaaagtttgctgctgggctaagagcagccactcaaaaaataataataggccaggcgcagtggctcacgcctgtaatcccagcgctttgggaagctgaggctggtggatcacttgaggtcaggagttcgagaccagcctggccaacatgatgaaacctcatctctactaaaaatacataaattagccgggcgtggtggtgggagcccagctactcagggctcctcagctactcagctattcagctactcaggaggctgaggcaggagaattgcttgaacccaggaggcggaggtttcggtgagcgaagattgcgccactgcactccagcctgggcaagagtgagattccatctcaaaaaaataaatraataaataaaaacaaaaaaaaataaatagtttttaaaaaatcttgacagcataccwacttatgacaatatttagggctaaactgatgttactggtgaaccagtatctggaatgatttccataactcacttaacttgcacatttataatgtggactttaaawaataattatcaggatggctactctgaagccaggagcttaggaagtgtcacagatggtatatatttgtattcctgcctcatgtccctttccctgaagtggcgtgtggagtatgagggattacggtgtatttgtaggtggtgtccctgaaaggctatcaggggacttctggttctgcttcagttctgttttgtgaagacggtcaagtgatttaaggtctcttgcttcagccatcccacttagaaagcagttgctttatagtcctttgggtatacacccagtaatgggatggctggctcaaatggtatttctagttctagatccctgaggaatcgccacactgacttccacaatggttgaactagtttacagtcccaccaacagtgtaaaagtgttcctatttctccacatcctctccagaacctgttgtttcctgactttttaatgattgccattcta

SEQ ID NO: 290973 - DNA, 561 bp, Homo sapiens
acttatgacaatatttagggctaaactgatgttactggtgaaccagtatctggaatgatttccataactcacttaacttgcacatttataatgtggactttaaataataattatcaggatggctactctgaagccaggagcttaggaagtgtcacagatggtatatatttgtattcctgcctcatgtccctttccctgaagtggcgtgtggagtatgagggattacggtgtatttgtaggtggtgtccctgaaaggctatcaggggacttctggttctgcttcagttctgttttgtgaagacrgtcaagtgatttaaggtctcttgcttcagccatcccacttagaaagcagttgctttatagtcctttgggtatacacccagtaatgggatggctggctcaaatggtatttctagttctagatccctgaggaatcgccacactgacttccacaatggttgaactagtttacagtcccaccaacagtgtaaaagtgttcctatttctccacatcctctccagaacctgttgtttcctgactttttaatgattgccattcta

SEQ ID NO: 290974 - DNA, 561 bp, Homo sapiens
acttatgacaatatttagggctaaactgatgttactggtgaaccagtatctggaatgatttccataactcacttaacttgcacatttataatgtggactttaaataataattatcaggatggctactctgaagccaggagcttaggaagtgtcacagatggtatatatttgtattcctgcctcatgtccctttccctgaagtggcgtgtggagtatgagggattacggtgtatttgtaggtggtgtccctgaaaggctatcaggggacttctggttctgcttcagttctgttttgtgaagacggtcaagtgatttaaggtctcttgcttcagccatcccacttagaaagcagttgctttatagtcctttgggtatayacccagtaatgggatggctggctcaaatggtatttctagttctagatccctgaggaatcgccacactgacttccacaatggttgaactagtttacagtcccaccaacagtgtaaaagtgttcctatttctccacatcctctccagaacctgttgtttcctgactttttaatgattgccattcta

SEQ ID NO: 290975 - DNA, 313 bp, Homo sapiens
ccagaacgactggaggaataaattacaaaacctgagaggacccacaggccccctgaaggaagcagatggctcctgcaggacccaggagacacaccaaatactgtgttagtatttacttatagaaatgcaaaatggtctggaaagtctcagccatagaatcaaacaagtagaagaaagaaattcagagctygaacacaaagtcttcaatttgacccaatccaaccaagacaaagaaaaacaaataagaaaatatgaacaaagcctccaaaaactctgggattatgttaaatgaccaaacctaagaataattggc

SEQ ID NO: 290976 - DNA, 313 bp, Homo sapiens
ccagaacgactggaggaataaattacaaaacctgagaggacccacaggccccctgaaggaagcagatggctcctgcaggacccaggagacacaccaaatactgtgttagtatttacttatagaaatgcaaaatggtctggaaagtctcagccatagaatcaaacaagtagaagaaagaaattcagagctcgaacacaaagtcttcaatttgacccaatccaacmaagacaaagaaaaacaaataagaaaatatgaacaaagcctccaaaaactctgggattatgttaaatgaccaaacctaagaataattggc

SEQ ID NO: 290977 - DNA, 564 bp, Homo sapiens
cagacaaaacaaactttaaagaaattgcagttaaaaaagacaaagagcggcattatataatgataaaaggccttgtccaacaggaaaatatcacaatcctaaacatatatgcacctaacactggagctcccaaatttataaaaccatcactaatagacctaagaaatgagatagacagtaacacaataatagtgggggacttcaatatgtcactgacagcactagacaggccaatgagacagaaagtcaacaaagaaacaatggatttaaactatacyctggaacacatggacttaacacatatatacagaacattccatccaacaactgcagaatatacattctattcaacagtgcatggaactttctccaagatagaccacatggtaggccacaaaacaagccgcaataaatttaagaaaattgaaattttatcaagcactctctcagaccacagtggaataaaactggaaatcaactccaaaaggagctttcaaaaccatgcaaatacatggaaattaacctgctcctgaatgatcatgaaatcgagatggaaattaaaaa

SEQ ID NO: 290978 - DNA, 564 bp, Homo sapiens
cagacaaaacaaactttaaagaaattgcagttaaaaaagacaaagagcggcattatataatgataaaaggccttgtccaacaggaaaatatcacaatcctaaacatatatgcacctaacactggagctcccaaatttataaaaccatcactaatagacctaagaaatgagatagacagtaacacaataatagtgggggacttcaatatgtcactgacagcactagacaggccaatgagacagaaagtcaacaaagaaacaatggatttaaactataccctggaacacatggacttaacacatatatacagaacattccatccaacaactgcagaatatacattctattcaacagtgcmtggaactttctccaagatagaccacatggtaggccacaaaacaagccgcaataaatttaagaaaattgaaattttatcaagcactctctcagaccacagtggaataaaactggaaatcaactccaaaaggagctttcaaaaccatgcaaatacatggaaattaacctgctcctgaatgatcatgaaatcgagatggaaattaaaaa

SEQ ID NO: 290979 - DNA, 1129 bp, Homo sapiens
cagacaaaacaaactttaaagaaattgcagttaaaaaagacaaagagcggcattatataatgataaaaggccttgtccaacaggaaaatatcacaatcctaaacatatatgcacctaacactggagctcccaaatttataaaaccatcactaatagacctaagaaatgagatagacagtaacacaataatagtgggggacttcaatatgtcactgacagcactagacaggccaatgagacagaaagtcaacaaagaaacaatggatttaaactataccctggaacacatggacttaacacatatatacagaacattccatccaacaactgcagaatatacattctattcaacagtgcatggaactttctccaagatagaccacatggtaggccacaaaacaagccgcaataaatttaagaaaaytgaaattttatcaagcactctctcagaccacagtggaataaaactggaaatcaactccaaaaggagctttcaaaaccatgcaaatacatggaaattaacctgctcctgaatgatcatgaaatcgagatggaaattaaaaawcagacaaaacaaactttaaagaaattgcagttaaaaaagacaaagagcggcattatataatgataaaaggccttgtccaacaggaaaatatcacaatcctaaacatatatgcacctaacactggagctcccaaatttataaaaccatcactaatagacctaagaaatgagatagacagtaacacaataatagtgggggacttcaatatgtcactgacagcactagacaggccaatgagacagaaagtcaacaaagaaacaatggatttaaactataccctggaacacatggacttaacacatatatacagaacattccatccaacaactgcagaatatacattctattcaacagtgcatggaactttctccaagatagaccacatggtaggccacaaaacaagccgcaataaatttaagaaaattgaaattwtatcaagcactctctcagaccacagtggaataaaactggaaatcaactccaaaaggagctttcaaaaccatgcaaatacatggaaattaacctgctcctgaatgatcatgaaatcgagatggaaattaaaaa

SEQ ID NO: 290980 - DNA, 635 bp, Homo sapiens
cttgctaaatatttttaaattatctgtaacatctaacataatctgacatttatccccaaattcagctttcaattctggattgaaacatactttgatctgttctctaaaaaggacaaagccagtcactggtgttttgcaaagtctgggaccatttttcctacacagaatctcacacaataaacagacaagatattagaaactaagttctaatatctagcagtcactccttccctggaagcctggctgtgtcctgaagccaggtcctatgatcaggcaactcttctgaagctctgcttccactagrgacagcacttaccctgtagactctacagatgtaccatccaggatggcaggcatgagccacatgtggctactgaacccttgagatgtgactagtccaaatcgaaatgtgctgtaaggatttcagacttagcacgcacaggagttcaaagactaactacaacaaaagaatgtgacatctcattaataattttaaaatgttgatttcatgttgaaatgataatgttttaaatgtattattaacattaatttcacatatttctttttactttttttaatgtggccatgagaaaaatttaaattacatgtatggcttatatttacgttggacagca

SEQ ID NO: 290981 - DNA, 526 bp, Homo sapiens
cacaggaacatttttctagagtaatggcacatacctttcatcagattttcaaaggtttctcaaaatgctcaagaaccactgttagatatttaaataaccagagtgtacagtgtccaaatatttccaaattttgacacttgtaagatgtcttaattaaaacaagccatgaagttcagcgtcacaataaccagaaaagcacttgtgagagtagttctatgtctttacttcctagtggtttacacactctttaacccatatggcaatctggcttctgtctccrgtgctctggaattacttctgcctgtatgattaagttcctcattgttaaattcgaaaatacattctttggtatttatttgacctcttggtggtaatatagtgtaagagcacagactctggagccaaactgcctaggttcaaatcttagctctattactttctaactctgtgactttgggcaaatgacttaactctctcatgcctcaaagcagaatcctttgtaaggtttatttatatagtggtgtaa

SEQ ID NO: 290982 - DNA, 526 bp, Homo sapiens
cacaggaacatttttctagagtaatggcacatacctttcatcagattttcaaaggtttctcaaaatgctcaagaaccactgttagatatttaaataaccagagtgtacagtgtccaaatatttccaaattttgacacttgtaagatgtcttaattaaaacaagccatgaagttcagcgtcacaataaccagaaaagcacttgtgagagtagttctatgtctttacttcctagtggtttacacactctttaacccatatggcaatctggcttctgtctccggtgctctggaattacttctgcctgtatgattaagttcctcattgttaaattygaaaatacattctttggtatttatttgacctcttggtggtaatatagtgtaagagcacagactctggagccaaactgcctaggttcaaatcttagctctattactttctaactctgtgactttgggcaaatgacttaactctctcatgcctcaaagcagaatcctttgtaaggtttatttatatagtggtgtaa

SEQ ID NO: 290983 - DNA, 526 bp, Homo sapiens
cacaggaacatttttctagagtaatggcacatacctttcatcagattttcaaaggtttctcaaaatgctcaagaaccactgttagatatttaaataaccagagtgtacagtgtccaaatatttccaaattttgacacttgtaagatgtcttaattaaaacaagccatgaagttcagcgtcacaataaccagaaaagcacttgtgagagtagttctatgtctttacttcctagtggtttacacactctttaacccatatggcaatctggcttctgtctccggtgctctggaattacttctgcctgtatgattaagttcctcattgttaaattcgaaaatacattctttggtatttatttgacctcttggtggtaatatagygtaagagcacagactctggagccaaactgcctaggttcaaatcttagctctattactttctaactctgtgactttgggcaaatgacttaactctctcatgcctcaaagcagaatcctttgtaaggtttatttatatagtggtgtaa

SEQ ID NO: 290984 - DNA, 629 bp, Homo sapiens
gacaattaccccaccccttatttcttaattagctcaacaagattagatagaaatgtatctacaaaggatatatgtatataaattaactagataacaaaacttcacactgaagtgaacattctacaagtatttmtttcattgctgaccattaggttgcagcatgcaactctcaacaatgagctgcccctctccactcctatagaagctccaaatactatggtaccactatgtaggttttcagcctttcaaaggcttttattatgaacatcatcattacttcagcaggagccttttagggacttaaaagcactgattatctataaaaagtaacttcatatttcatgcacaaaattcccaattggcagatttaggtccataaaagaaaggaaaaaaattattctagctatataaattatcaggaataaaatagcatttctccttgccttgttataaggaaataatatatttttccttaccaggaatcaggatagtatctttgatgatccctcagggttataaaattgcttactggttaaagttttttgccaaagatattaagaaataaaaagttcgctcattttcctgtgcaatttaaagaaatatttgcagtatgtacaggaattttaagt

SEQ ID NO: 290985 - DNA, 629 bp, Homo sapiens
gacaattaccccaccccttatttcttaattagctcaacaagattagatagaaatgtatctacaaaggatatatgtatataaattaactagataacaaaacttcacactgaagtgaacattctacaagtatttctttcattgctgaccattaggttgcagcatgcaactctcaacaatgagctgcccctctccactcctatagaagctccaaatactatggtaccactatgtaggttttcagcctttcaaaggcttttattatkaacatcatcattacttcagcaggagccttttagggacttaaaagcactgattatctataaaaagtaacttcatatttcatgcacaaaattcccaattggcagatttaggtccataaaagaaaggaaaaaaattattctagctatataaattatcaggaataaaatagcatttctccttgccttgttataaggaaataatatatttttccttaccaggaatcaggatagtatctttgatgatccctcagggttataaaattgcttactggttaaagttttttgccaaagatattaagaaataaaaagttcgctcattttcctgtgcaatttaaagaaatatttgcagtatgtacaggaattttaagt

SEQ ID NO: 290986 - DNA, 629 bp, Homo sapiens
gacaattaccccaccccttatttcttaattagctcaacaagattagatagaaatgtatctacaaaggatatatgtatataaattaactagataacaaaacttcacactgaagtgaacattctacaagtatttctttcattgctgaccattaggttgcagcatgcaactctcaacaatgagctgcccctctccactcctatagaagctccaaatactatggtaccactatgtaggttttcagcctttcaaaggcttttattatgaacatcatcattacttcagcaggagccttttagggacttaaaagcactgattatctataaaaagtaacttcatatttcatgcacaaaattcccaattggcagatttaggtccataaaagaaaggaaaaaaattattctagytatataaattatcaggaataaaatagcatttctccttgccttgttataaggaaataatatatttttccttaccaggaatcaggatagtatctttgatgatccctcagggttataaaattgcttactggttaaagttttttgccaaagatattaagaaataaaaagttcgctcattttcctgtgcaatttaaagaaatatttgcagtatgtacaggaattttaagt

SEQ ID NO: 290987 - DNA, 1542 bp, Homo sapiens
ctcaggtaaatgtatttagtagtttgagtagttgatctgcagaaactttaactttaattaactacatagrtgaatattttttattttgaaatttgagaatgtcctaagaggatgtctacaggatatgaaactactgggtgcaggaaaattttttaagtgttagcaaattgtggcaagaggaaaacaaacagcggagaaaactgtggtagagaaagtaaagaaggggcaggagaaagctgtaattataacctgggcctgcctttgttctcatgaagccaggggcctctccatatcctatacttgctcttacactaataacaaaccaaatgctgcaaaataaaagtaataatgacccaaactaatttaagtcttttgtttaaggagtaaatgagagaaacattttagcttcttaatcaaggagtgctataatttcaaggcatcttaatataattcacttaccctaaagcaattgtgcaataagcaaattataaaaggaaaacaacaaaggttaactttctacaggggccaatagacaagatctgtggagcacagcaattawtgcacatgataaattataataattattacatgttaataattattatcttcataatcttctaatggtctgaatcatattctcttatattttgaaaaacgataatgataatccatgtaaaacaaactcagataaccagaaaattcaattwaccaaacacagtcttaagctatacttcaatgatgactgctaacatttctaagattctccacatagtagagactactatgaagttaaagctatcaggatttatatttcaatagacataggaaagttgtaactaaaatacaataagtactacaaaaaaaaacgcaagtaaattaagctttttagtattttctggcaagttttttcacccccaaggacatttgtaatgttgttatcttcttataacagttaactaaacacttagagaaatagccagatagacacaagctagaccatattaaaatatagggcatattttaataataaacacaaactctccatttgacwtgcacatgataaattataataattattacatgttaataattattatcttcataatcttctaatggtctgaatcatattctcttatattttgaaaaacgataatgataatccatgtaaaacaaactcagataaccagaaaattcaattaaccaaacacagtcttaagctatacttcaatgatgactgctaacatttctaagattctccacatagtagagactactatgaagttaaagctatcaggatttatatttcaawagacataggaaagttgtaactaaaatacaataagtactacaaaaaaaaacgcaagtaaattaagctttttagtattttctggcaagttttttcacccccaaggacatttgtaatgttgttatcttcttataacagttaactaaacacttagagaaatagccagatagacacaagctagaccatattaaaatatagggcatattttaataataaacacaaactctccatttgac

SEQ ID NO: 290988 - DNA, 491 bp, Homo sapiens
tgcacatgataaattataataattattacatgttaataattattatcttcataatcttctaatggtctgaatcatattctcttatattttgaaaaacgataatgataatccatgtaaaacaaactcagataaccagaaaattcaattaaccaaacacagtcttaagctatacttcaatgatgactgctaacatttctaagattctccacatagtagagactactatgaagttaaagctatcaggatttatatttcaatagacataggaaagttgtaactaaaatacaataagtactacaaaaaaaaacgcaagtaaattaagctttttagtattttctggcaagttttttcacccccaaggacatttgtaatgttgttatcttcttataacagttaactaaacacttagagaaatagccagatagacacaagctagaycatattaaaatatagggcatattttaataataaacacaaactctccatttgac

SEQ ID NO: 290989 - DNA, 647 bp, Homo sapiens
tctcagttacagcaatctccgcctcccaggttcaggtgattctcacgcctcagcttcacaaatagctgggattacagacacccaccaccacacccagctaatttttgtatttttagtagagatggggtttcaccattttggccaggctggtctgaaactcgtgacctcaatcgatccacccaattcagtctcccaaagtgctgagattacaggtgtaagccactggacccagcccattacacaattcttcaactaacattttaaacttttattttagcttgaggatgtatatgtgcgggtttgttacctgggtatattgcataatgccgaggtttggggtacaaacaatcccgtcacccaagtactaagcatactacctaatagtttttcaacccctgccccctccttccctcctcttctagtaagtcctcagtatatttatgtccatgagtgcccaatgtttagcttataaacttataaatgagaatatasagtatttagttttctgttcctgcattaattcacttaggtaatgacttccagctccatccatgttgctgcaaaggacatgatttcatttctttttatgactgcatagtattccatactgaatatatactatattttctttatccaatccaccacta

SEQ ID NO: 290990 - DNA, 647 bp, Homo sapiens
tctcagttacagcaatctccgcctcccaggttcaggtgattctcacgcctcagcttcacaaatagctgggattacagacacccaccaccacacccagctaatttttgtatttttagtagagatggggtttcaccattttggccaggctggtctgaaactcgtgacctcaatcgatccacccaattcagtctcccaaagtgctgagattacaggtgtaagccactggacccagcccattacacaattcttcaactaacattttaaacttttattttagcttgaggatgtatatgtgcgggtttgttacctgggtatattgcataatgccgaggtttggggtacaaacaatcccgtcacccaagtactaagcatactacctaatagtttttcaacccctgccccctccttccctcctcttctagtaagtcctcagtatatttatgtccatgagtgcccaatgtttagcttataaacttataaatgagaatatagagtatttagttttctgttcctgcattaattcacttaggtaatgacttccagctccatccatgttgctgcaaaggacatgatttcatttctttttatgactgcatagtattccatactgaatatatactayattttctttatccaatccaccacta

SEQ ID NO: 290991 - DNA, 647 bp, Homo sapiens
tctcagttacagcaatctccgcctcccaggttcaggtgattctcacgcctcagcttcacaaatagctgggattacagacacccaccaccacacccagctaatttttgtatttttagtagagatggggtttcaccattttggccaggctggtctgaaactcgtgacctcaatcgatccacccaattcagtctcccaaagtgctgagattacaggtgtaagccactggacccagcccattacacaattcttcaactaacattttaaacttttattttagcttgaggatgtatatgtgcgggtttgttacctgggtatattgcataatgccgaggtttggggtacaaacaatcccgtcacccaagtactaagcatactacctaatagtttttcaacccctgccccctccttccctcctcttctagtaagtcctcagtatatttatgtccatgagtgcccaatgtttagcttataaacttataaatgagaatatagagtatttagttttctgttcctgcattaattcacttaggtaatgacttccagctccatccatgttgctgcaaaggacatgatttcatttctttttatgactgcatagtattccatactgaatatatactatrttttctttatccaatccaccacta

SEQ ID NO: 290992 - DNA, 579 bp, Homo sapiens
cttttatacactatggaaaacagtatggaggtttctcaaaaaactaaaaacagaactaccatacaatctagcaatcccactgctgggtatttctccaaaggaaaaaaactcattatgttaaaaacttayctgtacccccatgtttacggcagcaccattcataatatctatggatagataatcaagagaaatgtccatcaagagaataatggattttaaaagtgttttttacacacacacacacacacacacacacacacatacacacacaccatggaatactattcagccataaaaaagaatgaatttctatcattagcagcaacatggataaatctggaggacattacgttaaataaaatcagtcatgcacagaaagataaatatggcatgttctcattcatatgtaggagccaaaaaaaatttttgagctcatggaagtagagagtagaattgtgggtattagaagtagggaaaggtagagagaaggggaggatgggcagaggcaagttaatggataaaaaattacaactggataggaagaatgagttctggtgttctgcagaactgtagggtaaa

SEQ ID NO: 290993 - DNA, 563 bp, Homo sapiens
tttcactactttatagaggaaactgaggcttagagaagttatgtgagctgytcaaagttacactgttaggaaatgtttgagcaagggtactaacctacacatatctggctccaagacagtcctaaagcaagaagttatctattattgcatgatgggcacagcatagacacatgttaacaggttaaattactgtaagcatgctgaaaaaaccaacaagatgtccattttgtagaattagagccagagaagttgctcctcccaaaagacaacatttttaagtaatctttactttttaaaaattattattttttatcaggcattctgttactgtatttcacacttaaatgatcataaagaaatcaagattacactcactgaaaagtcatggctcctgcttccaaggtacatctggtaggggactgttcattcaactttcgaaagagttacttagcctgactctgatactgttgaaggtcccggccagactgaaagaagacatcttcatttaagaattttccacaaaatgctgtatcaattagtgagaagcaccatattatgaggac

SEQ ID NO: 290994 - DNA, 563 bp, Homo sapiens
tttcactactttatagaggaaactgaggcttagagaagttatgtgagctgctcaaagttacactgttaggaaatgtttgagcaagggtactaacctacacatatctggctccaagacagtcctaaagcaagaagttatctattattgcatgatgggcacagcatagacacatgttaacaggttaaattactgtaagcatgctgaaaaaaccaacaagatgtccattttgtagaattagagccagagaagttgctcctcccaaaagacaacatttttaagtaatctttactttttaaaaattattattttttatcaggcattctgttactgtatttcacacttaaatgatcataaagaaatcaagattacactcactgaaaagtcatggctcctgcttccaaggtacatctggtaggggactgttcattcaactttcgaaagagttrcttagcctgactctgatactgttgaaggtcccggccagactgaaagaagacatcttcatttaagaattttccacaaaatgctgtatcaattagtgagaagcaccatattatgaggac

SEQ ID NO: 290995 - DNA, 602 bp, Homo sapiens
atcgcattagttatttgctaagaagcaaaagcatatacctcaaatacacttaagcactcttaactttcaatccagtsttctttccactattaggacagtactctcctcctaacccatttcatttgcagttattggcacagaactacacagcatgtgctatactcaggggaatatcctaggaacaagattggtgaatttcatttttatgttggaatatccagcagaaccttccacaagtgttacagtttttagcatttaaacaaaactaaatgtgtgtactagtgactgcaaattattatgaacactttgactgcaattacataaaaatgaccaagggtagagacaaagattagcatgtcagataccctttactgaagaaatctatttggttcccaagtttggacagcaaaagtttgaatatcgagggatatatgcagacaaaaatgaaaataatagcattcacatgttataattacaggtaatattttcctgaacaatttctaactgcttttacaattatttttgttaaaaagagggggcaaatctactggaaaaaccagcagtgtcatttcaaaagaagaaaaccatgcatctccaatcta

SEQ ID NO: 290996 - DNA, 602 bp, Homo sapiens
atcgcattagttatttgctaagaagcaaaagcatatacctcaaatacacttaagcactcttaactttcaatccagtcttctttccactattaggacagtactctcctcctaacccatttcatttgcagttattggcacagaactacacagcatgtgctatactcaggggaatatcctaggaacragattggtgaatttcatttttatgttggaatatccagcagaaccttccacaagtgttacagtttttagcatttaaacaaaactaaatgtgtgtactagtgactgcaaattattatgaacactttgactgcaattacataaaaatgaccaagggtagagacaaagattagcatgtcagataccctttactgaagaaatctatttggttcccaagtttggacagcaaaagtttgaatatcgagggatatatgcagacaaaaatgaaaataatagcattcacatgttataattacaggtaatattttcctgaacaatttctaactgcttttacaattatttttgttaaaaagagggggcaaatctactggaaaaaccagcagtgtcatttcaaaagaagaaaaccatgcatctccaatcta

SEQ ID NO: 290997 - DNA, 602 bp, Homo sapiens
atcgcattagttatttgctaagaagcaaaagcatatacctcaaatacacttaagcactcttaactttcaatccagtcttctttccactattaggacagtactctcctcctaacccatttcatttgcagttattggcacagaactacacagcatgtgctatactcaggggaatatcctaggaacaagattggtgaatttcatttttatgttggaatatccagcagaaccttccacaagtgttacagtttttagcatttaaacaaaactaaatgtgtgtactagtgactgcaaattattaygaacactttgactgcaattacataaaaatgaccaagggtagagacaaagattagcatgtcagataccctttactgaagaaatctatttggttcccaagtttggacagcaaaagtttgaatatcgagggatatatgcagacaaaaatgaaaataatagcattcacatgttataattacaggtaatattttcctgaacaatttctaactgcttttacaattatttttgttaaaaagagggggcaaatctactggaaaaaccagcagtgtcatttcaaaagaagaaaaccatgcatctccaatcta

SEQ ID NO: 290998 - DNA, 602 bp, Homo sapiens
atcgcattagttatttgctaagaagcaaaagcatatacctcaaatacacttaagcactcttaactttcaatccagtcttctttccactattaggacagtactctcctcctaacccatttcatttgcagttattggcacagaactacacagcatgtgctatactcaggggaatatcctaggaacaagattggtgaatttcatttttatgttggaatatccagcagaaccttccacaagtgttacagtttttagcatttaaacaaaactaaatgtgtgtactagtgactgcaaattattatgaacactttgactgcaattacataaaaatgaccaagggtagagacaaagattagsatgtcagataccctttactgaagaaatctatttggttcccaagtttggacagcaaaagtttgaatatcgagggatatatgcagacaaaaatgaaaataatagcattcacatgttataattacaggtaatattttcctgaacaatttctaactgcttttacaattatttttgttaaaaagagggggcaaatctactggaaaaaccagcagtgtcatttcaaaagaagaaaaccatgcatctccaatcta

SEQ ID NO: 290999 - DNA, 606 bp, Homo sapiens
gtacaaatcctttgactttacaagaggcactgtaaacattactgtaacctgagaaaaagactaacaactgtatcaactataagaaactggccaaaagcattctgcaatttcaggaatttgcaaacagcaatgtaaagactgccaatatacaacactggggatgtatttatagggattatggtatgccaaccaacaccttaccatgctggttcagttagcattaccatcctygagaacacaatgctagcacaatcttcatggttaaataataatctttctggcatattcatacaatggaatactatgcagccattaaaacaatgctgtatagagtttaatgatatgagaaaatattcattaaacactgttaagtggaaaaaattaggtgaaacagtcttacggtattacctattatttaatgttatacacacatacatatgtttaaggtcatccaccaaaatggatataatttgagtacagattatagttaataaacactgttaacattttggtcattttgcttttatgtatttactgaactttctataatacgcacaaattaattttgtaatgtgaaaaatcattcattcattacatatttgcatc

SEQ ID NO: 291000 - DNA, 606 bp, Homo sapiens
gtacaaatcctttgactttacaagaggcactgtaaacattactgtaacctgagaaaaagactaacaactgtatcaactataagaaactggccaaaagcattctgcaatttcaggaatttgcaaacagcaatgtaaagactgccaatatacaacactggggatgtatttatagggattatggtatgccaaccaacaccttaccatgctggttcagttagcattaccatccttgagaacacaatgctagcacaatcttcatggttaaataataatctttctggcatattcatacaatggaatactatgcagccattaaaacaatgctgtatagagtttaatgatatgagaaaatattcattaaacactgttaagtggaaaaaattaggtgaaacagtcttacggtattacctattatttaatgttatacacacatacatatgtttaaggtcatccaccaaaatggatataatttgagtacagattatagttaataaacactgttaacattttggtcattttgcttttatgtatttactgaactttctayaatacgcacaaattaattttgtaatgtgaaaaatcattcattcattacatatttgcatc

SEQ ID NO: 291001 - DNA, 606 bp, Homo sapiens
gtacaaatcctttgactttacaagaggcactgtaaacattactgtaacctgagaaaaagactaacaactgtatcaactataagaaactggccaaaagcattctgcaatttcaggaatttgcaaacagcaatgtaaagactgccaatatacaacactggggatgtatttatagggattatggtatgccaaccaacaccttaccatgctggttcagttagcattaccatccttgagaacacaatgctagcacaatcttcatggttaaataataatctttctggcatattcatacaatggaatactatgcagccattaaaacaatgctgtatagagtttaatgatatgagaaaatattcattaaacactgttaagtggaaaaaattaggtgaaacagtcttacggtattacctattatttaatgttatacacacatacatatgtttaaggtcatccaccaaaatggatataatttgagtacagattatagttaataaacactgttaacattttggtcattttgcttttatgtatttactgaactttctataataygcacaaattaattttgtaatgtgaaaaatcattcattcattacatatttgcatc

SEQ ID NO: 291002 - DNA, 621 bp, Homo sapiens
agaaaggtagataaagaaattgyaaaaatcctaaaaggagaaacatgccataaaaggaatgaggaaaaaagataaacagggtatcagttagggagtccacatttgagaagaaacgctcatctctcttcctgccctaagtctaaattttcagttaaacacagaggaaacaccctgtataaaatactctgtctacattattttgtaaattttactctctattgtattatctgaataactgtccatcttcggtaatatggcagcttgtacaggcacctagtaaatacctaaaatatgatatctattatcagtgtaaatactgaaagtacactgataagaaaacaaaaacatacaaaaatgaaaatacattgaattatctggcctggacaattaaggtgattaaatataaaactgtttggttgagatatctgtttattaaaaagttattcctggactcctaagaggtaagacatcattaaaaggccttagaacaaggcagtaaagtacagtggttaggcactaaagtacagtggttattaagtttttgtctgagtcgacaaaaacttaataaaaaccactgggtctcaattggggtgattttgcccccatgagacatttagcaat

SEQ ID NO: 291003 - DNA, 621 bp, Homo sapiens
agaaaggtagataaagaaattgcaaaaatcctaaaaggagaaacatgccataaaaggaatgaggaaaaaagataaacagggtatcagttagggagtccacatttgagaagaaamgctcatctctcttcctgccctaagtctaaattttcagttaaacacagaggaaacaccctgtataaaatactctgtctacattattttgtaaattttactctctattgtattatctgaataactgtccatcttcggtaatatggcagcttgtacaggcacctagtaaatacctaaaatatgatatctattatcagtgtaaatactgaaagtacactgataagaaaacaaaaacatacaaaaatgaaaatacattgaattatctggcctggacaattaaggtgattaaatataaaactgtttggttgagatatctgtttattaaaaagttattcctggactcctaagaggtaagacatcattaaaaggccttagaacaaggcagtaaagtacagtggttaggcactaaagtacagtggttattaagtttttgtctgagtcgacaaaaacttaataaaaaccactgggtctcaattggggtgattttgcccccatgagacatttagcaat

SEQ ID NO: 291004 - DNA, 391 bp, Homo sapiens
gattaatcaaccctcagtgattgggagcgtgagacaatttaactgtataacatgttatctatctgctttcttggagcttcctgctgcctatttggtgagatctaacactttcttcaagtctggactgcccttcacgatgccagaggaaaatgaaagaaaatacaataattttgaggcagaacagaaaggtagataaagaaattgcaaaaatcctaaaaggagaaacatgccataaaaggaatgaggaaaaaagataaacagggtatcagttagggagtccacatttgagaagaaacgctcatctctcttcctgccctaagtctaaattttcarttaaacacagaggaaacaccctgtataaaatactctgtctacattattttgtaaattt

SEQ ID NO: 291005 - DNA, 593 bp, Homo sapiens
ttctaatttatatggcacaccacctgaaggccagcacagagaaatatatgacctgtttaaaacgaaaggaagtgtacctgggcacgaccaagaatctatcaaaaaagcatcagaaagctccatattaaggttaataaaaataggtgaaccgcacatttcaaaggagartctgggacactattcaaataacaaagacttaaagcaggctgggttcactgcccagaataataggcacacgcatttacagaatggggggattttgtccactgtacgcatgctcattcacactcacatctaaccctacaacaccagctccgagaaagtggatgcaatgaaggaaatgttaacatgagcagtgaccctagtgtacaaacaatatcaaattttagattctttttgtttccatgatagtctaatctgtattatcttttggctatatcaaccttgactttgaaatctccaaataaacatttcaaccaaaatgtacggctatattgtaatttcagcaagaagggttttcattgtttgcacatatcttcaaaaagaaaaaaaagtgtgcttggtagtaatcaaaagcacattctcgagtgagc

SEQ ID NO: 291006 - DNA, 593 bp, Homo sapiens
ttctaatttatatggcacaccacctgaaggccagcacagagaaatatatgacctgtttaaaacgaaaggaagtgtacctgggcacgaccaagaatctatcaaaaaagcatcagaaagctccatattaaggttaataaaaataggtgaaccgcacatttcaaaggagaatctgggacactattcaaataacaaagacttaaagcaggctgggttcactgcccagaataataggcacacgcatttacagaatggggggattttgtccactgtacgcatgctcattcacactcacatctaaccctacaacaccagctccgagaaagtggatgcaatgaaggaaatgttaacatgagcagtgaccctagtgtacraacaatatcaaattttagattctttttgtttccatgatagtctaatctgtattatcttttggctatatcaaccttgactttgaaatctccaaataaacatttcaaccaaaatgtacggctatattgtaatttcagcaagaagggttttcattgtttgcacatatcttcaaaaagaaaaaaaagtgtgcttggtagtaatcaaaagcacattctcgagtgagc

SEQ ID NO: 291007 - DNA, 375 bp, Homo sapiens
gcggccattatagtttcctcatcttacctgctgtctcaacagctttgctgtagcttggcttcctcctctaatagtcctccagctcctgctccttttattggaccatctctcctctactcatagtggtggttcagtgtttcagcaattagtgaaaatttccgtctcagactgacttttctttacaatcttaaggatctttcagttttcattattaataktagtagtattttattttattttcaattttttatgatggggtctccctgtcacccaggctggagtacagtggcataatcttggcccactgcagccttgacttcctgggctcaagtgatcctcccacctcagcctccccagtagctgggaccacaggca

SEQ ID NO: 291008 - DNA, 560 bp, Homo sapiens
cactacacatttagaatgaggaaaatcaaataggattaacatcaaatgttcataagcatatgaagtaactagctggcccactctgacattgctagccggaatgtaaaacagaccagtcacctggaaaaggttgttgcaatttcttacataactaaacatttgtttataatatattctgggaattgtactttggrcattcaattcagaaaaatgaacacttatattcattaagcttgaaagtaaatatttataagcacctttgttcataatagccaaaaactggaaataatcccaatatccttcaatacatgaatagttgaacaaactgtggtatatctatgctataaaataatactcagtgataaaaagcaacaaaaaggatatagcaatttagatgttaaataattattctgactaaaaatgctaatctcaaaaggttgcatactgtacaattgcatctatattacattcatggaataataaaaatacagagattcagagcaggttagttattgccagggattaggaagcagaggttagaagcggctaagcttacaaaa

SEQ ID NO: 291009 - DNA, 585 bp, Homo sapiens
tttttctaacctttaatatatgaatattacatattatattaatatatatattcttacttagataattacttaaaaaataaattcagtttcaattactttcaggataacctggtgcaaatagtcccctgtatgtattatgtgccatggttttcaaccctgcctctaaaccaataaccttactttattctatatttgaacatcatatttcatttatttgctgcatttttgttctccaaaaaattactattgttctatttagtgctaatttcccttttttctctaaaatattttagggattgatgtgtatttaaaaccttgtcatgattatgaggggtgaatgacttatagttttatcttggcttgaaaatcaattttatcttcytgttgactgcattttatgttttctttactctcatcctaaaaaaagttctgaaatgaagccaagttatgatgagatgtcctctgaagtaatcaaatattacactgagagtcatccatcacagaaggcccacaagtttttgttacctatatccttggaaaatgtgaattaagtaattacaaataaacagtggacaatatcattta

SEQ ID NO: 291010 - DNA, 634 bp, Homo sapiens
ttatatggtgaatcacatttactgattcttggatgttgaaccagccttgcatctgagggacaaaacctttttgttcatagtgtgtgaacttcttgatatgctgctggatttgatttgctagtattttgttgaggatttttgcttctatgttcatttggtatattagtctgaaattttctttttctgttgagtctctgccagattttggtatcaggctgttgctggctacacagaatgggttagggaagagctcatccttcccaattccttagattagttttagtaggattggtaccagttcttctttgtgtgtctgatagaattcagcagcgaattcatcctccagaacttttttgcttgacaagttctttattagtcattcaatttcagaagtcacagtctggaggtttctcaaagaacttcaaacagggctaacatttaacccagcaatgccattactagatatatacatcccccmaaaaaaatcattttacctaaaagacacatgcatttgtatgttcatcactgtgctattaacaatagcaaagacatggaatcaacccaagtgcccatcaatgttagatcggataaagaaaatgtggtacatataaaccatggaataccacacagccat

SEQ ID NO: 291011 - DNA, 626 bp, Homo sapiens
gttgatgcatttccacatgcatttgatcaattattaccaacctttgaatagacacagtgaagggaggtatttttaaaaaatctttgttagataaatttggtctgtacacatatttcactaatgtagttcttaaattacrctgccttaataatatattatataaatgagaaattaaaataataacctcaaaaaagcatcttttgtaatgtttgaatctataggttaaagtaatactatgccaaaatttaaactaagcattttagatggccccaaggtaccagtgtaccaacaaaaattatcaggttggaagattctagatttgaccttgtgtaagtgtttaagagatatccttaaagaagactccagataaatcacaaggaatagaaagggtatttctgctcgcctcatttctaggctgatcttttgcacttttacagccacccacggtaacaatttgcagtcttatactccccttccttatgctgaaaacatgtttgcccccttcatatgtgttaatgtgcctgaaatctccaaattggatggaagtaaatgggctctttcaatatcacttttccccttgggataatagtttatcacagtcttgtggaaacttatgttaacagttt

SEQ ID NO: 291012 - DNA, 1055 bp, Homo sapiens
tttcttcctgtttcttcctttcttttctttagcactatttatatattagttctaaagttttttcaagtgctatgggcactagatcatggttaaaaggattatattttgtaatactgcttgaagtctgtgggatgcaacttctctgtaaagattttattattgctaaaggcaagaaacactttatttccaacatcaaaagtaagtaagatgttggtcattttagcagtccaggaatatataatggaatcaggattacctcargagatagaagttaagatatgtaaactatgaagagtttaaaattgtttttttttttttttgtagacagtgcataactttctctagtctaactttttaatcccttcaactccacagctgtgcatggactattagaagtaaaagtgaatagtccaggataaacaacagctgcactcctatattcttggatacagacccaagttttcatataagagggaataaaatacaagatttgagaaaacactggagatggtaataagtatattttcwtttcttcctgtttcttcctttcttttctttagcactatttatatattagttctaaagttttttcaagtgctatgggcactagatcatggttaaaaggattatattttgtaatactgcttgaagtctgtgggatgcaacttctctgtaaagattttattattgctaaaggcaagaaacactttatttccaacatcaaaagtaagtaagatgttggtcattttagcagtccaggaatatataatggaatcaggattacctcaggagatagaagttaagatwtgtaaactatgaagagtttaaaattgtttttttttttttttgtagacagtgcataactttctctagtctaactttttaatcccttcaactccacagctgtgcatggactattagaagtaaaagtgaatagtccaggataaacaacagctgcactcctatattcttggatacagacccaagttttcatataagagggaataaaatacaagatttgagaaaacactggagatggtaataagtatattttc

SEQ ID NO: 291013 - DNA, 583 bp, Homo sapiens
agcatgaggacaggttagtatatttcctcactgaactttcagttatttcatctagcaagcctcaaattcttttattttattttattttttttgagacagagtctcactttgtcacccaggctggagtgcaatggtgcgatctcagcccactgcaacctccaccaccctgggttcaagggattctcctgcctcagcatcctgagtagctgggattacaggcatgcatcaacttgctcagctaattttttgtacttttagtagagacggggtttcaccatgttggccaggctggtcttgaactcctgacctcaagcaacccacccacctctgcctcccaaaatgctgggattacaggtgcgagccaccrtgcctggccaagcctcatactcttaatgagatttttttccctgcttatccttttagctattcttctgacatgccatattagagagtatatgaaaaactacagttattttcatttactactttcaaaaatttcccttttctagcccagtctgtagcaccgtatttattgggactctgccacccagggtgcaacatttcagagtttcaatttgtgtca

SEQ ID NO: 291014 - DNA, 583 bp, Homo sapiens
agcatgaggacaggttagtatatttcctcactgaactttcagttatttcatctagcaagcctcaaattcttttattttattttattttttttgagacagagtctcactttgtcacccaggctggagtgcaatggtgcgatctcagcccactgcaacctccaccaccctgggttcaagggattctcctgcctcagcatcctgagtagctgggattacaggcatgcatcaacttgctcagctaattttttgtacttttagtagagacggggtttcaccatgttggccaggctggtcttgaactcctgacctcaagcaacccacccacctctgcctcccaaaatgctgggattacaggtgcgagccaccatgcctggccaagcctcrtactcttaatgagatttttttccctgcttatccttttagctattcttctgacatgccatattagagagtatatgaaaaactacagttattttcatttactactttcaaaaatttcccttttctagcccagtctgtagcaccgtatttattgggactctgccacccagggtgcaacatttcagagtttcaatttgtgtca

SEQ ID NO: 291015 - DNA, 583 bp, Homo sapiens
agcatgaggacaggttagtatatttcctcactgaactttcagttatttcatctagcaagcctcaaattcttttattttattttattttttttgagacagagtctcactttgtcacccaggctggagtgcaatggtgcgatctcagcccactgcaacctccaccaccctgggttcaagggattctcctgcctcagcatcctgagtagctgggattacaggcatgcatcaacttgctcagctaattttttgtacttttagtagagacggggtttcaccatgttggccaggctggtcttgaactcctgacctcaagcaacccacccacctctgcctcccaaaatgctgggattacaggtgcgagccaccatgcctggccaagcctcatactcttaatgagatttttttccctgcttatccttytagctattcttctgacatgccatattagagagtatatgaaaaactacagttattttcatttactactttcaaaaatttcccttttctagcccagtctgtagcaccgtatttattgggactctgccacccagggtgcaacatttcagagtttcaatttgtgtca

SEQ ID NO: 291016 - DNA, 549 bp, Homo sapiens
tagagcaccgtactgtactccaagacagcatcgttgccctgctgaaatggagaaaggcatgtaatgatctgatggcttctctaagcctaaaatgggaaagtccagttcaactcccttttaaatgcatttcctgaaatgtcctcaagctcagctgagacctrctaagttcaacagtttttgtctctctttccatagaaaaaaaactgtaaccaacatgacctgtaaaatttattgataattggtctttctatgctattaaacagccaaagacctgattcttttaaaggacacagacagagaagcagaatctcagatcattcataatatggcaaaattttggctgtgcacttaaataagaaatgcttattgtttgtataaaaataatgttctttaatctggaatcattcacaatatctaaaaaattatgtgatagacacagtgcatatcatcatggactgaactcataaaataaatacgaaggattgacttacaataaaaatctttctcaaattattgagaaaatatttctccttagccaacaaaatttct

SEQ ID NO: 291017 - DNA, 634 bp, Homo sapiens
cactgtgaaagcattgcactatcttcttccatagcatttcccttttggggggccccagggtttgctgtaaaaattagatgtttatcttgcagatctgttttgccttccagctatacctgataattaggccgtagaaactgtgggctttcctgacccttttcccgaaaagactccatcctaaagccaataacctagtcaagaaacttacatctttaaggaaatctccatgtgtaagactgtctggttttcctggccatcttgactgaaattttacccataccatttttccttggtgtaaataaaatatgaattttctattttgcttcacttcagaattatccttttaaagacgcaaatttggaactgcatgcctgacaattgttagggcctggaacaggtaatcaagagactgatggtctaacataagaaagagaaacttaaaaacagtcaaataacaaatcttatsactctaccaaatctgcatcggtttgtgtacttgaatgtgtcatgtgtgtgatgtttcactatcaaaatatatgaaaaagctctaattaattggcttaaaaataataagggcttaaataaaatattttgtcaggaaaataaaaacctaaatgcctttttgttcatgtca

SEQ ID NO: 291018 - DNA, 599 bp, Homo sapiens
aaatttgtctttctctttttaacaatattttcatataatattaaaagataatgaaagatttttgtttgccttttgaataaatcacaagaaaaagaggggagagagaagagagatgagacaaattcagttggcctcctgctgtctttactgggtcttgttgggaaagctgtctgtcctttatctatgagtaaaggtttttgctttaaaaacctttgaaaagttttaaagtatcattttggctaataatttaacttacattgactttggattctgtattgtgatatcaagtattttaaacctttgatatatgacaaatttccaaaattaaattctaaattcagtccttttttgacctcattcgtcatttaagtattaggttccctgaagtccagaagagacatatttggtttatttggaatattaaaaccatataggatacatcatcaaatataaaatgatgtttaactttctttgggttatatcatataaatgtgttgttagtatttgttccaaaatagtataagattcctatatgttaggaatatgttagtaataattatgattgttaygttaaatttttgtgtgtcacagagatgacc

SEQ ID NO: 291019 - DNA, 583 bp, Homo sapiens
actcattagctgttttcacagtgctttatacaatgcctagaatagagaagcactcattaaatgtttttgaaatatgtcaatgaataaatggaaacagtattaggttagctatgatgcaagagaaaaaaataagtataaacaatggcccttattctaactaatgaaggttacagtctaagggagaaaagaatacagtagttcatacattcaaggctatacttggtaagtaacaagtcacaggcctccatgttcatattccagaaaaggaacaatccttactattagtaaaaaaaagctacctaacactgtgttaaatttatgtgtatatatatttacacatatgtgtgtgtgtgtgtatctacacacacagagagacagagagattcagtaatctcacaaatttcacataaggtaaacaaagataaaaagaacaacaaaccaacacttccttrcctcatgggtgtgctggcagctttgattagttaatatttataaagcactttgaaaatgaaaagtgctaaacattatctaacagctcggtaaatgcaaatttgtcaggtcttatgaaatttaacagaaatta

SEQ ID NO: 291020 - DNA, 636 bp, Homo sapiens
cagctagcttaccataattgatacagattggtaacattctagtaagtgttattagacatgaagttaaatgacattattctggtagaggaaataayatgcctaaaagaataaaactagaaaaacatgactcttattcatgatggtctagcagtccaattgggctgaagtataagttgtaaataggaaaaaagtaaaaagattgaaagtgaaggattaggttgattgaaaagaacacttggctataccaatgcatatatgttttttccattcaaattcccgtttttctgttgcagtcataaatttatctttccatttgcccctttgtccctggaatgcttataaccaaagcagatgtctcagttctagctttgactggttttgactgttttcctttgtattgctgtatcctgtctttctttttctagtctacatataatgctgagtccgacaaaccataatctagagaaatacttgtacataatgtttgcgtgaatatctaaaaggctcctggggtagaataggaaagtgattataggtatagaatcagaatctatttttgttttcttcttttattttcccattctcacttagaggtaagggttaagtttgagctgtatgcatttttttttctactac

SEQ ID NO: 291021 - DNA, 636 bp, Homo sapiens
cagctagcttaccataattgatacagattggtaacattctagtaagtgttattagacatgaagttaaatgacattattctggtagaggaaataatatgcctaaaagaataaaactagaaaaacatgactcttattcatgatggtctagcagtccaattgggctgaagtataagttgtaaataggaaaaaagtaaaaagattgaaagtgaaggattaggttgattgaaaagaacacttggctataccaatgcatatatgttttttccattcaaattcccrtttttctgttgcagtcataaatttatctttccatttgcccctttgtccctggaatgcttataaccaaagcagatgtctcagttctagctttgactggttttgactgttttcctttgtattgctgtatcctgtctttctttttctagtctacatataatgctgagtccgacaaaccataatctagagaaatacttgtacataatgtttgcgtgaatatctaaaaggctcctggggtagaataggaaagtgattataggtatagaatcagaatctatttttgttttcttcttttattttcccattctcacttagaggtaagggttaagtttgagctgtatgcatttttttttctactac

SEQ ID NO: 291022 - DNA, 636 bp, Homo sapiens
cagctagcttaccataattgatacagattggtaacattctagtaagtgttattagacatgaagttaaatgacattattctggtagaggaaataatatgcctaaaagaataaaactagaaaaacatgactcttattcatgatggtctagcagtccaattgggctgaagtataagttgtaaataggaaaaaagtaaaaagattgaaagtgaaggattaggttgattgaaaagaacacttggctataccaatgcatatatgttttttccattcaaattcccgtttttctgttgcagtcataaatttatctttccatttgcccctttgtccctggaatgcttataaccaaagcagatgtctcagttctagctttgactggttttgactgttttcctttgtattgctgtatcctgtctttctttttctagtctacatataatgctgagtccgacaaaccataatctagagaaatacttgtacataatgtttgcrtgaatatctaaaaggctcctggggtagaataggaaagtgattataggtatagaatcagaatctatttttgttttcttcttttattttcccattctcacttagaggtaagggttaagtttgagctgtatgcatttttttttctactac

SEQ ID NO: 291023 - DNA, 511 bp, Homo sapiens
attataggtatagaatcagaatctatttttgttttcttcttttattttcccattctcacttagaggtaagggttaagtttgagctgtatgcatttttttttctactacccagtgggatttttaaaagtctttttctcatttatatggaggatcrtatacatttcagtagtatttgcatggaatgtttctacatgatggcaattataaattattcctttctgtttttcttcagcagaatataaatatcaacagcaaaaacactacttaaaattaatattagctcacttaacccaaattacaatcttacaaggtagatactattgtttgcctcattttattggtaaactgacactttgagggaaagttaacttgctctaggtttccgagctgataaacagtagagtcataatttgaactcaagcagactacagagccccagctcagctcataaacacaaccctatgatagaaaccagctacatacacaacaattgtctcagtgcatttgtgct

SEQ ID NO: 291024 - DNA, 537 bp, Homo sapiens
tttgaggttgtagtgaattatccaattagacgttattccactgattcttcttattgactacagccacatggatatttgatttccatatttgcttcacaaatcaactgcaaagttatgaaacaatatgtttaatgactattccactctaagaacactaacataaaaatattttctttgctctgtaccccaaccccaatttctaaagccttaaactttgaaacatacttattcttctgtatcaaccctgtactgattcagccctcaagcactttrgaatgtttattctccattttgtcacattacctctgccttatttttgcaatatccttttggccagtcttccactgttttcttcatattccaatcctaatataaatcaacatgtgccaaattgtctctcccaaaacatcattaaaaatatttctggccagggatgatggctcatgctggtaatcccagagacttgggaagccaaggcaggaggatcatttgaggccaagagttcaagactgcattgagtcatgagcccgccactga

SEQ ID NO: 291025 - DNA, 537 bp, Homo sapiens
tttgaggttgtagtgaattatccaattagacgttattccactgattcttcttattgactacagccacatggatatttgatttccatatttgcttcacaaatcaactgcaaagttatgaaacaatatgtttaatgactattccactctaagaacactaacataaaaatattttctttgctctgtaccccaaccccaatttctaaagccttaaactttgaaacatacttattcttctgtatcaaccctgtactgattcagccctcaagcactttggaatgtttattctccattttgtcacattacctctgccttatttttgcaatatccttttggccagtcttccactgttttcttcatattccaatcctaatataaatcaacatgtgccaaattgtctctcccaaaacatcattaaaaatatttctggccagggatgatggctcatgctggtaatcccagagacttgggaagccaaggcaggargatcatttgaggccaagagttcaagactgcattgagtcatgagcccgccactga

SEQ ID NO: 291026 - DNA, 1216 bp, Homo sapiens
aagcatgacattctcattctcttatgttacattttagctacaattataaaatttatacttaggtcttctttgcatttagaaaaatatccaatgcaatctagcctaaagaatggaagaattaaaattttcatttgggctattatttcaatttgttaaaacaacattgattaaacactgtttttaatattattttaatgcataaaaacaaaaataaagaataagactatataagttgacattgagaaaataaatataactkctagttattgcctgattatatttcatttataaaaacagaggttaagttaatatacatttgaggaacacagttgctattgaccatggcatgtagtctctgcaggatctggggactaatcaaaggaagaattgccatcaggtaaatagtgaagacattccagttggaagtagatgttagtgagcatgatactttatttacactactaccacagcccctggaatggtagtctgaccaagaatatggtgctcaaagtatccttataataaattttgctgaataaatatttctcaatttacaaatggactaaacacactgtaaggtaaatggatgtgctttggtcaagaataggtggaggcagacatccaggcctgcatgactcagcawctggccaactgctgctcatcaatctgacatcagctgaggcttgatttcctcccaaaaatatttctcaaattttcctatggggwcttggtaccagtgtatgttctcccataacaacctgtgccactccgttttaacactgttttggaaatgccagcctgtgtctttcatataaggaattaaattgcaaaacatatcaaaacaatacatgttgcctgatatattcaccactgtattcctagtacccaggagaatgcctgggcattcacagtgttctctgaatatttatagaagaaagggacaaaagagtgagagaggaatgtaatacattatttacacgatgtctttctttttctttcacccacataatacacaaatgggcagtcatatacacattcataaaattatcatatacaaattttgtacacaaaatattgaaagcaaatactgtaaaatgtgagtgacttttgtggatattgagattgtaggcagtttttatttttttcttttagtgtctctataccatgtaagacaaaaaaaatcagaaaatctataaccagaaaagttattcaaatt

SEQ ID NO: 291027 - DNA, 573 bp, Homo sapiens
ctggccaactgctgctcatcaatctgacatcagctgaggcttgatttcctcccaaaaatatttctcaaattttcctatggggacttggtaccagtgtatgttctcccataacaacctgtgccrctccgttttaacactgttttggaaatgccagcctgtgtctttcatataaggaattaaattgcaaaacatatcaaaacaatacatgttgcctgatatattcaccactgtattcctagtacccaggagaatgcctgggcattcacagtgttctctgaatatttatagaagaaagggacaaaagagtgagagaggaatgtaatacattatttacacgatgtctttctttttctttcacccacataatacacaaatgggcagtcatatacacattcataaaattatcatatacaaattttgtacacaaaatattgaaagcaaatactgtaaaatgtgagtgacttttgtggatattgagattgtaggcagtttttatttttttcttttagtgtctctataccatgtaagacaaaaaaaatcagaaaatctataaccagaaaagttattcaaatt

SEQ ID NO: 291028 - DNA, 573 bp, Homo sapiens
ctggccaactgctgctcatcaatctgacatcagctgaggcttgatttcctcccaaaaatatttctcaaattttcctatggggacttggtaccagtgtatgttctcccataacaacctgtgccactccgttttaacactgttttggaaatgccagcctgtgtctttcatataaggaattaaattgcaaaacatatcaaaacaatacatgttgcctgatatattcaccactgtattcctagtacccaggagaatgcctgggcattcacagtgttctctgaatatttatagaagaaagggacaaaagagtgagagaggaatgtaatacattatttacaygatgtctttctttttctttcacccacataatacacaaatgggcagtcatatacacattcataaaattatcatatacaaattttgtacacaaaatattgaaagcaaatactgtaaaatgtgagtgacttttgtggatattgagattgtaggcagtttttatttttttcttttagtgtctctataccatgtaagacaaaaaaaatcagaaaatctataaccagaaaagttattcaaatt

SEQ ID NO: 291029 - DNA, 592 bp, Homo sapiens
aatctagcctaaagaatggaagaattaaaattttcatttgggctattatttcaatttgttaaaacaacattgattaaacactgtttttaatattattttaatgcataaaaacaaaaataaagaataagactatataagttgacattgagaaaataaatataacttctagttattgcctgattatatttcatttataaaaacagaggttaagttaatatacatttgaggaacacagttgctattgaccatggcatgtagtctctgcaggatctggggactaatcaaaggaagaattgccatcaggtaaatagtgaagacattccagttggaagtagatgttagtgagcatgatactttatttacactactaccacagcccctggaatggtagtctgaccaagaatatggtgctcaaagtatccttataataaattttgctgaataaatatttctcaatttacaaatggactaaacacactgtaaggtaaatggatgtgctttggtcargaataggtggaggcagacatccaggcctgcatgactcagcaagttaggagtgcaggtgcacaactcctcttgttatataacttgt

SEQ ID NO: 291030 - DNA, 583 bp, Homo sapiens
cagtattgctttgtcttctagatgaattgaaacctttatgattatcttttttatccctagcaatattgctatttcttactttgcctgatattaaaatagttccatacctctctgtcacatctctttttaatatctttttgttttttaactggcatgttgtacatattaatagagtaaaattacaatgtttcaagatataaatatatattcaatatataaataatcaagtcaaagtactccatcacctcatccatttatcatttctttgtggtgagagcattcaaaagcctctcttctagtcattttgtaatatacaatattctactgttaactatagtcaaccaacagtgcaatagaacacagaacttattccctttatctaacagtaactttgaccaaccttttcccatcctaccccctttccaccctgctccccagttgctggtaatcactattctactytctgcttctataatatcaactttattatttatttattttttagattcctcatatgaatgagattgtgtggtattcatctatctgtgtttggcttattttgcttattatgatgtcctccaag

SEQ ID NO: 291031 - DNA, 487 bp, Homo sapiens
gagagggcagaagctgttaagtatcctttcactctcccacaatacctgccaggtccttgcagttaaaatgctgttaatttctctgaatacacttttcccatctgttaagtctctactcattttaaaaagaatkatataggatgcagtgttttttgtttctctctcttcctctctcatattttctttaatggaaatccaattaggtagaaatcaatttattcacaataaaaatggaatgtctaaaaaaggagtaataaaaacatatagaattgatttattgtgctcagtttgaagaaaaaaatccctcagactggttgaatttaacaaagttaatttaagcaagaaaagtttcaagaactgggcaccacctaagacccacgatgattcagaaatgccccccacctcctatgtgttaagctatatttataaccagaaaacagaaaatgagagacagcgattacctgattggtacagtcaggcatttgcc

SEQ ID NO: 291032 - DNA, 371 bp, Homo sapiens
atgtgatacattaaaataattataaaaaagtcaaaagataacagatgttgatgagagtgtggagaaaagggagctattttatgctgttggtaagaatgtagactggtacagtcatcatgaaaacaatgtggaggtttctaaataaattaaaaataaaactaccatatgacccagcaatctttcttctgtacatatacccagtggaaataaaatcaccacatcataaagatacctgcacttccayggtcactgcagcattattcacaattgtcaagatgtggaaaaaatctaagtgtcaatgaatgaatagataaaggaaaatggtacatatatataatggaacattactcatccctaaaaagaatgagata

SEQ ID NO: 291033 - DNA, 1901 bp, Homo sapiens
gttacagtgagcagtgattgtgccactgcactccagcctgggcgacagagcaagattttgtctcaaaaaaaaaaattaattaattaattagttaattaaaaatgagtaattgtgaaacaatggataggtgaatttgcttcaatgcagtaacctctttacaatatttatgtatcccataaaatgatatatcttaaacaaaactttttaaagaaacctctgttttattcagaaggcagtttatccattggagcattttaagcagtagggtcgtaatcataatcaaacttatggttttaataagttctgacctgggaaattcattagaatagttgagacaacagacaggaaagtaagtcaagaagactttgctttgataacctctttacctaattaggttctctcttcatactaatctatttgctgtctcctaatcatagccttgcctcttaacagcctgcctggaattttgartaaatccaattaaaatattcattaaaggcataatatgtacataccactatgaaaaactacagaagtgaaagataaatatggacattttctcctctcaagaagtttttagttaaatggaagtattcaggactcaaatatwcaacattaatgtcaaagtagctgtaatacattgaaacagaaaaataatagaagatgaggtcagttatgcagcagacaaaccatataaggctctattagttacacaaaataatctagatttttctacttccaatgtggagcccattgaaaggatacagtcagtgtgagatatcatcaattttttaaacccttattccaagatagttcattcagagagtwtgtggaggctgggcatggtggctcatgcctattaatctcaacattttgagaggccaaagcaggtagattgcttagcccaggagttaaagaccaacctgggcaacatagcaaagccccatctctacaaaaaaatacaaaaattaaaaatttttgtattttaaactttagtattttaaaaaaatacaaaaacagacttcaggtggtgcacacctgaagtcttagctacttgggaggctgaagtaggaggattgctggagccccaaagaggttgcagtgagctgtgatcacaccacagcactctagccagggtgacagagtgagaccctgtctcaaagaaacaacaaaaaaagaaagtatgtgaaaactgaattatgatgttaggtatagaagcagtgacactaataatgagcttgtacacaataaaaatwcaacattaatgtcaaagtagctgtaatacattgaaacagaaaaataatagaagatgaggtcagttatgcagcagacaaaccatataaggctctattagttacacaaaataatctagatttttctacttccaatgtggagcccattgaaaggatacagtcagtgtgagatatcatcaattttttaaacccttattccaagatagttcattcagagagtttgtggaggctgggcatggtggctcatgcctattaatctcaacattttgagaggccaaagcaggtagattgcttagcccaggagttaaagaccaacctgggcaacatagcaaagccccatctctacaaaaaaatacaaaaattaaaaatttttgtattttaaactttwgtattttaaaaaaatacaaaaacagacttcaggtggtgcacacctgaagtcttagctacttgggaggctgaagtaggaggattgctggagccccaaagaggttgcagtgagctgtgatcacaccacagcactctagccagggtgacagagtgagaccctgtctcaaagaaacaacaaaaaaagaaagtatgtgaaaactgaattatgatgttaggtatagaagcagtgacactaataatgagcttgtacacaataaaaat

SEQ ID NO: 291034 - DNA, 645 bp, Homo sapiens
caacattaatgtcaaagtagctgtaatacattgaaacagaaaaataatagaagatgaggtcagttatgcagcagacaaaccatataaggctctattagttacacaaaataatctagatttttctacttccaatgtggagcccattgaaaggatacagtcagtgtgagatatcatcaattttttaaacccttattccaagatagttcattcagagagtttgtggaggctgggcatggtggctcatgcctattaatctcaacattttgagaggccaaagcaggtagattgcttagcccaggagttaaagaccaacctgggcaacatagcaaagccccatctctacaaaaaaatacaaaaattaaaaatttttgtattttaaactttagtattttaaaaaaatacaaaaayagacttcaggtggtgcacacctgaagtcttagctacttgggaggctgaagtaggaggattgctggagccccaaagaggttgcagtgagctgtgatcacaccacagcactctagccagggtgacagagtgagaccctgtctcaaagaaacaacaaaaaaagaaagtatgtgaaaactgaattatgatgttaggtatagaagcagtgacactaataatgagcttgtacacaataaaaat

SEQ ID NO: 291035 - DNA, 516 bp, Homo sapiens
tcaagtcttttctaccttaagtttatttctctggccagcagaagagttcccctgcaaaatgattatgatttctgtttgttttggtatttagtaagcaactgttcccaagataagattatgatttacaccagtacttcttaaaatgtgggtctgyggaatggtgttgctccacaaattatgtgctacaagtcagaaacaaagtcagttataaatttagaacaagcagtcatagcaatttggcagcgtaactttgttgaatctgagagtaaaaaaactaggatatatattttgtatttctccgttttattccatttttctggtaatttatttttaaagtattttacaaaaacattaatccagaatggattggaaagaggcaggggaaagtagccctttatatggatgactttaaaatcactggtttatcccttatactgatatctttagaatgattacagatttttcttctttgcacagtcatgcctatgaagcaggagctcattcttttggatgcca

SEQ ID NO: 291036 - DNA, 603 bp, Homo sapiens
tttcaaacggaattttaaacttcatatattcatccatcttttggatacatcatttacacaaggaagctgctattcttggagattagaatttcccctccactcctcaattttttggtattagaacaacagggtaaaaagaataaaaaaaaaaagccaaactttggtgcatatccatgctatttcctgagcacaaatcatcatagtaatgaaattattgagtgaatgcctatgaacattttaaacttttgctagtccttgagaggttgacctctatcagcaagctcgcatgtgatacttgtgacataccctcactaatattgtgtaatatatcatttaaaaatagacaatttttacttttctcattaaaaataattattagtaatattataataattacattttcactgtttcctaatcatttgtgtagatgagtgtgttttgtgaatggctattcttatcatttacatgtttttttaaacagagtacatgatttttcttattaacttgtcaaagctcttttttyaggagcaataaccatttaactatatatatatatatatttcacaattagttgcatacttttaagttttattataatttggt

SEQ ID NO: 291037 - DNA, 549 bp, Homo sapiens
acaatctataactggtatggtgggcagtctcaccagcaagtgacttttgtggtcccaaatgttattatttaaaggggtacaagtcagatactctttctgcaaattatcagccttactgactattgacgttttgttatgggttaaataggcatcatacctagtttccccgtattctcaactctcaacagagatagctactattgctattcctatttcttttcaracaaagaattcaaaagagattgaagtcatttacccatggttataaaacccagaagtgtcaaaactgaaatttaaacactgttttatttcaaacttaaattgctgatgcccaagctatatagtttcatggtttagtggtcccctcctgaaaaatgttttcattttctaaatttgaagaaatctcctttgaaaggcaaaacccttaagcttgctttgcccgacactttatccccttgacaagaatcagggatggcaggaagacaaagggagggtcagaaggaagaagtggctctggcagaagtagatgggaagccagcagggatgaac

SEQ ID NO: 291038 - DNA, 575 bp, Homo sapiens
taacaaattgactaatagataactgaaatacgtttctaaaatgcagaaaaggataagcaaatggaaggcaagcaatcaccttaaaaggttacrtgagtttatcacctgtgcattttttttaatccaaatttaaatctctaaaattgaagggccatggaactcagatatgctctggccacagttgaccctatgactttgagctttttactttatcttgattgctacagctgagaaaacgggaatagtaatgctgaactttatggctattacaaaggttaaataaaatatatgtcatctagcatctagttacctgaaatttattaggagattaaactttaaaacaaataaaaggggaaataagaaaagatggaaactctcagctttccatcctcatccacatctctggaatcttcaggactcctagaatcccaagaaggacttattctgacttatagatcctgaggccatgagactattctcttcaggacaacttagaccagtaaagctatgatgcctaattgcctataattttttttaacttttctgtaaaatttgtctatttcatggtggcaaaa

SEQ ID NO: 291039 - DNA, 1176 bp, Homo sapiens
caaacaagcatgttcatttccaaaaagtgttgaaaaaataattagtctgtttttaaaggaaagtttctagctgttctacagagattcaacttcttcattagtcttaacaaggccagattcaggtacatgccttgctggtactgccagcaatatggtccaatgaagagggttaaatctggaaacagactcactagcctggaaggggttagattatgaggaaaaattaatgtaggttaccctgggcagaacagtttttgctaccttgaaaacagtttgtaccaggtcatctatcttgtgaataagtcatgaaataaaaaattaagctgtagtctcctctaaaagcaggttggcttactggtcatcatcattttaggagaatgcccctaatgtgatacatagtacagttctaatcccaaagggagagaatggatggtgtatgataataccagtctttttgagatgagtggttagaattctggaacttcagcaaaatcaacctatgaacataaattaaaaatatatatattgaaagtaatgaagaccacmacacaagaacaggatgctctaaaaaaagaattcagagaacacagaaggagtttctaagaattaawtcccaatgacagaggaaacaagattagagatcacttctaagtgagataggaagggggcatctgtttgcccatgtgcatacattgtcataaataaacatggtagcaaggctaatgtatgcagcaggaggaaggcattagaaaattaatgaaatgaagtttggtgtttattctgttgtgaagaacaatcatttattatctactttcatggatcaaggtcacccacttctgtgcccwccattttcttaccagcccagatttcatttcctctcataggaactatacctcattgtctgcattaaaattccagtgaatgtctctgtcctaaaatttctcatccaagccattcttcacactgtcaccagaattatttttctatgactcagatttgaaaccaatctcctgcttggaaactatcaaagttagttaatagactaaacctaatatttcagaaggttattcagcttcctttagagacctcctgactctctttttatctttttttctaattacaaatccttgacttcctccaacaccatacctatattttcagggctcagaggggcaa

SEQ ID NO: 291040 - DNA, 467 bp, Homo sapiens
tgtgtggctttcttctcttccattaggacttccgggacccatggggcctccagggcttcctgggattgatggagttaaaggtgacaaaggaaatccaggctggccaggagcacccggtgtcccagggcccaagggagaccctggattccagggcatgcctgtgagttattgatttgtagatttttatttttaaaggagtcttttctggccagaagtattcatatgtgtctatgtgtgtatgtattttgtgtatgtatatatatgtgtgtgtgtgtgtgtgtgtgtgtgtgttacactcccayatccccactaaatcagttctttctttctttcttgccagtaacccacatctttattggcatcagagtaggaaactattgtaacatttttttacaatccagttttccaagaaccataaaagggaaatgttatactgctggaaattatggctcaatgcctaaatttaa

SEQ ID NO: 291041 - DNA, 490 bp, Homo sapiens
cctggtgccagtcagtgtctgtctgtctctgtatacatacttatgtataaatatgtgtttgtatatatgtttatatacatatatatttgttcatgttattttggtttgacacttttaaaataaggctaagaaacaaatctacgtaagaaataaaacaacttgttacatgttgctgtccacgacttgaraaaggaacgacttgttgaaatggaaagaaaatgagcccctattttaaaatacacgaatattgccacagtataaaggaaaatactcgttccttagcatttcttaattttctttgcatatttaaaatcagttttcagataagacatgaaactaattctaaagaaaactgattgcacttgaggattaaggggaaagttttcagaaaagctcgttggctggtgctggatggctatgttgccgtcacaggtgttgagggggccctggctctgtctatggcatcgtgctgtgagctggaggtggcaag

SEQ ID NO: 291042 - DNA, 490 bp, Homo sapiens
cctggtgccagtcagtgtctgtctgtctctgtatacatacttatgtataaatatgtgtttgtatatatgtttatatacatatatatttgttcatgttattttggtttgacacttttaaaataaggctaagaaacaaatctacgtaagaaataaaacaacttgttacatgttgctgtccacgacttgagaaaggaacgacttgttgaaatggaaagaaaatgakcccctattttaaaatacacgaatattgccacagtataaaggaaaatactcgttccttagcatttcttaattttctttgcatatttaaaatcagttttcagataagacatgaaactaattctaaagaaaactgattgcacttgaggattaaggggaaagttttcagaaaagctcgttggctggtgctggatggctatgttgccgtcacaggtgttgagggggccctggctctgtctatggcatcgtgctgtgagctggaggtggcaag

SEQ ID NO: 291043 - DNA, 551 bp, Homo sapiens
aagaactttggtatgcagtacatgtcagaactgtccactcatttgaagtgaaggaagatcaggcccataatgggtgattacttcacaagcagacatttcctcagtgtcagctatgttttcggtgatgtattctgaggaaaggggagcggtgactctgcagtattgagccaatgtgccttcatcctccctgtctcttcacatctgctgatgggaaaaccaaagtttgtggaatccccaatgccatctggttttcctcccctttttcttttctgaaaaatcacgttccaagttgaagcaatcatagctgggaaattttgttacattttcctcactgtctgtggttttttccattcgctaatcaatttgattctccatattttattcctaaaatcattttatctgggcatgtgaagtggacgctagtacttgaagtcactctatttaaatcttgcctgactttcttaactagctgttctgatttctgtcctcctctagagacaattgaccagatgccatttctttggscttcctattggataaggccgtgaacc

SEQ ID NO: 291044 - DNA, 608 bp, Homo sapiens
gtacctaccaaccaacgagtggatagagaaaaggtggaatccatgcaccatggaacactactcagccacaacaaggaacaaaatgatgtcttttgcagcaacttgaatggagctagaggccattattctaagtgaagtaacccrggaatgggaaaccaaataccgtatgttctcacgtataagtggcgtctaagctatgaggatgtaaaggcataagagtgatacaatggacttcgggactcaggtggggggaaggctggaaggaggtgagggatcaaaaactacgtaacaggtagagcgtacactgcttgggtgacaggtgcactaaaatctcagaaatcaccacgaaagaacttatacatgcaaccaaacaccacctgtaccaaaaaaaattgaaataaaaaaaaacaaaaaaataagtttttaaaagctgactgctgatcccttcaaacataaggctgcccatgcacaaaataactctgctcccatttcatcattactaagaggtggagaggaggaagagcaaggctggctctgaaaataccatgacttttccattaaatgaagtcatctctgtctaatgactgtggacacatcatcaattgccc

SEQ ID NO: 291045 - DNA, 608 bp, Homo sapiens
gtacctaccaaccaacgagtggatagagaaaaggtggaatccatgcaccatggaacactactcagccacaacaaggaacaaaatgatgtcttttgcagcaacttgaatggagctagaggccattattctaagtgaagtaacccaggaatgggaaaccaaataccgtatgttctcacgtataagtggcgtctaagctatgaggatgtaaaggcataagagtgatacaatggacttcgggactcaggtggggggaaggctggaaggaggtgagggatcaaaaactaygtaacaggtagagcgtacactgcttgggtgacaggtgcactaaaatctcagaaatcaccacgaaagaacttatacatgcaaccaaacaccacctgtaccaaaaaaaattgaaataaaaaaaaacaaaaaaataagtttttaaaagctgactgctgatcccttcaaacataaggctgcccatgcacaaaataactctgctcccatttcatcattactaagaggtggagaggaggaagagcaaggctggctctgaaaataccatgacttttccattaaatgaagtcatctctgtctaatgactgtggacacatcatcaattgccc

SEQ ID NO: 291046 - DNA, 439 bp, Homo sapiens
gtaggtcttgaaaaggacatgacytgtccatgaacctggacttgaattctggccctcattcctctcaattaagtgtcgccgtgagtggctgggccacttttgcacggagttactttcggtcagctgcctctgcctgcccttgctaagttctcaagagagcaaatgtcacagcagtctgtgccctgggaacagggaatgggcctcacactgtccctcccaccacatggcccctgtcttgtgctttaaaatatgacatctaaaaaatgcaaacctgccagtacacagtggagtctaatctcatgatgtcagaatgcttggcaggccttgagatatcgttgaagataaagccgaagggggcactatgggaagtgctcctgccatactgtggggagagactttttctaaaataacataggaactgtttgtcagggatggaaga

SEQ ID NO: 291047 - DNA, 604 bp, Homo sapiens
gatagtcttaagtatgtgatgtgttctttcaatgttttaagtattttcttaaaaaaattgttcttgaactatggttattaatgtttgctagctttttatttttattttcttcagaaaaccctattatttataggttggctcttttttgcttatctttaataattgtccatttccctcaaattcttatttatttcttcttgatttgtaaaattttctttcttttcatattttatgtctgtaggcattatttgttgtgattattttcttttgtgttcatttcattttagtctttccttctttaatttttaattcatgattttgtactttattttgaatattctaattctgatttatgttctttatgctttctttcatgtttacattatcctagctaattctctttttttttttcttttacaactttgactcacctcccctctgtgagcatgtgtttatgacattgttttattgtcttcagggatattattctgttcaattttctgtctytcttgtcttcatagaaactttgtgaaaaatttgactgcaagatttttctgatgttcatcttattaacagattttagtttttctaaaatttgacaagt

SEQ ID NO: 291048 - DNA, 524 bp, Homo sapiens
tcagtccattctattacaaatactgtgtcccatcttgtcatttttcttgttattatgcatatggagtattttgttttcatgattagaaaagaattttgcctttctccagatataaaagaattcagccattacatcatgttttctcattttgcttgtatggtttaatacttttatctttaaatacctaatccatttggaatttatcctagtgtgtaatgtgaaaaatggatccaacttgatgtatttaatatatatattcacttatctcaaaaccacttattacaaaatctataattttatctatcaagtcagagattgcccttattgcgtacttgatttccatatgtgattgggtctaatttttggacttttctttttgtcygattgttatgtctgtctagtcttctaccaacactacacagtttttaacatatgggctgtagcacattttaatttatggtagaattcttccctgtcattacccttccttgccacgttttcttgattgttcctctgtgtgtgca

SEQ ID NO: 291049 - DNA, 493 bp, Homo sapiens
ggtatagtggctcatgcctgtaatcccagcactttcagaggccgattacttgaggtcagaagttcgagaccaggctggccaacatagtgaagccccatctctrctaaaaatacaaaaattagccaggtgtggtggcacgtgctggtagtcccagctacttgggaggctgaggcaggagaattgctcgagcccaggaggcggaggttgcagtgagccaagatcacaccactgcactccagcctgggtcacagagggagactctgtctcaaaaaagaaacaaacaagaaaacaattctatttacaatagcataaagaataaaatacttagaaataagtttaacaaacaaagcgccaacttatgcgctgaaaactataaaataatcactgaaattaatttacaaagacctaaataaatggaaatgcatccacattaatgtatcagggacttaatattgttaggatggcaaaactccccaaattgatctatagattc

SEQ ID NO: 291050 - DNA, 493 bp, Homo sapiens
ggtatagtggctcatgcctgtaatcccagcactttcagaggccgattacttgaggtcagaagttcgagaccaggctggccaacatagtgaagccccatctctgctaaaaatacaaaaattagccaggtgtggtggcacgtgctggtagtcccagctacttgggaggctgaggcaggagaattgctcgagcccaggaggcggaggttgcagtgagccaagatcacaccactgcactccagcctgggtcacagagggagactctgtctcaaaaaagaaacaaacaagaaaacaattctatttacaatagcataaagaataaaatacttagaaataagtttaacaaacaaagcgccaacttatgcgctgaraactataaaataatcactgaaattaatttacaaagacctaaataaatggaaatgcatccacattaatgtatcagggacttaatattgttaggatggcaaaactccccaaattgatctatagattc

SEQ ID NO: 291051 - DNA, 454 bp, Homo sapiens
atgttagttattgctaaattgtaagtacgtggccttggatcctggggtgcatggagaagcagatactcctcttctaaaaaaatgatgttagggtgcagaaagccaattggttaggaaacagggcaccaagataaagttctccctaacctgacatttagartttacccaacatcatagctacttcacaaccattaaccccaatcaaagttgtcaactgactggccctgctgatgcacagagagccctattagctttcctatgcaagtgtttagtatagaaatgaacaatcaagggtcaccagatgttttaggaaatttgcataatgaaagagaatgatcaagacagagcaaagtaacactagaggaagcagacacattgaagatcaaaagaaactaaattaaaacaaataaagcaattctaattagtctcttcaggatgattgaagaatatatca

SEQ ID NO: 291052 - DNA, 616 bp, Homo sapiens
aatcctgcatgggtgtaagtttccgcctaacactttaataacaaaaatatctctttttaactggtgttagcttatttttccctctggcctttctttttctatttcttactgaaagcaaataacctattatcaactcctgataatatgtggtggttttaacttcagctcctgaagctgagtcttgggaactgatgaataagacatttttcttcacgttctattgtgaaaacattcctggtatttctcttatttcctgtgccttagagaactcagtagggtgctgaatttcagtagagatacaaatgtacttgcaarcttggcattgatttatcatgatctttcctgtaagggaaaaatagagattgtttttgctgtacagacttccctagaagagtttgacttctaacacctctgatgggtagtctaattggatttagaagatggtatgaatctcttttggcaacaatgaaaggcacacagaggcctaagggcagccatcatttatttatttataacacattttatttcaaaaaaatgttaagccaatccctgctcctgagtctacatcaatacttttgacacgtaaaaaaacaatataaatcacaaatttaataca

SEQ ID NO: 291053 - DNA, 616 bp, Homo sapiens
aatcctgcatgggtgtaagtttccgcctaacactttaataacaaaaatatctctttttaactggtgttagcttatttttccctctggcctttctttttctatttcttactgaaagcaaataacctattatcaactcctgataatatgtggtggttttaacttcagctcctgaagctgagtcttgggaactgatgaataagacatttttcttcacgttctattgtgaaaacattcctggtatttctcttatttcctgtgccttagagaactcagtagggtgctgaatttcagtagagatacaaatgtacttgcaagcttggcattgatttatcatgatctttcctgyaagggaaaaatagagattgtttttgctgtacagacttccctagaagagtttgacttctaacacctctgatgggtagtctaattggatttagaagatggtatgaatctcttttggcaacaatgaaaggcacacagaggcctaagggcagccatcatttatttatttataacacattttatttcaaaaaaatgttaagccaatccctgctcctgagtctacatcaatacttttgacacgtaaaaaaacaatataaatcacaaatttaataca

SEQ ID NO: 291054 - DNA, 662 bp, Homo sapiens
acccgttttcaaaaaaatatgagttggtgctttatcatcctgatggagtgtacaatgcattttattaagtattattatggtatttaaattctggaaactacctatatcagcacaaacacacatttgtttttacycacaatacctagacgctagccttcaataaaatttaacaaataccactatcaccaaaaatatgattactgaaaagcctttatttttttttccagttctcatatgtcctcaggaaatatcacactagaaatacagtcaaattacaaaatttttaaatcccttgattggtttctctctgcagtttggcactgactggatacaaaaataggtttattttattttactttatatttttaaacttttaaaataaataaattgtgcttttaagtcacataaaatttttgaataattttgaaagttgaaccaacaaaaagcaagcatattcagagaatcctgattttattcatattcactttaacctctttcctccttcttaagaagtgattttggtttatcaattttttcaaaatacaaacaaatatgagtatacgggtgtgtgtatgtgtgtgtgtgaatgtgggttaagtgggtaagtgttagcaaactatacttttcttccctttgcttttccattcaataatatattcaga

SEQ ID NO: 291055 - DNA, 662 bp, Homo sapiens
acccgttttcaaaaaaatatgagttggtgctttatcatcctgatggagtgtacaatgcattttattaagtattattatggtatttaaattctggaaactacctatatcagcacaaacacacatttgtttttacccacaatacctagacgctagccttcaataaaatttaacaaataccactatcaccaaaaatatgattactgaaaagcctttatttttttttccagttctcatatgtcctcaggaaatatcacactagaaatayagtcaaattacaaaatttttaaatcccttgattggtttctctctgcagtttggcactgactggatacaaaaataggtttattttattttactttatatttttaaacttttaaaataaataaattgtgcttttaagtcacataaaatttttgaataattttgaaagttgaaccaacaaaaagcaagcatattcagagaatcctgattttattcatattcactttaacctctttcctccttcttaagaagtgattttggtttatcaattttttcaaaatacaaacaaatatgagtatacgggtgtgtgtatgtgtgtgtgtgaatgtgggttaagtgggtaagtgttagcaaactatacttttcttccctttgcttttccattcaataatatattcaga

SEQ ID NO: 291056 - DNA, 548 bp, Homo sapiens
attattaaatttataattccagctgtatgacactctaaaaaagtcaaaactttggagataatagaaaagaccattggttggcaggtgttaaaagagtgggagggatgaataggcagagcacagagagcttttaggccagtgaaaatattctgtatgatattgcaatggtggctacatgaactatgttagcagtggaaattatcagagtcatatggcatcaaaatatgttaccagcagcaaatccgtatgggtctgcagcaacctcaattcttgcctcttcagaagaaagaatttgaggggattaaggcacaggagagcactgaggcaagttttagagcaggaacagaaggaaggaaggaaagcacttggaagagggccaagtaggtgacttgaaagacaagcatatggtttgaccttttgacttggagttttatgtgttggcataattccggggtcttrcatcccttctcccctcattcttccctggaatgggctgtctgtaagcatagtgccctgccagcactttggaggggctgcatgcagtatgt

SEQ ID NO: 291057 - DNA, 620 bp, Homo sapiens
ggaaaggaaaagagcatagagagagaccttctttaataacacatgtattcagagactgctgaaactgagagtggaggaggaatgcttacatacaatcttctgacccccaagacctcccattaagaagttgttcactgcaagaggaatttgaaaactgtggtgatctgaaagtaaggatagtagcaataaaacctaaatttatctcaactactggcttaattgactcaacccccaaaactcattagctggttaggccagagagaagatgtgttcatcttcagaaaaaaaacrtatttaccttagtttttagttttcttctgctcatgatgttaagcaatccatcaggattgtgacacacatataaaaggaaaaaaggagtaacacaaggtgaggcaataaataatatcagactcacaggtgacttagatggtagaactgatataaactttagaattgctttgaatactatgtgaaatcatatcatctagtgggaaaattggatgacatatttacacaaatagggaatatcagaaaagaaatgaaagctaaaagaaatagtaaagtgggagttttagaataattttgatattgaacacaacgaaaattttaacagacttagc

SEQ ID NO: 291058 - DNA, 531 bp, Homo sapiens
ctctcattactcaatatttactgagcatctattatgtgtcaggcattgtactagatacaacgtgacaagcaagacatgttttccattttatgtgaggcctttaagaccccctgtggaaacaataccattaggtattcagtgtcactctgcacagcaagaagcaagggagaaaatagtcccttactatacacatttaattctgagaatctgagctgtggcatgatttgggcccatttctgtgagtaggtgggatgcaactattcaaagaagaattttaacttcacaaaaatatttctattctactctctrcttgataatttaaaaaaaacagggtgcaatcaaaaaggagcccatgttttaaaataaaatgtataactccattaatatatgtgtgcatgtgtatgtgtgtgtatgtgtgtatatgtgtatatctatgtatatatgtgtatgtatacattagtccacataaacacatatataaatatatgtagggagtgattaatgctttacataatggaagaaattaaaata

SEQ ID NO: 291059 - DNA, 531 bp, Homo sapiens
ctctcattactcaatatttactgagcatctattatgtgtcaggcattgtactagatacaacgtgacaagcaagacatgttttccattttatgtgaggcctttaagaccccctgtggaaacaataccattaggtattcagtgtcactctgcacagcaagaagcaagggagaaaatagtcccttactatacacatttaattctgagaatctgagctgtggcatgatttgggcccatttctgtgagtaggtgggatgcaactattcaaagaagaattttaacttcacaaaaatatttctattctactctctacttgataatttaaaaaaaacagggtgcaatcaaaaaggagcccatgttttaaaataaaatgtataactccattaatatatgtgtgcatgtgtatgtgtgtgtatgtgtgtatatgtgtatatctatgtatatrtgtgtatgtatacattagtccacataaacacatatataaatatatgtagggagtgattaatgctttacataatggaagaaattaaaata

SEQ ID NO: 291060 - DNA, 620 bp, Homo sapiens
ggaaaggaaaagagcatagagagagaccttctttaataacacatgtattcagagactgctgaaactgagagtggaggaggaatgcttacatacaatcttctgacccccaagacctcccattaagaagttgttcactgcaagaggaatttgaaaactgtggtgatctgaaagtaaggatagtagcaataaaacctaaatttatctcaactactggcttaattgactcaacccccaaaactcattagctggttaggccagagagaagatgtgttcatcttcagaaaaaaaacatatttaccttagtttttagttttcttctgctcatgatgttaagcaatccatcaggattgtgacacacatataaaaggaaaaaaggagtaacacaagrtgaggcaataaataatatcagactcacaggtgacttagatggtagaactgatataaactttagaattgctttgaatactatgtgaaatcatatcatctagtgggaaaattggatgacatatttacacaaatagggaatatcagaaaagaaatgaaagctaaaagaaatagtaaagtgggagttttagaataattttgatattgaacacaacgaaaattttaacagacttagc

SEQ ID NO: 291061 - DNA, 589 bp, Homo sapiens
gttaatcgaactagtgcttctaagaaaaacaaaacaaaacaaaaaagccatactaaaagatgtggtgattcaggtaggacaaaagcaatataattaatgacatttttcagtctaggaagcttctttcacaggtgtggtcaccttcagaaagattgctctctggatgtgtccagacactgagctatacacccaccaaacagtggctgggcctgatggcttgtcatatagaacaggatgacaatttctttttaaatctactgttttccccagcttgtcacagattcatatgaagcatctgttctttagaaaacagtgtggcctaatcccaggtacttacaatctttttagaaatttagatgtttctgttcatccttctcaactacttttccaggtattttctaccatttcctgttytatattaatgagtcccacctccacggctattgtttaattaagaaactcccattttttcagcctttagggactgcacaattccaatatcgattcttcagctgtaatagttgcaacaaaataacaagtcaatcccttaaaaactctgggatgcaagccatcaggctccacgatttgg

SEQ ID NO: 291062 - DNA, 544 bp, Homo sapiens
ggattgaagtagatacttacaaggtaatggggtggtcttggtcaccaaagagatggaaattcaaataaaggatgtgacactgcrggtgttagcaagtgctaagtaaaaggacgcctctctttctttgtgcttgttgacctctttactcccaatgctcagtctctggggctaaatgcatttccatttcttgtgatctcttttgggctttctcatgagaaatctcccttctatcccttcctttactctccatgcatctccaagcagagtatcagtctggatccttaaaaggactgagttatattgggtcaatcataaaaatttaggttctataagcactggataattctcttaaaacttgaatttagcaaattttcaaaagagcatcgcataccatatgagaaggttttatatgaataagttacaaaatgataaactaaaatgagatagtattagacacatcttatattctgagtttatagacatcttacattctgagtttctcagttatttataaaagcattgcaaatcaactagttaatgcctt

SEQ ID NO: 291063 - DNA, 536 bp, Homo sapiens
ttttttcaaataggaccataaaagaccctaaatagctaaatcaatcttaagtcagaagaataaagtttgagatattactgatttcaaattatattacaaagctatagtaatcaaaatagtatagttctggcaagaagaagagacacataggccaataaaatagaatagggagcccagaaataaacttgtgtatatatgaccaactagtytttgacaaaggtgttaaaaatacgaggagaaaagatgtctcttcaataaatggatatcaacaactggatatcaacatgaataagaatgaaattggacctttaaggaaacagcaaaaagaaaaggcaacctatggattgggaaaaagtatttacaaaccatatatccaaaaagaggttaatattaaaaatatatgttaaagactcataaaacttaatagcaaaacaaaaataagcaaataacccaattaaaaatgggctgagaatctcaatagactcttcttccaagaagacatacacatggccaacaggtatacaaaaaggtgctca

SEQ ID NO: 291064 - DNA, 549 bp, Homo sapiens
tggacctttaaggaaacagcaaaaagaaaaggcaacctatggattgggaaaaagtatttacaaaccatatatccaaaaagaggttaatattaaaaatatatgttaaagactcataaaacttaatagcaaaacaaaaataagcaaataacccaattaaaaatgggctgagaatctcaatagactcttcttccaagaagacatacacatggccaacaggtatacaaaaaggtgctcagcatcattaataatcagragaatgcaaatcaaaactacaatgagataacatctcacatctgttataatagctattacaaaaaaagctagaagataacaagtgctggtgaggatgtgataaaaagtgaagccttatacaccattgatgagaatgtaaactggaacagctattgtggaaaaccatatgcaggttcctcaaaaaacgaaaaatagaactatcacctggatctacaaattctccttctttgtatctatccagaagaaagcacacccaggttcactgcagcattattcacagtagccaagatattaaac

SEQ ID NO: 291065 - DNA, 550 bp, Homo sapiens
tgatcttatgaaggtgagagtagaatgatatcaaagactggacagagtgtgtgggcaggaggagtggaggagtggatgaagacaggttagtcagtgggctataaacatacaatttcatagaagggataaattctaatgttcaatatcagaatagggtgactgtagttagcaacaatgtattgtatatttcaaaggagctagaagagagttcccaacacatakaaatggtaaatactggccagttgcaatggcttatgcctgtaatcccagcagtttgggaggccaaggtgggaggatcacttgaggccaggagtttgagaccaactggggtcaacatagtgaaaccccatctctaccaaaaaaaaaaaaaaaaaagttggtgcatgcctatggtcccagctactcaagaagctgagggagtttgaggctgcagtgagccattatcatgccactgcactccagcctgtgtgacagagtgagaccctttctttaaaacaaaagaacaaaagaaatgataaatactcaaggtgatgtataatttgaaaaccct

SEQ ID NO: 291066 - DNA, 550 bp, Homo sapiens
tgatcttatgaaggtgagagtagaatgatatcaaagactggacagagtgtgtgggcaggaggagtggaggagtggatgaagacaggttagtcagtgggctataaacatacaatttcatagaagggataaattctaatgttcaatatcagaatagggtgactgtagttagcaacaatgtattgtatatttcaaaggagctagaagagagttcccaacacatagaaatggtaaatactggccagttgcaatggcttatgcctgtaatcccagcagtttgggaggccaaggtgggaggatcacttgaggccaggagtttgagaccaactggggtcaacataktgaaaccccatctctaccaaaaaaaaaaaaaaaaaagttggtgcatgcctatggtcccagctactcaagaagctgagggagtttgaggctgcagtgagccattatcatgccactgcactccagcctgtgtgacagagtgagaccctttctttaaaacaaaagaacaaaagaaatgataaatactcaaggtgatgtataatttgaaaaccct

SEQ ID NO: 291067 - DNA, 561 bp, Homo sapiens
ttttgtctaaaaattaactcctgsttttccccagtcatgttacaagacgtagctttttgaatggctgccaaagaatggggtttagacaatctctttactttagggctttgaaaatagacaacaaatagagaagggggagaaaaatgttagaggattaaaaattcaacagccctcagaagcttggctgttcttttctttatgctagcctccaagtctactttttgaatattgagatgattgggacagaacaggataataaatatgtaagaaaaaaatcatctaatctcaataatcttcttttctccccctattgttggctgacagaaaaacaaacacaagggtaaagaaaatgctagtttctcatctgcagtggatgcgtatgtctgaggggtgagctttctctaccaagtgcccggtgattcaggttgtaatgagaagagcaaagcaccaggtctcctgcctttctctaatccttctgaatcagtcccaccttgctgctccttctgtgcttgttggaagcgtctcatgggttttgttgttgcagttgttgtctcaatacca

SEQ ID NO: 291068 - DNA, 1177 bp, Homo sapiens
tatcatgctactcagaacaacacataatttaaaacrtatgagctgttatttctggaattttcaatttaatatttgtggacagttggtagcagttgactgctggtaactgaaaccccagaaagcaaaaccatggataaggggtgactactgtatacaaaatgaccccacaaaggaggagaacatcactatttccttgggaaaatgattataaagtataagcatactccatatatgtaaagtggcttatttaaaaacatttaatatcaaaacatttatctgtttgactgggctttaactcagagtttagcaatctagagtgaccatgcagggaagctggtgattcggcctccagggccatatccattctccactcccttggctgcctttcccctccagacagtaggaggtgatattgcacacaagctaagggtgcaggctctggaggctatctaggtttaaatgccacctctactacttttgtgatcctctcaagctgcttaacttttctttatttcaggttgttttgttatgtattttagaattagattaatttctagtttcatggggtacactattgaaaaacacaaawtatcatgctactcagaacaacacataatttaaaacgtatgagctgttatttctggaattttcaatttaatatttgtggacagttggtagcagttgactgctggtaactgaaaccccagaaagcaaaaccatggataaggggtgactactgtatacaaaatgaccccacaaaggaggagaacatcactatttccttgggwaaatgattataaagtataagcatactccatatatgtaaagtggcttatttaaaaacatttaatatcaaaacatttatctgtttgactgggctttaactcagagtttagcaatctagagtgaccatgcagggaagctggtgattcggcctccagggccatatccattctccactcccttggctgcctttcccctccagacagtaggaggtgatattgcacacaagctaagggtgcaggctctggaggctatctaggtttaaatgccacctctactacttttgtgatcctctcaagctgcttaacttttctttatttcaggttgttttgttatgtattttagaattagattaatttctagtttcatggggtacactattgaaaaacacaaa

SEQ ID NO: 291069 - DNA, 590 bp, Homo sapiens
ccacataacaccttagggttggccctttaccaagaagaggaagatgatggaggagaggaaggaaaaagggagaacatgtagaaaaggaaacggaaggtgcaatcacaggagatgagacagcctggtgctaagggttgcttacttcacacctgtgccataggttcctttgtgtatagattgatttggctcaaagtgtcctctttatgaaaggaaaggctttttcattaattcattttgcaacatagaatacatctgagacaaagactaggtatgatatcccacatgctatttatgcttctggctctgtgatttccatatagaaaacagagatgtcagcgaatcacttcattcttttcagggaaaccttgagtgggtacacaacacagtcactaagaaaaaagtcactaagagcactaagatgtgctctgcaccccttctctgccaccatctgaagttctccacctggaggcctgtctccaaatggcctccttttccccagctgatttactgggagtcactgatttacacrggcactgcagaataaaggatgcttggtttttcttctgtgtaaaatcgtgtgccccacctgt

SEQ ID NO: 291070 - DNA, 594 bp, Homo sapiens
gtttgttttctacaatccctacctgagtgattaggagctatggtatgttatcatctctcacagaattttactaaatagaaactgcttttagtttaataagatggtaagcttcactaggatttaccaagaacttgagataatagaagggaagtcttgagccatggattctagtccagaacttccgtgtcttatgtgactttggatttctgactttaacttctctaggttccagttctttttccataaaataaaggggttgrgtttgattaaatgttattaaaccagactctgtggtcctctcagaggtttattaacaaaattcaaataatccatgaccacctgaaaattatacgtagaattttgtgtgtctttgagttttgctggttaagtaaaattttcagattctcagagttttttaaaatatagaaatacattttaattagatgatatctgagggctttttaaaacttacataaattcattttatactgctgtacagtatttttaacttcatggtcaggtattctatcagaacactagcaggcactatattaattcacaatattaattgataagctgtcttattttttattc

SEQ ID NO: 291071 - DNA, 602 bp, Homo sapiens
taaacatattatctaaataaattttgtaaggattctaagcaaatttagcttcaaagacaaatcctattttttccccatttatccaatttgaattgtgtgaacttgccaactttcaatcttttctcacttagaaaaatggcaatttcatatagttcaacctatagattatgaaaaagttttgttttttccctttcagcacagtgtcctgaagatgtcttctggcatttaccactacctaagrcctcctatctttacatatttctttcagaggcaggtcccctcctgcctggcttagtgggccacctctgacattagaaggttgaaacatttctattaaatgaaggatcaaatgtaggcaagagaaagctagtaagcaaagaaagcactaaagtctcattctttctcctgtgaaaatgtcagtgcctcctggaggtctactttaattttattttttttttttattggtgtttgaactatacggagataataatagtgtgatattaaaggcaatttaacatgaaaatctgcccattgagtagtttctctgtgttggttagcaccttatgaacatcttccttaatttttaaaatagcacttattat

SEQ ID NO: 291072 - DNA, 602 bp, Homo sapiens
taaacatattatctaaataaattttgtaaggattctaagcaaatttagcttcaaagacaaatcctattttttccccatttatccaatttgaattgtgtgaacttgccaactttcaatcttttctcacttagaaaaatggcaatttcatatagttcaacctatagattatgaaaaagttttgttttttccctttcagcacagtgtcctgaagatgtcttctggcatttaccactacctaagacctcctatctttacatakttctttcagaggcaggtcccctcctgcctggcttagtgggccacctctgacattagaaggttgaaacatttctattaaatgaaggatcaaatgtaggcaagagaaagctagtaagcaaagaaagcactaaagtctcattctttctcctgtgaaaatgtcagtgcctcctggaggtctactttaattttattttttttttttattggtgtttgaactatacggagataataatagtgtgatattaaaggcaatttaacatgaaaatctgcccattgagtagtttctctgtgttggttagcaccttatgaacatcttccttaatttttaaaatagcacttattat

SEQ ID NO: 291073 - DNA, 574 bp, Homo sapiens
tttgaatatcagtagctctcattctgggagatcatttcttaatgttttacctgattttcccttatttgtcctcataatyacattctaatggtattagccccaaattgcagacccagaaatggagtggcttaggaacaaagagaataattcatcagcagaagctcacaaaaccagtgactagctgctgagatctgtttgagcccataccactctgccttcggtcttactagaagtcaaggttctgaaatcagggtttcagaagggccacactctctctggatgtggaaatctgttctttgcctcttaaagcctctggtagctgccagcattctttggcttattgccttatcactcctatctctgcctcagtggtcacgttgccttttattttgtctgtatcaaatcttcctctgcttccctcttataaagacatttatgattccatttatggcctacctggatactctgcccatctcaaattatctgtatgaccttgatctttctgaggtcattctgacaaagttcttgtattgctggtgtgctctcagttttcttgaagcccttgaagacaaaa

SEQ ID NO: 291074 - DNA, 574 bp, Homo sapiens
tttgaatatcagtagctctcattctgggagatcatttcttaatgttttacctgattttcccttatttgtcctcataattacattctaatggtattagccccaaattgcagacccagaaatggagtggcttaggaacaaagagaataattcatcagcagaagctcacaaaaccagtgactagctgctgagatctgtttsagcccataccactctgccttcggtcttactagaagtcaaggttctgaaatcagggtttcagaagggccacactctctctggatgtggaaatctgttctttgcctcttaaagcctctggtagctgccagcattctttggcttattgccttatcactcctatctctgcctcagtggtcacgttgccttttattttgtctgtatcaaatcttcctctgcttccctcttataaagacatttatgattccatttatggcctacctggatactctgcccatctcaaattatctgtatgaccttgatctttctgaggtcattctgacaaagttcttgtattgctggtgtgctctcagttttcttgaagcccttgaagacaaaa

SEQ ID NO: 291075 - DNA, 574 bp, Homo sapiens
tttgaatatcagtagctctcattctgggagatcatttcttaatgttttacctgattttcccttatttgtcctcataattacattctaatggtattagccccaaattgcagacccagaaatggagtggcttaggaacaaagagaataattcatcagcagaagctcacaaaaccagtgactagctgctgagatctgtttgagcccataccactctgccttcggtcttactagaagtcaaggttctgaaatcagggtttcagaagggccacactctctctggatgtggaaatctgttctttgcctcttaaagcctctggtagctgccagcattctttggcttattgccttatcactcctatctctgcctcagtggtcacgttgccttttattttgyctgtatcaaatcttcctctgcttccctcttataaagacatttatgattccatttatggcctacctggatactctgcccatctcaaattatctgtatgaccttgatctttctgaggtcattctgacaaagttcttgtattgctggtgtgctctcagttttcttgaagcccttgaagacaaaa

SEQ ID NO: 291076 - DNA, 641 bp, Homo sapiens
ctggggattcacttaaaatgtaaattcttatcctctagggctgggatggagctcaagattaaaaatttctagcatgttccaagctggtgcccatactgtttgtccagggaccacactgcgaataggaaaacatagaaaagaatgtaagggaaggtataggaagggatatttgagttaaaaatgagaggattttctaatagtaagatctatatgaaaggaggatgggggtataagggggtgtgagttaattaattaacgagctcattttttttctgggctaactcagatatgggctgggagtccaattgttaggcataatatagaagagactaaggggacatttagaataaatgggcgttttctcaatatgatstatagggtgctatggttttattggagtccttagaacatccatgagcatcaaggaaaacctaaaattttaacttcaattttgtatattttatccctcaagacaccttcaattttatatattttacctattgaagttctgtgtaagatttaattttttaaacaaatccagttgcttaaaatacacactcacacacaacacacactctcaaaagtacaaacatggcagtagaggagtttctctgattctatgcaccctgatcagagaacca

SEQ ID NO: 291077 - DNA, 612 bp, Homo sapiens
ccataaaaacctgaatgctcaatgagggcactgaggctggctagcagcaggtgctaatatatatgcattaactgtatgcctgacataaggatttaatgtagagactacttggacaagtcagcactagattaacaagttccatcaacaaactattcttctaacaaaagctatgctcatttatatractgatgctatcttacaatttatgccacttttaaagtcatacaatatattcaaacacattaactcatttatcctagtactctctgaggtagataatatcctctaccccttaatttacggatgagtatacaacctctggaacattaaaatccctcccttggtttcagagctttccctttattttacctggcgatagcctgaaatctatatttctaaagctaaaatgactctccaaacacatatggaaatactgatagaggaaattatatggtatctgggatttacttcaaaataatctggggaaggaaggaagtaggtgggaatagagatgatacaggattagcccttaatagctaactgttgaagctgggatgggtacaggaagtaatctttgcatttataaacgtttgaagttttccataataaaga

SEQ ID NO: 291078 - DNA, 576 bp, Homo sapiens
ttaactaacaggtccagggcacagtgctgggctatttgcctgtggattccatttctaccttttagtttttacttctttctttggaggcagaaatcgggcataagacaatatgagggtggtctcctcccttaacttcatgggcttgttttaaagcttaaataagatagtgcttctgacccacttaacgcagtacccagcaagtggtaggcactctataaaattaggtattattagtattaataatgatattgtattatgtacagaatgaagtttataaagcaaattgtgataaatgtgatgaaaaatggtaaagggggcaatgagagattacagaaggacctgtcttactctgggaattggcgaaaagtttctctgaaaaaaggacgtgtaatctgagacctggaacattcattaactctcaamtagtaagcagcatttcgcagaccagtatctgtgaaggctttgctgagggaaagagcttctcaatttgaggttgcttttggttcaaaatactaagatgccacaataagttagaactgacaattcaactttatatctgataataaattaagattg

SEQ ID NO: 291079 - DNA, 551 bp, Homo sapiens
caaaggctgggactttacagctgaatttggaagtcactgacacatatgtgatgggtgaaaggttgtgaacagctgggttccctgtggatagggttgggaataccttgcatctatacagtatttcaaactgcttttcacctattgtcatgctgttgttgaaacaatcctttgcaaacagtaaggtaagttttataggccatttttgaaaaccagagagcaagaatctakggactcagccaaagcacacacaacttttccatctgaaggctggtaattgtagggctatagtgtaaacatgctatagaatttaacattttctgtatcatttgtcctgtcaaaggggagaatttctttggatcctatttttttttcataatgtgctgtatgcaaaatgttttctattgtcattttgaatacctgtaatggcacatgaatgcttttatgagtacaatttctgaaataaaacattttcttcttctccaaatatgatcacaaatgaggaaagagtaatagaaacatttctgttaccacccaggtctcccaaatgtcca

SEQ ID NO: 291080 - DNA, 542 bp, Homo sapiens
aattggccttatgttccctgcctccacactctattctcctgcctccgtctcacactctagtttgagggaaattacgataaagttactccctgtgtggccctggcctcagtatcttatcaagctattatcttttagtccaccaccaaccaacagtcactgtcaaacatactcaagccctgggttccccatgtgttcacccctcttcctcattttctccttatctacttcccggaaataactactatataacatagaagaataaatcactaattgtgagaactcacacattggcctcagagaagatattttgggtaaaggacattccttggtcctcaaatgtcatcaaatctgtgttttctgttgacagatgtctttgtatctgctcagcaaatgggaatagggagacagagtgaaattggttgtgaggaagctgtcraaggccatggccattggttttcgcatattcagtgagggaacttctgcttcacagatgaaagaggaatacatttcttttgttcttcagccacataagattacagatt

SEQ ID NO: 291081 - DNA, 1122 bp, Homo sapiens
gtgatcagccattgagaactcactttgagccaggcattgtgctaggcactttccaaattatgaaacgatttttcaacaaaatattgaaactttcattcttttgccaaactraacaagatatgaatactatcgagcattccatttgcctcccagatttctaattgatgttgaaagtgcatcactgatgctcccaagcatcatcctaactaacatgacttagctggaagtctgtagcttgtcagtggctttccctgaattctcgttaaggcaaattttcttatttggaaaattctctacattttcagaatgcggagtgcccctgaaaagtgcctcccaaaatgtctcaggtcagagctgcaacctgcgcaacaacggctaaggtaatttttatgtttccagtatatggattttttgcctttatgatttcattttatcttaatgaagttatcattatctttatttgtctgatcctttcctctttttcttctctctttcttctctgtcttctaatgtttcccaaacttcaatccattacatatcattttcacattwctaatatagccccacatgccatatggaatttatatgtatacatatgtacattttgtttatttctgttgacttatttataaatgcacacctagggtgwatttatacatagctggggcttttcaaataatatttaagtaataaacctagttggtattaaatggcataggaaaaaaaagaaaagagttccagaaaacttgtatttattatatctctattaacttgtaatgctggtaaagaatataaaagggttgacaaagatccacaatctcaggccaggctggtaggtttgtggattctaattacacatgacttaaccgcaaaggctctgaacttccctaatgtgaactattgccatagggagctgaagcattaactctttcaggggccactcaccttgtgggctccacttgtggtgacccattctctttgatctttgactgcagcaagtttttgaaaaatatctataaaggaaagaaagagcgcaaagaggcatccagagattaaagggggagtacttccaggagcacagatctgcagtgcatatgggcaggcagagaaaggtcaaaggga

SEQ ID NO: 291082 - DNA, 570 bp, Homo sapiens
ctaatatagccccacatgccatatggaatttatatgtatacatatgtacattttgtttatttctgttgacttatttataaatgcacacctagggtgtatttatacatagctggggcttttcaaataatatttaagtaataaacctagttggtattaaatggcataggaaaaaaaagaaragagttccagaaaacttgtatttattatatctctattaacttgtaatgctggtaaagaatataaaagggttgacaaagatccacaatctcaggccaggctggtaggtttgtggattctaattacacatgacttaaccgcaaaggctctgaacttccctaatgtgaactattgccatagggagctgaagcattaactctttcaggggccactcaccttgtgggctccacttgtggtgacccattctctttgatctttgactgcagcaagtttttgaaaaatatctataaaggaaagaaagagcgcaaagaggcatccagagattaaagggggagtacttccaggagcacagatctgcagtgcatatgggcaggcagagaaaggtcaaaggga

SEQ ID NO: 291083 - DNA, 574 bp, Homo sapiens
gttgtgatttttaaaaacttgttgcttataaactgatctgaaaatagcaatcctctatagctttattaaataaaattaaaaacgttctatcacctaactttactatcgaacttaaccaagagaactatagaggtagaaggaaccttaagaattyctttagcacaccttgtcacaacccgacacacagactgtataaaggagaaaagtgaaatgcggtaacttctgttgactacaaatattcattgttctttacctctctctaccatctaaatatttatggaaagtttgtgcctatttacactatttctgtctttctatgctctccaaaatgattagtagaaaataacataatctaagagtcgactcagtttaagtcataataacagttgacaaggacttcctacttaaccaagctttagtcaggctcctctgagtcctcttcgtgactaggcctcatccttggtctgtcagttttagcaacttatatcctgctaagtcagtttatggaaaaatttcccacccttgacatccaattaagtttctcatccactcacccttgatatctaaccaagtt

SEQ ID NO: 291084 - DNA, 574 bp, Homo sapiens
gttgtgatttttaaaaacttgttgcttataaactgatctgaaaatagcaatcctctatagctttattaaataaaattaaaaacgttctatcacctaactttactatcgaacttaaccaagagaactatagaggtagaaggaaccttaagaattcctttagcacaccttgtcacaacccgacacacagactgtataaaggrgaaaagtgaaatgcggtaacttctgttgactacaaatattcattgttctttacctctctctaccatctaaatatttatggaaagtttgtgcctatttacactatttctgtctttctatgctctccaaaatgattagtagaaaataacataatctaagagtcgactcagtttaagtcataataacagttgacaaggacttcctacttaaccaagctttagtcaggctcctctgagtcctcttcgtgactaggcctcatccttggtctgtcagttttagcaacttatatcctgctaagtcagtttatggaaaaatttcccacccttgacatccaattaagtttctcatccactcacccttgatatctaaccaagtt

SEQ ID NO: 291085 - DNA, 546 bp, Homo sapiens
agaagtaagacaatttctatttgcaggtgctatgatattttgtgtagaaaattgcaagaaattcacaaaaaaatyacagctaatatatgagttcagtaagtttatagtacacaaaatcaatatgcaaaaataaattatatttctatactctagcaatgaacaatccaagatgaaattaagaaaacaatttatttacaatagcttcaaaaaaacccaaaacttagggataaatttaacaaagaaagtacatgacttgtacactaaaaagagcataacatcattgaaaaaagttttttaaaaaagacctaaataaatggaaagacattttgtgttcagaaattagaagacttgccattgtttaaatggctgcattagtttcctcttgttgctgtgcaaatcaccacaaattcagtggtttagaacacacatcttatagtcctgaattgctctaaattggttcttgctggactaaaatcaaggttttggtagggctgcatttctttctgaaggttctgggagagaatctatttccttgcctttttccag

SEQ ID NO: 291086 - DNA, 487 bp, Homo sapiens
tgtaggcaggacagccccagggctgagctgaggagcagagcatctgttccagttccttgtatgcctgcacaaatgccataccccagcaaatgctttccgaataactttgccccttacccttctagatgaagctagtactgtctaatggaaaccgattgtaagcatcaaacataattttaagttttctggtagccacattttcaaaaagtaaaaagaataaagtgaaataaatctattttatttaatcaaaaatatccamaatattatttcaacatatacaaattgaaatcttattattttacatcttaattaatattaaacaaaattaaaaattcagtccctcagttgcactggccacatttaagctgctcaagagtcacatgtgcccagtggcctccatacttaacaatgtggtccaggcccttccttaagtgttggtcattgtcttcatacatttattacattcatgccatgtagctgctaaacc

SEQ ID NO: 291087 - DNA, 594 bp, Homo sapiens
ggctttgaaaaattttcaagaagatctttcctcttataaatgtcatgattattttaaatgtttttatgacaataagtggaccattgcttttctgtgaataacatatgattccttttgttttttgatctcttctcccaagataatattggagctaggatattaaataaataaatttatatggttaggctttgtgtccccamccaaatctcatcttgaattgtaatccctgtaatccccataattccctcatgtcaagggagagaccaggtggaggtcattgaatcatggggccatttcctccatgctgttctcatgatagtgagtgagttctcatgagatctgatggttttataaggggctcttcccccttggctcggcacttatccttcctgctgccttgtgaagaaggtgccttgcttctcctttatcttccaccatgactgtaagtttcctgaggcctccctagccatgctgaactgtgagtcaagtaaacctctttcctttataaatcacccagtctcaggcagttctttataccagtttgaaaaaggactaatacatggatctagcaaaatatgcttttagtaattgcta

SEQ ID NO: 291088 - DNA, 1129 bp, Homo sapiens
ggctttgaaaaattttcaagaagatctttcctcttataaatgtcatgattattttaaatgtttttatgacaataagtggaccattgcttttctgtgaataacatatgattccttttgttttttgatctcttctcccaagataatattggagctaggatattaaataaataaatttatatggttaggctttgtgtccccaaccaaatctcatcttgaattgtaatccctgtaatccccataattccctcatgtcaagggagagaccaggtggaggtcattgaatcatggggccatttcctccatgctgttctcatgatagtgagtgagttctcatgagakctgatggttttataaggggctcttcccccttggctcggcacttatccttcctgctgccttgtgaagaaggtgccttgcttctcctttatcttccaccatgactgtaagtttcctgaggcctccctagccatgctgaactgtgagtcaagtaaacctctttcctttataaatcacccagtctcaggcagttctttataccagtttgaaaaaggactaatacatggatctagcaaaatatgcttttagtaattgctawaatttgggagggagaggagccataggtaatcagctcaggggaaaggaatgagaaagccgtatgagaatgagaatattggagaggtagatgaaagagggatttatatcttgagcatgacaaaggattacaaggatgggaggagcagtggggttacctagctgcctggtgttcaaaagaatcccaacgttgcccaggaaatagaaaacactaagagctcttgattgacagtggaggagtgtgaaaagaggagtatgtgtcttgatgactcccagtcttgtggcttggaagactgaaaatattgtggtgccatgagwcaagatcggggatataaggtgaagaatagacctggggaggaggctaatgactttgagtttaggggtagtatggagagtacttgtggaatatccatgtggctaaaacttctggaagttaggagcaatgcctgggctgagatcatgatgacagggttgaaagagtgtttgaaatcatgggaatggatgacaccatccaggaggggagtgtttagagtatgaa

SEQ ID NO: 291089 - DNA, 382 bp, Homo sapiens
acattctaagtcaggagcacggagaatggatagttttgttcccaattgaaattctctagaagtacgttgcaaactaacttctgtattttctgaattaaatagattgaagtatttaataataatatcttgtkgtaccatccatgggaagattctattacctaatattgttataaagtataattcagttctatgggtgctgaaccaaagttaaaaatgagtatgcctccttgaactggatcgtctttatgatctgcagtacataaataaagctcattctaataaaagcagagggacttatcaattttcatataactagatattatcaaatcaatgttgttatgactttgtatttgttatgcttccagcgatattgcagaactgt

SEQ ID NO: 291090 - DNA, 382 bp, Homo sapiens
acattctaagtcaggagcacggagaatggatagttttgttcccaattgaaattctctagaagtacgttgcaaactaacttctgtattttctgaattaaatagattgaagtatttaataataatatcttgtggtaccatccatgggaagattctattacctaatattgttataaagtataattcagttctatgggtgctgaaccaaagttaaaaatgagtatgyctccttgaactggatcgtctttatgatctgcagtacataaataaagctcattctaataaaagcagagggacttatcaattttcatataactagatattatcaaatcaatgttgttatgactttgtatttgttatgcttccagcgatattgcagaactgt

SEQ ID NO: 291091 - DNA, 560 bp, Homo sapiens
atatcttgtggtaccatccatgggaagattctattacctaatattgttataaagtataattcagttctatgggtgctgaaccaaagttaaaaatgagtatgcctccttgaactggatygtctttatgatctgcagtacataaataaagctcattctaataaaagcagagggacttatcaattttcatataactagatattatcaaatcaatgttgttatgactttgtatttgttatgcttccagcgatattgcagaactgtgtgttaccaacttcattttctcttaaggaacattcagaagcataagaatagactgtacagacatgaacagtagctttgttaacaatatttgtcattacctaaacaaaggaaaaatttatagactgttgacaacccacttgcttcatgaatgtgacataaaaatatcaattactttatagtataaattataagtcattcattagtgctgtgacataataagccagccccttggtcaaaataattacaattgccaaaggttttttatttaggtttgtaggatgacgatggtaatgatgatc

SEQ ID NO: 291092 - DNA, 560 bp, Homo sapiens
atatcttgtggtaccatccatgggaagattctattacctaatattgttataaagtataattcagttctatgggtgctgaaccaaagttaaaaatgagtatgcctccttgaactggatcgtctttatgatctgcagtacataaataaagctcattctaataaaagcagagggacttatcaattttcatataactagatattatcaaatcaatgttgttatgactttgtatttgttatgcttccagcgatattgcagaactgtgtgttaccaacttcattttctcttaaggaacattcagaagcataagaatagactgtacagacatgaacagtagctttgttaacaatatttgtcattacctaaacaaaggaaaaatttatagactgttgacaaccyacttgcttcatgaatgtgacataaaaatatcaattactttatagtataaattataagtcattcattagtgctgtgacataataagccagccccttggtcaaaataattacaattgccaaaggttttttatttaggtttgtaggatgacgatggtaatgatgatc

SEQ ID NO: 291093 - DNA, 597 bp, Homo sapiens
agaaaatgaaagatacgcccaatagaagaagacaggttttcaacatgtggacaattgagatccctgaagtacagagtaaaatgaaaagggccaaacatttccaagatatgataggagagaactttcttaaaataaaggaagattgaaagttcatggaaaaagraaactgagaataatcaagactgagatgtattcaggtgaatcaactccaggaaaatagaaaattcaaaaacaaaggtggccatgtagagcagtggggagaggacacttttcaataaatagtgagaaatcagtaaccataaaaaaatggttcttaccacacaccatacacaaaaatcaattccaggtggattggaaagtgaaacaataatgatgccttcatgacctgagggaggcaaagatttcttaaatgtgacacagaaaggactgacggtgaagggaaattgataaatggtctatgcattaacttttctttttcagagacagaaattttgtttctgatcactcctccattggaagcctgtccagtgcaaatgctgcaggccgaatccagcagcttcatttatcagaagacttgagccctagggaaatacaaga

SEQ ID NO: 291094 - DNA, 568 bp, Homo sapiens
aaaaattggaaacaatataaatgtctatctgtaggaaaatgattaaataaattatggtatacccatattgtgcaataccatacaaccagcagaaagaatggtatggatctgtgtgtactgaaatataaggctgcttaatgaaaaaaagcataaattacagaacatgattccatttttgtcaacattttctacacacatattttgtatacatcccaargtttcaaaagacacatatcacatcccattgttaataaaccctattggttttagaggaggaagtagaatttgctcctttgttttttggcatccaaagcaaaaagacaaacacaatcagtcatgaagttctctgtatctgtaagataaaacctggagaagtccagttttgtttttttttgtttgtttgtttgtttttttttttttgcttttgaaagacataacacaaatttctatcatgtgtgttattttcaactgtgtcattgcaagaccatggcattattccagtgtaaaattctgtaaggtaaatctatcagactatgaaacaatacagttgaaaatgcaattttctgaa

SEQ ID NO: 291095 - DNA, 568 bp, Homo sapiens
aaaaattggaaacaatataaatgtctatctgtaggaaaatgattaaataaattatggtatacccatattgtgcaataccatacaaccagcagaaagaatggtatggatctgtgtgtactgaaatataaggctgcttaatgaaaaaaagcataaattacagaacatgattccatttttgtcaacattttctacacacatattttgtatacatcccaaggtttcaaaagacacatatcacatcccattgttaataaaccctattggttttagaggaggaagtagaatttrctcctttgttttttggcatccaaagcaaaaagacaaacacaatcagtcatgaagttctctgtatctgtaagataaaacctggagaagtccagttttgtttttttttgtttgtttgtttgtttttttttttttgcttttgaaagacataacacaaatttctatcatgtgtgttattttcaactgtgtcattgcaagaccatggcattattccagtgtaaaattctgtaaggtaaatctatcagactatgaaacaatacagttgaaaatgcaattttctgaa

SEQ ID NO: 291096 - DNA, 568 bp, Homo sapiens
aaaaattggaaacaatataaatgtctatctgtaggaaaatgattaaataaattatggtatacccatattgtgcaataccatacaaccagcagaaagaatggtatggatctgtgtgtactgaaatataaggctgcttaatgaaaaaaagcataaattacagaacatgattccatttttgtcaacattttctacacacatattttgtatacatcccaaggtttcaaaagacacatatcacatcccattgttaataaaccctattggttttagaggaggaagtagaatttgctcctttgttttttggcatccaaagcaaaaagacaaacacaatcagtcatgaagttctctgtatctgtaagataaaacctggagaagtccagttttgtttttttttgtttgtttgtttgtttttttttttttgcttttgaaagacataacasaaatttctatcatgtgtgttattttcaactgtgtcattgcaagaccatggcattattccagtgtaaaattctgtaaggtaaatctatcagactatgaaacaatacagttgaaaatgcaattttctgaa

SEQ ID NO: 291097 - DNA, 558 bp, Homo sapiens
atttaaaccccagaaaattctgtaaccagtgcccttgagctgcttgcttcagcctgcccctgctctgtggagtgtactttcatttccataaatctgtgctttcgttgcttcacatacacacacacacacacacacacacacacacacacacacacacaygaaaggggaggttggttagataaataacactaagctggtaatacagtaatgtatttgttgacccagaagcatatttacaatattaaataaaaaaataggttaccaatggcatatattttatgatcctatcacagatagaaatatctgaaaatattgtcaagtcaagcagacatcacagacaaaagtgaattagaaattaaaggaatatgaatacatataacaaaataaaaacaacaaaacttcaaatctgaaaaaagtttataatttgttgattaaagtttcttatattgttttcttattagaaaatcagtatattctctgcagaaaatgaagaaaaaatcccattaagaatattcgtaatcctactaacccagaaatggaaaaaactcacagaaaata

SEQ ID NO: 291098 - DNA, 377 bp, Homo sapiens
catcacttgccttgagctccttcaaagagatgtactatggaaatacaaattattcctagtctgcttccctcataaatttatctatttctttttccgctcaacttgtcattgaatatatcaaactaaagtttagctacttcatggtctgtggctagatttttaagaataatacattatgtgaggctgttgaaataaataatggcatttttttcttccctttccttggcttctgatgaattcatatmtaaccctaaaaataaatttcagtaaaaaatggacctgagaacacagaatgtggctgactgatacacccttgagtgatctattttaatatattgaaaaggtcattatctgaaaagtttttatcttgacttttc

SEQ ID NO: 291099 - DNA, 598 bp, Homo sapiens
cctgagaaggactctgtacttctatttttgagtccttgtggatgaactgcaacctaacttaatagatagacaagattgaaaacctaatttaggagtatgtgcctgtaacaatcgctgagtcttacccaatcccagcaaccttacttcaaccagtcatacactgctgagggttcacagygttcaaataagtcaaatgtggagctataacaaatccaactgtttctttacctcacttccagtttcagtacatcaatttacttttttttttttttttttggtctataaatttgttctgaccatgaggcaaccctggaatccttctgaatctgctgtgattctgggggctgcgtgattcacaaattattcattgctcaataaaactcttttaaatttaatttggctgtttttcttttaaaaataataacaatggattaaagctggaaagctgcaagacacagactctttctgaggagcaatacaaacagaagtcccaaagactagacaggagacaaaaatgaagacactagaggaatttcttctgattcctagagctataacaatttataaaaacagccaaaatcctagccagattgactta

SEQ ID NO: 291100 - DNA, 616 bp, Homo sapiens
ccatttatgtttccttcatttttattccagtcagtggtgtggagattgcatgatttggaaaatggtctctttgtagctcagtgtttgtaagctatgggctgcaaatacaaatatacatcaatcactgtgagttgactgaataaattatatgtattgtacatgtatgggaaactaattttttcaaatacatttacatgcaattgtggttaataaactacaagtccatttaaaatggttatcaaattcatggcagaatttttaaaaatcagaatgtattccaataacatgaccaggtggagtgtgtttccccacctagcaattgcagcagtcccgtttatcagcgggggatacrtttcacgacccttggtgtatgcctaaaaccatggatggtaccaagccccatatatattaagcacaaatttctctttcttcttcaaaatttcacacatagaagacttcattctcgtgtagatcatagcaacctcagcatacattttttccccctatgttgagaacttttacatttttacacaaggaatgcaccttatggcttctctctggcatatccaaattgccagcatcactacccttgcactttggggctatcatgaagtaa

SEQ ID NO: 291101 - DNA, 617 bp, Homo sapiens
tgtatctgctgtggcgcccccttgctgccaccctggctgctttcaatacgctttcaatatgctgcaggtgggtgctgacagcgcgtgtgctgattccaaagctgtagaaggggtctgagtagggccactttcctgaaaagccctttgactagggcagtccttctcctcgaactgtatccttattaaatgtgttctgtgccagctctgaaggggacaggaaagaatcagttggatggggaaggataggattctccaggcagaagtagtgtcasgccaatctctgtccccagtagcggaagtttgggcacttcctcaaacttcctgaacctcccagcttaggtctctgtcccatacaggaagggaaacttaccttccttctgatacgaaatagggagcatgcctacagttcggggacacaatgttgtccccgaatgtgcaatgttgtcatgaacaaaagcacatgcaggaggtgggcatgccaaggttcttgtaccaccattaagacagagcctttataggatccagtgccatctcctgagaaaccccaaaactacaattacacagctgggaccattcatcactgtacccttgagagcaaaaagagaatttgaaattat

SEQ ID NO: 291102 - DNA, 596 bp, Homo sapiens
agaaatgttaaaaggacttctaaatcttgaaacaaaaggttgacatacaccagaagagaaattcctgaaagcataaaattcagagggcttataaaacaataacacaatgatgaaaacaaagtcactaggtaacaattgacataatgactggaacagtatctcacatctcaatattaacattgaatgttaaatgctccacttaaaagatacagattggcagaatggatttaaaaaaccacaaatcaaatatctactgtcttcaggagacacacttgatacataaggattcttatagacttcaggtaaaggggtagaaaaagatatttcacagaaatggaaaccaaaagcgagcaataatagctacttttatatcagataaaacacattttaaagcmtcaacagtaaaacaaaacaaagaagatcattttataatgataaaaagatcaatttaacaagaagttatagcaatcctaaatatatatgcacctaactccagagctcccagatttataaagcaattaccaccagacctaggaaaagaaataggcagtaacacaaaaatagtgggagacaccagcactctactgacaatatta

SEQ ID NO: 291103 - DNA, 501 bp, Homo sapiens
aacaaataaattttaaaaaatcaaaatcatatcacatatcttctcagaccacagtggaataaaactagaaataaatttgaaaaggaaccctgaaaactgtacaaatacatggaaattgaatgatatgcttctgaatgatttcttggttaacaatgaaattaataacatgaatgataacagtgatgaaagttataaaaacctctgggatacagcaaaagcactgctaaaaggaaagtttatagcactaaatgactacattaaaaaagtctgaaagattacaaattgacaacctaacttcacacctcaaggaattagaggaataagagcaaaccaaacccaaaggtagcgaaagaaaagaaataacgaagatcagagcagaaccaaagaaaattgaaatcaaaaaacmaaacaaaacaaaaaatcaatgaaataaaaaggtggttatctgaaaagataaacaaaactatctatgttcaccaggaaatgaagacagaagattca

SEQ ID NO: 291104 - DNA, 599 bp, Homo sapiens
tccacctggccccgcccttgacatgtggggattattacaattcaaggtgagatttgggtggggacatagccaaaccatatcagtactattctggtagtcttatgtacagggctaagtgaggtgaccctggatacattcctcttatccacaactcccaccccagcctgttcacctctactttgcactgtgaaggcctagtagccctttcttgaaatacctaactcactgcaagtaaagttccttgaatgtttcttgggcctaaataataccaacacatacctgcagtttcctatttgatagcaaactacctttgctyaaaaattacttagactgaaacaatacaacaaatataaaaacagatctgcatcaaataaagcttttaattgctcaaaataatagtcaattttgcactaaaagaggtaaggaggaaggaaaagatgattgcactaaaagtaaggagttgtgtttttaaatcaaatcttgtgtcatttaataaaattatactactctgtctcacagtaatgtcacaaaacttaagctagtgttcaatgaaacattttgtaaactacaaagtagcaggcatatatgctattatttta

SEQ ID NO: 291105 - DNA, 446 bp, Homo sapiens
ctatagaagacagtattgttaatatattacttcagtctaggaaattgaactaaaacaaatctgcaactcccgagtatgtttttaatatatagtcatttgggttcagcaattctaaaactaattttgctattgtagaatagagtaaatgtgttgatgtcattgcgagccaagactctcactgtggaagaaggatgacagaaatatagtaatggagggaaaaaggatattaagggcatgactggtgcaattgacaaaacggaatatgcaatgcagatgcaataaaaaatgtattattgttacatttcctaaatttggtaactgtacagtggttacataagtttgtaactttttattttaraaaatacatatgaagatcttaaaaggtaaaggagtacaatatatgtaaactattctcaaatagttcagaaaaattacaaaatatgcac

SEQ ID NO: 291106 - DNA, 512 bp, Homo sapiens
ggcctgctttggcaaaggttctctctcagtgagggaaataggacagcccagccaatcagtctgccgctcattttccagcccatggaagcggagccaccagtgggcactaggctgcctgttttcagtggctctgctcccaagcctgtggcagcatccttgttgtgattttggcaagctcagaagagtagtgggagatggccgttgctagtgttctctaattgggaggctaactgcttgccttccagatttactgttcccaaggtctgaaggacatgcagcttaggtcctggcgagtcgtggatggctttgtgttactgtttggaaactttttattatgttctgatgtaagtggtatgggggagtcactccttgagataactcatcctctaagtttcaaaggtgacactgaaytttcccattctctcctatgtatgcactgcccatcagtcatacaaatgcaacaccgacatcggcaggggggtggggcagtggcagtaccaccagtttcctcc

SEQ ID NO: 291107 - DNA, 519 bp, Homo sapiens
tcataggttctcctagcaaactgataaactcctgaagaacctaggccagaagttattttcctgcgttgttctacttaaggcctggccctggacagcagaagcattaggacatcatacagaaccagtcaacacaaagacagcttctgtgagatccaagacatgatcgcctaaacacaccacgattccaggtgcagcagcttaagtgcctatgtaagtcctacttagcacctgttcatctggctggcgtggagcaggaaactggattattttcccacttttggatgaggcatagcacactgattaatgatgtgagggagaatgaaccaaagacaggagttctgcacacaaatgtctttcaggaaagctrtcacaggcatggggaaagaaaggtgagcattgtaaggagggggtggcagacagcatttggttgattagggtttggttaatgctggtgagtgtcgaacattccaattcatggctattactaatgggagaaaggggttatttgttaattttact

SEQ ID NO: 291108 - DNA, 621 bp, Homo sapiens
attatacagtcacgtgagatccagcacagttggaaaatggggcagttataaaatctgagatcccatggttaccttattcctctagcttttcaaaccaatagaaggttcaaaagtataccctgctacaaacacacagtttgaaaaataattttaatccgcttgatagttcttccttatatagtgacctcagtagaagtttggaaaaatggacagtcatctttgcttttctcctaagacttttttaacctttgcaggtgacatcatgggtacttctcaaaggctcaggactgctagcccttaccttgttcacagagtcccagaactgatgcaaactcagagttcactttgaaatctatcaacatcaactgactccttcaatagttcagaaaataataaatggcccccaagatatgagcatttagcagtatgtttggccttggaatcttgttaaggcacacaacttccaaatgagaatttacaaattcacccaaagtcttttgttgataaccamatgtgtactcaacacagaagaaaatatagttgcagagacgacagaaaaagtaacaaatacatctgcatttatcagctcagtaagtattcaccaagctcctaccctatgtc

SEQ ID NO: 291109 - DNA, 528 bp, Homo sapiens
cttttgttgataaccacatgtgtactcaacacagaagaaaatatagttgcagagacgacagaaaaagtaacaaatacatctgcatttatcagctcagtaagtattcaccaagctcctaccctatgtcatgtaccagaaggtacaacagtcatttttatagttagagaaagggtatctacaattatcttacttttttgtttacttgtcttttgctatgctgtctactaaaataaaaccaccatgagattaagggccatgtttagtatttataacagacatggtggacaaactatagctcacaggccaaatctagcctatcacctgtttttgtaaacaaagttatatcaggaaatagcaaacttatttgtttataaattttctatagctgttttcatactacacagcagagttgagtagttgcaacagaaagtatgtcgaccacaaatcytaaaatatttactgtatggtcctttggagaacgcattctctgagatgacttctagaaaaataccttatatacagtaggta

SEQ ID NO: 291110 - DNA, 575 bp, Homo sapiens
ttggcttgtataaatgcatatttctgtctgtggtgactagtacataaatggacataatgggtcaccagtgattatttgtagaatagaaaaatgaattcaatagaaaaaaatctttagagcagaggaaaataacaaaagcaatacatgaatgagaagaagaatgagcaaagattttcgggataaatagtgggaattattagctttgtgaaatgaaggattcctcggtgcttgttagctttccttaatgttctgtttaaaatgcatccgtatttattggacccttatttttacaatgggatgaaatcttgtaaaattggggtttttacatttcaacaaagatagaagttgattctagaaattaaatacaaattatccaaagtgtcattctttggggagcagtgtataggatggggttgtctcctgggacctttagatgcttcaatttggcccattatacaaatacaatttttactacccttttattgactgtctttaagttgacrttttcatactagttttctgcccatccatcctgcagaaaaacggcttgatgtagtgtagagagagaatataag

SEQ ID NO: 291111 - DNA, 608 bp, Homo sapiens
tagctcaatttagatattccacaatgtatatctatttcaaaacatgttttatatgataaatatatacaatttttatttaattttaaaaacgaataacacaaaaagtaaaaatggaaaaatccgtaagtttctcactcatttgaattaagatttctggttgtctagtagacacaactacttgtctaacttattgattccttaatttcagmaaaatttcttgtcctacttctaccctagataattccttccaaaacaaagtacaacacacactaaggaataatgatttcttttaggtcagttacatctcttctgatggagctccccaagactgaaaactttgcatcagcttgaattcctccttcatcttcaatatcctagtaaagcactcagatttaaataagaatttcgatacccaaatcagcaatatccaagtaagcaccctgacaactattccttcatacatttttcaggcactgtcccttttcctccgctacccattcatacctctaccatccacttgcattacctattgtttgtgaactaaactgtgtcccgcaaattcatattttgaacttctaacccgcaacgtaattgtatatggagagaga

SEQ ID NO: 291112 - DNA, 638 bp, Homo sapiens
tctaagatatcaagacatccacatttcatccttacaacaatcctatgtggtaggcatatacatttattattcatatttattttgggttcactgatttcttttttttatgtaggaggtaggaggaaggatgcagaagaaaattacctataggaaaagsgttgagaagggtctgcagggactgaaccataaagtagtgacactgttttcatagttggaaagaagtgggctacatttgtaagtacctagtgtgagttttgcaataaaacctaccttaccaataagcatggtggaatacttagtactactacttagtacattcatacatgtctctaccatcttgagatttctgtatacacagcatatgatcagtttttataaatctacagcttaaaaaaaaagattcttcttgttataagtacagcatttaaacacaaaaccagcatgggccagccacattccaactgaagacccagagaaagaaaggccagcagcataactctcagcccctgccctgcttgatggaactgattgtcctggcagtgtattactcctattttacaaatgaggaatctgtggcacagagagagtaaataatttgctcaagatcacagaccaagacttgtacttaagaagattag

SEQ ID NO: 291113 - DNA, 535 bp, Homo sapiens
ctttcttcatttcctaggcattttcctctgagttcccacagtggcaaacattctcttacattaacctatgggacattgccccaaatatccattcaaatatcargttctctgctatctgtgagccacttaagagcagtgagcatatttttggcttcagcattcttacagtctagcatagggctttgcacatcataggtctctctacattttgttaaagaaattagtacattcaagtcaccttttttttttttttttttttgagacagagtcttgctctgtcgcccaggctggagtgcagttgtgcgatctcggctcactgcaatctccacctcccgggttcacgccattctcctgcctcagcctcccgaggagctgggactacaggcacccaccaccacacctggctaattattttgtattttcagtagagaaggggtttcactgagttagtcaggatggtcttgatctcctgatctcgtgatccgcccacctcggcctccccaagtgctgggattacaggcatgagccaccatgc

SEQ ID NO: 291114 - DNA, 535 bp, Homo sapiens
ctttcttcatttcctaggcattttcctctgagttcccacagtggcaaacattctcttacattaacctatgggacattgccccaaatatccattcaaatatcaggttctctgctatctgtgagccacttaagagcagtgagcatatttttggcttcagcattcttacagtctagcatagggctttgcacatcataggtctctctacattttgttaaagaaattagtacattcaagtcaccttttttttttttttttttttgagacagagtcttgctctgtcgcccargctggagtgcagttgtgcgatctcggctcactgcaatctccacctcccgggttcacgccattctcctgcctcagcctcccgaggagctgggactacaggcacccaccaccacacctggctaattattttgtattttcagtagagaaggggtttcactgagttagtcaggatggtcttgatctcctgatctcgtgatccgcccacctcggcctccccaagtgctgggattacaggcatgagccaccatgc

SEQ ID NO: 291115 - DNA, 1079 bp, Homo sapiens
tatgctctggatgaatctcactgctttcctacttgaaccctagccttctataagctgcttctgtgcacatggggaatgaaggttgtgcctcagagtgatcttctttagctcttctgacatccccctagcyttcagcctgctatgtctctgctccccatgaatacccataggtaaaggttaataggtaggtagagacattctgtgactgtgactgggggtcctcagtattctgatccttatgccaggccacatgtagccattaagaatccattaattaagtttcctccatcaacattccttatatccccagaagttatgttttaacttgttctatctatttcaacttgttctatttcaacttgttctgccaatatctgagagaaggtcttaaaagtctccaacaacaattatgtcaattgttgtttcatgtcaattgttgttcatgtactcataaagagaaattttaaaattttctaaattttctttccatatcttttccatcaacatggaaagaaaaaaataaaactgtgtgacgatwagtcagcttgaaaggagcctctatcagggcaaaataaattctactaaaattggtgcaagaccgaacatctaatttactgtgaaccttggaagaattgggaaatcattgaaagattatgagaacaatgtccccccaaaataagcagtttataaactgatattcattttaagaagagaagagatgatgttgaagatgaagcccacggcaacacaccatccatatcaatttgagagaaaaaattcatcttgtttgtgccctaattgaagatgactgatgactaacagcagaaacaataggaaacaccatagacatcwcaactggtttagcttacacaattctgactgaaaaattaaagttgagcaaacttcctactcaataggtactaaaaccattgcacccggaccagctgcaaacaaaggcagaactttcaatagaatttttaaataaatgagatcaagatcctgagaaatttctttgaagaaatgtagcaagagatgaaacatggctttactggcacaattctgaagtcaaaacacaatct

SEQ ID NO: 291116 - DNA, 541 bp, Homo sapiens
agtcagcttgaaaggagcctctatcagggcaaaataaattctactaaaattggtgcaagaccgaacatctaatttactgtgaaccttggaagaattgggaaatcattgaaagattatgagaacaatgtccccccaaaataagcagtttataaactgatattcattttaagaagagaagagatgatgttgaagatgaagcccacggcaacacaccatccatatcaatttgagagaaaaaattcatcttgtttgtgccctaattgaagatgactgatgactaacagcagaaacaataggaaacaccatagacatctcaactggtttagcttacacaattctgactgaaaaattaaagttragcaaacttcctactcaataggtactaaaaccattgcacccggaccagctgcaaacaaaggcagaactttcaatagaatttttaaataaatgagatcaagatcctgagaaatttctttgaagaaatgtagcaagagatgaaacatggctttactggcacaattctgaagtcaaaacacaatct

SEQ ID NO: 291117 - DNA, 616 bp, Homo sapiens
cttgttcttcctgtggggtccttggaatgctttccatccctccctgggtattccttttggatgattttattggaaaacattcacattgatctttggtttattccattgcttctctaaggagccaaagttaaaaaatgaccttgagctcaagtaacttctaatgtgtcacatctggaggcagggagataaagctctgtctgtggttgagagaagaaaaaatcctgccaaagcattgttctcaatggtttactgatgaaaatgataacaataacttcatctgttaataaagtgctttgcatttaccaagtgctttcatacacattatagcattggattctcaggaaaatgctcagggataggtgagcaaacrttattttttaaaaattattctcaaatggaaaaaataaggctctaaaatatatgtactttttctaaactgaccagcaagtgttgcagataacacttaaacttcaaacctgttttgtaacattaaaaaaaaaattaagatacaaaatgtcatttcacaggccagcaccctaaagtcattcattcaaatttatgaattttgacaattgtgtccatatgcatttgcattttatataaaaatcacaactac

SEQ ID NO: 291118 - DNA, 560 bp, Homo sapiens
gtgcatcccatgtgtatgtgtgtcatagcactacacaggtcacagccttcatttctggctattctttcatccagagcacctgcttcaaaatggattgggctgagctgggccatgtggcaactggctcctcatttcttccccaaagatgtatggtagaagacaagaaagaatgggctttcctaagtacaactttgttcaaatcagaaattgttttataatttggaagtcacttttcagaagcttgacttgtctttcagatagtatctgtccaaaaaagaaaaaagtaactgaataatgaatgagtcagcsactctatgagagcttgtccaaaatacatgcataaaaattctttcaagaaatgaactattgtaaggtggactttacagtttgccctcctgactcttcctaggtaacatgcccaagatcatcatagatatgtcaggaaagaagggggaaagagttagtttgcacacctgtgtcatccaaagtaggttggtgtctgcattctcttctcttaggtggattaacaaaggatcatgacacaaagtaaagaagcccag

SEQ ID NO: 291119 - DNA, 550 bp, Homo sapiens
ctagactgcttctgtgtgagaataactggaaatcctatgagaaaatacggaatgtgcagggtgaagagcaatcaaagactcctcattgagctggtgtcaccttccttctctttgaagcttctgatgatactcatggaacaaactatgggtttaaaaaaaaaaagcccactagtgactttagaggcctcttttccctcctctttccacatatgcaatcaactctccagcactaaaggtaacttccactggcctgaaactacagaccccctttggcttctgtttgacctgtttttggagggcagctttgcttctgggttctcttctcttcctctgtgttttcaagggagctcttctgcaaaaatgacttctctttgaactgacatggatatttttccaagacytagggtgtccactcactaggataaatccacatgagggtagcatgggagcctctccacgatgtgactggaagaaaacccaagcaccttgcccccacatcacccttcagccccctagtagccagtgctgtcttcaagattaggagctaaga

SEQ ID NO: 291120 - DNA, 490 bp, Homo sapiens
tgagaacaattggacccaaagaagaggggaacaacaaacactgggacctacttgagggtacagggtgggagaagtagcagaaaaaaaagactattgggtactaggcttagtccctgagtgatgaaataatctgtacaacaaacccttgtgcatgagtttacctatataacaaacctgcacatgcatccctgaacctaaartaaaagtttttaaaagaaagaagcccacgcgtccagatattaagctagccttgcttttcccattgtctttaaacagtagattcagaaccaggtctcccagggcaaggacacatcaccccggctcaaccatacttttcagggatttcctgcccagccagtactgcctggtgaggctcactctgaggagctaattggcctactggtacccctgtaaaaacaattataataatgagacacatttatgggcacctagggtgtaaaggcaaaatctgcctacaggatgacaaaaa

SEQ ID NO: 291121 - DNA, 540 bp, Homo sapiens
atccgagcatgtgtatgaacataaatgcttaggagacaaattgtaattgcccaagaagccacaactcttccagattaaatgccttacctccacttcctcaagaagtcctttcctcaaactgtggcctcagctaagccagagggtaagctgcttaaaacacacacacacacacacacacacacacacayacacggagagaaagagccactagagcaaacacacacctactataggcaaattctaactgtctccatccagaatatgtgtgatttatgagtctgtagtgaaaagagaaggtggtgattcctaacggtattaattaggtccgatcagtaaaaaaatggacaccaagccttcagaggatcccacaaaggaatcaactggctaatgacagcttttgcttcttctggaaaaccatacccaagaagcaggggcatcatttgcagtttttttctaccctctgtgctgggattctggtcaatgggaccacctgctaatgaggggcttccatgtgtcacatgcaatttttatgaaatgcca

SEQ ID NO: 291122 - DNA, 540 bp, Homo sapiens
atccgagcatgtgtatgaacataaatgcttaggagacaaattgtaattgcccaagaagccacaactcttccagattaaatgccttacctccacttcctcaagaagtcctttcctcaaactgtggcctcagctaagccagagggtaagctgcttaaaacacacacacacacacacacacacacacacacacacggagagaaagagccactagagcaaacacacacctactataggcaaattctaactgtctccatccagaatatgtgtgatttatgrgtctgtagtgaaaagagaaggtggtgattcctaacggtattaattaggtccgatcagtaaaaaaatggacaccaagccttcagaggatcccacaaaggaatcaactggctaatgacagcttttgcttcttctggaaaaccatacccaagaagcaggggcatcatttgcagtttttttctaccctctgtgctgggattctggtcaatgggaccacctgctaatgaggggcttccatgtgtcacatgcaatttttatgaaatgcca

SEQ ID NO: 291123 - DNA, 514 bp, Homo sapiens
ccaatgccaattacttataataaatccctttatacacacacactgtgaatagatttcaaaattttttcamcaaaataactcatactgacttgttataagatgtctaactagaatctagtttgagacactaagagggataagacatcagttcaaaaagagtccctagcagagcaacataaattctgctaaaattgaaagaaaaggaaacatccaatttatgatgaagcttaggtgaaagaatggtgaaatcattgatgctttatgaaaagtttagggggacaatgcctccaaagaaatcagaagtttataaatggataactcattttaagaaagaatgagagaatattaaagaagaagcccacattggcagaccatccacaccaatttgtgaggaaaaatttcatcctttttgtgcctcaattgaagaggactgatgattaacagcagaaacaatagcccgaaccataaacatctttattggttcagattatacaattccgactaaataataaaa

SEQ ID NO: 291124 - DNA, 455 bp, Homo sapiens
cacatccaaatgcacaaactataaaagaaggaagaggcagtaccggcaccaagctctttggtttctgcatctggccggtgtccactgggagaaatgtaagtcagartttaccacatggattacaaatgtgctgaattgcaagaatgattattaaatgaacatatccatagcacctgcaacttgtcccggaaaattcccccagggtgttgtgggtgcttttctaaaaaaattttttaaggaaaaaaaggaagacagagtgagatgcaaatggcaactccagctgtttatagtagcaactccattaatgttcctgaagggtttgcagagtcaattcagtcaatctgagctgcttccattctcagcatgagtgtgaggagtgggggctaggggaatatcattagcctctttcctttgaggtttggatgatcaagacaatgaaaataatagtaatgtaa

SEQ ID NO: 291125 - DNA, 591 bp, Homo sapiens
tttctacataagtagactcacaatacatttttggtgagttgcttttttaaaaataaacttttcattttatttatttaactactttggaagagttttatatttacagaaaaattgtgaaggtgatacagagacttcccatataccccatacccagtttctcctactattcacatcttacattactatggtatattggtcataattaataaaccaacactggtaaattgttattactaaaggccatactgtattcagatgtccttagttttgactccgtgtcctttttctgatctaagatcccacccaggataccatatcacatttaattgtcatgtgtcttttggctcctgtttatgtgacagtttctcagatttttctttttttatattgasaggtttggaaacactggacgggtgtcttgtagaatgcccttgatagagtctggatgttgttccctctaaatctcctgttgcattataatctccaatattggagggggagcctggtgggaggtgatgggatcatgggagtgaatttttcatgaatagtttagtggcatccccttagtactgtcctcactatagtgaatga

SEQ ID NO: 291126 - DNA, 611 bp, Homo sapiens
tataataggaacccttgtacactattggtaggaatgtatattagtatggccaatatggaaaacaaaacagaagttcctcagaaaattaaaaatagaactaccatatgatccagcaatcccactactcagtatatatccaaaaatataaaatcagtgtattaaagaggtatctgcactcccatattcattgtagcattattcacactagccaagatatgaaattaacctaagttcccaccacagaatatatggatatacacaaaatgtggtatataaacacactgaaaaactattcagcctttaaaaagaaggaaatcctgtcattcatgaccacgtgaatgaacctggaggacagttaaataatccagacacagaaagasagacaccacacggtctcgtttatatgtggaatataaaaaagttgaactcagaaacacagagtaaaatggtggttaccagaggctagcaggtagggaaattcaggagatgttggttaaaggacacaaaatttcagttaggcaggagaaataagttcaagacatctattgttcaacatggtaactacagttaataacaatatattgtgtacttgaaaactgctaaaagagcag

SEQ ID NO: 291127 - DNA, 606 bp, Homo sapiens
tcggtttgcattacaacatttgggaccactgctccataccatgagtattgttttatttccataaaatctttatgtcaacatgaccagtgagtagaggtagtgtgattggtccagaccccagacttcttaggggttgtactttcatcttgtcttctcttttctctcctcatttcctccatcactccttccccttcccctcctttccccttttcctctcttctctgagttacttcccctctctctgaaaactgcttggtgcctctttccagagagggcattgttactggacttttctgtacttttgtcccctcatctataaaatggaaccaagaatcatctctaggttattgtagggatccaacaggacactctatattaatggacttagcaaaaaaattgacatgtggtaagtgttctaaaaatggagaagtaacaatgatacttgtcaaagaaaaattgtamccagagagagttaaatggacaagaaagactttatttaagactaccttagtggtagagacaggtctaactcaatgccactgaatcaaaaggagagaggagggagcagggagtgggagatcaaggtgattagcatggatgtttgct

SEQ ID NO: 291128 - DNA, 639 bp, Homo sapiens
aacataggcaatgtttttctgacttcatgccaatttttccacaaaaaatattttccctactcatctctactagttaaaaatggcacctaacctttgaagcccatgtcatatgttatttctttattcaagtgtgcctacctttctacaatttgagatagtctcatgtcatgaatctcatctccccaccacagaaattacaaatcatatcctcagattccttcacagctaggaagctgtcatgtgactgaatctagtcaatcaggagtagccacttgagatactgattcaaaaaagagcgacggagagttgactatgctcagaggaaagratctcctggcaaggatggcataagaagcatttggttgtcaggcatggtggctcacgcctgtaatcccagcactctgggaggccaaggcgggtggatcgcttgtaaggtcaggagttcaagaccagcttggctaacatggtgaaaccccatctctactaaaaatacaaaaaattagccaggcttggtggcaggcacgtataatcacagctactcgggaggctgaggcaggagaattgcttgaacccaggaggtggaagttgcagtgagccaatattgcgccattgcactccagcctggccaaaaagagtgaa

SEQ ID NO: 291129 - DNA, 639 bp, Homo sapiens
aacataggcaatgtttttctgacttcatgccaatttttccacaaaaaatattttccctactcatctctactagttaaaaatggcacctaacctttgaagcccatgtcatatgttatttctttattcaagtgtgcctacctttctacaatttgagatagtctcatgtcatgaatctcatctccccaccacagaaattacaaatcatatcctcagattccttcacagctaggaagctgtcatgtgactgaatctagtcaatcaggagtagccacttgagatactgattcaaaaaagagcgacggagagttgactatgctcagaggaaagaatctcctggcaaggatggcataagaagcatttggttgtcaggcatggtggctcacgcctgtaatcccagcactctgggaggccaaggcrggtggatcgcttgtaaggtcaggagttcaagaccagcttggctaacatggtgaaaccccatctctactaaaaatacaaaaaattagccaggcttggtggcaggcacgtataatcacagctactcgggaggctgaggcaggagaattgcttgaacccaggaggtggaagttgcagtgagccaatattgcgccattgcactccagcctggccaaaaagagtgaa

SEQ ID NO: 291130 - DNA, 1194 bp, Homo sapiens
aacataggcaatgtttttctgacttcatgccaatttttccacaaaaaatattttccctactcatctctactagttaaaaatggcacctaacctttgaagcccatgtcatatgttatttctttattcaagtgtgcctacctttctacaatttgagatagtctcatgtcatgaatctcatctccccaccacagaaattacaaatcatatcctcagattccttcacagctaggaagctgtcatgtgactgaatctagtcaatcaggagtagccacttgagatactgattcaaaaaagagcgacggagagttgactatgctcagaggaaagaatctcctggcaaggatggcataagaagcatttggttgtcaggcatggtggctcacgcctgtaatcccagcactctgggaggccaaggcgggtggatcgcttgtaaggtcaggagttcaagaccagcttggctaacatggtgaaaccccatctctactaaaaatacaaaaaattagccaggcttggtggcaggcacgtataatcmcagctactcgggaggctgaggcaggagaattgcttgaacccaggaggtggaagttgcagtgagccaatattgcgccattgcactccagcctggccaaaaagagtgaawaagtgtatagatggtgataaatgctaatacaaatattgaatgaggctgagatagtggagggagtctatgggagggcacagtggtaattttaaatgagctggctagggcwttgttgccaactagtatttgggtaaaaccataaaggagtgcggaagtcattcacgcagatatctggggaagaacatcccagaacattacaaaggaacgctgaggaactgacatgctggaaaagaagcctagaagccaagattgaagtagtttgagccacaggagcccaggaagggatcaggtgagagagatagcaagaaactgatcaggaagcacctttggaccagtgtaaggaccttggcttctatgctaagtacaatgggaaatcacaggtgcattatgaacatcaaagaaacatgatttgtactgtagttttaaaggaaaaatttggtcttctgctgagtatagacagtagcaaaaaagatagtatacagactcaacaaacataagccattattactgactttattatgttatggtacattttgtacaactgccatggaaca

SEQ ID NO: 291131 - DNA, 616 bp, Homo sapiens
gtagctctcaaaccatgacaccacatcagattgcacttctgatctactgaagcaatatttctgggtattagttccaggaatcactattccttacaagatctccaggtgccgctggtaagtatccaattttgtgcagctccagagtgtgagggactcatgatyaaaactgatgggacacaaagcaagcattgatgtgacttctccacaagcatataaataaaagcctgtgaataacataccatatctgatagacgtatttttggggcaagcaacaacaaacaacaaaatctgattaacagtagattaaacaataggtgctatttttgcctctcattacaagaatcttgagttaggtgtttgctggcatcggttcagtagctctgcagagccctcaaggatccaggttatttctccctttatctttcaccatcctcacacgcttgctttcttcctcatgcttataactccatgtttgcgtaacactgacacagcttcaggcatcacattcacatgcaaggcaagatgaagagtcaagggctcttctctttatctagaaagaaaagtctctctcaggagctcactcagaatactttttgtttttccttggccagcactt

SEQ ID NO: 291132 - DNA, 1233 bp, Homo sapiens
gtagctctcaaaccatgacaccacatcagattgcacttctgatctactgaagcaatatttctgggtattagttccaggaatcactattccttacaagatctccaggtgccgctggtaagtatccaattttgtgcagctccagagtgtgagggactcatgattaaaactgatgggacacaaagcaagcattgatgtgacttctccayaagcatataaataaaagcctgtgaataacataccatatctgatagacgtatttttggggcaagcaacaacaaacaacaaaatctgattaacagtagattaaacaataggtgctatttttgcctctcattacaagaatcttgagttaggtgtttgctggcatcggttcagtagctctgcagagccctcaaggatccaggttatttctccctttatctttcaccatcctcacacgcttgctttcttcctcatgcttataactccatgtttgcgtaacactgacacagcttcaggcatcacattcacatgcaaggcaagatgaagagtcaagggctcttctctttatctagaaagaaaagtctctctcaggagctcactcagaatactttttgtttttccttggccagcacttwgtagctctcaaaccatgacaccacatcagattgcacttctgatctactgaagcaatatttctgggtattagttccaggaatcactattccttacaagatctccaggtgccgctggtaagtatccaattttgtgcagctccagagtgtgagggactcatgattaaaactgatgggacacaaagcaagcattgatgtgacttctccacawgcatataaataaaagcctgtgaataacataccatatctgatagacgtatttttggggcaagcaacaacaaacaacaaaatctgattaacagtagattaaacaataggtgctatttttgcctctcattacaagaatcttgagttaggtgtttgctggcatcggttcagtagctctgcagagccctcaaggatccaggttatttctccctttatctttcaccatcctcacacgcttgctttcttcctcatgcttataactccatgtttgcgtaacactgacacagcttcaggcatcacattcacatgcaaggcaagatgaagagtcaagggctcttctctttatctagaaagaaaagtctctctcaggagctcactcagaatactttttgtttttccttggccagcactt

SEQ ID NO: 291133 - DNA, 616 bp, Homo sapiens
gtagctctcaaaccatgacaccacatcagattgcacttctgatctactgaagcaatatttctgggtattagttccaggaatcactattccttacaagatctccaggtgccgctggtaagtatccaattttgtgcagctccagagtgtgagggactcatgattaaaactgatgggacacaaagcaagcattgatgtgacttctccacaagcatataaataaaagcctgtgaataacataccatatctgatagaygtatttttggggcaagcaacaacaaacaacaaaatctgattaacagtagattaaacaataggtgctatttttgcctctcattacaagaatcttgagttaggtgtttgctggcatcggttcagtagctctgcagagccctcaaggatccaggttatttctccctttatctttcaccatcctcacacgcttgctttcttcctcatgcttataactccatgtttgcgtaacactgacacagcttcaggcatcacattcacatgcaaggcaagatgaagagtcaagggctcttctctttatctagaaagaaaagtctctctcaggagctcactcagaatactttttgtttttccttggccagcactt

SEQ ID NO: 291134 - DNA, 592 bp, Homo sapiens
gctgacttccccttctgccacgattgtaagtttcctgaggcctcccagtcaggcttcctgttaaggttgtggaactgtgaattaattaaacctcttttcttaagaaattacccagtctttggtagttctttatagcagtgtgaaaatggactaatacagtatccatatatttatctcgctagtatcaatggtcctttactgagatttttttagctattttcttctagaaaactcattttctcagtacctcagtcagtactcttaaaggtggatgttttggcmacaagaaagagaaactccatcagaagtaccaagaaaaagctctgagctcattttctgtgtacttaaggtcagaactacatcagagcaaacacacactgcctatttgaatacacaacataaaagaagggcaatccatcattcattaagttcccctcaaacacacttgcacctgcagatttcctggaggttcttttttttttctcttccttagggggagggtcttgaagtaccaggactctcaagcacctggaggccaacaactgcagatgtctgcctgaaggcaaagatttgatcaggtttatgaaaccag

SEQ ID NO: 291135 - DNA, 590 bp, Homo sapiens
atacacaacataaaagaagggcaatccatcattcattaagttcccctcaaacacacttgcacctgcagatttcctggaggttcttttttttttctcttccttagggggagggtcttgaagtaccaggactctcaagcacctggaggccaacaactgcagatgtctgcctgaaggcaaagatttgatcaggtttatgaaaccagcatggtatgccctaaaaaaacaatgatctacagagattataaagcttgaagtgtttttaatcctgaagatatgcaaactatatgcctacaaaagatttgggagattctgcaacaaaaatatagartgattttcaaatgcatcctatcaagaagtagaattttggttgacattaagggttttgtgtgtgatagcacttcattttatgttgtgtgaatatagtaagagaatctatgataattgcaaatgtgtcttcagtagagaagaaaagaaggttctttatggccacatgttcagaatctgtattattgttaatagcccaaatttggactctgaattttccccagaatttaaactatcaggtttttaaagtaaaaatatatcattat

SEQ ID NO: 291136 - DNA, 443 bp, Homo sapiens
ccagagttatctttctaaaattccagtcgaaccatgttttctgcttgaaagtatttgatgggtgtccattcacatagaagacaragtcaatccctgcagcttggcattagaggcctttcctcatctggatcctgtcgaaatttccagcctcttttatcgtgatccagcttactctcagccacatgacacttttcactatctgcttgagcagacccactcttgtgtgtggtcccctccatgtggaatgccctctttctaccaaggtctacatatctcacacaactcctccagagggtttttcccttgtcttagctcttcccatttctactcagaaagaaaaaaaaaatcagtgctcccatcctgaacttgttgcgttctgatagataattatgttctcaccagtatgtcctaccaggctgtgaactgagttccttgatggaaag

SEQ ID NO: 291137 - DNA, 443 bp, Homo sapiens
ccagagttatctttctaaaattccagtcgaaccatgttttctgcttgaaagtatttgatgggtgtccattcacatagaagacagagtcaatccctgcagcttggcattagaggcctttcctcatctggatcctgtcgaaatttccagcctcttttatcstgatccagcttactctcagccacatgacacttttcactatctgcttgagcagacccactcttgtgtgtggtcccctccatgtggaatgccctctttctaccaaggtctacatatctcacacaactcctccagagggtttttcccttgtcttagctcttcccatttctactcagaaagaaaaaaaaaatcagtgctcccatcctgaacttgttgcgttctgatagataattatgttctcaccagtatgtcctaccaggctgtgaactgagttccttgatggaaag

SEQ ID NO: 291138 - DNA, 1028 bp, Homo sapiens
  misc_feature (1)...(1028): n = A,T,C or G
ccagagttatctttctaaaattccagtcgaaccatgttttctgcttgaaagtatttgatgggtgtccattcacatagaagacagagtcaatccctgcagcttggcattagaggcctttcctcatctggatcctgtcgaaatttccagcctcttttatcgtgatccagcttactctcagccacatgacrcttttcactatctgcttgagcagacccactcttgtgtgtggtcccctccatgtggaatgccctctttctaccaaggtctacatatctcacacaactcctccagagggtttttcccttgtcttagctcttcccatttctactcagaaagaaaaaaaaaatcagtgctcccatcctgaacttgttgcgttctgatagataattatgttctcaccagtatgtcctaccaggctgtgaactgagttccttgatggaaagwctgaatgaacacaggtattttatatcctaccaattttaaaaggcatagtttatttgagcacatttatgaaaagaaacaagttggatatatggnnnnnnnnnnnnnnnnnnnnnnnnnnnnnnnnnnnnnnnnnnnnnnnnnnnnnnnnnnnnnnnnnnnnnnnnnnnnnnnnnnnnnnnnnnnnnnnnnnnntgcttttctcaccaatatcatagtgatattgtgagaaatgaagaggaagaatgcatttaaagcacttcatacaaccctggcactcagcaaaagttaacactattgtcataatagctaagctttcttcatagactgtgtagaattgaagagttcatctatacagtggacagttcagctgctgagtttccttttatctctgttattttgtgattattttattatgttaagtgatcatctttatgtggagcattcaagtctttcctacagtcttctttctagagtttcaaaagatttatacctcacatcatattaagtgaagggcatccgtgattcccatttataataaaagagaatgagatcacctttgtaacatttwcctcacttctatagcc

SEQ ID NO: 291139 - DNA, 616 bp, Homo sapiens
aagtttaaatagggttcaatttcggccaggtgcagtggctcatgcctgtaattccagcacttagggaggccaaggcaggtgcatcatctgaggtcaggagttccagaccagcctggccaacatggtgagacgctgtctctactaaaaacacaaaaattagctgggcgtggtggcgtgcacctgtaatcccagctactcrggaggctgaggcaggagaatcacttgaacccgggaggcagaggttgcagtgagccgagactgtgccactgtgctctagcctggatgacaagagtgagactccagctcaaaaaataaataaataaaaataagtaaatagtgttcaatttaatttgaaatggttttcctctgtgtccccacccaaaactcatcttgaattgtaatccccacatgtcagaagagggacctgctgggaggtgattggatcatgggggcagtttcccgcatgctgttctcatgatagcaagagagttctcatgagatctaattgtgtaaaagtggcagttttccctgcatggtctctctctcctgccaccttgttaagacgtaccttgcttccccttcaccttcctccatgattttaagtttcctgaggcct

SEQ ID NO: 291140 - DNA, 616 bp, Homo sapiens
aagtttaaatagggttcaatttcggccaggtgcagtggctcatgcctgtaattccagcacttagggaggccaaggcaggtgcatcatctgaggtcaggagttccagaccagcctggccaacatggtgagacgctgtctctactaaaaacacaaaaattagctgggcgtggtggcgtgcacctgtaatcccagctactcgggaggctgaggcaggagaatcacttgaacccgggaggcagaggttgcagtgagccgagactgtgccactgtgctctagcctggatgacaagagtgagactccagctcaaaaaataaataaataaaaataagtaaatagtgttcaatttaatttgaaatggttttcctctgtgtccccacccaaaactcatcttgaattgtaatscccacatgtcagaagagggacctgctgggaggtgattggatcatgggggcagtttcccgcatgctgttctcatgatagcaagagagttctcatgagatctaattgtgtaaaagtggcagttttccctgcatggtctctctctcctgccaccttgttaagacgtaccttgcttccccttcaccttcctccatgattttaagtttcctgaggcct

SEQ ID NO: 291141 - DNA, 555 bp, Homo sapiens
ggtttcacaatattggccaggctggtctcgaactcctgacctcgtgatccacccaccttggcctcccaaagtcctgggattataggaatgaaccaccttgcccggccctggtctccattttaatttgctttaacaattataactagtgctgagattagcaagcttgtttattagaatgttttctaattgttgcttagcatcaatttctgtaattaaaaaaaaacctaaactaacataataaacattacaatttagctatttgccatggtatcagatgagatctcaggagctcactacaaattttacttatttcagccaaactgaaaattacagtactgtgtgtgtgtgtgtgtgtgtgtgtgtgtgtgtgtgtgtgtgtgtgtttgtgtgtgttgtgtgtaatggggagagakaaaggacaaaaagagaaaaagaaaaattaatttggtacagagatttggccaaaaactagagttgggtcagttttgtacattttaatatattctgagtcttcatccttaagttacctttttttttttacatttttagaaatga

SEQ ID NO: 291142 - DNA, 1135 bp, Homo sapiens
tgtggtaaaagttagtaaatatttgtagatgttgaatatataatccaggacttggctgtcatgccaccttargcaacttgatgattctgtgttccgtttttggtgatgttgttttgagatggagtctcactctgtcacccaggctggaatgcagtggcatgatgttggctcactgcaacctccacctcccaggttcaagtgattctcctgcctcagcctcccaagtagttgggactacaggcgtacatcaacacacctggctaaattttttggtatttttaatagagaagggggtttcaccttgttgcccaggctggcctcgaacttctggcctccagtaatgcacccccctcagcctcccaaattgccaggattacaggagtgagccaccacgcacagccggattctctgttccttgaacttcatcacattgatgccaaagtccatatggaattggcatagcatactagagccccaaactcctgaggtcaaaggatccagctctctcagactccatgtagcaaacatctgtactacaaccaattttatccaggwggactgttctaagactgaatttatactttcacttagattccatagtcttcaaaataggacttatttggctattttttaaaaataaattttaaacctacattagcaggcaaataaggaaacgtgtgcttagcttcacttaaaaatttgttggaaatggttttacaactaagcaatcttcagaattttaaagccaatgcacwaagacttaataaaatgcaagcaaaactccatgaagcagttttgaaactctacatcttaagtggcattgcaccaaatccttataagttgttcaaatgaaaaataagtttttctaacactagctttgtaaatacttagttatcaaggcaagaaagcatgagattcacctttaagtgtataccatctttaagttttgcttcacaagtaacctgtccctgaaaaggaaaggaggaagagggaacttggggatttatagttatcaattattaccaaaacattattaataccattattgcccttagtcataccctgggtcctctggcagtgataaagagtaaaatcataggataagggatggagttgggagatgaaggaggcaaaa

SEQ ID NO: 291143 - DNA, 642 bp, Homo sapiens
tggttttattttgatgtgtaaagaggcactgagagagttcaaatttcatcaactgcaaattgagaggaaaaaatcttttaattcaaaatcttttcatgataaaaatttttggttgggcacagtgtctcatgcctgtaattccagcattttgggaggctgaggcgggcagatcacttgaggtcagaagttcaagaccagcctggccaacatggtgaaaccctgtttctactaaaaataataaaaaaaaattagccaggtgtggtggtgcgtgcctgtaatcccagctactcaggaggttgaggcaggagaattgcttgaacctatgaggcagaggctgcagtgagccaagatcgctccactgaactccagcgtgggcgacagggcgagatgatgtctaaaaaaaaaaaaaccctttttcaacaaactaagtatagaagaaatttatctcaacataataaaggccataygtgaaaactcacagctagcattatactgaaggatgaaaaactgatagcttctcctctaagatcaggaactaggcaaggatgcctactcttgcaactcctattcaacatgcagctggaacccccagccagagcaattaggcaggaaaaataaatgaaaggcatccaaatcagaaca

SEQ ID NO: 291144 - DNA, 642 bp, Homo sapiens
tggttttattttgatgtgtaaagaggcactgagagagttcaaatttcatcaactgcaaattgagaggaaaaaatcttttaattcaaaatcttttcatgataaaaatttttggttgggcacagtgtctcatgcctgtaattccagcattttgggaggctgaggcgggcagatcacttgaggtcagaagttcaagaccagcctggccaacatggtgaaaccctgtttctactaaaaataataaaaaaaaattagccaggtgtggtggtgcgtgcctgtaatcccagctactcaggaggttgaggcaggagaattgcttgaacctatgaggcagaggctgcagtgagccaagatcgctccactgaactccagcgtgggcgacagggcgagatgatgtctaaaaaaaaaaaaaccctttttcaacaaactaagtatagaagaaatttatctcaacataataaaggccatacgtgaaaactcacagctagcattatactgaaggatgaaaaactgatagcttctcctctaagatcaggaactaggcaaggatgcctactcttgcaactcctattcaacatgcarctggaacccccagccagagcaattaggcaggaaaaataaatgaaaggcatccaaatcagaaca

SEQ ID NO: 291145 - DNA, 601 bp, Homo sapiens
  misc_feature (1)...(601): n = A,T,C or G
aataattgtaaaccactggcctctgcacagctttttctttgaaacagtcttgagtgggtastgaggagagccaagaaagcaaacaggactgcaagaaacagagaatggttgattcgcctcagtgctgacatgctggataaaaagatgggtgacctgaagtgaggaatgaggaggggctataaccaagtcaatgagacagttgaggagctttttcagaatccactactgagtaagtgttaggcagatgcctgctaccaacaggtattgccagaaaaggaaggaagagccagtgaaggatgtaaggagacagcaagaggaaaagagcttcatgaagaggccagacctgcgcggagcttgtgatagaactacaatgaaagtgtatgcggccccaagtccagctcagactattttctaaaggagggagaaatgaactacttgatgaaacagattgataattttttgtatatgaggatgaggggaatccaggaaagtctttattaaagccactttgttttaaccggacaatgatattcccgntgtggtcctcttgaagcctgggccttcatcagtgcataatacaaagcatctctcattgtatggg

SEQ ID NO: 291146 - DNA, 1050 bp, Homo sapiens
ccagccacaatcagacaaatactgcatgtttcctcttgtgcaaggtgtctaaaatagttaaattcatagaaacagagagtagaatggtgattgccagggactgggagggaaagaaaaatggagagttgttcagcaggtatatagtttaatttatgcaagatgaataygtttagagatcttctgtaaaacttggtgcctatagttcgcaagactgtattgtgcacttaaaaatttgccaagagggtagatctcatgtgaagtgtttttatcacaataataagaaaaaaccccaaacttttccctgccttttttataaggttgtgataggtgatgcagtgatggtataattccccctgacatttttgaaaacagtaaggtacaataaaactacttcgggttctattattattgctattttaatactgtttaatactgatggaaagcttatacttcagaatcttctggcgatggctgtgcwtccaccttaatccacctgggactctgagtaggcctcatctctccctaggagaggaggtgtgtgcccctctctgaggcccagccttcccwgccatggcctggagggccccaggtcctaacctctcctctccagggaccctgacgacagcagtcccctccccatcatctcatgctccctgtgtttgtgtttgcctcctttttagggatttatttctctacaagggacacaggtgactgaacttcctcctggccccgaggacccagggaagcacctctttgagatcagcccaggtaggcctgagcaccttccagctctgcagccctggtgggggtgttgccatgcccctggcctgggaagggcagaccttcgtgacactcctcccgcaggagccacagcacagtctccaggcatgactcggaaatgtgggccaaatcgacagcatactcacatggggaagaaattagaaagtcccatcaattatctggacaatgagcttttgggtaatgcgaaacgaggatttttaaattcacgataaatgcaaggaaagaaattagtcaatgggaacatctcag

SEQ ID NO: 291147 - DNA, 572 bp, Homo sapiens
tccaccttaatccacctgggactctgagtaggcctcatctctccctaggagaggaggtgtgtgcccctctctgaggcccagccttcccagccatggcctggagggccscaggtcctaacctctcctctccagggaccctgacgacagcagtcccctccccatcatctcatgctccctgtgtttgtgtttgcctcctttttagggatttatttctctacaagggacacaggtgactgaacttcctcctggccccgaggacccagggaagcacctctttgagatcagcccaggtaggcctgagcaccttccagctctgcagccctggtgggggtgttgccatgcccctggcctgggaagggcagaccttcgtgacactcctcccgcaggagccacagcacagtctccaggcatgactcggaaatgtgggccaaatcgacagcatactcacatggggaagaaattagaaagtcccatcaattatctggacaatgagcttttgggtaatgcgaaacgaggatttttaaattcacgataaatgcaaggaaagaaattagtcaatgggaacatctcag

SEQ ID NO: 291148 - DNA, 572 bp, Homo sapiens
tccaccttaatccacctgggactctgagtaggcctcatctctccctaggagaggaggtgtgtgcccctctctgaggcccagccttcccagccatggcctggagggccccaggtcctaacckctcctctccagggaccctgacgacagcagtcccctccccatcatctcatgctccctgtgtttgtgtttgcctcctttttagggatttatttctctacaagggacacaggtgactgaacttcctcctggccccgaggacccagggaagcacctctttgagatcagcccaggtaggcctgagcaccttccagctctgcagccctggtgggggtgttgccatgcccctggcctgggaagggcagaccttcgtgacactcctcccgcaggagccacagcacagtctccaggcatgactcggaaatgtgggccaaatcgacagcatactcacatggggaagaaattagaaagtcccatcaattatctggacaatgagcttttgggtaatgcgaaacgaggatttttaaattcacgataaatgcaaggaaagaaattagtcaatgggaacatctcag

SEQ ID NO: 291149 - DNA, 572 bp, Homo sapiens
tccaccttaatccacctgggactctgagtaggcctcatctctccctaggagaggaggtgtgtgcccctctctgaggcccagccttcccagccatggcctggagggccccaggtcctaacctctcctctccagggaccctgacgacagcagtcccctccccatcatctcatgctccctgtrtttgtgtttgcctcctttttagggatttatttctctacaagggacacaggtgactgaacttcctcctggccccgaggacccagggaagcacctctttgagatcagcccaggtaggcctgagcaccttccagctctgcagccctggtgggggtgttgccatgcccctggcctgggaagggcagaccttcgtgacactcctcccgcaggagccacagcacagtctccaggcatgactcggaaatgtgggccaaatcgacagcatactcacatggggaagaaattagaaagtcccatcaattatctggacaatgagcttttgggtaatgcgaaacgaggatttttaaattcacgataaatgcaaggaaagaaattagtcaatgggaacatctcag

SEQ ID NO: 291150 - DNA, 506 bp, Homo sapiens
tattccttttcatctaatgcaagaatctttgtggtaaaactgcacatcagaaggtggtaacaaagggatcctggggtatggagtagaaaacagaggytgactgtggaaccaggagaaaaggcctcagctattcagatagagaagaaatgcaagtagtgacgtaggcagggccctgccatctaggcgaggggtgtggcccctggctctggggacaggggtagtgactcaaggccagaactagaaggtagaggtcaacacactccagccatcaattcagaaaggcactgagtgtgtgctccataggccagataagggacatcacctgtgtgcatgttcattatctgggtcagagctatttacaagaatttatttgactcttgccagtggtgttgggggtgttgggggcggtaggagaagaccctttgccatataaggtaacatagtcacaaggttccagaaattagaagatggacatctttgaggaccattattctgcctcccacaat

SEQ ID NO: 291151 - DNA, 506 bp, Homo sapiens
tattccttttcatctaatgcaagaatctttgtggtaaaactgcacatcagaaggtggtaacaaagggatcctggggtatggagtagaaaacagaggttgactgtggaaccaggagaaaaggcctcagctattcagatagagaagaaatgcaagtagtgacgtaggcagggccctgccatctaggcgaggggtgtggcccctggctctggggasaggggtagtgactcaaggccagaactagaaggtagaggtcaacacactccagccatcaattcagaaaggcactgagtgtgtgctccataggccagataagggacatcacctgtgtgcatgttcattatctgggtcagagctatttacaagaatttatttgactcttgccagtggtgttgggggtgttgggggcggtaggagaagaccctttgccatataaggtaacatagtcacaaggttccagaaattagaagatggacatctttgaggaccattattctgcctcccacaat

SEQ ID NO: 291152 - DNA, 568 bp, Homo sapiens
gaggtcttggaacttgatacagcatacacctctggttccaaaagcacctgagaacctgcacatccagccactgagcaagacacagagaaaacactcttataagggggytttagtgccagtgggacttctgtcctcttgtggctgtggcctgccactgctttcccgacatggtcagtatataaagcgtactgagaggtgggagcaattgctttgggcagaggtgacggtctcctccctgaagctgcggggacacgcaggaaaaccacttataaagtttaagggaggctgagagaaagggtgactggcatttgtgtcttgcttggacagttgcttacacacaagatttgcttttcatggttacccaggcaaggaaaatctgactgaggactgatggcaaatggggttctgccaggcacacctcctgccgtaagcatccagttctcaagaggagcagaatgtgaagcctctgtgggaccacaggcctgggcactgatggagaaaagaggatgacatgggccctcagactttctagaattctcatagtgcagggcagacaggcaagatgcca

SEQ ID NO: 291153 - DNA, 568 bp, Homo sapiens
gaggtcttggaacttgatacagcatacacctctggttccaaaagcacctgagaacctgcacatccagccactgagcaagacacagagaaaacactcttataagggggctttagtgccagtgggacttctgtcctcttgtggctgtggcctgccactgctttcccracatggtcagtatataaagcgtactgagaggtgggagcaattgctttgggcagaggtgacggtctcctccctgaagctgcggggacacgcaggaaaaccacttataaagtttaagggaggctgagagaaagggtgactggcatttgtgtcttgcttggacagttgcttacacacaagatttgcttttcatggttacccaggcaaggaaaatctgactgaggactgatggcaaatggggttctgccaggcacacctcctgccgtaagcatccagttctcaagaggagcagaatgtgaagcctctgtgggaccacaggcctgggcactgatggagaaaagaggatgacatgggccctcagactttctagaattctcatagtgcagggcagacaggcaagatgcca

SEQ ID NO: 291154 - DNA, 568 bp, Homo sapiens
gaggtcttggaacttgatacagcatacacctctggttccaaaagcacctgagaacctgcacatccagccactgagcaagacacagagaaaacactcttataagggggctttagtgccagtgggacttctgtcctcttgtggctgtggcctgccactgctttcccgacatggtcagtatataaagcgtactgagaggtgggagcaattgctttgggcagaggtgacggtctcctccctgaagctgcggggacacgcaggaaaaccacttataaagtttaagggaggctgagagaaagggtgactggcatttgtgtcttgcttggacagttgcttacacacaagatttgcttttcatggttacccaggcaaggaaaatctgactgaggactgatggcaaatggggttctgccaggcacacctcctgccgtaagcatccagttctcaagaggagcagaatgtgaagcctctgtgggaccacaggcctgggcactgatggagaaaagaggrtgacatgggccctcagactttctagaattctcatagtgcagggcagacaggcaagatgcca

SEQ ID NO: 291155 - DNA, 599 bp, Homo sapiens
cacatctcttgaatgatgccaactggaaggtgcctttagtgtcccaccaataggactgcctgcctggaccagcttggcttcctgggtgcataacatggtctatactccagtgcactggcccagcctctctctttagtgtgacactctgcctgcctgcctgaccccacagcctgttctacacagggggacacttccattgcctttgggggctccaggatgccgcctgtcctgcagcgggctagctgcatggatctagactccargctgactctcagcagggtcatgctcttagcaggaggctcaagaagatcaggctggtgctgggcaccacggttctgtgacacagagacacagaaggatgtgcacagaagtccctcagatggtgatagcgcaccgggcaggaaggggtgatgcgcaggaggaggtatgcttgtgccagcgcagaacaaagatgtagataaaattctttatgagtgatctcagctagactaaatccctagataaattaggatgtggggaggaatgtggcaggggattagtaggtgggggttgaatgacccaggtcacctctgagaaaccaaacccaagtacagagcctc

SEQ ID NO: 291156 - DNA, 502 bp, Homo sapiens
tcataccattgtggcattgggagtgacactgccagggccactggccctccgcagcagggcccatgctcactagtcttggaatccagtccacactctcaggggccrgaagaccaagctcctgttcctgctgtccactcctggcgggtctcccatcttcctgcaccccctctctgcctagcacctccatccatgcagcatgctgctccagccatgctgtatcatttacttggcccgaggcactgcccctgggacttccggtgccgctcccggaggcctgcggtcaggtgggaagaacagagctgcaggcatccaagagaccgaggagaggacctgctgcttcccccctgtgtgcgccaccttgaaaagtcacctcatcttcctgagtttcactggatggtgacagtaatgacctttgcaggcccttggcagacattttggaatacagcagtgcctggcacacagcagatgctcaataaacatgagaacctcccgtcaagtcagc

SEQ ID NO: 291157 - DNA, 596 bp, Homo sapiens
gaggacactgaggtcctagaaggagcctgggtccctgagtgaccacatggagcagccccactccctcttcccttttcatgctgacctgcaggagccagtgacctgagcaagaagagtctttaggggattaagccactgagatttgggagctgttagagcagcaagcatgaattacctgattgatgtgcccggtttccttatctgtaaaaggaggttatcaacatcattctcagggttgttgtgtcaatgacttatgattcagtgaaaacacaaacccaggatctgacacattctaggtaactgaggtccctccttacagtgtcagcagcagccacagcagcaacagtgcaaggagcactagttaactcccagtgtgcacagtactatgccccagctaagtggaccagacaccagatgggcctagttcatatacagggtctcatgtyctatagcatgggggtgctgggagccttaaaaggtgtgcaggactgactgcaaatgctttgtaaaatgaatttttcctataactgcagaccattaaggtgatatctgtaaatagaatgctaagctgaggggtcacacatagtaaaagtgag

SEQ ID NO: 291158 - DNA, 579 bp, Homo sapiens
atatttgccaaagccaggcttyaaatttttcttgagcttcctggaagccaaaggaaaaagagaaatgagacaagtctcatcaacagaaagaaaaaagaataccagtccttatgggatctagagctttttctctagaaaaagatgtatggggcttgcttcaaacagaaaaagagtaatacccaccttccccagaatcatatacttagttaaaaaaaaaaaaaaaaacaacagaacaatgagtctgcaaaatgaatagcaacagcaatgctgttgatgagggtcagtacggggacaggggttcttgttaatatgtctggccagagattgaactagatatcagaaggcaaagcagttggcttccatgcactgtgctaaaagtgcataaaacattttgagagggtgtaagaagcctcatttctgcttatcacttctgtatatctatttgtttcagagcaaaaactggagttcaataaggacaggcccaacttgtcactaactcaccttacagtgcctggcgcaaagtaggccctcaagagattgctcgtgaacatatacaccatggaatactatgcagccata

SEQ ID NO: 291159 - DNA, 579 bp, Homo sapiens
atatttgccaaagccaggctttaaatttttcttgagcttcctggaagccaaaggaaaaagagaaatgagacaagtctcatcaacagaaagaaaaaagaataccagtccttatgggatctagagctttttctctagaaaaagatgtatggggcttgcttcaaacagaaaaagagtaatacccaccttccccagaatcatatacttagttaaaaaaaaaaaaaamaacaacagaacaatgagtctgcaaaatgaatagcaacagcaatgctgttgatgagggtcagtacggggacaggggttcttgttaatatgtctggccagagattgaactagatatcagaaggcaaagcagttggcttccatgcactgtgctaaaagtgcataaaacattttgagagggtgtaagaagcctcatttctgcttatcacttctgtatatctatttgtttcagagcaaaaactggagttcaataaggacaggcccaacttgtcactaactcaccttacagtgcctggcgcaaagtaggccctcaagagattgctcgtgaacatatacaccatggaatactatgcagccata

SEQ ID NO: 291160 - DNA, 1107 bp, Homo sapiens
gctgctggccatgtggtctccagctccccacatccccatcctcctctcacacgtggcctgcttttgcttccctcatttctctctgcctgaagtcaccttgctccttgtttgtctgggcctaagtgtcactatttcctgagaggccttttctgacccctgttgtttgctcacttgccattatgtatttttcctttaaaacacttaccataatgtgtaaatatacatgtgtcattactttgcacaatctgttccctcactaagtgagccagaagctccctgaaggccagggcagactctgtcttatgcttgctgctgggaaggctggcagaggccaggcgaggtggcagccctcatgtctgacttgactttgaaggcagtggtgggctgacgtggacagatctgaggcctggaaccacatgctgggatgtggtcgagccttgccgtcctgcgggccttgctcargagactgaaccttgaggcttctggctccactcgatttctgagaagggccgctctttgtgacttcttctccactwagaagccggtgtgcactttgagaaatagcaatggagaacaccaaaggacaataagaaaagcagcatatgccatttgccaatgaaactggcaacaaaaggcctgggacatcccctagtcaatccagtttggaagaagttaaaggtcagatacaaacttccccattgtggcttcagcctatccaggttcctctctgagaatcagtcatgcagagagcctgctcaccactggagttcctcttgaggtagggctctgtccctggagcagcctcctccctgcccactaagtctgctcaggctgttgttgagactgggggctaatwgggggaggtggccagggactgctgttcttcagcctgtcacagtcagatccacttgcgagcccacagaagcggcagagaggatttttaactcagtgctcatcttgacaagctggttcagtgctgacccttacaggccagggccattcaggaccaggcaaccccaccctgggatttgttcagtcattatgacttgaacagtcaatgatgtcattatcaagtatctggtgcattcatgcctggcccagcatgga

SEQ ID NO: 291161 - DNA, 1030 bp, Homo sapiens
aacaaaaggcctgggacatcccctagtcaatccagtttggaagaagttaaaggtcagatacaaacttccccattgtggcttcagcctatccaggttcctctctgagaatcagtcatgcagagagcctgctcaccactggagttcctcttgaggtagggctctgtccctggagcagcctcctccctgcccactaagtctgctcaggctgttgttgagactgggggctaattkggggaggtggccagggactgctgttcttcagcctgtcacagtcagatccacttgcgagcccacagaagcggcagagaggatttttaactcagtgctcatcttgacaagctggttcagtgctgacccttacaggccagggccattcaggaccaggcaaccccaccctgggatttgttcagtcattatgacttgaacagtcaatgatgtcattatcwtaacaaagtataccagtaaaaggtaagataawcattgcaaaaaaggtcaggaaagaagacatggaagtataatcttgtaagatctttatatcatacatgaaggggtataatatcacttaatgtagactgtgataagttaaagatgtataccataaaccctaaagcaattcctacagcatgaagagagtgagatttttactaataagccaacaaagcagatagaatgaagtcattaaaaacaaaaaacaaaaactccatccaaaacaagacaagaaaagagaaaaaggacagatagaaaacagaagccagacttaaatctaagcatcccaataatcacattataaataaagcttatcagattggataaaaagcaggacccaactatatgcctgataaaaaatgcacttaaaatgtaaagacacaaataagttaaaaggatggaaaaagataacatcatactgacactaatcaaaagaaaactggatggctatatttatatcaaggatttcagaccagagtaaaaaatatgactagggataaataaggtcatttcataatgataaagaggtcagttcttcaagagg

SEQ ID NO: 291162 - DNA, 605 bp, Homo sapiens
aagcaagaatgtctgctctcaccacttctattcaacatggtatttgaggctctggtcagtgtcattagaagaagaaagaaagaaacgattcccagctggaaaggaagaagtaaactgtctctatttgcagatagcacgattgcacatggaggttcactggtgtctgtagagaaatgatagacttttcaccaagtggggctggaatgtgcatatgcaraagaatgaacttcaattacaccttctcccatatacaaaaagtaactcatagacctacatgtaaatcctaaaactgtgaaacttttgaaagaaaacctagaagaaaacttttatggccttagatgaagtaaagatttcttagatacaatgcaggaagcacactcaataaacgaaaaaaatgattaattggactttgcaaaattaaaaacttctgctcttggaaatacactgttaatagaatgaaaaaagagagagacatggactgggagaaatatttgcaaagcaaatatctggtaaaggccttatatccagaatatgtcaagaactctcaacaccaataatggaaaataaataatctattttaaaaataggcaaaagatttgaacaga

SEQ ID NO: 291163 - DNA, 582 bp, Homo sapiens
atcagtcatttgggaaatgcaaattcaaacacctgcacacctattcggatggctaaaagtaaaaagtctgagcatagctagtgttggtgtgtatgtgggggtcccagaactgtcatacacagctggcgggaaagtaaaatggagtagtcactttgcagaacagtgtgtggccatttccttaacagttatgcatatataaaaatatatataaatacttaaaaagttagacaggctgagagcacgttggggcaggacccaggacaggggcacagctctgggcagggcagatccaagttttgtggggcctgaagcttgtgtgacttgggtggccctcttcagggaaaataattttcaaatgagaaattcaagattaggtacaaaagtgaatatttaggacaaaccaagtaaccacaaattcctggagctgtggatctccaggttccttttttttttccaagtcatcttgagatatttttctaggaatgctgacatagaaaagsttcctggtgacatctggcttcctctccctatctcgcacactcagccattccagccttcgtagcccaaatgctgtgcagcact

SEQ ID NO: 291164 - DNA, 561 bp, Homo sapiens
ctatggcaaggccatagctctgtttggacacgtttaggtttgaggtgtctatgagtcattaaaccagtggagatgctgagcgggcagttggattcagaagtctgggggctgggactggtgctaactagcactgtggtaacagttccactatggccagcaggcaccgccaagcaaagccctgaagctgtttgtcccaaccttaccagtggcagcgcagaaggcagtcttggggctaggagcccagctgggaaaaggtgtccctgcccagagtgactgcttggtgctggggcggggcatgggggccggagacaggcagtaggcctgtggtcatcatcggaactgcactgccctggcctggctgtgtgggaatctcacaggcctctggaggcttttctcagacccccaggagtcaactctcctgcccttgggttcctctggaatcatgggtggaaaaaakaagggagaaatacagctccctgaagccctagggcaggacatgtgacatggaaaaaaatccaaccttgggacaacctggtgggatgaaatgcaaccttgttagct

SEQ ID NO: 291165 - DNA, 621 bp, Homo sapiens
cctgttggctcttggagcctgggcaggagcagcccagtgggcagactcaagcagacattcctggaagaggrccagggccataccacaagctctaaggcctccatcctgctcaccccagtctccctgcacaagcaccaagcatgggacacaggcacacagacagcatggatgcagggctgggctggaaagacccagacaccctgaatgtctccttcatgcagtgtccccacagctaacatgcctttatcgacagccaccagagaaatgctgaagctgtgcagggcagaggaagaaggagcagccatgtcattaaccccttaacccccaagcctctccaggatgttcacctgcacctggcagcacaggacccctgggaaatgagtctgaagatggagattttccttcttctttctttaatgaaaagagagagagagtaaggacctgatgctaccaccaaactaaaaataataataaataacaacattgagatcaccttgcacggtttacaactctcttcaatatccacaggggtgatgtcatttaattcctgtagccagcttgcaagatattaatgttcccattttacagaggagaaaactgaagctcaaaagtgcagtcctt

SEQ ID NO: 291166 - DNA, 577 bp, Homo sapiens
aaatacagccactttctgtatggggcggtgggggttaggcttcatcatgaactggagtcgggggacacaattcagccctcttgctttcctgggctcagagctgtcagccctgagaagcagaggagagtctattccaaagaacaggctgggcagagcctcagagagtgtctaracagatgccctgccagccacactaccctctagggagccaagcggaagcccaggctcacccacccccagccacagaaccaaataagggctgagtcagcggctcttcttagagacccagtttcctacaatggtttctgtttctgcacatctgggagaaatgatttgactctgggaatggttgtgaaatgggcaaaccacagtgcaggctcaccgccctctgcacccagcagcttatcctctcctatggcccagctctgtgggggcagagcacttttccctgttggctagatgaggaagcagaagatctgaagtttactgacttgccaaaagctcacagctagttagtggcagacaggactcaacccagatctgagctgacccatctttagtgctcactcacagcagt

SEQ ID NO: 291167 - DNA, 576 bp, Homo sapiens
gatataaggttaatatccaaaagtcaatgccttttttatatcaacaatgaacagctggaatttgaaaataaaagcacgataccatttacattagcataaaaatgaaatacctataaatctaacagaatatgtacataatctttatgcagaaaagtataaaactcttgattaatgaaatctaagaaaatcgaaataaatggagagatgttccrctgtcatggattagaagactcaatattgttaagatgtcatttctgggctgggcgtggtggctcattcctgtaatcccagcgctttgggaggctgaggtgggtggatcaccaagtcaagagatcgagaacatcccggccaacatggtgaaaccccatctctattaaaaatacaaaaattagccgagcgaggtggcgggggcctgtagtcccagctagtcaggaggctgaggcaggagaatcacttgaaccagggaggtggaggttgcagtgagctgagatagcgccactgcactccagcctggtgacagagcaagactccgtctgaaaaaagaaaaaaaagtcacttctttctaacttggtatat

SEQ ID NO: 291168 - DNA, 645 bp, Homo sapiens
ggaggagacactcaaaccatagcacttccttaagtaaactttcgtcctccttctaacaatccttagatgttggaggttctcatagtttggtcctggcctctctatttttctattcttttttttttttacattcttctcagtggtctataaaagttatattcctagccaaaactctcctctaaacaatatagtcttacatccaattctcttctaaacttctccacttagatgtacttctgtcatataccacaagggcatggcaccatgaagtctggcctaggtctaagaactactggaaacttgggtttggcttaagtttccttctatctggttccaataatggtccagaaattaagaagatcaactgatacagtgaatgcttggtttaagaaattcaaaccaagggttcttcaarcgtaccatcttcctactaaactataaagcccttgtctttttttaactgggatagatgagtactgagggtatttggaaactagatgctcatcagtgacctccaagaaaacagtttctgtcacatgacagtggtagtggttactgaggccatatcatgatgatgagtataaactgctccattaagaagcatgtgacacacaagagagccttaaaagaagagtcactgaggcc

SEQ ID NO: 291169 - DNA, 448 bp, Homo sapiens
tctcaaggtagaaggcttgattttcaatagtgcaaagctgatcaaaatggtgatttatcattttctaaaatctgactctttacctaaaatctgactctttacctaagtttcagggaagggaatcatttcagacctgcttccttgttggtacggttgkggaagggcaggggttgcctttggagcctgggcagctgatgcagcgacctccccccttcttttctaggaaggggggcagcttttgggaatctcagtgcatcatgttcccaggacccagaaacaggactgccatatagcaaggacatgtttcactctttcgtctcagcctctaactcctgtaagcagggaccctgcctagcccagggtgtcacacctggtaagctagggtccctccgaagctgctttccaaggtaccctgtgagaacccagcactcacaggcagagcctgtgc

SEQ ID NO: 291170 - DNA, 453 bp, Homo sapiens
gagcttcgtgaaagcaggaaccatttctgttcggggacatcattatacccycaatgccaggtacctggtggacactcaacctgtgttttttgagtgagtggatgaatagctggatagaggagaaagcatttgcctgggtggctggagcactgtctctacccaagctggcccggtacttaggaaatttggcctcatctttcactgactcatatgttgcaaatattttcccaatttgttgcttgccctttatttttatattagagtgggttttttttctagatgtacctgtttttaactcgtatatattttccttttagaatttctgtctttgtttgcaatatttcaaaataaaattgttgatgctattaaggaggctccttcttttaaaggaaatcatcagactgatgggccaagttataggagctttaaccatctcctgtagcaggagtgtca

SEQ ID NO: 291171 - DNA, 453 bp, Homo sapiens
gagcttcgtgaaagcaggaaccatttctgttcggggacatcattatacccccaatgccaggtacctggtggacactcaacctgtgttttttgagtgagtggatgaatagctggatagaggagaaagcatttgcctgggtggctggagcactgtctctacccaagctggcccggtacttaggaaatttggcctcatctttcactgactcatatgttgcaaatattttcccaatttgttgcttgccctttatttttatattagagtgggttttttttctagatktacctgtttttaactcgtatatattttccttttagaatttctgtctttgtttgcaatatttcaaaataaaattgttgatgctattaaggaggctccttcttttaaaggaaatcatcagactgatgggccaagttataggagctttaaccatctcctgtagcaggagtgtca

SEQ ID NO: 291172 - DNA, 554 bp, Homo sapiens
gcatggatggtgtccaaacccatgaggcagagatatagacagacatgggggccaaggactagccctgcacactcagcactgagaggtcaggaagacggggagatgggagtgacagccggtgagggaggggagaagcgggggagtataatcttggaacccaggagtacaaagtggtcctgggactgggatggatcagcctcacaatcaagtgtagccaaagggccaaagaatgggaggactgactggacgcttgggttgaacaatgtgagagtcattgcyaacgtggtaagagcagttctggtgggacggatgttggggaagcctgactgaagcttaacagagaacagaagccaggtgcggtgacagatacccgtagccccaccacttgggaagctgaggattgcttgagcccaggagttcgagtctagcctaggcaatgtagtggtgagactctgtctaaaagagagagtgagagaaaacaaggcaggaattggagacaaggattgaagacagtgaggtgctggataaaagagaagctaaccatgttagcttgt

SEQ ID NO: 291173 - DNA, 452 bp, Homo sapiens
aggtttctgttgtatgttttattttttttccaggagaataagtgagggaagctcagcaataaggagccatagaagattgatttaaagtttgatgtgattgagtaaaagcttgagactggtggggagaaagtcaagatggatgggaaagcacatgcacttctaggagtggaacattaatattggacagtcggaaaccagaaatctttaagaaagaggaaacctcaggggaagaaagagaggccatcctatcccataacttgaaagtcacaggaatatttcagcctgcagggaatcttcatttcccascccattgtttaccaaacttgcacgtcaaaaacaaaaacaaaaaataaaatgttgctttcatgaactctgttactccattctcccattgctataaagaaatacctgagactggataatttttttttaaagaggtttaattggctcat

SEQ ID NO: 291174 - DNA, 635 bp, Homo sapiens
gaatgaatgaatgaataaatgagaaaaataaatggaatgaatgagtgcatagtgtgacccatatttgtattagatcctcaatggaaaaataatttattgcttttgtaaagtkcctgagaattggcaaagagcttattgactgccttccctatcagactgtaagcccaacaaggtgaggtttttgtctatcttgtttatctctgtgtctcagtatccagaacaatgtctgacacatagtagaagctcaataaacacttgttcaataaacattcacacagcatctccacaaggccaggcacaatcaatttccactgtactggtagagaatgtggggctcaaaaaggtagaatgaaagcttgcatactataatggaaaaaaccataatatttggaaccagaatacctggcttcaagtcccatttataccacctactagctatagatttgggaagatcattgaagccctcttgttcctacttttggtgtggtcctttgaggctgtggcttcactaagcattggacaaatggaagttgctgtggttgatagtgttgtcaatgctgcctaaacactcagagataagactattacaattcttagaatgggttctgaaatgaaagaccttcaagaagcatgcg

SEQ ID NO: 291175 - DNA, 479 bp, Homo sapiens
gctctgaaaagccgccaccattctgtaagaatgtctgaatggaccacagaatgatgaggaagcgtgaatgagagaaaaaccacacagcctagatgaatgagtgaggccttccttcctggaccttatagcccagctcagctgccaaatgcaactgtgtcagtgactctsgaccaagctatatagagcagaagaaacatccactgatccctgccacggtatcatggcaaataacagatcactattttgtaggcaataagttttggagttttcttacacagcagtagatgattgaaacaatttaggaatgagtactatcaccactgtcccaataaggaaactgaggcacaaagagattaggtgactttcttaagatgcatagaaattagaacaagggaggggaagccccaccaagcttttccatggtcagaccaggtcacttctggagagtgacggtcccctcaaggcactatattttcaag

SEQ ID NO: 291176 - DNA, 628 bp, Homo sapiens
ctcttggtgaatttgcccctgacctcctgagaagccctgaagagtctgacttcaatccctccttcctacttcccacctgcaagtctctgtccacaaaagaacaagcaactgattacctcccaagctgctcccatagatcttgccacagcaaatttcagtcagtctgtctacackcagaaaaaaacaaacctgagcataaaagacaggctctgatgcatccctcagaccctctctgccccaggataagccagcgatgattgaaaagtgtcttctgcagcacgttagagagcaccttgagttaattaggaactgagcttcacactcccattagtgctgcagaagaaaaattcaacaacagatatttccttttttaaaatgtcctgggggacaacttgaaatgcttcttctgtgaagaattactcattggagtcataaaaagagagaggggtatcatttatttagattcaactgtgagactttgtggcttttttaaagggatgctgtatttttgcagctattttagaaccataattccccacattaaacatatcaaaatgaaaactctattcaagcaagttattttaagtcaaatataaatttatttactaacttgaaattggcagtagca

SEQ ID NO: 291177 - DNA, 469 bp, Homo sapiens
actcagaaaaaaacaaacctgagcataaaagacaggctctgatgcatccctcagaccctctctgccccaggataagccagcgatgattgaaaagtgtcttctgcagcacgttagagagcaccttgagttaattaggaactgagcttcacactcccattagtgctgcagaagaaaaattcaacarcagatatttccttttttaaaatgtcctgggggacaacttgaaatgcttcttctgtgaagaattactcattggagtcataaaaagagagaggggtatcatttatttagattcaactgtgagactttgtggcttttttaaagggatgctgtatttttgcagctattttagaaccataattccccacattaaacatatcaaaatgaaaactctattcaagcaagttattttaagtcaaatataaatttatttactaacttgaaattggcagtagcagctgtgttttta

SEQ ID NO: 291178 - DNA, 593 bp, Homo sapiens
atgaacaagtcatttctcattttgtgtagtaaaaaatgttacattgaggattgttatgcatccatttttgtgcatttgtttttccttagaacaaattcttaaaattcaayacaaggttacaggacattttattttaaagttgttttagacattgcaaaattgctttcagaaagtctttatcaaattatgtatcaaaagtgtatgagaatgcccatttctgtatgctcttcctgttgcatggtcattaagtactgaccgtccttttaaattgagaatcttatgacaaatttattgaccatttgtatttcttctattaattccttgttaacaccctttacccatttttctattgggttgtcttttattttaacaacatattttatttatttatattggattacccaatatgtccaaaaatcagcctttcaacaagtaatcaatataaaattattaatgaaatagtttacatcttttatagcaaatctttggaatccacttatagcatatcagatttacattgcaagtttttatcaaatatatgtgatctgtatttagatcttatcaaatctacatttgaagtagattcacatacc

SEQ ID NO: 291179 - DNA, 593 bp, Homo sapiens
atgaacaagtcatttctcattttgtgtagtaaaaaatgttacattgaggattgttatgcatccatttttgtgcatttgtttttccttagaacaaattcttaaaattcaatacaaggttacaggacattttattttaaagttgttttagacattgcaaaattgctttcagaaagtctttatcaaattatgtatcaaaagtgtatgagaatgcccatttctgtatgctcttcctgttgcatggtcattargtactgaccgtccttttaaattgagaatcttatgacaaatttattgaccatttgtatttcttctattaattccttgttaacaccctttacccatttttctattgggttgtcttttattttaacaacatattttatttatttatattggattacccaatatgtccaaaaatcagcctttcaacaagtaatcaatataaaattattaatgaaatagtttacatcttttatagcaaatctttggaatccacttatagcatatcagatttacattgcaagtttttatcaaatatatgtgatctgtatttagatcttatcaaatctacatttgaagtagattcacatacc

SEQ ID NO: 291180 - DNA, 502 bp, Homo sapiens
taaactatttcactaataattttatattgattacttgttgaaatgctgattttttgacatattgggttatccaatataaataaatatgttaaataaaatatattgttaaaataaaagacaacccaatagaaaagtggataagggatgttaacaaggaattaatagaagaaatacaaatggtcaataaatatgtcataagattctccatttaaaaggacaatcagcacttaatgaccatgcaatgggaacagcatacagaaatgggcattctcatacacttttgatgaaacataatttgataaagactttttgaaagcaattttgcaatgtctaaaacttgcraatactgagccctcctagatgcagacaaaatggcacatcctttgtccattagctacttacaccaatggactgcatttgtatggcgctagagatgcattaagtcagctgcagcctctcaggaggaacttagatacataggctgagcaattccctaacagag

SEQ ID NO: 291181 - DNA, 553 bp, Homo sapiens
acatggccttccaaactcatcttggacaagggccacatcactgaggtaaataaaggtagaaagtccgccgcagggagctctttcaaacaatggctctcctttggtcggctcagttgagtgagcatgtttacattttgccctcaaaatatattttgaggaatgaatgagtgagtatagcggtgaaacctcatcatctcatagccaaagtgtgggtttgagagacagcgagtgtgttgttgcgtctctgtgtgtgtgtgcgcctsaaagagagaagggtctccgaaccagagacggtctctttttggaggcagcccccaggccacaacacctcttttcagttgtcactgaagaaggcgaagaaggcagccagagtcagccacaacgctcattcctttgcttcttgctctcccccatggcctgcaaattagtttcagcccagtggctccctccactgacctgaatttaattattttattctttataaacggaacacttcccccatcccctattctcagccccccaccactccccagattaactgaccacccctcat

SEQ ID NO: 291182 - DNA, 589 bp, Homo sapiens
caacatgtattccttccaataagacttcttccttccctcttgttagaaaaaaaaaaaagatggaaaaaaaagtcaactctggaagagtttccattcacttttgtgcagttaggaccaacatgaagtcacactcctatttcaacacacccagactctcttttcttgaattctatgtatcaatataacaactattaattgagcaaccacccagtgaaagctgggtactcaggtgctcaggtggcagggggttggggtagagagctgagaatcaaagcataaagctccaggttcagcaaactcaaggactcatcatggcaccaacccacatgtacgatgactggtggatagcataagacagaaggtatctcccaacagrggaccctatagcacagatggcccacactcagggtgtgccagcaggtgggtgccaagacatggtgtgtgcacagggctggggagagtggcagtacgaggtctgatgccattggtcccatggccctgccagcaagcagtctttcccagaggcagggccccccaagcttatgcgattaagaggggtgagtccatttgagccatgtgcggaatctac

SEQ ID NO: 291183 - DNA, 1120 bp, Homo sapiens
ggcattgtttgctatggtcagaaactatgctggacctcaaagaagatctaactcaaatcatccctgaactagattttattcactactgctcagtggacacaaactaactgaaaaataaaatccgctgggtaaactaccattctaaaatgatcaaaacagccagacttgagtttttctgttaccaactgcctcatcctaactcatttctatacatacatctcctaacttgctctccactgtcagactgctctcctttttctgtctaggttcatcaggaacctrtatcttaactgttgctgactgttaggacaacttgtctttataaacaacacctttatgttcccagtcttcccaacacactggcactggcataagtctgactttctccttacctattggctttcttcctcctccctcttaatattattaaattttactttccctatgtctggttcatgattatcaagaagctatttaatctgtagaacaggtttgtgaacatgtattggggagttggagcaatttaatgaaatgaatwtaccatcagactggatcacagagcagattgaaacatctcctcctaattccatgtttaaagacatcaccttaacagcttggcattaccatataggagtatttacaacactgaaatcaatacgtaaaaattaggggctttttttgttttgttttgttttttaacctgagaaccagttgttaaatatttgtcaacataccactgtattaaawgcatactggaagcacttaaaatatgtgtgatattttgtttggtaacaacccatgtgaaccatatttttccatattttagccttgaccacttataccacacaaaattgctttcaggatgaaatgaaattaggcagttgcatactatttaaaacaaaaacaataattaaaaaaacacacacatacactgaaagtgtaagacttctttaatattatctctggagatttgaggtcatttcaaaacagtataacctaaaaatgtgaagatgaagtctgatctttggatttcacatagggtagctgatgttatgctctttgaagttcttctcaacattgtcattttcttcaattttagttaaaatgttgttcactttaa

SEQ ID NO: 291184 - DNA, 564 bp, Homo sapiens
tctctgggaactgtctgggtgagctccagttaggtcaagtaggacactgggatgattccaacaacctcccccagccagttctgcaatgtttttctataactattatttcttaagtaatagttaatttgtcctttttagggcttttcttgtcatgtrttggtataaagctttaggatagctttattgaataaattgatttttttaaattttattttatatattctatagttcttatattttaatttttctagtcagttaataattaacttctgttttcaaacatattttaccatataaggtctgctccaatttattgaaaaatcctgcccagtatcagggcttcccatagcaaactgtatttcagaaccacctgagaactatttttaaaatgtctgagaatttgtgtgggtttttttttttttcaagttttctgctttacttttgtgtgcagtaactctgtggacctgggctttggaaccactgaatactttccattatcattttttttaaagttctttcatgtgtgtatgtatatttagaagttgttgctacaaagttcttggg

SEQ ID NO: 291185 - DNA, 564 bp, Homo sapiens
tctctgggaactgtctgggtgagctccagttaggtcaagtaggacactgggatgattccaacaacctcccccagccagttctgcaatgtttttctataactattatttcttaagtaatagttaatttgtcctttttagggcttttcttgtcatgtgttggtataaagctttaggatagctttattgaataaattgatttttttaaattttattttatatattctatagttcttatattttaatttttctagtcagttaataattaacttctgttttcaaacatattttaccatataaggtctgctccaatttattgaaaaatcctgcccagtatcagggcttcccatagcaaactgtatttcagaaccacctgagaactatttttaaaatgtctgagaatttgtgtgggtttytttttttttcaagttttctgctttacttttgtgtgcagtaactctgtggacctgggctttggaaccactgaatactttccattatcattttttttaaagttctttcatgtgtgtatgtatatttagaagttgttgctacaaagttcttggg

SEQ ID NO: 291186 - DNA, 564 bp, Homo sapiens
tctctgggaactgtctgggtgagctccagttaggtcaagtaggacactgggatgattccaacaacctcccccagccagttctgcaatgtttttctataactattatttcttaagtaatagttaatttgtcctttttagggcttttcttgtcatgtgttggtataaagctttaggatagctttattgaataaattgatttttttaaattttattttatatattctatagttcttatattttaatttttctagtcagttaataattaacttctgttttcaaacatattttaccatataaggtctgctccaatttattgaaaaatcctgcccagtatcagggcttcccatagcaaactgtatttcagaaccacctgagaactatttttaaaatgtctgagaatttgtgtgggtttttttttttttcaagttttctgctttactyttgtgtgcagtaactctgtggacctgggctttggaaccactgaatactttccattatcattttttttaaagttctttcatgtgtgtatgtatatttagaagttgttgctacaaagttcttggg

SEQ ID NO: 291187 - DNA, 525 bp, Homo sapiens
gaaaatttagtagttggaatcaaattcaaaatgcttaccctagcacttttaagcatatttcaatattgactttttaaagggggacataggggacaatcatgctcatcacaggccccatttattcttatgatcctgtacttggtgcaattcatcaccttttgtttcctccttgtgttagtctattcttgcatgtctataaagaaatgtctgagactgggtgatgtataagaaaagaagtttaattggttcataattctacaggctgtacaggaagcatggaagcatctgcttctagggaagtcttaagaagcttccagtcatgscagaagtcagagaggtagcaggcacatcacaaggcgaaagcaggaacaagagaaccgagggggaggtgctacacactttaaacaaccagatctcatgtgaactcactcagtattgtaaggacagtaccaagcagatggtgctaaacagtttatgggaaatctaccaccatgatccaatcacctcccaccaggccccacctcc

SEQ ID NO: 291188 - DNA, 541 bp, Homo sapiens
gctgaatgcaggcaattcaaatgtgtgtgaaaaatcttaacaggagcacatcagggaagtctctgcctgaccaaacaaaggcacatctcccacatttaccagccagaatctgctttaggttaattgttctgcatattgcaggtagcttatttcctggggcttccaggagccacagcttctttccactatatgcagaaactggtrgagctaggaagacactgggtacatttcccagggtcttgaaggggattctaaatagccatcttgttttttccacagactttctttttttaaaaaagctcaatgactggcatctctcctagcttaagcatgcacacaagtataaaattctgatttcttgtttcatgcatggatagttgtttattgttatcatttgctggttgcctaagctcattgatgactttagaaggcaagcaagtacctctagtttacagctgagtaccttggctggtgtggagctgtactggatgggagcttatttggatgtctggtgtttgttcacggttatatgatgctctta

SEQ ID NO: 291189 - DNA, 603 bp, Homo sapiens
aacaattacactcactttacctgttcttgtaaatgactaaattgttatactaagaaaaacaatataatgtccatcatatgtgtctgtkttttggagggaggaggctatttttttgtatgcttgtccactattgtcctaaaggctacaaagataaaagttgtatccagcatttttcctagtctgttttaattctactcatctatcagtctttcctatgtatttacttatttctgaacaagcttattaagaatttgtctgctctatcacagaacacctttcctgatcatccaaatacataatagcaccctgtgtattccattgtctttatttattattcttcctcccacttataattgacattattttgcatattttaatttatttgtttattatgtattattgatcagaaggtaacctacatgaaagcaggacctttatcagttgtgttcttcatgggatccccagtacctagaacagctgctgccacagtgcaggtgctccttaagtgtatacagagttttgaatgagtgaaccctatgtataacttttaactccaaaaacagtaggtacaagtttaaataatttggtaaacttcagaaagtt

SEQ ID NO: 291190 - DNA, 619 bp, Homo sapiens
agtccacccaacttggctgaacttcaaggctcargttccagtttggaacaaatgttctagggttaacggctggggctgagcaaactcaggaaagacaatctccccagtcttgcaaagtgaaattctcttttctttcagtgtgttgtgaagaactacagaaatgtgttctcattaaaaaaaaaaagaaaaaaaaagattttattttgaaactggttcctgaaatgggaaaccaaaaggttagtgatggctgtgctggccgtttttagcctccctccaccagtttaaccatccctaataatagtccaagaatcacaagacatttccagcaccagaaggtcatcagtcaacagcataggtgcaaaagggagcgtttgctcttctacagatcccaatggtctcatgtattttaacagatgaaatgctctgaaggtggggttgggggcggcctggcctttggaaattagtcaccactcacatagttcttgcatttacacttacaaagcactttcacagctattatccagtgagatgggctgggcagagaaaattacccacattttccagaaatctgagactccaagtgaaatggctcaaggtcatcgctgttaaacccaaagca

SEQ ID NO: 291191 - DNA, 619 bp, Homo sapiens
agtccacccaacttggctgaacttcaaggctcaggttccagtttggaacaaatgttctagggttaayggctggggctgagcaaactcaggaaagacaatctccccagtcttgcaaagtgaaattctcttttctttcagtgtgttgtgaagaactacagaaatgtgttctcattaaaaaaaaaaagaaaaaaaaagattttattttgaaactggttcctgaaatgggaaaccaaaaggttagtgatggctgtgctggccgtttttagcctccctccaccagtttaaccatccctaataatagtccaagaatcacaagacatttccagcaccagaaggtcatcagtcaacagcataggtgcaaaagggagcgtttgctcttctacagatcccaatggtctcatgtattttaacagatgaaatgctctgaaggtggggttgggggcggcctggcctttggaaattagtcaccactcacatagttcttgcatttacacttacaaagcactttcacagctattatccagtgagatgggctgggcagagaaaattacccacattttccagaaatctgagactccaagtgaaatggctcaaggtcatcgctgttaaacccaaagca

SEQ ID NO: 291192 - DNA, 586 bp, Homo sapiens
gtttgtctaaagcactgtctatccactcagtcctttatatatcctaaaggaaaagttctgttgatcaacacaacacctattgattctgtatcaccagttaacatatcctaaagacaaccttattgctccatgtacagcattattctatctttcatctgcccatttagtcaacaaatacttatcaggctccaactgtgtcaagcacatatatagagctggaaatctaggatgactgaggttccgttcctgtctttgaaaagttagtcttggagaattcagaaactaagcaaacagttgcagcaccatgtggtaagtataactgagatttacacaggtattggggcatacaaaggagggaaaaccacactatggtggctgttggaaggggatcaggaaagcttcctagaataggaggggaccaggtttgcaaaggtggcaggagttctggacagaagtagtagcctgtgcaaaacatggccacaggggcagcgatgtgcaccgggggagcaagtagccygtgttactggaacagagaatctgtcaggggtgtggcagcagatcagactgaaaaccaagcaggtgaaag

SEQ ID NO: 291193 - DNA, 582 bp, Homo sapiens
tggactataaattctgttgcacttgcaggtgtaatgagctctttgaacctcagtttcctcacccatcagatactattcattatctgccttgcggacaacacctagttgttgggaacattgcatgaatggcaggtggaggtgctttgtaaacgctaaagcctgccatgaatgtgaaggagtgttgctactcttctgtgcccaacaatgtgctagcaccaagggagttcaaaagaaatgtgagacatggtccctaccctccaggaacttacaaytcattgttgggagaccaagacacatcccctaaaaacagatatgtaacacctcaagtctgtgaagtacttactatttaaatgatgcccagagcctctgaatcccctagaagtacagaggagggggagatcattaatggtgtggagaagttggaggaggtgagacgatgccaggtgataaagtagacagagaagatgaaggtcttttttttgagacagggtctcaccctgttgcccaggctggagtgcagtggcatgatcggcccactgcaacctccacctcctaggttcaagcaattctcgtgcctcgact

SEQ ID NO: 291194 - DNA, 565 bp, Homo sapiens
aaattttttgctcttgcgcaaaggtcaggtcccgtgaaacttgtgaaataggtgtttttatctcttttcttttccaactgatcagatagatatctttccaggaatttggtgtcagaaatcaaattcaatgagtgggaagtttgacaagattcaggatagtcttgccaaatagcacaagagaggaggtaaagttaggtcaggtcaagggggcagcaaaaatgaagtttataacagatatactgtatatttgtcatgggaaagggcttcagtcaatagcaattgatattaataaaacataaaagaaatgacaataaacartcaggataactttgaaacaacttctttttatgtaggtaacattaaagaaaattaaagaaaaggaatcgctttattttataaaataaatgcactactatttgcaaaaaaaaatttacctaaaaatgctgctactgaacaaacaaaactacccaaaattagagaacaaaagcataaaaattgttaacaaataaaaaaactatatttttgaaatgtcttagatgatacacaaaaaatgcagatttgtata

SEQ ID NO: 291195 - DNA, 487 bp, Homo sapiens
cattgtaatgctgggacatgatgcgggtgggaaagattgcctcacacttaataatagtgacacttcacatttacaccaacctctttgcagagtaaccaagagtatttctcagttctttttttcctttaaaaataatatgatcttcttgataccctgtaagtggaacaggagggagtacaattcttcccaccttacagagaaggcgattgaggcctccaaaggtaaagtgactcactcaggattacagagttacccagggatcarcactgtgctgttcaaaatacaccaggctgccaactgcagcaatatcctgggcctgtgagaaccgtgggttcataggatgttgcacaaaaaagagagaaatttgcttcccattgcctctgttttgaaatgtactgcctttcatcttgagcatttcataagtttctaattttaaggcaaattgcttataagccatggtgacctatattagctgacatttgaaatc

SEQ ID NO: 291196 - DNA, 625 bp, Homo sapiens
gggctgtgtattgtcttttttyttaagacatgaaatatcctggagtctgggataacttttatatttttgatattggaacaagtgaacaatcacaagatggggcattgtacacattgtaaataatattgatgctattttattttactttaattccaaaacaagttatttgggaagtgtggaaatggactgcaaaagttcctaaaataacattttcatgacttcacttaattagaagtttttaacttggaagcctttgaatttatgccattgactattttttcatttatccatttgctatagacatattatcatttcatgatattttatgtaatgctttgcaatcagacctagaccaatttgacatgagtatctactaggttttcccagtcagataacagttattggcaataattagatgagcgttggctattttgctacaaccttactttcagattgtaattaagactgagaccaaattcttccacatatataaatcttcattactgagcaggcagaaaatagtcatacagactattttgttgagtaactttagtgaagttttcagctctctgttgtttgagatggtcatgagaccatccccattgaaaactactattagtagata

SEQ ID NO: 291197 - DNA, 591 bp, Homo sapiens
tgtctctgttctcagtattctgcctctgcatacccacagaacaatagctctaagtttcccagaccctcgtgtggaggcttggtcaaaaggcgaaacctgaagaaatactttagcacaggatgaaggaggaagtggcagaagggtaaaaccaacccctgtcaaacttcaccaagtggctctgccccggactcagctccaccacatcctactcttattgggagccaagcaagaaggactaaggtgactgggacctgggcagtgggagaatgggcagtgggagaaagatcatgaggaagcagaaggggctttgttttggtccagggaaccaaatccagcactataaccgccaccagtcctgggagtcactggcagaaaaaatcagaacagggaatgcaaaggtgctgctctgcctctactgagcacccctccccatctctaagmctcattcttatattctataaaatggggattatgacatccacctgtgtgtcctgttgacctgtttgtaaaggtagaataaggtaagtgagtatgaaagcactttaaacatgtaaagcactatattacaggctttttctcactcaactgacc

SEQ ID NO: 291198 - DNA, 565 bp, Homo sapiens
aagtaccttaccttgtttcatcttcatgacaaccctggtagtaaatcatctcagtactctcagttaaacacacacacacacacatacacacaccctgagactcatagaactcaagtgtcttcagtcacaggccagtgccaggtggtgtctctcaagacctccccaaagtacagcaagcrtttttattttaataggaaacaacagcctctacttcaaatgcttttagaatgagctcttccatagtatcagaactgttgaacgacatgactgttttacccatgagattctataaatacagactccctctgtttcatccactagtttgtatgtttctgtcttctgatgaattcatcattgcacaagcatttttggaggacagcattgtgctgtgagctgaagggctgaaccatacccctgcctgcagggttttgaagtctggtagttgtccagggagcatgttgtcagacagctccaatcaggagaggacaattgtgtcacaagagaggtgaaaacgtgtatgtgagatatagagataggagaggggagaagggaatgtgtctgcgta

SEQ ID NO: 291199 - DNA, 579 bp, Homo sapiens
acaagaagatcatatgccacattgcagcttttaaatcaaaagtcagaatcttgactcttggtgaagatctccagctttcaaactgtctagatcagggcactggtcacactccactgatctcattctgttctgcttctcttgtatctctcatcacttcagtggctcctctactccacyggcttccatctatcgtccatacattcactcaacaaatattcactgaggacctgtagtgcctttaactaggaataccatgagaattttgtctgaatgccgcgtatgataaaaacaacaacagtaacacctaatccttcagcatttaccaagtgctttctcccgcattgccttgtttgatcttcccaagagggtcatagggaagataaggcagccctaccctcacagagctgactatgcagaggaggttgatggaacctgccaaatttcactgcaacaatcacatgagcaaagcattggctcaatccaaagcccagtgctgagcaaagccacttgctcttcctggaagggcacaaatatcctaaatagaagagaagtacagaatgttgggactgaaaaaaccca

SEQ ID NO: 291200 - DNA, 579 bp, Homo sapiens
acaagaagatcatatgccacattgcagcttttaaatcaaaagtcagaatcttgactcttggtgaagatctccagctttcaaactgtctagatcagggcactggtcacactccactgatctcattctgttctgcttctcttgtatctctcatcacttcagtggctcctctactccactggcttccatctatcgtccatacattcactcaacaaatattcactgaggacctgtagtgcctttaactaggaataccatgagaattttgtctgaatgccgcgtatgataaaaacaacaacagtaacacctaatccttcagcatttaccaagtgctttctcccgcattgccttgtttgatcttcccaagagggtcatagggaagataaggcagccctaccctcacagagctgactatgcagaggaggttgatggaacctgccaaatttcactgcaacaatcacatgagcaaagcattggctcaatccaaagcccagtgctgagcaaagccacttgctcttcctggaagggcrcaaatatcctaaatagaagagaagtacagaatgttgggactgaaaaaaccca

SEQ ID NO: 291201 - DNA, 507 bp, Homo sapiens
ttctccaacagtgtggcctcttctatgaagctgtctacccatgggtttccccaacatcccatcccccasccctcaggtttctcctccccatcatcttcacttcagaaagagaaatgaaaaagaaattcaagtgactcatcggtccacataggcaggagtgggagaggctgagagagtgaatttgtgggtccagatgaatatttccgcaggcctcttgactgcttcacacgatctgctgtgcttcatgaaaaagaggatataaaaatctgagtggtgccatattgtctccaaaagcagccagagtgaaaatgaagtgtgactgctgcctccccaaaacgcagggcagctcctccctcacatccacaaatgtggttcagcgggctgccttgccctgtttcaggaagcctacgtggagggcacggtggagccccagccaccttcttcacacagggctatctggggcttcagtgccaggtcccctggatacacagcagagtctgctggggg

SEQ ID NO: 291202 - DNA, 553 bp, Homo sapiens
tttaacaaacccattttgctttgtaaactgcaatctttcacaatatagagtttctaatacaggttgggcaagaatagaaatgctcagatctatattattatccgacaccatatcagttagccttgctaaacttcaattgctatatctgcaagtaactcatttaatatttatttaataaatattattgagctgcttctatgtgctagctactatatgtagcttctatattattaytgagcttcttctaaatactattgagcttcttctatgttctggcactaaaaactggattagaattgctcttttatatagatattggtgatttcaaacataatgtgtgtaaagtccatgaccctgtgccatagcttgctggctgacttggaaaattaggtctaggacctgtcctttaccagccccctctccacataagtcagctcaacaactgtggacatcgtagagcctgggacactgcagaaaacattcatggtgctggtgcatcgtgagtgagtcatcagactcactcacatcactgccattgcagaggcaatgggca

SEQ ID NO: 291203 - DNA, 520 bp, Homo sapiens
ttgattcttaaatatctgagatttctattaccatattgcttttctaaagcactaaaattcaaacccaaacggtactatcttcatcataatctcaaatcataaaagctcaaatcagagaaagtatttttcttctaaacatttctttttctttaatgctattctcccatcaygcccagatctactttttttttctttttgtcccagcattaataatgttttaatgtctttcttactatattaatagtgggctttctggttcattccctccccaaagctccttgacggcaagatgattttgggttgctttgttttggtccagtgcctggaccaaaggtcagcaaaccatagcttgcagctggtttttgcatgacctctcaaactaaaaatagttttaacatttttaaagggttgttaaaaaatactaaagaagaagatgtgatagaaaccatgtgtggctcacaaatcctaaaatatgtattgcctgagcccttctagagaatgtttgctcactcctggccta

SEQ ID NO: 291204 - DNA, 476 bp, Homo sapiens
catttgccctgtatgtatttgctatatgacattatctcctgtgcttctgtgaaatgtaatttcaaytgctggagttttgccagcttatcgctgccactagccagtggggacacctcacagaaaggactatatataagccgatcaaagaacaaagcacagaagacttataaataggaagttctacatcctgtagaggccaaagaggtcaatcctcacaaaaatcctctggcattaatcaattgtcaggcactgcgttgtaatcaagagttggcttgcaaataaaaataaataaagtaatagaacttgtaagaagaattggcttggactcaacaggctgcgacctcagaagccagtaagaactttggaccaggatattctccaaatacagccagagtaacaggttgaaatacagaagtccttccattgattctgccacatttatctcattctcattgtttaacctaaaagatatcttc

SEQ ID NO: 291205 - DNA, 611 bp, Homo sapiens
ctacttcactcccttgctacctccactggagtaggtgctggtatccatggctgagagacttaaaaatggatcacatcacaggattctttgcagacactccccagtaccatgctggagcccagtagctccactgggtggctagatctagaagagaaataacaatcactgcaagtagaaggattcaatatggctgaataggaacagctccagtctgcagctcccagcaagatcgacgcagaaggcaggtgatttctgcatttccaaatgaagtacctggttcatctcactgggactggttggacagtgggggtagcccacagagggcaagctgaagcagcrtgggtcgtcaccttacctgggaagtgtaaggggacagggaattttctcccctatccaagggaagctgtgagggtctgagcctgaggaacatcggcacagatattgcacttgtcccacggtcttttcaaccctcaaaccaggagattccctccagtgcctaccctacccaggccctgggtttcaagcacaaaactgggcggccagttgggcagacatcaaactagctgcaggagttttttttgttttttttcttttttccataccccagtggc

SEQ ID NO: 291206 - DNA, 547 bp, Homo sapiens
ttccttccatctctaagattcagtgatatcactgagtagtgccttggatttgctgctctgtgcctgggtcttaccttaaccctgggaaaggggggaaaaaaaaaaaaaaagaaaagaaagaaaactggttttgggctccaaaaaattatgtaaccagctgcacagcctgaaatttgattttgtcctttttccarattaattgcaggggggcacgagtcaagcccacctgtctttgcataaacacacaggaagataaacaacaactacagcagaaaagagtctgacccaagggtcctctctgggcacagactctaagatgaggagggctcaacagctcccaaacttttgacttgctaggaaggtagcccctgctgccttgtaactgaaatgtattcactctttttgtcaagttggtgggatggctatagctttgtggcagcttgcactttgactttctgggagaatagcagagagctaggtgcaacaaggaaactgctatgtttgattaatgcacaagattctgcaccatggttctgccaaagcctca

SEQ ID NO: 291207 - DNA, 547 bp, Homo sapiens
ttccttccatctctaagattcagtgatatcactgagtagtgccttggatttgctgctctgtgcctgggtcttaccttaaccctgggaaaggggggaaaaaaaaaaaaaaagaaaagaaagaaaactggttttgggctccaaaaaattatgtaaccagctgcacagcctgaaatttgattttgtcctttttccaaattaattgcagkggggcacgagtcaagcccacctgtctttgcataaacacacaggaagataaacaacaactacagcagaaaagagtctgacccaagggtcctctctgggcacagactctaagatgaggagggctcaacagctcccaaacttttgacttgctaggaaggtagcccctgctgccttgtaactgaaatgtattcactctttttgtcaagttggtgggatggctatagctttgtggcagcttgcactttgactttctgggagaatagcagagagctaggtgcaacaaggaaactgctatgtttgattaatgcacaagattctgcaccatggttctgccaaagcctca

SEQ ID NO: 291208 - DNA, 547 bp, Homo sapiens
ttccttccatctctaagattcagtgatatcactgagtagtgccttggatttgctgctctgtgcctgggtcttaccttaaccctgggaaaggggggaaaaaaaaaaaaaaagaaaagaaagaaaactggttttgggctccaaaaaattatgtaaccagctgcacagcctgaaatttgattttgtcctttttccaaattaattgcaggggggcacgagtcaagcccacctgtctttgcataaacacacaggaagataaacaacaactacagcagaaaagagtctgacccaagggtcctctctgggcacagactctaagatgaggagggctcaacagctcccaaacttytgacttgctaggaaggtagcccctgctgccttgtaactgaaatgtattcactctttttgtcaagttggtgggatggctatagctttgtggcagcttgcactttgactttctgggagaatagcagagagctaggtgcaacaaggaaactgctatgtttgattaatgcacaagattctgcaccatggttctgccaaagcctca

SEQ ID NO: 291209 - DNA, 461 bp, Homo sapiens
cctaatgcttaatatcttcacgattgattttatcttctcattccaatcttactttgactagaggattcttatcaccatagaaaaatgcttttatttttcatcttacaaaaaaaacctgcaaaagaaaggaaaatcatgtgtggatcaactatctccctaactctatgcttgtctctttmtatctgttctcaacacagcagataggctgatcatttaaaaatacaaatctaatcagtctcctcttctggtcacacccctccagtggcttcctatttttttttttatgaagtcttgctttattgcccaggatggagtgcagtggcgcaatcctggctcactgcaacctttgcctcccaggttcaagcaatcctcatgcctcagcctcctgagtagctgcgactgtagacatacactactacatccaattaattttgtattttttgtagtgacagggcttcgcc

SEQ ID NO: 291210 - DNA, 478 bp, Homo sapiens
cctggctctctacttttcatgggctttcccttccagtttctactactgcagatatgtacccctttgtactgactctggctgcccacagtcctgtgctggatgtctcacctggatgcatcctatcaaaatagctgtgtgcccccttcttaacatacacttccctgccctcactgattttgccctatgtcctagccagccttgctgtgcaagaaatcacagatctcttgaatccttcatgacttttttatagatgcatgccctgaaggatttcccaagtaataaaaatcctaaatagattcaaagatgtaactagcaataggagttaagataytatattcacccagaagagcatgagcaaaggcaatattgaaatgaacgtgagatgaatgacaccagcattggctgctaatgccacctaaacagttatttgggtgactccttttcctggaagtaagttccacagctcattcagcaagtt

SEQ ID NO: 291211 - DNA, 647 bp, Homo sapiens
gggcctatctaaactctctactgtcttcctttgattgtgatgtgtaatgtaagtagacaaaataatgaaattatgctaattccatactattttgattacttttgctttatagttggttgtggaattgggtagtaaaaatcctccacctctattatttttcaaatttatactggttaayctagaattttgattagaattgcactgaacctgaatattattttgaggagaactaatatcttaacatattgagtcttctaatatacaaaataataaattttttacttatataggacttttttctcttgtagcaaggttttacagtgtccagtgtagatatcatagacattttactgtatttattttaagatgtttaatgttctttgattacattaccaactgtattattttctaagcttcacttctaattgtgttgccattacacagaaatacaattttatttaacatttcttttatatcctatttacttgctcaattttctaatcagtgccaggagatgtttttgtaattaaattccacaatgttttgcatgtacaaaataattttatataagaataaagataatttcactttattttcaatctttatgacatttatttcttaacttgtcttattgcactggctaagac

SEQ ID NO: 291212 - DNA, 638 bp, Homo sapiens
gccaatcacctggcggggagaaaagaatgtgtaaattgagtattcctgaattttacttctgtgcagttaaatcagactcttagaatatagagtacaagaatgtccatgttgtactgatccccatgtgcttcttatacacctggagtttgagaactactgggttgatgagatcattccaatgcctgagtaatggtgacagtgcttatctggtgtccctaagtcatggtctttggctacaaaggctgtaaaatggctttggatcttctcttaaggaaaagactagttatctgcttcctgccaaacacatgtgaacagaggcctccagaatgatgattgtctttaaatcagatattactaatgatgctagcagatacaggtgctaggctcctctggatgtagtaggamcctgtaagagtatacaagaaagactccttgggaagtctctctttcttaaaaaagctttctaaaaatgtgacctatgagctgtgtgtgtcagaataatttaggaagatattaacagtatgtgttctggagtctcatgccagacctgttcaatcaaaatcacagagaatggatccagaaatctgtatgtcttaacatgtcatatcaaaactacacccttacctccccccaccaaa

SEQ ID NO: 291213 - DNA, 562 bp, Homo sapiens
cctgtctctggggctccctgctacataatttcaaacgctgatgagaggatatctgtgagaagcttctgtgaaagctaccttttaaaaaatggtaggaggaaaaaaataacaggaacaaaatacaaattaatgcatcacattctgaaaaacaaaatcagtagcatgaatttcttcttgatatttggagtgtatcattgtattccacaaaataaaatcaagatagggtgacatatcccaaagaactgttattttcataattcaaagagggttatatgaaatagaatttttatcctatcagttcacatcttggaaataaataaaaatgtcgtgctggtaagtgccccacaactgaactaatctaaccgaattcaaatctttgttaaggcactagaaactaaagtatatcaagcaatcagtggctaagttttctcctgacatcagtagaatctaaaccatagttctgrgactcagactaattttctgagaacttaaagagattcttggcaaggtatagaatgattttgaaagaaaggtctgctgtgtatgatgtttatacaatttg

SEQ ID NO: 291214 - DNA, 561 bp, Homo sapiens
caagcaatcagtggctaagttttctcctgacatcagtagaatctaaaccatagttctgggactcagactaattttctgagaacttaaagagattcttggcaaggtatagaatgattttgaaagaaaggtctgctgtgtatgatgtttatacaatttgtgaaagagaagtacatgttgttagtcatgaatcatgtgacctagtggcttagtaagcactaaaccctcacattcagtctgtgttatattccgtagtctgtgtctggtagaaactttagaagggctaaacattttaaataactgagttttgcaacaactagtgaattttttctcttaattttttagttttytttatctgtagcttccctcactgctcacacacacacctcaggaaattagtcctaggtaaagacatgacaatttacaaaggagaaatgtattggttgctccaaagtttctctgaagtattactgtatcttccaatgtttcatatcagaatcttccaatgtttctctgaagtattactgtaattcagagctttctgatttcttatcaccatttgaa

SEQ ID NO: 291215 - DNA, 566 bp, Homo sapiens
caaacagtggggtttttacatcttttttactcttctgttataggtcgctgaaaatgaatataattgatgcttaaattacatttaaagaattactagtgagattgagctttttgtcaaaatttttctttggtgatacgtatttcttcttgattaattggctctttaagtttggtcagtttgacccactattcctttaatttttatggttgattttatttgagtcattcaatatgaaatagcagcagcaacaaatacagctctgtaagacacggcggttaaggtaccacctaggagcttattttctatctgtggatgaggaacctggaactcctctggctacttaatattataagtgggtggaaaaaaacattttaaaatttctrgtacagaaaatgttatttaggcattctatgctaataccttaaattgggtaaatttccttatatttcttttagatgtatagccacataatctcttctacagaatagaagcaaatctgacctagaaactcttggaaaatgctaccagaaatccgaattcctaaattctgtttatgtcaagctatt

SEQ ID NO: 291216 - DNA, 543 bp, Homo sapiens
gagatatctgtgctctcatccacagtcaacatcaacacttgcttttcaaatcccatctctcttccctatttgagggcactgttgcagacatgtttcccactttgtctttttttaatcaaatatttactcttcattatactcatcaacaaaacatactttcatcttaaccaaaaaaaatgaaaaagaagaaaaatttaaacatatttgcctttactttcttgcaagcttcactactcatttgccaacttttgctgtaaactccttggttgagrtgctctccctaatttctctcctcccataatattcttcctctatcattgagatataactcacatactgtaaaattcaccctattctctattaaagccactttagttaggcatttgtcccactaaatattgctactaaatattataattgggatctctaataacccacttgttgctaaatctagtagttaatgatcaatttccatctaatttgacttatcagaagcatttgacctgctagcatttatcacaactgtcttccttctttttgatt

SEQ ID NO: 291217 - DNA, 543 bp, Homo sapiens
gagatatctgtgctctcatccacagtcaacatcaacacttgcttttcaaatcccatctctcttccctatttgagggcactgttgcagacatgtttcccactttgtctttttttaatcaaatatttactcttcattatactcatcaacaaaacatactttcatcttaaccaaaaaaaatgaaaaagaagaaaaatttaaacatatttgcctttactttcttgcaagcttcactactcatttgccaacttttgctgtaaactccttggttgaggtgctctccctaatttctctcctcccataatattcttcctctmtcattgagatataactcacatactgtaaaattcaccctattctctattaaagccactttagttaggcatttgtcccactaaatattgctactaaatattataattgggatctctaataacccacttgttgctaaatctagtagttaatgatcaatttccatctaatttgacttatcagaagcatttgacctgctagcatttatcacaactgtcttccttctttttgatt

SEQ ID NO: 291218 - DNA, 543 bp, Homo sapiens
gagatatctgtgctctcatccacagtcaacatcaacacttgcttttcaaatcccatctctcttccctatttgagggcactgttgcagacatgtttcccactttgtctttttttaatcaaatatttactcttcattatactcatcaacaaaacatactttcatcttaaccaaaaaaaatgaaaaagaagaaaaatttaaacatatttgcctttactttcttgcaagcttcactactcatttgccaacttttgctgtaaactccttggttgaggtgctctccctaatttctctcctcccataatattcttcctctatcattgagatataactcacatacygtaaaattcaccctattctctattaaagccactttagttaggcatttgtcccactaaatattgctactaaatattataattgggatctctaataacccacttgttgctaaatctagtagttaatgatcaatttccatctaatttgacttatcagaagcatttgacctgctagcatttatcacaactgtcttccttctttttgatt

SEQ ID NO: 291219 - DNA, 543 bp, Homo sapiens
gagatatctgtgctctcatccacagtcaacatcaacacttgcttttcaaatcccatctctcttccctatttgagggcactgttgcagacatgtttcccactttgtctttttttaatcaaatatttactcttcattatactcatcaacaaaacatactttcatcttaaccaaaaaaaatgaaaaagaagaaaaatttaaacatatttgcctttactttcttgcaagcttcactactcatttgccaacttttgctgtaaactccttggttgaggtgctctccctaatttctctcctcccataatattcttcctctatcattgagatataactcacatactgtaaaattcaccctattctctattaaagccactttagtkaggcatttgtcccactaaatattgctactaaatattataattgggatctctaataacccacttgttgctaaatctagtagttaatgatcaatttccatctaatttgacttatcagaagcatttgacctgctagcatttatcacaactgtcttccttctttttgatt

SEQ ID NO: 291220 - DNA, 652 bp, Homo sapiens
ggcacatgtcatgtctgagcaggatatttaaaagccattgttttatcattattccttttctctccattacaaaagcgtcatggcccatatgggatcttctttttcagtctcagtctaaaaataaatacaagcagcagaactacctccaattggtggtggacactatctttccttaggaaagggattaagtgtaaccttggatccatttctatgtacaggatgtgactatatctcacaacctctcttactaatamcttggtagtacaatacaataacttatttcctggattactgcaggattactgttaagtgtattatgggagtaaaggaagggaagcaaataattgtgaccaagagaggagcttaggaaatcacattatttttcttgagcactctctcttgcatcctttaggaggataatatatccctaacgcattgcaccgtgacccacttggtcaataaaatgtcagtagaaagggtgcatgccacatctaaggaaagctttgtcttcctgccacaatcagatcagctttgcctaggtaggggctgttccttcagctctatttccagactgaagacaaataacaacagaaatgcatcgaaaacataacgaggaatgcatgagataaagcttacttgttctaagccactg

SEQ ID NO: 291221 - DNA, 1225 bp, Homo sapiens
atggcacatgtcatgtctgagcaggatatttaaaagccattgttttatcattattccttttctctccattacaaaagcgtcatggcccatatgggatcttctttttcagtctcagtctaaaaataaatacaagcagcagaactacctccaattggtggtggacactatctttccttaggaaagggattaagtgtaaccttggatccatttctatgtacaggatgtgactatatctcacaacctctcttactaataacttggtagtacaatacaataacttatttcctggattactgcaggattactgttaagtgtattatgggagtaaaggaagggaagcaaataattgtgaccaagagaggagcttaggaaatcacattatttttcttgagcactctctcttgcatcctttaggaggataatatatccctaacgcattgcaccrtgacccacttggtcaataaaatgtcagtagaaagggtgcatgccacatctaaggaaagctttgtcttcctgccacaatcagatcagctttgcctaggtaggggctgttccttcagctctatttccagactgaagacaaataacaacagaaatgcatcgwtagatacatagatgatggctaggtagttagcttaatttatagatgatgatcatgatgaaaatagatgataaagatagatagatagwagatagatagatagatagatagatagatagatagatagatagacagacaaaagcaaagcaagtccctctatctctaccccacaatagcaatatctttggacaacagtatactactatctcctttacatgaatgagaaccaaatgaagagagaaaatatcttgcgctggctcatttttaactcaggtctttggttctcacaatattaactaacattaccattcccattaccataacatagcactatcacttcactgtcttctaaatttgcctgaagaaaaaaaatcttggttattgttaaaagcataaattctgctcatcaaacagaattggccaaatcagactttctcagggtaaatattttataatctgcatgtttgacagaaacctcaggcgattcttattattaggaaagattgggaaataatgattaattgtttcattttatttgaaatgtatctgagcaaccatctgaagtaggagttatgagatagatgatatcccaattattacaaatgagaaaattgacactcagag

SEQ ID NO: 291222 - DNA, 605 bp, Homo sapiens
ctgatggttgaacctgacaaaaagctagtgttttaaaggagaagggaaagaaatggttctgaagtgggcatacagaatagaaaagacacttgagttataggaagtgtagaagaaaaaacagtctccattcaaggggttatagagatgtattttcagtgcagccacattttagttaagcaagaacataaagtgatcattcaaagaaggggttgagaacagaatggagtatgcttgtgacagtgattccaaaaagtactgaaggatttgaaaaaggtggagggttgggtgttaagatctgatcagtaaatgtaaacaattgtagggagataatcatttgtattatgmtttatggtattgaaacttggatttctgttaatatccaagggtagaagcccagtggattaattctagaaatcagaaaagggattgaataccctaaagcggctgttcatggcccttggggaagtgtcaacgcagcaaaacatggaatcactagagactgagattcagttttgcccctgagtaaagaagctgacttgcaaaagcacacaggtgattggatgacacaatttcagttgagaaatatatgaaggatgtgaaggttc

SEQ ID NO: 291223 - DNA, 580 bp, Homo sapiens
aacattgctcaaattttccctgacaaatcttaaaagcaacacctaaggagatcaaagtgttcccaagtaacttaagtttattctagagcaaagctctagaaaatacaaaaamaatctagcacgcaagtcaaaattcatgacagtggtatgaatagaaacaccaaatacaagccatgcaaaagagcaggaaaattcaacctattttacaaaatgtaatattcatttctaattaagacatcatcaatgtagcaataaaaggaaaatttctcaacttgacaaagggatctataaatatcctacaattattatacttaaggatgaatgactggatactatcttagagagattctaagcaagatagaatgtctactctcaaaactttattcaacattgtgttggaggttctagtcattgtactatggcaagaaaaacaaataaataaataaagattctaaattaaaattagaattgtcttttttatacgacatgatcatccattagaaaatttaaggaaatctggtaaatcagacaaacaaaaacaaactaattcttacaagaagtgagtttaagaaaagtgaaa

SEQ ID NO: 291224 - DNA, 580 bp, Homo sapiens
aacattgctcaaattttccctgacaaatcttaaaagcaacacctaaggagatcaaagtgttcccaagtaacttaagtttattctagagcaaagctctagaaaatacaaaaaaaatctagcacgcaagtcaaaattcatracagtggtatgaatagaaacaccaaatacaagccatgcaaaagagcaggaaaattcaacctattttacaaaatgtaatattcatttctaattaagacatcatcaatgtagcaataaaaggaaaatttctcaacttgacaaagggatctataaatatcctacaattattatacttaaggatgaatgactggatactatcttagagagattctaagcaagatagaatgtctactctcaaaactttattcaacattgtgttggaggttctagtcattgtactatggcaagaaaaacaaataaataaataaagattctaaattaaaattagaattgtcttttttatacgacatgatcatccattagaaaatttaaggaaatctggtaaatcagacaaacaaaaacaaactaattcttacaagaagtgagtttaagaaaagtgaaa

SEQ ID NO: 291225 - DNA, 580 bp, Homo sapiens
aacattgctcaaattttccctgacaaatcttaaaagcaacacctaaggagatcaaagtgttcccaagtaacttaagtttattctagagcaaagctctagaaaatacaaaaaaaatctagcacgcaagtcaaaattcatgacagtrgtatgaatagaaacaccaaatacaagccatgcaaaagagcaggaaaattcaacctattttacaaaatgtaatattcatttctaattaagacatcatcaatgtagcaataaaaggaaaatttctcaacttgacaaagggatctataaatatcctacaattattatacttaaggatgaatgactggatactatcttagagagattctaagcaagatagaatgtctactctcaaaactttattcaacattgtgttggaggttctagtcattgtactatggcaagaaaaacaaataaataaataaagattctaaattaaaattagaattgtcttttttatacgacatgatcatccattagaaaatttaaggaaatctggtaaatcagacaaacaaaaacaaactaattcttacaagaagtgagtttaagaaaagtgaaa

SEQ ID NO: 291226 - DNA, 617 bp, Homo sapiens
aaacaaacaaacaaacaaatatgataaaaactggccaataatggagtttaaaaacttggcctctatcaactttgagagactcctaatatccaaaggtaagataatttgagtattggttagaatagtaactacaatactttaatacagtgattgtttttattaaatggttaactgggtaacagaataatttgaaagacttgaaagaaaaagtcttaagtatatatcctggctttctttcatgaattttgatgaactttctrtcagtgtgtttaaatatttgtggtctgattctctttttataaaaactgttctaaatataaatgaagaaatgatagaattataatattatatttcaatcccaatgaaataatgttgttaatcaacgtttgtaaatagctgcaaaaatggagtaaaaaagatgttgtgtacttcttcatagaaaaatacaagaccatgaagaaattttgccaaacattaaaaaacaaaaattcaagtatgataaactaattttattggcaaaatagtggaattcttctccaggtgcacttctatacagtactatacattataaactgatttaaattcaagagatctccaattaaaaatgggtttttcaa

SEQ ID NO: 291227 - DNA, 593 bp, Homo sapiens
ttaaattgcaaatacatatacatgtaagatgaatttaacaatagaccttaaggaggcagttgagcttcaaaaggaagaaaaaaacagaattagtgtttatgtacattcagttrctcatctccgtgtgtctctctccatcagctacatttttcttcattagaccaaattttgctgcttctctcagcccatgttcactctataattcctaggtttgcatgtctcatcttagttgaaccaccagaatgactatatttagttctatctctaaataccaaattcccagaacaaactggctaaattgtgtcagcttttctcttctattccaattccctgtgtggaagggttggattataaatagtcaaacacacttgttttcaaaatgcctatttttttttctatttgaatcaccagttagatatcatattttggaaaacaagtccacatccagttcactctgtttatcatgtcctttctatagaacgtagtaacattagtcattcactcaattgtcgaattaacaaattaattgattttaagttggtgatataaaactattccagacaatatttagtactttctaaatatgatttact

SEQ ID NO: 291228 - DNA, 1073 bp, Homo sapiens
ttaaattgcaaatacatatacatgtaagatgaatttaacaatagaccttaaggaggcagttgagcttcaaaaggaagaaaaaaacagaattagtgtttatgtacattcagttgctcatctccgtgtgtctctctccatcagctacatttttcttcattagaccaaattttgctgcttctctcagcccatgttcactctataattcctaggtttgcatgtctcatcttagttgaaccaccagaatgactatatttagttctrtctctaaataccaaattcccagaacaaactggctaaattgtgtcagcttttctcttctattccaattccctgtgtggaagggttggattataaatagtcaaacacacttgttttcaaaatgcctatttttttttctatttgaatcaccagttagatatcatattttggaaaacaagtccacatccagttcactctgtttatcatgtcctttctatagaacgtagtaacattagtcattcactcaattgtcgaattaacaaattaattgattttaagttggtgatataaaactattccagacaatatttagtactttctaaatatgatttactwtgaaataaattgagaatgtatccaattacatgattaatgctttgaggtaagtcattccatgtcattctaatgtcatagtcccatgccagagcatttaaacctaacactcttgggatagagcttgaatgtttgtagtttttgtaaggtcacctcatgattctaaggtacattcctgattgaaaaccacagttgtaaaaatgcttcttggtaacacatttgtctctgtcaaatacattcatttaaatcattattgcatgtctgctatgttatagcatgtcatagcatgctatgttatagcatgtctgctatgtttctgcaaattagtagttaataaactaagattttctaggagatgaatccatgttttaggtacaatactaagtacctaaaacaagaagtgtttagtcaactgtctaawcacataatgtaaatcatctaattatttttcaaaagatgtaacactattaagaggagataat

SEQ ID NO: 291229 - DNA, 599 bp, Homo sapiens
tctttttaaatagcaatctactccatagtagttttattgaacagtaaggaaatcttacatcattgttttcagaaggaaaggatgacatcggaatagggcagccagtagagaatttgtccaaatcactagggcctcctcctgaccttcaccaggaaggatkcttaattttacaactgttcatttgtgctgtcactatgcaaaaaaaaacaccaattgagggtaaagtgatgagctggttcggtaagtcttagaaaagagcagatttatccaatgccttagcgtgtactaaaataaatgtatgtattttttcaatttgaaaaacaatatacaaactatgtaaaaggagtcaaaataaagtgtcaaagagttacagactccctatttgtcctggaatatatttttctctacctgttttactgaaaattttagtttctctttttacatatgttcttatctcaattcagatgaggtctattggttaggaattatgataaattccttttatcataaaaggaagatctattttggctcttttgaagctaccaatcatgggagcacagcaagtattcaaggataaagttgactgaccacaaactcca

SEQ ID NO: 291230 - DNA, 1088 bp, Homo sapiens
acaagccagcaaaatatggtttaggtcatgctattgttggcttgatgtaaaagtcatcaaaatgtggtactcaaaaagaagttattgatggttcacggttgaccgggatgtatggaatggaataagggaagtagttggtttatgtctgatcaaatggtgttakgccagatgggatttctaagtttgaaattatttctaatcttataaatgattggtaaatgaccttaactaacttatcctattatatccaattgggaaggatgactatgaagtagaaattatcttgagatatatatgtacatatatacattcattcacttgtgcatacacacacacaagtgtgtgtgcatgtattcagaagtaacctagacaatgaggaatatctaagaaatgaaaagatcaaattatgacaaagcttttagtgaggaattagttaccagcatatctcacttaaaacatgactctttatatttaagaaaaaaaaaaaaacatggtgacatttttactgttgaacaaaaataaaattttattacaaatgatgtggcaaaatgttaagtgaaaatgctgcagtgtataaccataggaggaaatwgaatgaataaaatctagaatttgattgcacaagcccagagtggggctcacacctataatcccagcactttggaaggccaaggtgggaggattacttgagcctatgagtttgagaccagcctgggcaatatggtgagaccttgtctctacaaaaaataaacacaaatagctgggcatagtggtggatgcctatagccccaactacttgggagactgaggtgggaggattgcttgagctcggaagtagatgctgcagtgaattgagatcacatcaatgcactccagccttggcaacagagtgagaccctgtctcaaacaaacagcaaaaaaagatagcacaaaagggtgattacagtcaacaacaatttattttacatttaaaaaatactggaagaatataactggaatgwttgtaacacaaaacaaatgataaatgcttgaggtgatggacaccccatttaccctgatgtgcttactacacattgtatgtatatatc

SEQ ID NO: 291231 - DNA, 530 bp, Homo sapiens
tcctatactggcttggagaggaaaaaataaaaaacaaaaaacaagttttttctatttatctaaggcagtggtcaggaaactactgcccacaaccaaactagatacagtttgcctgattttgtatgatccaagagcagagtgtttattatattttttcaaaaatyaaaagaataatatcccatgacatataaaatttctataaaattagaactttgttgtccataaataaatttctattggaagacaaccttacttattcattcatgtattatttatggctattttcacactgtggcagaggtattgagaccagaaaccctatgggctacaaagtcgactttgttttctatctagtcacgtaagaaagacttgaaaactcttggtctcgagaagggagaaattccctactggttattctatttcaaattagtcactatttgacattgatgagcgaatcaaaatggtgacaaaactggtgattagataaaaactatatacatgatagtaatcttgctcttgagtcaagcctt

SEQ ID NO: 291232 - DNA, 543 bp, Homo sapiens
gacaatgttcttcccctcccatatctgcataggttctatgtatcgatctatttttggaactgcatcaaagcacatagttcatatttattctttgtgatagttttgataagggtaaaatgactttctgctgctgtattttgtgcacataatagccaatgggagtcatagctagggatttgcaaacaacataaaatgaactgatgtcacctttatttgatcttaaactagtataaattttgtgttttatattgtaatatatattacaatgtcatgttatatttctccaacgtcttctgtgtaaaatgttgctctaagataatgctctatgcttttgaagtagtttgctaaattatctcacaagcagatactcttccagggatattggtaaactgatttgagattacataatttatttttaaatatttagtgagcttgttctrtgtgccaggcatggttatagatgctggaacaaagacaaaaatgtacacaacgttcccaaattctcttatacaagcagtcttttttgcttttgagagtaggggt

SEQ ID NO: 291233 - DNA, 554 bp, Homo sapiens
attgttaaacatcatatatcacaattaaataaccttgtccttgttttcccaactctgcctacttcattgctttaaggccacatcttctcactgtagcatgccttgataatgatgtttggtttataaggcatactcccaaggaagcaaagaactcatttatctatctatgaatcattgttctgtataaaataggaatccaaaccatatatcctatgccttaaacatcaatttgcagaaactaaaaatgctcgtaatcacaatttgaattgccttttgtaaattaagtagcattagcaaaatgatagcatgccaatccatctcagctaatgtgaagtttctattaaaaacaaatatcaataacatttaataaggggacatcaaaaatatattgaacatagaattatagcactaatgtactcttctgctgcacagggaagagttagaatttccagtggtaaaataattaatatatgccttaaaatttacataccacagtcatatttaatcttacttgatcctgacaataamactataaggtaggaattagtactgtt

SEQ ID NO: 291234 - DNA, 567 bp, Homo sapiens
aaaataaataaaaattaaatttactttttaaactgcattaacttttcaaaaagagaaattttgaaagaggttgtagtgtagaaacctatgctcattcttgcagatctataagagaacagcaggcgaggtactaagagtcagtgaggatagataattccaacaagaaatattgctgtacactactgcagaggaagatgtctgttcaaagaggggacatgagggcaaagagtgttttgttatttttaagatgtaaaatatgcaacctgttttgatgctgatggcaatgatgctccagtgcagaaatgatgaggaaggaatgagtcattacctaagaaaaagccctaagtagaaaataaaaatgggattcatggcaaagtaattgctatgatctttaaaacaggagcagtttcttcactgtaacaggaagaaaggcagaaatktgggtaaacggataagcatgtttggtagatttggttggaagaaggctattcgctttcggaagtgaatagttttccattgggagtgagagggctatgagagagatttaaaggtttaaaagacggaaga

SEQ ID NO: 291235 - DNA, 613 bp, Homo sapiens
tccaaatgtacattgaacagtccttttgaggctccattctcttcatcttctttaagaaaaagtaagtcattagaaagaaatgaaaataaattattttgttacagcaaaggggtcccaatccagaccccacccaagagagggttgttgcatctcatgcaagaaagaattcagggcaagtccatagagtaaagtgaaaacaaatttattaggaaagtgaagaaataaaagaatggctactccatagacagagcagccctgaaggcagctggttgcccatttttatggttatttcttgatgatatgctaaacaaggagtggattattcatgcctccccttttcagacaatgtagggtaacttcctggcattcccatggcatttgtaaactgtcatggcgctggtgggagtgtagcagtgaggaygaccagaggtcactcttgtggccatcttggttttggtgggttttggccagctcctttactgcaacctattttatcagcaacgtctttatgatctgtatcttgtgttgacctcctatctcatcctgtgacttagaatgccttaaccctctgagaatacagcccagtaggtctcaacattgttttaccagcccc

SEQ ID NO: 291236 - DNA, 601 bp, Homo sapiens
tgccttaaccctctgagaatacagcccagtaggtctcaacattgttttaccagcccccattcaagatggagttgctctggtttaaatgcctctgacacattcatgattgattgattgattgtttaatttttttaaaagctatctagttaatttagttaaaataaacctggcttattctttttttamacaaattgattttaaatagttaaaacatttttttaaatccataagtaattcttactctactcatttatacacacatatactcacatgtacacagacatacctacacacacacttataaatacatgtatacacagaatatagcaaggtcttttatcccttttcaatgaaataaatattgtattctatatttagaataaataatgttgaaaaagtgattttggagaaaggttgaaatgattgagtcttaagtgtgtcaatgtataatctacccctttctaaacatcgtgttttaagtagtcatcttacttcagaaattagaggttcaatgtgtttagaaatacatttcatcatgttcatacacaatatagatttctccttcctcagattgtctcccatgtaaatatactgcttgata

SEQ ID NO: 291237 - DNA, 601 bp, Homo sapiens
tgccttaaccctctgagaatacagcccagtaggtctcaacattgttttaccagcccccattcaagatggagttgctctggtttaaatgcctctgacacattcatgattgattgattgattgtttaatttttttaaaagctatctagttaatttagttaaaataaacctggcttattctttttttaaacaaattgattttaaatagttaaaacatttttttaaatccataagtaattcttactctactcatttatacacacatatactcacatgtacacagacatacctacacacacacttataaatacatgtatacacagaatatagcaaggtcttttatcccttttcaatgaaataaatattgtattctatatttagaataaataatgttgaaaaagtgattttggagaaaggttgaaatgattgagtcttaagtgtgtcaatgtataatctacccctttctaaacatcgtgttttaagtagtcatcttacttcagaaattagaggytcaatgtgtttagaaatacatttcatcatgttcatacacaatatagatttctccttcctcagattgtctcccatgtaaatatactgcttgata

SEQ ID NO: 291238 - DNA, 590 bp, Homo sapiens
cagactgagacttcttaaaaaaaaaaaaaatcacagaatctgaattggtagtcatctaatcttgcaaagtaaatatttttgcaggaatgtttctgagattctgattctgtgcctggatttcaatatgaatctctttaattttgtccagaaaatagagtttcatgtaaatatatcacaacccaaagagttatctcctcaccctcaccatttttgctaartcagatttctgagacattggagggaaggctcatttttttgttattgttaaaaagcaatagatagaaactaggccagctggttttaggaaaacaactaactggtttctgcaataacttagactggtgactaacatggtaaacctataaaatgataaggagtcataataagataaactcaacaaggttaaaccaattcacttcacttctgcagagaacccagcaggacatactaaagaacatacaagtttgttagcatatttttcatgttgctgaagaaaagattacatttgtccccattaatttggctgtcttggtctttccatatgacatggaaatatattatccttagtatatttttaggtgaataatgtc

SEQ ID NO: 291239 - DNA, 590 bp, Homo sapiens
cagactgagacttcttaaaaaaaaaaaaaatcacagaatctgaattggtagtcatctaatcttgcaaagtaaatatttttgcaggaatgtttctgagattctgattctgtgcctggatttcaatatgaatctctttaattttgtccagaaaatagagtttcatgtaaatatatcacaacccaaagagttatctcctcaccctcaccatttttgctaagtcagatttctgagacattggarggaaggctcatttttttgttattgttaaaaagcaatagatagaaactaggccagctggttttaggaaaacaactaactggtttctgcaataacttagactggtgactaacatggtaaacctataaaatgataaggagtcataataagataaactcaacaaggttaaaccaattcacttcacttctgcagagaacccagcaggacatactaaagaacatacaagtttgttagcatatttttcatgttgctgaagaaaagattacatttgtccccattaatttggctgtcttggtctttccatatgacatggaaatatattatccttagtatatttttaggtgaataatgtc

SEQ ID NO: 291240 - DNA, 567 bp, Homo sapiens
gaatccgggcggcagagcttgcagtgagctgagattgcgccactgcattccagcctgggtgacagagcgagactccatctcaaaagaaaaagaaaaaaaaaaaaagagccatggtgtgctactaacctgtggcctctttaaacccttcctccagtccttagcttaattcatgagtatgaggtttagtaccccaaaaacctttgctttaggccccaaccagaatctcctcattatagtgctgatactgcatttgttttcaggacagattttctcaagtccttcgcccacatgcagggatcaagaaaacataatgcctgctatgcttgcaaatcagaagagtatgcctcttatgcctaggaatcagcccctgctgagatccagctaactgttgccctgsttgtatgcaaaccaaatgttgccttatattctgatgtttcaagagaagagtgaaatgtgtattttgatgataaaacacctgaatttcaagtgttgctgtttagttcaagctgattaataatattttcagaaatatgaaatgcaacacaaaacttagggggtaggggagat

SEQ ID NO: 291241 - DNA, 570 bp, Homo sapiens
tttatgctctgtaataggaaaaacaaacatttaaacaagtatgaaaggcagtataataccctcctacaagatatctacatcctaattactgaaacctgtcaatatgttagcttctgtgtcaaaaagtyttttgcagacgtgattaagttaaagatatcgtgatcagaagagtaccttggattacctaggtgggcccaatgtaatcaccaagatccttataagagaacgagagaggcagaaaatcaatgtgggaaggcaatgtgaaaatagaagcagaggtcagaagacagaaagttaaagatggcctgctgactttgaagatagaggaagggaccacaagccaaagaatacaggtagcctctaaaagctgtaaaagataaagaaattgattatcttgtatatcctccagaaggaaaatggcactgctagcctattttagacttttgagctccagaagtataataaatttgtgctgttttaagcaaaaaaaaattggtgtaatttgttacagaagaaataggaaactaatataataggcataataataaagcatgataggtgttatgataa

SEQ ID NO: 291242 - DNA, 1210 bp, Homo sapiens
tttatgctctgtaataggaaaaacaaacatttaaacaagtatgaaaggcagtataataccctcctacaagatatctacatcctaattactgaaacctgtcaatatgttagcttctgtgtcaaaaagttttttgcagacgtgattaagttaaagatatcgtgatcagaagagtaccttggattacctaggtgggcccaatgtaatcaccaagatccttataagagaacgagagaggcagaaaatcaatgtgggaaggcaatgtgaaaatagaagcagaggtcagaagacagaaagttaaagatggcctgctgactttgaagatagaggaagggrccacaagccaaagaatacaggtagcctctaaaagctgtaaaagataaagaaattgattatcttgtatatcctccagaaggaaaatggcactgctagcctattttagacttttgagctccagaagtataataaatttgtgctgttttaagcaaaaaaaaattggtgtaatttgttacagaagaaataggaaactaatataataggcataataataaagcatgataggtgttatgataawtcccaggaaagatgtctgtactgaaggaagagatttgggagtcatcagtttacagattttgaagctttgggagtggacaaacttaccaaaggtttcttggattcatttaataagtcctagagtgaggtggagaaaaagactagaactgagccttgaaggtcatcaatattttaagtgagagtagataaaaggagtgttcagaggaaaaaaagagaagctggtgcggaaggaggcacaccagaagagagttgtaccccaggaggtaagaaaatagagagtcctaaagaaaagttgccaacagtatcaaatgttcccaagaagttaagcaagctagctaaagagtgtctacatttcgcaacatgtaagcttggataacctgtgtgaaagcagggttgttggcatattgcaggaaaaataataatgttgaatgagttgaagaactgggacagaaaatatagataatgccttcaagaattttgaccgtaaaggggtaaggagagaaaaaaaatagtacttgcagaggtagtttgtgttgaaggttgtttactttttattttctattttttaatgcwgaaaaaccatgcatgatgaaattctaatgagattcctccagaagtggagaaaatggagatgcaagca

SEQ ID NO: 291243 - DNA, 619 bp, Homo sapiens
aagagaatttatatttacttgtttgtttgtttattatggttatagaagctgatgctattgaagaaataataatcaagcttactttaaaactggctgagttacaggtttaattccctccttcacatttcgtgaacgcacaggaggagggtcagtgcccctcctaaccagaatgtcatttatagactaacatgagaattgcaagagaagcatggccaatagtcaagcagcacatagtggtgagaaaattctaaaataaggaatagccagggtttgctactagtgaacaacacacagtgggraggatgtaaatgtgtgtcagtactgggccaaagaaagatacatttgattcttaattcacaagtaaatgtgtgcccctctcatcggttctggttcacgaagattctaatcaagcaatttatctggttcatttctcatatgccctcatcaactgaagtgcaaagtctactcaacagccagaaaagatgaggtcagccttgaaaataagtgttggcccatttgcccaaggcccaaaagaaaccactgggtgacaaatgagatcagcctcttttggactagcctctacagcgccacagcaatattcgaaaggtgaaaattacag

SEQ ID NO: 291244 - DNA, 1155 bp, Homo sapiens
catgacacataatttggcagtaatcatatcagtgttttcccacagtgcatcccttttccaagaatgtgtgacagagttagaaacaccaaactttattgctggagaaggctttggaaaatatatgatccaaagtctcataaagaggaggaaacacaggcctaagaattagctgacttgcccaagacatgaggaaagttaatggctgggttcagactagaatccctatttccgctgctccactcagagctttccaatcattcccacatctcagaaaggggaattcttccagctttatcagaagaacatccaaccgcagtacatacaaatrtaaaatgcaaggctagccacatgagattctataaaaggattcatcattagatgattctgatggtgaatatcttttggaaaatactagagatagatacttcgaaaattatttttcccttttttgattggctgcaattctgaatgtgcctgtgtttaaaccaacctctctactgctctcccctccccttctctttctctgtctctctctatctctgttcttttattctctcttgggtttagttacttgcccwcatgacacataatttggcagtaatcatatcagtgttttcccacagtgcatcccttttccaagaatgtgtgacagagttagaaacaccaaactttattgctggagaaggctttggaaaatatatgatccaaagtctcataaagaggaggaaacacaggcctaagaattagctgacttgcccaagacatgaggaaagttaatggctgggttcagactagaatccctatttccgctgctccactcagagctttccaatcattcccacatctcagaaaggggaattcttccagctttatcagaagaacatccaaccgcagtacatacaaatgtwaaatgcaaggctagccacatgagattctataaaaggattcatcattagatgattctgatggtgaatatcttttggaaaatactagagatagatacttcgaaaattatttttcccttttttgattggctgcaattctgaatgtgcctgtgtttaaaccaacctctctactgctctcccctccccttctctttctctgtctctctctatctctgttcttttattctctcttgggtttagttacttgccc

SEQ ID NO: 291245 - DNA, 530 bp, Homo sapiens
tgggattggattttttgcatctcactaaatatttgtattcatagtgtctagcatagagtctggcacatggtgtgtggtcctctgctcagtgaacacttttgcatgaatgaaaaaagaaatctttgcctagtgtaaggatgtaaaggaatgaaaaacaggaggcttaattcctcctgcttaaaataagagctattttcctttcctccctttttgtcagaacgtgtactgtagaaaacctgtatataaagtaccttctctgtctttttgaaatgtatctttctagacagtaaataagccttctgtcagctttattattgagkaatgtctttctcaaagacctgagagtcatctctttgaaatgtaaatatcaaaggggaaggtgcccccatcctacaattttccatgggaaggcaggagcctaacatcagctcgcgccatgctccaagttataaacctccctcccgtcatagggtgttccccccaccccaaccccacccgcttcctctctcctctggatacacccagttagc

SEQ ID NO: 291246 - DNA, 449 bp, Homo sapiens
ttctaattctccaaaatcattaaaaatcctcatttttatattatatgtgataatccatatataatatactaaatgtaattaagcatctagtctgtgtaatattggtctcaacagtttccccacctgtaaaataaggactaattatagtataaccttccagaaaagtgggaattatgtgagatgtcaagtgggtagcatagtgcctgacacacctaagrtttcattaaatagaagctgttttgttatccttaaaataatcccacaaaaaaatattatttagagatgaaaaaactaaagctgagagaagtttaaatagctcttaggatattaagccacttattttgacagtgaaatgatggttacttttctgaatatagcttcctttttcctgagttttattgatcttcaatgggataaatgtgctgatggctgaaatactgaagtttaca

SEQ ID NO: 291247 - DNA, 610 bp, Homo sapiens
catgactgataagaaaatgaaggctagatacagatttgggaaaactaatttacactggaggagggaagaagggaaagaagagcaactacagaaaatcaactgttaataaatatcagagactgcagagaagtcacgagataagctgcagcgtatgttcctccagctagaaaatcgcaatcatttctctgagaagagaagctgataaggtcccctcccctccaccctgcaatcattttgcattttakgttatttgaaaagagcttgattattttcctttgaatgaaaccagattgattcacatttacctgtcaacagaatgttccattcctctgttttgcttgtctatttaaaggcatatgacctgactatgaaattccatatacaaacgttcagttaaatgtaagtaaataaaaatgagtgaccagcttgcattttaaatattttatatttttatttctggtagcaaattatgctaaattagaatccactgattgataaatatcactgatatggagtaatgaattgaggtcatgaatattgctttactcaaggtcagatacaatctttaaaaatcatacgcagaggaaaaagctgcatgtgaacatgataa

SEQ ID NO: 291248 - DNA, 547 bp, Homo sapiens
ataaaacgcagtgccaatagatgtcctagtcagggtgaggtgacgaatgctcatctatgtaacactgtactgtgaatagaccttattagtggaagtgaggggtgatcctgaaagctgtggctggagaatcatgttctttttgtctttgggasctttcctcctttaggtccttagggatttaacctataggtaagaaacatagaatgaggatcatatgcaagatgttcttaagactgtgttccatggtgaggaatgtagtcacatctaactacaaaatgtagtctggctatgtaacagaaggaaaagggaaatgttttggtgaacagttagccattttctccgacacagggtgatgtgataacgtgtgatagggaaagatgcagagcttgttggagcatctaggagattcatctaactaaaacttagagggagcagggtgtcaaaaagtctctccccatgagatgacaactttgctgggaattgaaggaggaataagagtttaatatgttaaaaagagttgagaaaaaaatgtgctaaacaaaataaa

SEQ ID NO: 291249 - DNA, 623 bp, Homo sapiens
ttctgaaatgtattatgtaattgtaggatgcaacaaaccaagatgtttactggacttaatgaaactgatgttgtaagaaggcaatttagccattttatggtggacatgttagtttcaattcaacrttttaaagaatagtcaatattctgctttatagcctgtgaacaatagtgatttccatgttggtttttggcatttcactacttcaattaaagattgtatttcataaaattgatactagtttctcattaactagcttactttttctcatctctgcctcaatccccactaaaaaatggggtgacagcatttatcttaaagacaatgtagggattaaaatattttttaaataattgttactttctatctttataattaggttttgaacttcttgaggccagggactgtgtctgaaaacaccgacggtggctaactcaaggtgagtccacaaccacattttaaccctttcccttctctgggtcctaatacttaatacagtaactgatgtatagttcaactcaacgaatattggttaggatggatggatggataaaatactcaaacattttactctgtttacctaatattgagttattctttactatagattttcctttataatg

SEQ ID NO: 291250 - DNA, 504 bp, Homo sapiens
taaacttgtgatgaataagataaacttaaatgttttaaaatcaatgtttctaaatacaaactttctaaataaagtctgtgaggtttaaaagttcgttagcatgctcaaatctcttatctgctaaaattttgcatcctcagtttaaagaaaagaatatcaccgtccctatcccctgttgatcttattttggggttgatgtatcttatgactctaagaaaatggaaatatctgcatatggagaaggtacacaaaggtccttcagaaatcacagtaccaytgaagtcaaataagatgataactcaacaaacaaataagagataacgaagattgtagtaaatttatttcaggctttcagcctgtttccatgggggttcatcattgttcaattttatatgttaagattcagcttaccttccccaaaaagctttcttggatacccccagtcaaattgatgtgttattcttttgaattcctctgtgtcttcattcttgactctcttaaaat

SEQ ID NO: 291251 - DNA, 1066 bp, Homo sapiens
ccttcctgctgccttgggaagaaagcaccttgcttccccttcaccttccaccatgattgtaagtttcctgagacctccccaaccatgctaaactgtgagtcaattaaacctcttttctttataaattacccagtcttgggcagttctttatagcagtatgaaaatgaattaatrcaagtgggcattaggatatacagacagaaaaaactactaagatagatagatagatactcataggacatattttgaccatctaaccatctagaactgaattccattaatgtctttatctgttttgtgctgctataacacaatacccccgcatgagtaatttataaagaatggaagtttatttgactcatggttctggagactgggaaatctaagatcatggcaccagcacctggcaagggcctcatcccatggcagaagggaagaaggtggaagtgatttcatgagactgaaagagtaaatggggacagaacttattctttcatcaggaacccatgcccatgataattaaaccacttctactwtatgtccatttaagaaacccgttaataacaggaagtaactcactccgtgcctggaatctggaattaaatctaggccaaactacagagcctaacaatgtgtatctcaggctaaaacaaatccagaatgtgggagttggaaaggattttagagataatttagtccaaatcctccattttatggtagggaaactgaagctcagggaggttccctgatttgtcaaaagtttcgcaaaatgtatgtttatatgtcactttaatcctataaagagtctgaggaaggactaaaatagaatgaaaaaaggatatagagacaatagtttgtgttagcaaacctcwccttaatgtttcaaccattaagatgaccttctccagggtgaacttttcagcagtactaagctttataaatataatggatggcaaagatagtttgctctaggacagagcacgattacatggtaaaacttccgtgctgtgctctaaaaattactctctcaaccgctaattgaactctgaggattctttaccaggag

SEQ ID NO: 291252 - DNA, 1034 bp, Homo sapiens
tgaacttttcagcagtactaagctttataaatataatggatggcaaagatagtttgctctaggacagagcacgattacatggtaaaacttccgtgctgtgctctaaaaattactctctcaaccgctaattgaactctgaggattctttaccaggagagatcagttttattccataactaagggctkaaggtaaaagtacccttggaatgattctctttgtctttcccttctttacaagatttatcagatggtacagaaaggtgtccagcaaaaatggccacagggaaatccacagatcatcataggattaagcatttaagtaagctaggaagagtggaaaaagtaggcttttcaccagggccagattgttggagggtcttatttcagggcacctggaagcacagtgaaagccactgattttcactgtgctgactacgtgagcagggacttgggaagcaggaatgtgtggtttagcatctggwagcactcctatctcccacaaaatattaaagtagaaaataaaacaaggttgtgttttcagagttaagctatgaaacaaaaaaagaatttaagcatagctgtatacatttcatacaacaagctatacacatggatagctatacaaagctataccttaaacaggaagaatgacctccaggctaaggccaaacctggaatataattgaagttatttgtatttatgaagagaacttgtcaatcagaaggactgttagctagcaatggaaatatgagatgctgagaaacaaacattggtagcggaggaattcctaccccatttaagggatgggttcactagctttagaacccaggtatgaaatccatctgcagatctaattctgcagctaattagatctgcwgtgaaggtaggtgtactccacatacttatctcgatgactctaatcatcgaacacagaggcctacaaactaaggccagtgggaccaaatccagcccaccatcctgcttttgtaaataaggttttttgtggaacacaaccattgccatttgtttacat

SEQ ID NO: 291253 - DNA, 338 bp, Homo sapiens
aaaatgcttgagatatgcagactttttagggttgtgaatatttgacctgcataaaagaaatgattaggcttccatcaatcattcctctgctgaacactctgctgagatcggtttatccagatgcttctcagctgcctcggttctgcacagtttgtaaactaatccagttttgtttgttatgtgctagagaaaggataaactccaagctgaaaaatatggacaaagatataattatcttaacataacactcatgckttatttttatgtaaaatgtcagaaactttattatctatatatttcagcttccaaaagaaggtggaagtcacttgataatgtct

SEQ ID NO: 291254 - DNA, 482 bp, Homo sapiens
atcagtaacactctcttccacatctacatcttgtcccactagaagatcttcaggggcaataacacaaatgaagctgtcatctcctacgacagcaatgccttattttggaataccacctgagaccattctgtagttaacattttttttaagtagaaagagtacactctaaaataatgacatgaagtatagcatagtatggcaaatacataaaccagtaacatagtcattgattatcaagtattaataccattgatcatttattatcaagtaytaatgccattacttttaatggcaaaaactgcaattacttttgtaccaatcaaatatgatgtaccatacataattgtatgtgctatgagtaatgcactgtgctataacattacaacagctatcacatcactagatgataagaatttttcagctctgttataagcttacgaaaccactgtcatatatgcagtccattgctgactgatatgtta

SEQ ID NO: 291255 - DNA, 641 bp, Homo sapiens
ggcccagaactgaaatgcaatacttctatgtatatttcattgcccaaaaagtcaatgtccatatgtaatggcaaaggaggctgggaaatgcagtctccttgtgagtaaagggagaaggtttaggtggtggtctctgccacacaccatttctccctcagaacactgcaaatggtctccttgcactcactgtcaccccaggataggtatctccacatagtagcgagaggaatcttttacaagtgtgtgttgtgttatattatgctcctgtgcaaaaccctttaaatcttcttccacatccatgatagaatctagtctcttcgccatggccagcaaggacttrcaagatctgtcccctgcctatctttgatcttatctactatactctgcctttcactcactttactctagccctacagatcttcttcctgtcctctagaacatgctggacttattaccaactcagggactttgcccttgctgtcgccttagcctgtgacaaacttccatcttgcattcctttggttctttgctaaataaaatattgcctttctaaaaaggccttgtttgacctcttaactacttctcatcatttaaaaatttgtattaggacacattacaaacaaaaagttatagagaatatt

SEQ ID NO: 291256 - DNA, 627 bp, Homo sapiens
atcctagggctgaaaggtcttgttctcaagtcaacaaaactctacctgtcaaaatttgtttcagggtaaacactcaaaaaatgaccattcattatccttcttgtcccatggggaagttgcattgtcataataagtcctcataccccaaaggcatcatgacccagagaggtgcagatgcattggcagacttttacacaccatgatctctgaaaaggaaccattgggtagaaaacattgtagttcctggtcctttgggcagccattttgccttcctcctttgaaatatagtctcatttcagttaataaaaatagtatttgtacataattttataattttaaaggttatttcccatagattttaaataattcaatgtttagatggcatataaataaatattgytcttttatagagatggaaggtgagggtctgaatgcctcctggtgtgctgggtgccttacagacatcaccacactggcttatcaggagatgcatgttcggtggagcttccccagcctgctcacagctacccagccacttgattgagtactgggttcccccttgggtctaacacaaaattcacaacttgctatcacaccacagttccttagagtctcagagttggtaaa

SEQ ID NO: 291257 - DNA, 592 bp, Homo sapiens
ggaggatccctcatgtactggtgctgtcctccagacactgagtgagttcttgcaacatctggttgtttaagtgtgtagcacctgcctctgacccccacccactgtcttttgctccttcttctaccctatgatgtgtctgttccccttcaccttgtgccatgattgtaagttatgtgaggcctcaccagaagcagatgccagtgccatgctttctccacatcctgcaaaaccatgccaattaatccttttctctttatactatttttttaaaaaagacaagagataacaagtattagcaatggtgtggagaaaaggtaaacatggtrtactgctagtgggaatgtagaatggtacagccagtatggaaagcaatatggaggtttctgaagaaattagagaacagagttaccatatgacccagcaacctctcatctaagtgtatatgcaaaggaaatgaaatcaccgccttgtaaagatagtaaagatatctgtgctccatggttcttatagcattgttcacaatagtcaagatatgaaaacgccctaaatgtccatcagttgatgaatggataaagacattgtagtgtatatt

SEQ ID NO: 291258 - DNA, 577 bp, Homo sapiens
ttaccatatgacccagcaacctctcatctaagtgtatatgcaaaggaaatgaaatcaccgccttgtaaagatagtaaagrtatctgtgctccatggttcttatagcattgttcacaatagtcaagatatgaaaacgccctaaatgtccatcagttgatgaatggataaagacattgtagtgtatatttatggatattttctaactttaaaaaaggagatcctgccattgctgcaacagcttcgatgacctaaaggacattatggtaagtgaaataagccagacacaagaggaaaaatactgcatgatctcacttacatgtggaaactaacaaaacaaacaaacaaaacaaaaacaaaacttgaatacatagaaatagaggtaaaaaagatggttaccagaggtcagggggtgggaaaatggggcaatggaggtcaaagggcacaaagtttcagttatgtagtataaataaccccagtgatctaaagtatagcctgagtactgtagttaataatattgtatcctggaaatttgataagagagtaggttttagatatttttacctaccaaaaagtggaa

SEQ ID NO: 291259 - DNA, 571 bp, Homo sapiens
accttgacatacccaatatcttggaacagagaatgtacctgacaaaaattgtctggtgaatgaatgtgaagcatgagaaaacaatgggacataacatgaataccttctcttcagtttatttctacaaggggcaggaagaagatgtgaagaaaaaagaaaaaaaggaaggagtgatccccagttgacacctaattattcagtctggaggaattctgagctaagtttgtgttgagtgtgactgatgctggcaggtggaactttagcytgagttgtgctggtggacacactgttcgctgatggtggtgaggggggctcatcaacagcttactgtacatcacacttgttaggttctgagtccctcctctgccctccctggccttacactgatctctctccatttgattatcttacaaacatttttactaggcaattaaatgcttaatttggataaaagaagagagagtgcaaaaacaatagttcacatgcacatataattagcattgagtggattaaatcacataagacccaaactggaagtatggagaaaatgaagctggagatgtaaagttga

SEQ ID NO: 291260 - DNA, 582 bp, Homo sapiens
agactcaatagctgtagaggaggccaggycctttgtcttaccacagtgagcagagtgggtcctgagccagcagcctgtagactccccttcctgcctgaggctctgccatcttctcaaaggaagatgaggctcagctctcagttccagcctttcctgaccacagctgtctctgagaacatagtcagttcctttttcctttctccattctcatcccagacacacagagcccattcccatatttttgtccattaccacacccttcccaccagtccctcagagaagagaactacagatgaactgccttcattatttcttaggtgtttggtttcttgctggatgacaggccttgtaaatgtagcacttattcagactgaccacagcatgagcacaaaagggatcaccatcacaggcctaggtcagccaaagaaccattattacattctctggtggaaatatccctcctttgaacaagaaaacatctagtagagcaaaggggcagcatggggaaatttgagatggcagaaatattctgcatcatggtcatggggtggataaatgaccatgcatttgttaaaacccatg

SEQ ID NO: 291261 - DNA, 582 bp, Homo sapiens
agactcaatagctgtagaggaggccaggtcctttgtcttaccacagtgagcagagtgggtcctgagccagcagcctgtagactccccttcctkcctgaggctctgccatcttctcaaaggaagatgaggctcagctctcagttccagcctttcctgaccacagctgtctctgagaacatagtcagttcctttttcctttctccattctcatcccagacacacagagcccattcccatatttttgtccattaccacacccttcccaccagtccctcagagaagagaactacagatgaactgccttcattatttcttaggtgtttggtttcttgctggatgacaggccttgtaaatgtagcacttattcagactgaccacagcatgagcacaaaagggatcaccatcacaggcctaggtcagccaaagaaccattattacattctctggtggaaatatccctcctttgaacaagaaaacatctagtagagcaaaggggcagcatggggaaatttgagatggcagaaatattctgcatcatggtcatggggtggataaatgaccatgcatttgttaaaacccatg

SEQ ID NO: 291262 - DNA, 547 bp, Homo sapiens
tgtccttccaggtaaaattggcctgttaggaagatttcctttcccctgtggcgtttcaggctatctctaagtggggacataactcccagcattcgcttcttggtggtactgacataggctattggagcygcctgaaagccaaactctgaatcttcccattgttatttatttatttatttatttatttatttatttatttatttattcttttaaaattttattaagggagtaaatgtacttctttgttacatgaggattgcatgtgtactggtgaagattgggcttctagtgaaaccatcacccaaatattgaacattgtacccaacaggtaatattcaaccctaactccctcccactctccccacttttggagtcggcagagtctattctgttcatatttatgtccatatgtactcaatatttagctcccacttatgagtgagaaatgtggtatttggttttctgtttctgtgttagtttacttaggataatggcctccaactccacccatgttgctgcaaaggacatgattttattctttcttatg

SEQ ID NO: 291263 - DNA, 544 bp, Homo sapiens
tattttttaaactcatcctctttagatccctcttaatcacattttcagcccctctccccaggagagctggccacttctttgtgctccaatcatcccatatttctgctagagtaccttagcatttcttatgcaattatttgcttaaccacctgccttctccaatacatgatgagctcctccagtgaagtgaccatattgttcacatctctgtatcctgagggcctagcaccatgcttcatgaaagtcattcaaagcatttattgaatgaatggatggattggtagagcagcccatcccctgtgtacttaggacaatgccctgatacaggacctggtacagggaacagcacaagcayggtctcacttcttcagcaaaacttgatccacactgtgagcttttcagagcctcctcgtattcctccctgatgccactttgtagattttcaaatcgtttcaaagctttaactttctaccaacagtatcaccaggccttctcacactgtctctagtgacagagaataggaggatgggagaagaattatgca

SEQ ID NO: 291264 - DNA, 562 bp, Homo sapiens
atcagtgagaatgaatgaactacaaccacatgaattgacatggctgaatcccatcattgtaatgttgagtgaaagaagataggcacaaagggctacatgctttgtgattccayttatataaattccagaagcaagaaaatcacatccatgctgttaaaagtcaagatagtggtcaccttggaggggtactattgataggaggaggggaggatcccaaagagcatggtttctgggatactagtaatgttatgcttcttgatctgggtgcaggttacatgcatatgttcagataatttaaattcaacacattggacatttatgatttgtgctctgtcatacatagaaaatgtggcttatgtcaagacttccaaaacagtggccatgtgggatgtctgagtgaagtgtagttcctagatctgtggcaataggacacccactccatgccaaatagaatacagaattctcccaatgatggcatgacatctcattaactgcatgaagccaaagaagattttgtaatcaattccggttctaggatttccttaaacctgcccatggttaa

SEQ ID NO: 291265 - DNA, 558 bp, Homo sapiens
ttctcctgtgtggaattatcctaggaaatagcttcagattcctctggaaaagttgcaaagaaatgcatggaggtaatgttgcaaggaccttctcaagagaatccaatctttgcttcaaccaaaggctctgggcctgtgaactggcttagaccttaaaactgggtgggagagcaagattctccattttggcgtccctatccaattttctcaccaccagactctagtttgtcctgttatataaattaagtaatatcttaatacgttgtccatctatttcattcctagggacactgtgattatccagccactgccaaagatttctgcaggctaaaaccaatttttgatgaccatttcattgttgctgctcattgtgrtaattatgtccatcttgtctctggaagttcggtgttgtcacatggcttctgctacttcagaattccatcaaacttatcaaaatcaggaaaccttctcagtggcagtagctcccagcccacagatggctgccaaagagctatgcaagaatcctggtgctccctcactgatgctcttctcaatacc

SEQ ID NO: 291266 - DNA, 512 bp, Homo sapiens
cattgattacattgattcttcttgaagttacttcacctcargctcaaggttgggccatgtatattacaactctctaggactccgtggacataaccctgctcacatgatttcatttgtgctctctctaaatgaaaatacagcagctgggcagggcacctggtggtgggtctccctgtagaatagagcagatggcaccaagcctttcatctattttgcccaggaaggggagagctcctctgcctattggtgacctctagccttactcacagtccggtattttccaaacacaaagtgcctactgcaattttgaaagatattctgacatccaatttaacaattaacaatttttttattgtttttttcccaccatggggctcagctcctgctgagctgtttcacagagagggcagtttgccaagcattaacttgtctggcccagggggcattactgtacagctgatttcatttgagtgaacatcattcctttggtcttatttgcaaactgtcatatg

SEQ ID NO: 291267 - DNA, 1167 bp, Homo sapiens
gttgtagtaggttgtagtctccaggctccggcaccagaaagagacctacctttcaaatcaagaggtgctgacgcaatatgacggtccatttgtcctaggcccttcctcgccttctaagggttgctgattgtaggaagggtattcattttattagaaaagatggtcttcaaaaattgttctctccttaaggcttctggaaatagctgatggctagtatagttacttttctaagtgaacagaggctgaagagagggtctctgccttgggggcatcaggcccatgtaagtgtaaggttaccamgagggaaggagagggattacaagcaagtttatagactgaatgttgaagccaccagcctcttctcactttcaggtctcagaacctcagcagctagatgttaccttccaggaaggagatcagaagaatcttgtctgggcaatctgaccagactaggaggacaaattgaaggataatgaaattgaggatgcccaaagtaacagatcacagcactccatacgtgacatccacgatggggaagcctagccacttgcacagcactgccaatcagactwgcaaagccacaaagattatgaacaaagaagtaaaactcactatagacaatgtaattgtttacataaacaattatgtaagctaaggaggcagatagccaacaaataacaataataattaataataattatttaggaatttatawaccaaaacattctacagaatctgatttatgaacttgacacactacagaatatgaagtcaatacacaatatgcaaatgatatctacgtaataggaacaaacaactggaaaatcaaatcacaacatagaacatacagtataatccaaacttcaaggcatgatagctagatagataatagataataaatagatgttagatcatagattagacagatagataaatggtattagaggatagaggagaaagaccacagaaagacatatgaacatttcctccacaaatagaacaatatctgtttcatcctagtttttgccatggtaataaatgacatctctatctacctggttgttcacgccagaaacctggaagtcattcccaaccttacctctccctcaagcatctcatccaaacaatcaccaagttctgttaattcttccttcaaagacagcttta

SEQ ID NO: 291268 - DNA, 595 bp, Homo sapiens
gcaaagccacaaagattatgaacaaagaagtaaaactcactatagacaatgtaattgtttacataaacaattatgtaagctaaggaggcagatagccaacaaataacaataataattaataataattatttaggaatttatataccaaaacattctacagaatctgatttatgaacttgacacactacagaatatgaagtcaatacacaatatgcaaatgatatctacgtaataggaacaaacaactggaaaatcaaatcacaacatagaacatacagtataatccaaacttcaaggcatgatagctagatagataatagataataaatagatgttagatcatagattagacagatagataaatggtattagaggatagaggagaaagaccacagaaagacatatgaacatttcctccacaaatagaacaatatctgtttcatcctagtttttgccatggtaataaatgacatctctatctacctggttgttcacgccagaaacctggaagtcattcccraccttacctctccctcaagcatctcatccaaacaatcaccaagttctgttaattcttccttcaaagacagcttta

SEQ ID NO: 291269 - DNA, 580 bp, Homo sapiens
ccttccccctgtctgattgtgcatgcttagtaagagtagaacacgtgaacacccatctgagcattgtatgttgcctaagagagatccaatttgatcatgttctataagtgtagatacaatctatgrggaaaataagccatatgtctcagtaactacattgctgagacggccacaggggattagacagtccctcaagggtagagttgaggggcaagcctggtttcttgggaccttaggaattttagttccaggttgctttctcagcacaatgctggtagcagaaagggacagggtgctggaaagaagacatggctacatttccatacaggtttggccaagttccagttggctcacctcccaggtatcatggccaggtactcctgtattgctattccctgcccactagaatgaaggctagagctttatttatttcagtatttggttgttttaaaagggagtttcttttgcttgcaggtgggtttgctttttccctttaagtaggatattgtaattcttctctggcttcttgaagttgatcttttgcaggctgccatatttaaaggagggtgaaagaaaaacc

SEQ ID NO: 291270 - DNA, 584 bp, Homo sapiens
gtgtgtcactctgatcctctaagtttacagtaatgttttacacaggaatagataactaatataactgtgatttattaattcaaccatctgttcattctacaaatgttgatgaagtatttattatgtactagaacaatgttggcactggggatataacaatgaacaacaagcagacatggctgttgtctttttggagcttattgtttagatgggaagacatacggtcaaatttgcaattttaatgaagtgtggtacragtacagaatagggatcatgagacactgggagtctaaatggcagaaaagcctgactagtaacgttggtgttgggagggtttattttaaaaagtgttatttttgagttctgaagaataagacatttattacatgaaaaatgaagagaatgctccagggagagagaacttatgtacgatgacctagagatgagagagagtttgagaaaagggtagaatttctctattttgaatctgagacagagaagcctatttagatgtgttgagataacatgaaggcctggtaaatcattttcagatttaagacttcatgctgaagaaaataagctac

SEQ ID NO: 291271 - DNA, 589 bp, Homo sapiens
tgattctcttaggatttctagttatcttacaagtaaattaaatatctttacttactgattgaaaaattgttagttgaaaaatataaagcattgctgtatgtctgtatatgttttgacacagacaattcttacttttgattcccccctttgcaaaaaaaataataataataagaaaataataakaagaagaaaataataataagaagaagaacaaaagcagaaaatgtagaaaaggtttcactatggctactgaaaataaaccagtaaatggtattcactggaatggagaaaaccttttttggatgtttcttttttttattttaggtatgctttccagaagagcaatgtctatgacatttccctaattatccaaatgagtgctcatactttaagattcccggggtgaagaatgaatgcatcagtatctcttagactaggaacataaaatgttaatgctagaaaggtggaaaggatcttagaaaccatcaagccagttatgttcatactatttttagcagcagattttttttttgcaaattaaatcttatatgtgctaaataaatatttttgaataaaacaaaatgaaaat

SEQ ID NO: 291272 - DNA, 565 bp, Homo sapiens
ctaccaagcacttgatgcagttacccttttccaggtccctcaaacactatgctgtccaatttagggagtgttctagtactgctaccacttgtcttagtcaattcagtctcacccctgggagtactttagacccattaagaacttactgagctagaatgaatgcattytaggcctcttcgacacttcactaccatccacaattgctaaacatcctaaatatttaagaagtcagaattagtacttacagaaacaacttattttgacatttaacaggttgggatgttattagcttacaaagccttaaaatgaaaattctatttttaaagcttatttttctaatgtattaagcccatttatattcagtcagttctaatgctagaatgcccgtttttaaatttcctgtctaggtataattttctcttgctgaattctttaaatgtttataatgaagaattgttcttctgaaaatgtgtcatatgggaacccagttatgaatttggcacttctagtttttatgttaacggcatttttgctatttcttagtgattgcacaaacctgcaaaca

SEQ ID NO: 291273 - DNA, 612 bp, Homo sapiens
gttaaatttgatggagcacactgcatctgctcaattgcagtcagagtctaatggtgctgccaaaaggctgcattagcattataagacaatgttctccagactcagatagatgtaggacagacttcataatagagactcttgggtcactgaatctaacaagaatgtgcctgtaaggctctgtcacagaaaaataactggattcagtcatatatctatataatctcctcagaggttttacarggaacaacttcatcttgagttcttatgaaaacaaaacacaaaaaattactgatactaggatgttgatttcttttctttctgaatcaagctgaaattcttgaagattgcaagaaagatgacagccattcagtgcttgttataaggatatttaataaatttgggattaaattagattaaattgacatagtagtggtattctgggatatggatttctttggaaatctgatgaaaactggaaatcctctaccagaaagagtacacaaccacatctatataataaatttagcgtacattttcagggggttcagccattcccagaagggtatttttggatttcaatttaaaaacaaaacaaaacaaaacaaaaaaact

SEQ ID NO: 291274 - DNA, 534 bp, Homo sapiens
ttggcaagttaatttaaactttctgagtatctgttttagtgaagttgatactaatgcctaacccagagttcttgcatagatttgaaatagcacatgcaaagcagctggcctagygcttgtcaagcagtaggcatccaatattgctggagttattgacttatgtgtcagttgtccccactaaaatataaccttgacaggaagaggaagatggtctccttcccatccttgtatccacaaatacctagcaaagtgccagcacacattagagagtcaataaataattgttaaattaaaatattagcccatagatactttggttcttgtttaaaaactaatttggcataaacggtaaagacagtaactcaagtctctacttgtgaccttaagtttctaatcttccttctgttaaacatgaagtcccaaagctgtgtaatagaacctaatgcttcactagatggcaccaaaccattgccctaaaacagcactaacaggagggagttggggcagaggactggaaagctggaaagccttatt

SEQ ID NO: 291275 - DNA, 534 bp, Homo sapiens
ttggcaagttaatttaaactttctgagtatctgttttagtgaagttgatactaatgcctaacccagagttcttgcatagatttgaaatagcacatgcaaagcagctggcctagcgcttgtcaagcagtaggcatccaatattgctgkagttattgacttatgtgtcagttgtccccactaaaatataaccttgacaggaagaggaagatggtctccttcccatccttgtatccacaaatacctagcaaagtgccagcacacattagagagtcaataaataattgttaaattaaaatattagcccatagatactttggttcttgtttaaaaactaatttggcataaacggtaaagacagtaactcaagtctctacttgtgaccttaagtttctaatcttccttctgttaaacatgaagtcccaaagctgtgtaatagaacctaatgcttcactagatggcaccaaaccattgccctaaaacagcactaacaggagggagttggggcagaggactggaaagctggaaagccttatt

SEQ ID NO: 291276 - DNA, 567 bp, Homo sapiens
agatacctcaaatttaaaataacacaaggtcaaaccccagatatttgctgccccttccacatgccttaatgtgtgagaaattaatgtgcatccattaatccaaataacatgtactcaactataatccttgactgttctttctctctcccccatcgcatcaaatccataatctaattggtctatcagctaagtatttcttaaatctctcacctccgctgttctccaaccttcatgagaccactgtcttaatgtgggcccttagaaactctcacctaagttattataacagtttccaagctggtagtcctgtctgtggtccctgcactttccagctgatcagtggatgcctcagttgctaaatccctgagatacaaatctgaaccaagtcactctggtgtttaattaccttcattgtttccacactgccaacagggtaaagtccaaacaccagcttagcaagtctggtttcatcctgccttagtaaattcagttcccattactctgytcacatttaaagcagcaccaaacatctaggtattcttattacatgatggaatgtgatgtgat

SEQ ID NO: 291277 - DNA, 608 bp, Homo sapiens
aatatttaaactctaaagataaattttatattgttaatttactccaaagtttgatgaacttcgcttgtcactaacatttgtgcttatgctttcttccatgaagatgggtagaagatgcatacatttcttttgcatagtgatggcaaacattgattgagcactgatcatgttccaggccctataacagggctttctatgtagcagtttattttatcctcacaaataccaaagagtatctcttatcatccccaatttacacatgagaacaccacagctctgggaggtcacatggctagtcatctactagtgccagaacagggagtgaaagggtacacgtgagactgcagggataaagactgagctyttaagagtggcactatatcatgaaaggggctagataggaaattttgtttaatatctttatttcctatttgaagaacctaagacccaaagcaaggtagtgactaagctgaaggtttctgtcacaccactctgcattcttcgtttttatttctggactaatcctggatttatattttcccacttcttcaattttgagtagaaagagaaaaaaaaatgtttgccctgaatatatttctctcccacac

SEQ ID NO: 291278 - DNA, 599 bp, Homo sapiens
ttgagagattgtaatttccacaagagaagggcaagtgcaaagtccctaaggtgaaagattgccttgcatctctgagaaacagccagggggccagagtgcctccagaggagttaacaaaggggagagctgaaagaaatgaaatcagagtgataagaggaggccagattatgtagaactttatagtgcaagctaaatattttgaccttcaccatgagaaagatgggaatctaggcactggaataacataatttgatttatattttaagaagataatgttggtgtgcagcagtaacaaatggtacaaagtaacaagtgatacaaagtcaataactcgtgacttttgtaacaatccagataaaagacaatggaggcttgaagcagcmcagtggcagctgggatggtacaaaatacttgaatgttgatatattttgagagtagacactagctgactgaattgataagagatgtggaggaaaagccattaagattgaaacttgactttttggcctgagcaacttaactagagtgttgccagttaactgaaatgggaagattgcaggaatggctgcatgtgtatttttgttgttgtttatttgttt

SEQ ID NO: 291279 - DNA, 549 bp, Homo sapiens
ctttctaaaaatagttttctaaatgcactgcattttctactctcttttatatgatctcatactattttgtatatacccctattgcagcagctttcaattgtattatattttagttatttttaagttgtcttcctcatatattgtaaacttcttaaaaactaagatcaattattcatttaaatgtttctccaacagttagtataatgcctaggacatgatgtgactcaaagtgcttaaacatgtaaagattccttcaaaattacaaataataattttatttccctaaatgtctaaagtgtcccatcatttttacggaactacatacagaaatacggagtgggtaataaagtattcaaatgacccctactttttaaataatattttgttctttaraactccatataattcagtttagtcattctttaaattagaggacatcattagacatttgaaaaggatttggatttataaactagaatatgaatagaaaacatgacactattagacagatagtacttacttgttgatggtctggaatttgaagaagtt

SEQ ID NO: 291280 - DNA, 582 bp, Homo sapiens
taaggacaaaagtataagaaaaacaaaaactctgtgtttgtttgagttacaaagataatttctttcataatgaagaattactgtgatacaggttattaaaaaaagaaaaacagcacgcataagagcaattaacagggactctgatccaatctatgggagatggaggaatgcctcctttagaaagtgacatgtaaagtgctgcytgaagaatgacttatttgtatccaggtggcaggtgagggtgaccaagctttgcaggcagaggaactaatatgtacaggcttccaaggctggaagaagcatgggtattgactgaagtgaaataaggtccatatggctactaggtgtaaaaggaggggaaaatagtatgacatgagattaggtaaaacagatcataccgagactcaaaatccatgtcagggcttttcaactttatttgaagaacaactggaattcacaaactatttcagacaaaggtatagcattattgaattggcattataaaagatcagtctagccattggagaatgaattaaaaggaatgtaaaatagatgcattgagaccagttgaaagatgtttgc

SEQ ID NO: 291281 - DNA, 615 bp, Homo sapiens
tctcttctggactattcattttcttcagggatatttgtttggacttgaaaactggtacataatttgcaaatattttctgtttgataatattaacatatctacgaaagaatgacaaatctattttagtaaaatgttccatcttccarttcatcactttagcaaatctaatttttattgattttagtcatgttttatgcttgaaaggggctaatttcctgtatactctttctaaaatatgtttagtatgaaaacatagcactaaataagtgaaaaactcaagggcaaacttccctgcctactctttctaaaatatgttctttagtatgaaaaaataggactaaataagtgaaaaactcaagggcaaaaccaatttactaaataagcttaaatatccctggagtctagaagtaattttaaaagaaatagcgctgaaacttctgggaggtattttcataagttgacaatgcctgtgctatataaatcaatatactagaaacttgccatagctctatttatgtcctattacagaactcagtaaaaattaagattctctagggttatttctaaatgaggttagttattaagttagtaaaatggtttctttaaaatgtagtt

SEQ ID NO: 291282 - DNA, 469 bp, Homo sapiens
atttataaagaaaagaggtttatttcttacagttctggaggctggaaagtctaaggttgagaaacccagatctggtgagggctttctcacgtrtcatcccatggtggaagacagaaaacaagagagctcgcacaatgttgtggggggattgggtgagggaagggggatgaattcagtcttttactagaaacccaggtaaacccagccctcatgaatgaatcaccttttaaagaaacctgtctacactgttggctttagggattaagcttccaatgcatgaatttgggggacacattcaaactatagaagcttttaaatgatgctcaaagtttgattttatgcccagccaccccaaagaggagaaatgttcatcctcactagccaatagtccctggtgattggatttccaaaatgattgaaacgttaagcacatccatccattgattggattctttctttagcctctttg

SEQ ID NO: 291283 - DNA, 1015 bp, Homo sapiens
tcgcacaatgttgtggggggattgggtgagggaagggggatgaattcagtcttttactagaaacccaggtaaacccagccctcatgaatgaatcaccttttaaagaaacctgtctacactgttggctttagggattaagcttccaatgcatgaatttgggggacacattcaaactatagaagcttytaaatgatgctcaaagtttgattttatgcccagccaccccaaagaggagaaatgttcatcctcactagccaatagtccctggtgattggatttccaaaatgattgaaacgttaagcacatccatccattgattggattctttctttagcctctttgttgcaagtagctgaaatggaaagggcatctctctttttcttgccagaattcttctcttttttccatgaggtggagaaggtaagcactgctccattcctccagtcatcacatactcagtcattgggatatatacctccagctgtttttttctcttttcctttgtcttttttttttttaaatctgtgtgtattcttctcactcgtctttttatatttttattacagatatatgtaatcataaataatacccaacatttatagtgcttttattatwggtcagaacacaaacatttcttggccctatgtgaatgttggaccctacttattctaattattttggacagtgttttctagccttggacaattttctcacacacttgcwttgatctagtgatctactgatctactgctgaatgccaataagggtgggatgtgaaggtggaatgtggccctctacagaggagtaggggcgtttctctgtacagctgtatcttccttggttaactttttctttgaacactagctgtcttaattctccaggaatctcagctctgtctcttcacctcatggagtctgccaggtttcaccctcagttccttccctgtcatagtttaaaatctctttcaaggccaataagatggggctcacctcatttgtttttttgtttttgtttg

SEQ ID NO: 291284 - DNA, 1209 bp, Homo sapiens
caacagtcattttatgagctacaggaatgagcaagagaggcaatccaagtgacaccatgtgaattgttttgactgaactttttggtttttaaaatcctggccttctaggactcaacttttctcctagtagcaggaaatataaggaagaccttagggaaaggccacaaatagtacttcaaagcactgtagttccttggagaggtaggaagcagggcactaaatcgtgttgccaaggtgtacagagattgcctttctctgtatctgcctaatttgctcctggaggagctaattctttttacattttggaaatcaaagctccatggataaatactgctttttctgaccttatgtttttttttctagacttcatttaaaacatctcaaatcagatcaaagggaacacaaggctgtgcatttagatatccagttgaagtcattttcttagtagttttcctaccacctatgttttcctcctcccactatctgcattttgctgccaggctcatcttccataagtgaacttcacagacatggatgrttccccatcgtctcctaaatggaacacaatagtctcawagagattaagaaagctcacaagtacaaataattttctcacacagaaatggcaaagcagtgtttcaaagataagttactcagattacaaagcctcaatctgccttctaacccttactgccccttccgagatttgtaccttaacgtgactatttcatgtttggatagccttgtcaagttacttagtataataagaataatgacaatataaaactcataggaatttttttcttaagaaaaatgaaatacatatgaagtacttgaaaataataagtgctatgcagatataagttattattacagacacttcawgttcctgatggtaattttctaaaagtttcttgatttgccaggttgaattgattcttgtttctttcagtgcactcattgctgttggtgcctagctcagtttattttacttacttacaattttttctctgcataactgagtttttttagaacaaaggctgtgtctccatcattgctatatacccaggacctatcaaattacctgacagagtagattgaacaccatctgccagccaaaatgaaaaacaaaaatcttagttaaaattcatgcaatagcttgaaaaatatttaaacccagaaagatatcctgttcactttcaaagtcag

SEQ ID NO: 291285 - DNA, 548 bp, Homo sapiens
aggagattaaacactgtgactagaaccccatgaaatggtcactgtaatgaactgaacatgtcctatgtgtgataaaccttggatacaaacgctaagtgacagtaaaaatgagctactggtagcactgaaaaatgctaagtgtctgtcaacttatttattacttcttagtattacaactaacttgttaaatcataaaaatattatgaaatcacaaatacagaatgtagggttaaaatctgaataagtgtaagaaaagatagggctaaacattaataaatatagttttgtaagcagacaaattctttcagattatgktgtccataaagcaataataaaaggaaaatttagtgatgaaaacattgatacatttccatgaaaatgcataaattttaatggtatagtaaacttattcttactgaatgaatgtaccagcatatgcacctaaatgaaaatataaaacattacttgcatctcaggaaactttctcataggtgctcccagtacttacgcactgagcccctgtcccagctctggcaaaaggtaaccac

SEQ ID NO: 291286 - DNA, 542 bp, Homo sapiens
tgaaaccataaaactcctagaagaaaacatagggggaaagcctcttgacattggccttagcaataattttttggatatcgcaccacaagccaggctacaaatgtaaacataaacaaggaggactgcatcaaactaaaaagcttctgcacagcaaaggaacaaccaacaaaatgaaaggggaacctacagactggaagaaatatttgcaaaccacatatctgataaagtgttaatatccaaaaatcagtaaagaactcttacaacttaakagcagaaaaacaacccagttgaaaaatgggccaaataggaaatgaccaataggaaatggggagatgtacattaaaataatacaaagtagcagacatgtaggatgaacaagttagagatctagtgtacatcatgagggctatagttaataaaaatatattgtctttgggatttttgttaaataagtagattttagctgttcctgtcacacaaacaaaaatctaactatgtgagatggtagctatgttaatttgcttcactatagtaaccagttt

SEQ ID NO: 291287 - DNA, 561 bp, Homo sapiens
ccaccctcccaaaatactgaaaaacagtacatccgtttctctgtacccttgccaagttgtctgcaaatgctttgtcgrtttttctactgagttagacaaacttgtgatttttttccctttcttaacaccaatttaaaaagtaggaaacaaaacctagtggataaaatgacatattttcaatatgagttctgtggcagtctcacatggaagtcaggagtaacagcctcaattcctaaatagctgtttaccactgcttttttgagcatatttaagtaatacagaatataaaggagcaaacaaaatatgaagtttataaaagatttcaaacacttttctaaaaataagaggcccacattttagaggtatttcattccttttctcaaacaatatggacatttataaatatgagaatatatagatatacagaccttaataaatgaagtgttcttgaaaattttatatggaaaaccagttagctttaatttcttcacaatttttatggatttatccagatcaaggacaactcctgtggcagctatctgaaaatcaggctaacaggag

SEQ ID NO: 291288 - DNA, 1123 bp, Homo sapiens
ccaccctcccaaaatactgaaaaacagtacatccgtttctctgtacccttgccaagttgtctgcaaatgctttgtcgatttttctactgagttagacaaacttgtgatttttttccctttcttaacaccaatttaaaaagtaggaaacaaaacctagtggataaaatgacatattttcaatatgagttcygtggcagtctcacatggaagtcaggagtaacagcctcaattcctaaatagctgtttaccactgcttttttgagcatatttaagtaatacagaatataaaggagcaaacaaaatatgaagtttataaaagatttcaaacacttttctaaaaataagaggcccacattttagaggtatttcattccttttctcaaacaatatggacatttataaatatgagaatatatagatatacagaccttaataaatgaagtgttcttgaaaattttatatggaaaaccagttagctttaatttcttcacaatttttatggatttatccagatcaaggacaactcctgtggcagctatctgaaaatcaggctaacaggagwccaccctcccaaaatactgaaaaacagtacatccgtttctctgtacccttgccaagttgtctgcaaatgctttgtcgatttttctactgagttagacaaacttgtgatttttttccctttcttaacaccaatttaaaaagtaggaaacaaaacctagtggataaaatgacatattttcaatatgagttctgtggcagtctcacatggaagtcaggagtaacagcctcaattcctaaatagctgtttaccactgcttttttgagcatatttaagtaatacagaatataaaggagcaaacaaaatatgaagtttataaaagatttcaaacacttttctaaaaatawgaggcccacattttagaggtatttcattccttttctcaaacaatatggacatttataaatatgagaatatatagatatacagaccttaataaatgaagtgttcttgaaaattttatatggaaaaccagttagctttaatttcttcacaatttttatggatttatccagatcaaggacaactcctgtggcagctatctgaaaatcaggctaacaggag

SEQ ID NO: 291289 - DNA, 516 bp, Homo sapiens
ttgtgatttttttccctttcttaacaccaatttaaaaagtaggaaacaaaacctagtggataaaatgacatattttcaatatgagttctgtggcagtctcacatggaagtcaggagtaacagcctcaattcctaaatagctgtttaccactgcttttttgagcatatttaagtaatacagaatataaaggagcaaacaaaatatgaagtttataaaagatttcaaacacttttctaaaaataagaggcccacattttagaggtatttcattccttttctcaaacaatatggacatttataaatatgagaatatatagatatacagaccttaataaatgaagtgttcttgaaaattttatatggaaaaccagttagctttaatttcttcacaayttttatggatttatccagatcaaggacaactcctgtggcagctatctgaaaatcaggctaacaggagccccaaaatttgaaaataggaataatattagcaagagaaaaacttcaattctatgt

SEQ ID NO: 291290 - DNA, 516 bp, Homo sapiens
ttgtgatttttttccctttcttaacaccaatttaaaaagtaggaaacaaaacctagtggataaaatgacatattttcaatatgagttctgtggcagtctcacatggaagtcaggagtaacagcctcaattcctaaatagctgtttaccactgcttttttgagcatatttaagtaatacagaatataaaggagcaaacaaaatatgaagtttataaaagatttcaaacacttttctaaaaataagaggcccacattttagaggtatttcattccttttctcaaacaatatggacatttataaatatgagaatatatagatatacagaccttaataaatgaagtgttcttgaaaattttatatggaaaaccagttagctttaatttcttcacaatttttatggatttatccagatcaaggacaactcctgtggcagctatcygaaaatcaggctaacaggagccccaaaatttgaaaataggaataatattagcaagagaaaaacttcaattctatgt

SEQ ID NO: 291291 - DNA, 612 bp, Homo sapiens
actttcctacctcgcttttatttgcgcgggtttaaatgcgccttaacagaacccgtgcaaaggcttgccaactgtctggctgcaccggatgagtagagcatcttccttggtggcaggtgggtgcgaggaggaggggsctgggcttttctccggacagtgtttgcccagaagaccatcatccctggactacgttaggagtaagtggcaccgctccgaggtgggggaagaagggttataaaggggggagtccaccwctggtgtggcgttattggttaattwatagctactgtggcaacagcaagcagcctagatgaacacacagctcaaagaggagcaggacagaactgctgtctcatttgaatatctctctgggcctgattatttaaaaggacttgcatttctcacatgaaagttattttcttttctcaatgtccataaatgagaataaatagacgtaaaatagatcttttcgaggatgaagtaaatggaatgaaaaacaaaacccaagctgaccagaaatcatagagggaagaaaaggttataaatatatggatttgtcagagtgattttaagctattaggaatcagttaaatgttgggggattttgtctga

SEQ ID NO: 291292 - DNA, 801 bp, Homo sapiens
gctttgcagctaagtttgcattcccagcccttctcaatagccattttgaaatatatcaaggaaatatatttaggggtaaaatatattagtttccttcatacagctataaaacatacaggaataatttttgtcaatgtctactacaaatccaatgtagcagtaattataaaacccaccagatattgaagaaaaaatatgtagagtacatcaattasaaatgttgatactaaaatgccaaataaaataaaaataatatccaacaatgtttgaaacagtaagacaagaaattggcaaaaaaaataaaacaaatatccaccttggggatgaaagtgtgtttccaaatttggtaatccaataatattaataataatattgattagcccaaattaaaaataaatagwgctttgcagctaagtttgcattcccagcccttctcaatagccattttgaaatatatcaaggaaatatatttaggggtaaaatatattagtttccttcatacagctataaaacatacaggaataatttttgtcaatgtctactacaaatccaatgtagcagtaattataaaacccaccagatattgaagaaaaaatatgtagagtacatcaattacaaatgttgatactaaaatgccaaataaaataaaaataatatccaacaatgtttgaaacagtaagacaagaaattggcaaaaaaaawaaaacaaatatccaccttggggatgaaagtgtgtttccaaatttggtaatccaataatattaataataatattgattagcccaaattaaaaataaatag

SEQ ID NO: 291293 - DNA, 515 bp, Homo sapiens
gtaaaattttaaatatttttaacaggtacattattaatattagataatatttatgataattgtgaaaatattcaatgctaaaataagatacaatgtctaaacatcagtattaaaactagtataaatatttgcttgtttrtacaaggaaaattcaagcttgacctaaaattatataggaaataaaagaaaaattttaagggagctctttaataacataaacatatatatatatacacacacatatatagcatgtatatatgttatatgggatagatatagatttaacatgttatatctatatttgtatctataactacagctgtatgtatctacatttctatatatttactcagtgatataaatatagactggaataaatataaagacacatattattcttggataaaaaggatttagtatcataaagacaaattatttccaaattcacttatgaattcacaacaatatacagtttcattagtataatttaaaatttttaaataaattccaggatt

SEQ ID NO: 291294 - DNA, 515 bp, Homo sapiens
gtaaaattttaaatatttttaacaggtacattattaatattagataatatttatgataattgtgaaaatattcaatgctaaaataagatacaatgtctaaacatcagtattaaaactagtataaatatttgcttgtttgtacaaggaaaattcaagctygacctaaaattatataggaaataaaagaaaaattttaagggagctctttaataacataaacatatatatatatacacacacatatatagcatgtatatatgttatatgggatagatatagatttaacatgttatatctatatttgtatctataactacagctgtatgtatctacatttctatatatttactcagtgatataaatatagactggaataaatataaagacacatattattcttggataaaaaggatttagtatcataaagacaaattatttccaaattcacttatgaattcacaacaatatacagtttcattagtataatttaaaatttttaaataaattccaggatt

SEQ ID NO: 291295 - DNA, 563 bp, Homo sapiens
cacctgtgcatatttacatagaaatcaatgagagctgatttttatttttattatatatattttttgagatagggtcttggttttttgcccaggctggagtgcagtggtgcaatcactgctcactgcagcctcaacctcccaagctcaagcaatccttccaccttggcctcccaaatagctaggacaacaggtgcacaccaccatgcccactttttatttttttaacttttgatagagactgggtcttgctatgttgcccaggttgcttttgaactcctgggctcaaggaatcctctcatttcagcctcttcaactgctggtattacaagcatgaaccaccatatgggccggaagctgatttttaaaatactgagatcatatagacgacaacacctgaaaaatagacaacaccaagctttatgttaaaaggtgtgagggtatcaatattgttgtggctattggggaggaaaacattagtaaaaccagtgagttaaagctgttgctttaarctttggctttaatttaacaaatgttctatggagtgacagtatgtatgtaaccat

SEQ ID NO: 291296 - DNA, 608 bp, Homo sapiens
ctctcttaattttttaaaaataatatgaattgtagtaaagagaaagaaaagaaaacaaagaaaaagaaggaaggaaagaaggaaggaaataaagaaagaagaaagaaaaggaggaggaratgagggaaggaagggagggagggaggaagggagaaagggagaaaaaagaaaacatgaacacaagaaagaaagagggaaggaaagaaaagaaagaaagaaacagaaaggaagagagaaagagagaaagaaagaaaggaggaagggaggaagaaaaggaggaagagagaatggtaaaagggaggaaggcaaagaaacaaagaaaataaagaggcgaaggaaggaaggaaaaagaggaaaggaagggagggaggaaggaagaaaaggagggcgggaggaagggagaaaaaaggaaagaaagcaagaacgtgagaaagaaagaaagaatacgagaaaagaaggaagaaaagggagggagaaaggaagggagggaggagggaaggaagaataagaggaaagaaagaaagaaggaaagaaggaaggagaaaaaagaaaagaaagaaaggaaaagaaaaaagaaaagaaaaggaagaggaaaagaagaaaggaag

SEQ ID NO: 291297 - DNA, 608 bp, Homo sapiens
ctctcttaattttttaaaaataatatgaattgtagtaaagagaaagaaaagaaaacaaagaaaaagaaggaaggaaagaaggaaggaaataaagaaagaagaaagaaaaggaggaggaaatgagggaaggaagggagggagggaggaagggagraagggagaaaaaagaaaacatgaacacaagaaagaaagagggaaggaaagaaaagaaagaaagaaacagaaaggaagagagaaagagagaaagaaagaaaggaggaagggaggaagaaaaggaggaagagagaatggtaaaagggaggaaggcaaagaaacaaagaaaataaagaggcgaaggaaggaaggaaaaagaggaaaggaagggagggaggaaggaagaaaaggagggcgggaggaagggagaaaaaaggaaagaaagcaagaacgtgagaaagaaagaaagaatacgagaaaagaaggaagaaaagggagggagaaaggaagggagggaggagggaaggaagaataagaggaaagaaagaaagaaggaaagaaggaaggagaaaaaagaaaagaaagaaaggaaaagaaaaaagaaaagaaaaggaagaggaaaagaagaaaggaag

SEQ ID NO: 291298 - DNA, 608 bp, Homo sapiens
ctctcttaattttttaaaaataatatgaattgtagtaaagagaaagaaaagaaaacaaagaaaaagaaggaaggaaagaaggaaggaaataaagaaagaagaaagaaaaggaggaggaaatgagggaaggaagggagggagggaggaagggagaaagggagaaaaaagaaaacatgaacacaagaaagaaagagggaaggaaagaaaagaaagaaagaaacagaaagraagagagaaagagagaaagaaagaaaggaggaagggaggaagaaaaggaggaagagagaatggtaaaagggaggaaggcaaagaaacaaagaaaataaagaggcgaaggaaggaaggaaaaagaggaaaggaagggagggaggaaggaagaaaaggagggcgggaggaagggagaaaaaaggaaagaaagcaagaacgtgagaaagaaagaaagaatacgagaaaagaaggaagaaaagggagggagaaaggaagggagggaggagggaaggaagaataagaggaaagaaagaaagaaggaaagaaggaaggagaaaaaagaaaagaaagaaaggaaaagaaaaaagaaaagaaaaggaagaggaaaagaagaaaggaag

SEQ ID NO: 291299 - DNA, 480 bp, Homo sapiens
gaaggaagaccgcaaacattagaaattctgkgtttgttagagaatatgccatactgtttttttttcacttgaaaggaaagagtagctgccattgaagattggatgtcttgttggcgatattgttgttcttatcttccacatgattactgagtttgtgcctagtctttccattactaagacaaaagtgttgaagtctgcaaatataattttggatttttctagttcacctttgattctttcatgttttacctcacgtatttggaggctctgttgttagctgcataccctaattagtaggatgtttacatcttcttgagaattgattattctattatctattatctctcatctctgatactatttcttgttccgaactctgttgtgtctaatatcaatgtagtccttccacagccttattttagtgtttccatgatatggctttctccatatcttgatgataacctatttatatctctatat

SEQ ID NO: 291300 - DNA, 480 bp, Homo sapiens
gaaggaagaccgcaaacattagaaattctgggtttgttagagaatatgccatactgtttttttttcacttgaaaggaaagagtakctgccattgaagattggatgtcttgttggcgatattgttgttcttatcttccacatgattactgagtttgtgcctagtctttccattactaagacaaaagtgttgaagtctgcaaatataattttggatttttctagttcacctttgattctttcatgttttacctcacgtatttggaggctctgttgttagctgcataccctaattagtaggatgtttacatcttcttgagaattgattattctattatctattatctctcatctctgatactatttcttgttccgaactctgttgtgtctaatatcaatgtagtccttccacagccttattttagtgtttccatgatatggctttctccatatcttgatgataacctatttatatctctatat

SEQ ID NO: 291301 - DNA, 703 bp, Homo sapiens
gaaggaagaccgcaaacattagaaattctgggtttgttagagaatatgccatactgtttttttttcacttgaaaggaaagagtagctgccattgaagattggatgtcttgttggcgataytgttgttcttatcttccacatgattactgagtttgtgcctagtctttccattactaagacaaaagtgttgaagtctgcaaatataattttggatttttctagttcacctttgattctttcatgttttacctcacgtatttggaggctctgttgttagctgcataccctaattagtaggatgtttacatcttcttgagaattgattattctattatctattatctctcatctctgatactatttcttgttccgaactctgttgtgtctaatatcaatgtagtccttccacagccttattttagtgtttccatgatatggctttctccatatcttgatgataacctatttatatctctatatwtttcaagatggaattcttatttctttttgttctatttgacattctctgagtttcctatatctgaagtttgattttctgtcacttcttttagaatatttttggcagttattttgaaawatatttcttttgctccattattttttcctcttttctttttgggatttcaatcataactagagtaggcaatttcatctcagtcttatgcaggtacattttctcagg

SEQ ID NO: 291302 - DNA, 445 bp, Homo sapiens
tttcaagatggaattcttatttctttttgttctatttgacattctctgagtttcctatatctgaagtttgattttctgtcacttcttttagaatatttttggcagttattttgaaatatatttcttttgctccattatttttycctcttttctttttgggatttcaatcataactagagtaggcaatttcatctcagtcttatgcaggtacattttctcaggwtttcaagatggaattcttatttctttttgttctatttgacattctctgagtttcctatatctgaagtttgattttctgtcacttcttttagaatatttttggcagttattttgaaatatatttcttttgctccattattttttcctcttttcttwttgggatttcaatcataactagagtaggcaatttcatctcagtcttatgcaggtacattttctcagg

SEQ ID NO: 291303 - DNA, 567 bp, Homo sapiens
gactttgaagttagtttggttctttcattgttgtcaggttaggaaccctattccatcccagatctccaaaacccagactttttggggggttgaaatgttaggctttctctttgaattgtagttttatcttctttcagttaccatttgcattttcataatgattaatgagactaagctttttttgtgtagttgactgtacctttggatttttttcccaaatacctttttatttcttcttttctttatggttttagaaaatgtagtttacataattgcagcttgatttgttactcagttaatggcatgcttaatggagagaaaaaatattaaatatatttccctttttaattactgtgcttttttcttttttaaggaaatgtttcattatgttaaatttcartgttattctacttagctattccttaaatattataatattttggatttcacatgtacatttgtaacatatcttgagtttattatgtatagagtaaggctattttctttttgaaggtaaaaatcacataatataaaattaataacaaccattttaaagcatacaatgca

SEQ ID NO: 291304 - DNA, 602 bp, Homo sapiens
ttatatcccaattgatttgccaattcctgatgtttcatgtgaataaaatcaagtaatatttgtmcttttgtgcacttaacataatgctttcaaatttcacccatattataacatatataagtacttcattctttgttatagctgaaaattgggtgtccatttatgagtcaacaagcgtatggattgtttccactttttgactgtatgaatattactgctgtaaatattcatgcacatgtttattttttgagcacctatgttttgtaagattaacagctgacttaagagaaacaatggaaggcaagaggcagtagaataatatattcaaaagatgcaaaggaaaaaaaactctcggccacgaattccttatccagcaattatttttcaaaaatgaagataacacaaagacttacccagataaacagaaatattaactgaagttgttgctggcagacctaccacattaaaaaaaacgctaaaataaattcctaaggctaaaagcaagtcacagaagacagtcacttgaatccacatttttaaaaaagtactggtataggtaacattgacattataaaagacagtaaaaatgcattttttctctt

SEQ ID NO: 291305 - DNA, 602 bp, Homo sapiens
ttatatcccaattgatttgccaattcctgatgtttcatgtgaataaaatcaagtaatatttgtccttttgtgcacttaacataatgctttcaaatttcacccatattataacatatataagtacttcattctttgttatagctgaaaattgggtgtccrtttatgagtcaacaagcgtatggattgtttccactttttgactgtatgaatattactgctgtaaatattcatgcacatgtttattttttgagcacctatgttttgtaagattaacagctgacttaagagaaacaatggaaggcaagaggcagtagaataatatattcaaaagatgcaaaggaaaaaaaactctcggccacgaattccttatccagcaattatttttcaaaaatgaagataacacaaagacttacccagataaacagaaatattaactgaagttgttgctggcagacctaccacattaaaaaaaacgctaaaataaattcctaaggctaaaagcaagtcacagaagacagtcacttgaatccacatttttaaaaaagtactggtataggtaacattgacattataaaagacagtaaaaatgcattttttctctt

SEQ ID NO: 291306 - DNA, 602 bp, Homo sapiens
ttatatcccaattgatttgccaattcctgatgtttcatgtgaataaaatcaagtaatatttgtccttttgtgcacttaacataatgctttcaaatttcacccatattataacatatataagtacttcattctttgttatagctgaaaattgggtgtccatttatgagtcaacaagcrtatggattgtttccactttttgactgtatgaatattactgctgtaaatattcatgcacatgtttattttttgagcacctatgttttgtaagattaacagctgacttaagagaaacaatggaaggcaagaggcagtagaataatatattcaaaagatgcaaaggaaaaaaaactctcggccacgaattccttatccagcaattatttttcaaaaatgaagataacacaaagacttacccagataaacagaaatattaactgaagttgttgctggcagacctaccacattaaaaaaaacgctaaaataaattcctaaggctaaaagcaagtcacagaagacagtcacttgaatccacatttttaaaaaagtactggtataggtaacattgacattataaaagacagtaaaaatgcattttttctctt

SEQ ID NO: 291307 - DNA, 602 bp, Homo sapiens
ttatatcccaattgatttgccaattcctgatgtttcatgtgaataaaatcaagtaatatttgtccttttgtgcacttaacataatgctttcaaatttcacccatattataacatatataagtacttcattctttgttatagctgaaaattgggtgtccatttatgagtcaacaagcgtatggattgtttccactttttgactgtatgaatattactgctgtaaatattcatgcacatgtttattttttgagcacctatgttttgtaagattaacagctgacttaagagaaacaatggaaggcaagaggcagtagaataatatattcaaaagatgcaaaggaaaaaaaactctcggccacgaattccttatccagcaattatttttcaaaaatgaagataacacaaagacttacccagataaacagaaatattaactgaagttgttgctggcagacctaccacattaaaaaaaackctaaaataaattcctaaggctaaaagcaagtcacagaagacagtcacttgaatccacatttttaaaaaagtactggtataggtaacattgacattataaaagacagtaaaaatgcattttttctctt

SEQ ID NO: 291308 - DNA, 382 bp, Homo sapiens
actcataacacacaacatagactattaaaaatgtgaatagaattttaaaaattatattgtagtaaaacgggggtcaacgctttaggaagacatagctattacaatcatgtmtgcacagatatgagctaaattgtttcctttatatagatgctgaaattctaaccactgaatatgacctcattaggaaaataggttctttgcagctgatcaagttaagatacaatcagatgagcctgaattcaatatgactgatgtccttattaaaagaagagatttgagtagagggagacatacacacagggagagtaccatgtgattatgaggacagagattagccaaggaatgccaaagactgccactaaaccatcagaagcgagaaaca

SEQ ID NO: 291309 - DNA, 320 bp, Homo sapiens
tttctccatttaatcctcttttgasatttatagtctctctaagtaaagagataacccaaacataagcctcacaaacaggcttccataccattcttaatttggtcctgtaattcttcattgctgtattaactttctgatgcttttaaggatgttttacaacaaattgtttagttttttccactggaatgtttattctcaattatctaattcatactgtaagtatagagggagtttaatataaaattattaaactaatatttgtgaaagaacgtatttgtgcatttaacaaatatgttaatcctcagactgttattgggcag

SEQ ID NO: 291310 - DNA, 586 bp, Homo sapiens
ctatcttttcattgcaatcattttcacaaaagtgactgcagctcacagaccctaaaaggagaaaatccagggtaggttatctgatctagttctgaagacaggatctagagattatttaatatgaaataggtcacctgaaatgaagtgtttmctgaaaacagcttggatcagcccagttttctaccactgaaccatgcatttggtttaaaaaacacaacaactctggggaatatcggctgcttccaactgtgttgaaggtgttaaagaaaagagcataaaagtaaaaatgatcatctgaggcctttatagtctctgctcaagagactagagtcttccattcttaacgaaacacccaaatatcttaataattgggcaaaatctaaatatcagagagataattttatcttgaagattgttaaattataatggtgattcactaccttgccacgtctctgagtcaaaaattaggtctttgtttaggaatcaatggtactctgcaacttggaaataggaagattttagaagactcaaacactgactttcttgtgtgcaaaaaaaagacgtattgagttaagacaagtctttc

SEQ ID NO: 291311 - DNA, 586 bp, Homo sapiens
ctatcttttcattgcaatcattttcacaaaagtgactgcagctcacagaccctaaaaggagaaaatccagggtaggttatctgatctagttctgaagacaggatctagagattatttaatatgaaataggtcacctgaaatgaagtgtttcctgaaaacagcttggatcagcccagttttctaccactraaccatgcatttggtttaaaaaacacaacaactctggggaatatcggctgcttccaactgtgttgaaggtgttaaagaaaagagcataaaagtaaaaatgatcatctgaggcctttatagtctctgctcaagagactagagtcttccattcttaacgaaacacccaaatatcttaataattgggcaaaatctaaatatcagagagataattttatcttgaagattgttaaattataatggtgattcactaccttgccacgtctctgagtcaaaaattaggtctttgtttaggaatcaatggtactctgcaacttggaaataggaagattttagaagactcaaacactgactttcttgtgtgcaaaaaaaagacgtattgagttaagacaagtctttc

SEQ ID NO: 291312 - DNA, 586 bp, Homo sapiens
ctatcttttcattgcaatcattttcacaaaagtgactgcagctcacagaccctaaaaggagaaaatccagggtaggttatctgatctagttctgaagacaggatctagagattatttaatatgaaataggtcacctgaaatgaagtgtttcctgaaaacagcttggatcagcccagttttctaccactgaaccatgcatttggtttaaaaaacacaacaactctggggaatatcggctgcttccaactgtgttgaaggtgttaaagaaaagagcataaaagtaraaatgatcatctgaggcctttatagtctctgctcaagagactagagtcttccattcttaacgaaacacccaaatatcttaataattgggcaaaatctaaatatcagagagataattttatcttgaagattgttaaattataatggtgattcactaccttgccacgtctctgagtcaaaaattaggtctttgtttaggaatcaatggtactctgcaacttggaaataggaagattttagaagactcaaacactgactttcttgtgtgcaaaaaaaagacgtattgagttaagacaagtctttc

SEQ ID NO: 291313 - DNA, 586 bp, Homo sapiens
ctatcttttcattgcaatcattttcacaaaagtgactgcagctcacagaccctaaaaggagaaaatccagggtaggttatctgatctagttctgaagacaggatctagagattatttaatatgaaataggtcacctgaaatgaagtgtttcctgaaaacagcttggatcagcccagttttctaccactgaaccatgcatttggtttaaaaaacacaacaactctggggaatatcggctgcttccaactgtgttgaaggtgttaaagaaaagagcataaaagtaaaaatgatcatctgaggcctttatagtctctgctcaagagactagagtcttccattcttaacgaaacacccaaatatcttaataattgggcaaaatctaaatatcagagagataattttatcttgaagattgttaaattataatggtgattcactaccttgccacgtctctgagtcaaaaattaggtctttgtttaggaatcaatggtactctgcaacttggaaataggaagattttagaagactcaaacactgactttcttgtgygcaaaaaaaagacgtattgagttaagacaagtctttc

SEQ ID NO: 291314 - DNA, 1250 bp, Homo sapiens
atagaaggtctgtaagcagccctgcaagccaggttctgagcaagccctcctgtgtggggccctcttacctggacataggtgtgtaaaccaaaaatgaaactctaagctccctaaccaactgaatgaactcctcctctcagccaaggacacaccaaaatcaacctgaaatacaatrcagtccatgatcggaacggatgattggacatwgtgtaaattaaggagcttgaaacagggagatggtcttagattaatcaactgggacttaaatgcaaactcaagtgtcctaawaaaaacaagaggtagagagacatttagcatagactgaagtggagaaggcagtgtgaacacagagacagagattgcagtgatgtgtccacatcccgggagagagaagccaccagaagctggaagagctaaatcagactgctccctagagcttcagaaggagccagaactgatgactccaagatcttagcccagtgaaactgatctggacttctgaactatgagagattccattcctgttgtttgaagctaccacatttttgagaacttgttacagtagcccgaggacactaacacaaatggggctccgggaaaatccagactaaaggtgttgtgttggtttgcaatctccttgcttaactttctgatactagacgtaaatagattggtgaaaaattttgtgaatgaagaaatgtacatgaaacctacagtgtacagagaagwgtgtaaattaaggagcttgaaacagggagatggtcttagattaatcaactgggacttaaatgcaaactcaagtgtcctaataaaaacaagaggtagagagacatttagcatagactgaagtggagaaggcagtgtgaacacagagacagagattgcagtgatgtgtccacatcccgggagagagaagccaccagaagctggaagagctaaatcagactgctccctagagcttcagaaggagccagaactgatgactccaagatcttagcccagtgaaactgatctggacttctgaactatgagagattccattcctgttgtttgaagctaccacatttttgagaacttgttacagtagcccgaggacactaacacaaatggggctccgggaaaatccagactaaaggtgttgtgttggtttgcaatctccttgcttaactttctgatactagacgtaaatagattggtgaaaaattttgtgawtgaagaaatgtacatgaaacctacagtgtacagagaag

SEQ ID NO: 291315 - DNA, 617 bp, Homo sapiens
gcttcaagttgattttaatcctggctcctatagtccgcgagtgaaacagagattttgaaataatgagacctggtattactagtcagctctccatgctggagaamcataagaaattataccaaaggcaggaaaggggatagaatatggggatcatcacgccaagaataaggtgcagcccatttagcccctagatcttaaagagacccatagctctggataatggcagatctatgcgtgacacattatcatctttgtgcatcttcagagaattgtttttccttttactcctaggaacaatgtcttaagtttgttagtaaattctattgaatttattaaagatgcttctgataaattctttttatattcatttcaaaaaagaagcaatttcacactgacagagacattgttattatagcactaaatacttttacactcatcaaattcctttgagactaactgaaatttctgacagccccacactctataactttattgtaaattttctgccaaaaatgatgctttcctatacactcttaatacaagtataaatatattatttaatctagtcttaggttgatttaaaattttgaaaattcactccaaaaatatgttctgta

SEQ ID NO: 291316 - DNA, 617 bp, Homo sapiens
gcttcaagttgattttaatcctggctcctatagtccgcgagtgaaacagagattttgaaataatgagacctggtattactagtcagctctccatgctggagaaacataagaaattataccaaaggcaggaaaggggatagaatatggggatcatcacgccaagaataaggtgcagcccatttagcccctrgatcttaaagagacccatagctctggataatggcagatctatgcgtgacacattatcatctttgtgcatcttcagagaattgtttttccttttactcctaggaacaatgtcttaagtttgttagtaaattctattgaatttattaaagatgcttctgataaattctttttatattcatttcaaaaaagaagcaatttcacactgacagagacattgttattatagcactaaatacttttacactcatcaaattcctttgagactaactgaaatttctgacagccccacactctataactttattgtaaattttctgccaaaaatgatgctttcctatacactcttaatacaagtataaatatattatttaatctagtcttaggttgatttaaaattttgaaaattcactccaaaaatatgttctgta

SEQ ID NO: 291317 - DNA, 617 bp, Homo sapiens
gcttcaagttgattttaatcctggctcctatagtccgcgagtgaaacagagattttgaaataatgagacctggtattactagtcagctctccatgctggagaaacataagaaattataccaaaggcaggaaaggggatagaatatggggatcatcacgccaagaataaggtgcagcccatttagcccctagrtcttaaagagacccatagctctggataatggcagatctatgcgtgacacattatcatctttgtgcatcttcagagaattgtttttccttttactcctaggaacaatgtcttaagtttgttagtaaattctattgaatttattaaagatgcttctgataaattctttttatattcatttcaaaaaagaagcaatttcacactgacagagacattgttattatagcactaaatacttttacactcatcaaattcctttgagactaactgaaatttctgacagccccacactctataactttattgtaaattttctgccaaaaatgatgctttcctatacactcttaatacaagtataaatatattatttaatctagtcttaggttgatttaaaattttgaaaattcactccaaaaatatgttctgta

SEQ ID NO: 291318 - DNA, 405 bp, Homo sapiens
tagttgtaacttattgtaacctcatggagcaactctaaagaaaccatagagagaaaaggagttttggaaaatgtgctcccrgaagtgatagtaatgatggggaattgacagctgacggggaagtaaggtgactctttccacaaggctcaacattttgccagttatgaattgttgcaaaatacatttgaatgtgctttcaagtattaccagtttggggtcatagctgaaaaactttattaagtcacagataaaatgggaaaatcaggaatattttatattgtatgaaatatacaataacactgtgtgtgatggctcaggtctgtaatcctgtgatagttaatactgattgtcaacttgattacattgaaggatgtaagcattgctcctgggtgtgtctgtgagggt

SEQ ID NO: 291319 - DNA, 405 bp, Homo sapiens
tagttgtaacttattgtaacctcatggagcaactctaaagaaaccatagagagaaaaggagttttggaaaatgtgctcccggaagtgatagtaatgatggggaattgacagctgacggggaagtaaggtgactctttccacaaggctcaacattttgccagttatgaattgttgcaaaatayatttgaatgtgctttcaagtattaccagtttggggtcatagctgaaaaactttattaagtcacagataaaatgggaaaatcaggaatattttatattgtatgaaatatacaataacactgtgtgtgatggctcaggtctgtaatcctgtgatagttaatactgattgtcaacttgattacattgaaggatgtaagcattgctcctgggtgtgtctgtgagggt

SEQ ID NO: 291320 - DNA, 405 bp, Homo sapiens
tagttgtaacttattgtaacctcatggagcaactctaaagaaaccatagagagaaaaggagttttggaaaatgtgctcccggaagtgatagtaatgatggggaattgacagctgacggggaagtaaggtgactctttccacaaggctcaacattttgccagttatgaattgttgcaaaatacatytgaatgtgctttcaagtattaccagtttggggtcatagctgaaaaactttattaagtcacagataaaatgggaaaatcaggaatattttatattgtatgaaatatacaataacactgtgtgtgatggctcaggtctgtaatcctgtgatagttaatactgattgtcaacttgattacattgaaggatgtaagcattgctcctgggtgtgtctgtgagggt

SEQ ID NO: 291321 - DNA, 405 bp, Homo sapiens
tagttgtaacttattgtaacctcatggagcaactctaaagaaaccatagagagaaaaggagttttggaaaatgtgctcccggaagtgatagtaatgatggggaattgacagctgacggggaagtaaggtgactctttccacaaggctcaacattttgccagttatgaattgttgcaaaatacatttgaatgtgctttcaagtattaccagtttggrgtcatagctgaaaaactttattaagtcacagataaaatgggaaaatcaggaatattttatattgtatgaaatatacaataacactgtgtgtgatggctcaggtctgtaatcctgtgatagttaatactgattgtcaacttgattacattgaaggatgtaagcattgctcctgggtgtgtctgtgagggt

SEQ ID NO: 291322 - DNA, 416 bp, Homo sapiens
aatttgcttttttatatttaaaccaaacctaatgctaattgtgatatgttatttattctcacctgatttgaatcattggattcaattaaatgagtttaattatcattaaataattctaagagaaataatgtctattcggatggtgggaattttctttctacatgcagccccattctgaatgaatgaaatcaaatcacgtgamgatcagggtcctagagtaacctaatattttgtacattggttatttgactcctcatttttatattacatgttatatcaagggagggggtataaaagaaatacaaaaattgcagaggtatctggaatgtacctatttgttaattctatttgtcatttcttttgtttcatcttttgagtaataagctgcttggaaaagtttctgttctttagctgat

SEQ ID NO: 291323 - DNA, 568 bp, Homo sapiens
acagttcttggcatgaaaggtttaaagagctatgcaaaacaaattcatttgacactaatgaatcatcgctcatgagaggcaaggagtttagtgactctgtacctaatacccttgacaaacaccttgcaaaatagatttgtgaggacagcacctgcatctttgaagagccctgtaaaggctcttctctgtatgtcagatctaatggtgagaactgcagtcactcagttacaaaagttaaatacaatttggaataattggatcctgaagtggcaggggccaagtggtagcactcaaccctcaaaggcacggtgggygtagctaccgtaatgggcagaaaagacaaagcagcaatctgaacagtctgactcacgtagagctctggcattggctaactaatcacagtgttcctggaagtgaaactgacaggaagactaatgcattcctacttaatttatgtaaggaggaaacttaaggtcaaacagataaaagactaactggaatcataaaaacagagattcatggcccctcaatcaatttccagccttgagccagtttacagacccagaac

SEQ ID NO: 291324 - DNA, 563 bp, Homo sapiens
agtagttatcaataccagctacaaccacctgaccagctgcagaaatgaggactggaactatcatgagtatttccttcttttgttaraaacatgtttgtgcatgtatgcacttgtactaagaaaatatcttcatttcatttcccttttctttatcaggtgacatagatttgctgacctcatatcagcatttaagtattgtttactttatgtaagagtatttgggttggggatgggtgcatttccagttgtaggaaggatagtttattatgttaggggtaattatgaccttactattgtctgtattttaagattatgtatgatctcaggagatgtgtgtgggttcaagttcacaaggggtgggcttgtgatggttaataacgagtgtcaacttgattggattgaaggatgtaaagtattcatcctgggtgtgtctgtgagggtgttgccaaaaaaaattaacatgtgagtcagtgggctgggaaaggcagacccacccttaatctttgtgggcacaatccaatcagctgccaacccagccatactataagcaggcagaaaaatgt

SEQ ID NO: 291325 - DNA, 470 bp, Homo sapiens
tcagtgttgaaatgtatgctacagttattatggttgtaatttgttatgccatgttgatcttcttgtgcttttcatatcagaacaatgyatttttaacattctgactttctttttctctcaattggtaactgactatatagaaaatttatatttatggatactatttcttttttaataagttcaagggaaaacattgataaaggaaaatttatcctttcaactttctttaggtgccagcattattttcatattaggaagcaggagaaagttaaggaactctaagcaatactagaatggttatatatatatttaagtttgtattaaacctgttggaatggtaaagaaatttactgacatatttaaccatacaaaatagtgttgctaaaagactagtttttctctttattctgtgcatatgtatatatatgaatgtgtgttttttttttaagaaattttaaaaaaacttaatc

SEQ ID NO: 291326 - DNA, 580 bp, Homo sapiens
tcctttgtgttaaggcatatattttctatactaaattgttgagaagttttttgtcatgtaagaatatttaattttgccaaacgcttttattgtgtttrttaatttaatcatatggttttcagtatatatccaaaggaaagaaaatcagtatatcaaagagttacctgcacccccatgtttattacagcactattcacaatagccaagatatggaatcgacaaaagtgtccatcaacagatgaatggataaagaaatgtgacatacatatataatggaatattatttagtcataataaagaacaaaatcctgttgtttgtggcaacaagaatgcaagtggagggcattatgttaggtgaaataagcctggcatagaaatataaacaccacataactacgtgttctcacttatgtatggaagctaaaatttttaatctcgtagaagtagatagtagagttttggttaccatatcctggaaagagtaggagaaagaagagtataagaaaaatgtgcttaatacatacaaaattacagctggagagaaggaagaagttctagttctctacagcactgttgggtg

SEQ ID NO: 291327 - DNA, 580 bp, Homo sapiens
tcctttgtgttaaggcatatattttctatactaaattgttgagaagttttttgtcatgtaagaatatttaattttgccaaacgcttttattgtgtttattaatttaatcatatggttttcagtatatatccaaaggaaagaaaatcagtatatcaaagagttacctgcacccccatgtttattacagcactattcacaatagccaagatatggaatcracaaaagtgtccatcaacagatgaatggataaagaaatgtgacatacatatataatggaatattatttagtcataataaagaacaaaatcctgttgtttgtggcaacaagaatgcaagtggagggcattatgttaggtgaaataagcctggcatagaaatataaacaccacataactacgtgttctcacttatgtatggaagctaaaatttttaatctcgtagaagtagatagtagagttttggttaccatatcctggaaagagtaggagaaagaagagtataagaaaaatgtgcttaatacatacaaaattacagctggagagaaggaagaagttctagttctctacagcactgttgggtg

SEQ ID NO: 291328 - DNA, 580 bp, Homo sapiens
tcctttgtgttaaggcatatattttctatactaaattgttgagaagttttttgtcatgtaagaatatttaattttgccaaacgcttttattgtgtttattaatttaatcatatggttttcagtatatatccaaaggaaagaaaatcagtatatcaaagagttacctgcacccccatgtttattacagcactattcacaatagccaagatatggaatcgacaaaagtgtccatcaacagatgaatggataaagaaatgtgacatacatatataatggaatattatttagtcatartaaagaacaaaatcctgttgtttgtggcaacaagaatgcaagtggagggcattatgttaggtgaaataagcctggcatagaaatataaacaccacataactacgtgttctcacttatgtatggaagctaaaatttttaatctcgtagaagtagatagtagagttttggttaccatatcctggaaagagtaggagaaagaagagtataagaaaaatgtgcttaatacatacaaaattacagctggagagaaggaagaagttctagttctctacagcactgttgggtg

SEQ ID NO: 291329 - DNA, 580 bp, Homo sapiens
tcctttgtgttaaggcatatattttctatactaaattgttgagaagttttttgtcatgtaagaatatttaattttgccaaacgcttttattgtgtttattaatttaatcatatggttttcagtatatatccaaaggaaagaaaatcagtatatcaaagagttacctgcacccccatgtttattacagcactattcacaatagccaagatatggaatcgacaaaagtgtccatcaacagatgaatggataaagaaatgtgacatacatatataatggaatattatttagtcataataaagaacaaaatcctgttgtttgtggcaacaagaatgcaagtggagggcattatgttaggtgaaataagcctggcatagaaatataaacaccacataactacgtgttctcacttatgtatggaagctaaaatttttaatctcgtagaagtagatagtagagttttggttaccatatcctggaaagagtaggagaaagaagagtataagaaaaatgtgcttaatacatacaaaattacagctggagagaaggaagaasttctagttctctacagcactgttgggtg

SEQ ID NO: 291330 - DNA, 452 bp, Homo sapiens
attacattttacctacaataaatgagataacacttgtaaattatatggtactctgcctaacacacgttaataactcaatagatgttagcaataaacttttagtrtagtagtcaaagtattaatttctcacattgcaatttccttcaaagacataaatacaacctttctaatgactccttgttcatcaagatacctcttcaaattattctatttgtttcattcagtatattatctgtgtataccgatattacactcttttctttttttgagatggaatctcattctgttactgatgctggagtgaggtggcatgatctcggttcactgcaacctccacctcccaggttcaagcgattctcctgtctcagccccccaagtagctaggactacaggtgcacaccaccatgcctggctaatttttgtatttttagtacagtcagagtttcaccctg

SEQ ID NO: 291331 - DNA, 452 bp, Homo sapiens
attacattttacctacaataaatgagataacacttgtaaattatatggtactctgcctaacacacgttaataactcaatagatgttagcaataaacttttagtatagtagtcaaagyattaatttctcacattgcaatttccttcaaagacataaatacaacctttctaatgactccttgttcatcaagatacctcttcaaattattctatttgtttcattcagtatattatctgtgtataccgatattacactcttttctttttttgagatggaatctcattctgttactgatgctggagtgaggtggcatgatctcggttcactgcaacctccacctcccaggttcaagcgattctcctgtctcagccccccaagtagctaggactacaggtgcacaccaccatgcctggctaatttttgtatttttagtacagtcagagtttcaccctg

SEQ ID NO: 291332 - DNA, 632 bp, Homo sapiens
cacttcattatccttgtgtcactaaataacgtataaagttaaatcagaagtgtattmatctctgaatttctaatcagttgtttttagtttgcagaaaaaacttcagcatgtgccaggaacacaacctcaccttgatcaggtaaagaaaaaaaatctaaatctgaaattcctaatcaatgtttttaaaggacctctttaactagataggcaatgtttaggactattttattataaactttttctaaaatggtatttttgaactgtgttgataatttttggaatcttaaatgcttttgacatagtctaattctatttcttaacacataataggaattcatcaaaccagatttgttttagaatctgaggaaatcatgctttctagcctttccattctgtagattgcttagcatattggttagttctgatagggattactccttaaaagcagcctgggggttctataggcagtctgtttttaagtatgttgaattgtttaaggaaaggtctgatataagcatggcttatttaaataaaaattgacttggagtttcaccttcaggtagcactataaatttgaactccttaagatgtttttcatgctctaaaattctaatccctaaggtaaatatcta

SEQ ID NO: 291333 - DNA, 1656 bp, Homo sapiens
ttcatgaacaatttgtgttttactgagaagagtcattgtttatggtagacattagactacagatgaatatgcactttaaacactcttagttgctttcttaattttatatctgctgctttatgcttctgtttattttcattctttccaatgtccacattctagtaaatttgaatattttaatccaagtttatatactatttaatattgcttgtatagtttagtattgttaagactcaaaaaggtttacagaaagaagaaaaagatcaacatgttattaatcatttaaagatcattttgaartctttgacctttatattttaatgaataaaatattagtagttattagtataaaataatttatgtcttttggacttagcatccagtatttcttttttaataaagaaaataattattctcttgcaatatactatgtttacctgggttttgaaaagtgatgtttcctaatatgagaaagccatttacatttttaaatctacaaaggcaaatggaawttcatgaacaatttgtgttttactgagaagagtcattgtttatggtagacattagactacagatgaatatgcactttaaacactcttagttgctttcttaattttatatctgctgctttatgcttctgtttattttcattctttccaatgtccacattctagtaaatttgaatattttaatccaagtttatatactatttaatattgcttgtatagtttagtattgttaagactcaaaaaggtttacagaaagaagaaaaagatcaacatgttattaatcatttaaagatcattttgaaatctttgacctttatattttaatgaataaaatattagtagttattagtataaaataatttatgtcttttggacttagcatccagtatttcttttttaataaagaaaataattattctcttgcaatatactatgtttacctgggttttgaaaagtgatgtttcctwatatgagaaagccatttacatttttaaatctacaaaggcaaatggaawcacttcattatccttgtgtcactaaataacgtataaagttaaatcagaagtgtattaatctctgaatttctaatcagttgtttttagtttgcagaaaaaacttcagcatgtgccaggaacacaacctcaccttgatcaggtaaagaaaaaaaatctaaatctgaaattcctaatcaatgtttttaaaggacctctttaactagataggcwatgtttaggactattttattataaactttttctaaaatggtatttttgaactgtgttgataatttttggaatcttaaatgcttttgacatagtctaattctatttcttaacacataataggaattcatcaaaccagatttgttttagaatctgaggaaatcatgctttctagcctttccattctgtagattgcttagcatattggttagttctgatagggattactccttaaaagcagcctgggggttctataggcagtctgtttttaagtatgttgaattgtttaaggaaaggtctgatataagcatggcttatttaaataaaaattgacttggagtttcaccttcaggtagcactataaatttgaactccttaagatgtttttcatgctctaaaattctaatccctaaggtaaatatcta

SEQ ID NO: 291334 - DNA, 632 bp, Homo sapiens
cacttcattatccttgtgtcactaaataacgtataaagttaaatcagaagtgtattaatctctgaatttctaatcagttgtttttagtttgcagaaaaaacttcagcatgtgccaggaacacaacctcaccttgatcaggtaaagaaaaaaaatctaaatctgaaattcctaatcaatgtttttaaaggacctctttaactagataggcaatgtttaggactattttattataaactttttctaaaatggtatttttgaactgtgttgataatttttggaatcttaaatgcttttgacatagtctaattctatttcttaacacataataggaattcatcaaaccagatttgttttagaatctgaggaaatcatgctttctagcytttccattctgtagattgcttagcatattggttagttctgatagggattactccttaaaagcagcctgggggttctataggcagtctgtttttaagtatgttgaattgtttaaggaaaggtctgatataagcatggcttatttaaataaaaattgacttggagtttcaccttcaggtagcactataaatttgaactccttaagatgtttttcatgctctaaaattctaatccctaaggtaaatatcta

SEQ ID NO: 291335 - DNA, 376 bp, Homo sapiens
ccttgccctggttctcccatggccctgaccctgaaatgcctggccctaccctggccttgcmctgctctggcccttgccctgactctggtcctgtcactgacctagccccagccctgttgctggtcttaccatggcccagaccctgccttggccctgccctgacactgtcctggaccctggctgtgccaagaacctgcactgtccttgcccttgttttgctcctgccccaaacctggtcctgcccaggccgtttctatggccctggccctggccctgcccaggtcttggcactggcctggccctgccctgccctggccctatgctttcctggccctgccttggccctagcctggctttgaccctgccctggccctac

SEQ ID NO: 291336 - DNA, 376 bp, Homo sapiens
ccttgccctggttctcccatggccctgaccctgaaatgcctggccctaccctggccttgccctgctctggcccttgccctgactctggtcctgtcactgacctagccccagccctgttgctggtcttaccatggcccagaccctgccttggccctgccctgacactgtcctggaccctggctgtgccaagaacctgcactgtccttgcccttgttttgctcctgccccraacctggtcctgcccaggccgtttctatggccctggccctggccctgcccaggtcttggcactggcctggccctgccctgccctggccctatgctttcctggccctgccttggccctagcctggctttgaccctgccctggccctac

SEQ ID NO: 291337 - DNA, 437 bp, Homo sapiens
tcctggtcctagccccgttgctggtcctgccayggcccttgtcctgacattgccctttcctggttctggccctggccctgtcccagccctgctctggccctggtctgaaccctggccctgcaatagacctgccttggtcctgcccagaccctggctctggccctacctctgccctggccatacccttgccctggcctggaccccggtcctggtccttgtcctgccccagccgtggccctggccctgccctgcctgtgccctgttctatcctgggctggccctgccatggcctggtcttgccattgccctgccctagcttgccctgcttgtgccctagatctgccccgcttgtgccctagatctgccccggcctttgccccatcttggttctagccttgactcagccctggaccttccctgaccttgcctcagccctg

SEQ ID NO: 291338 - DNA, 437 bp, Homo sapiens
tcctggtcctagccccgttgctggtcctgccatggcccttgtcctgacattgccctttcctggttctggccctggccctgtcccagccctgctctggccctggtctgaaccctggccctgcaatagacctgccttggtcctgcccagaccctggctctggccctacctctgccctggccatacccttgccctggcctggaccccrgtcctggtccttgtcctgccccagccgtggccctggccctgccctgcctgtgccctgttctatcctgggctggccctgccatggcctggtcttgccattgccctgccctagcttgccctgcttgtgccctagatctgccccgcttgtgccctagatctgccccggcctttgccccatcttggttctagccttgactcagccctggaccttccctgaccttgcctcagccctg

SEQ ID NO: 291339 - DNA, 437 bp, Homo sapiens
tcctggtcctagccccgttgctggtcctgccatggcccttgtcctgacattgccctttcctggttctggccctggccctgtcccagccctgctctggccctggtctgaaccctggccctgcaatagacctgccttggtcctgcccagaccctggctctggccctacctctgccctggccatacccttgccctggcctggaccccggtcctggtccttgtcctgccccagccgtggccctggccctgccctgcctgtgccctgttctatcctgggctggccctgccatggcctggtcttgccattgccctgccctagcytgccctgcttgtgccctagatctgccccgcttgtgccctagatctgccccggcctttgccccatcttggttctagccttgactcagccctggaccttccctgaccttgcctcagccctg

SEQ ID NO: 291340 - DNA, 433 bp, Homo sapiens
gctattactaaaatttttattttagatttttaagataactatagtagtagtaatgtctatactatgttgtttgtaatagtaatratacttgcagtaatcactaaattttaactaatactatctttgcttccagtagtgttctatgagtataattttatcaacatgtaaatatgtgaggcattgattctcataataattctatatgctaggtacttaaagcatccccattttccaaatgtaggaaacaggcaaaaagaaggtaaatacttggccagattactcctgtaatcccagcactttgggaggccaaggcaggcagatggcttgagctcaggagtttggaaccagcctgggcaacattgtgaaaccccatctctactaaaaatgcacaaaaagaactaatttaagtttcttgtaggattctggttataaa

SEQ ID NO: 291341 - DNA, 867 bp, Homo sapiens
gctattactaaaatttttattttagatttttaagataactatagtagtagtaatgtctatactatgttgtttgtaatagtaataatayttgcagtaatcactaaattttaactaatactatctttgcttccagtagtgttctatgagtataattttatcaacatgtaaatatgtgaggcattgattctcataataattctatatgctaggtacttaaagcatccccattttccaaatgtaggaaacaggcaaaaagaaggtaaatacttggccagattactcctgtaatcccagcactttgggaggccaaggcaggcagatggcttgagctcaggagtttggaaccagcctgggcaacattgtgaaaccccatctctactaaaaatgcacaaaaagaactaatttaagtttcttgtaggattctggttataaawgctattactaaaatttttattttagatttttaagataactatagtagtagtaatgtctatactatgttgtttgtaatagtaataatacttgcagtaatcactaaattttaactaatactatctttgcttccagtagtgttctatgagtataattttatcaacatgtaaatatgtgaggcattgattctcataataattctatatgctaggtacttaaagcatccccattttccaaatgtaggaaacaggcawaaagaaggtaaatacttggccagattactcctgtaatcccagcactttgggaggccaaggcaggcagatggcttgagctcaggagtttggaaccagcctgggcaacattgtgaaaccccatctctactaaaaatgcacaaaaagaactaatttaagtttcttgtaggattctggttataaa

SEQ ID NO: 291342 - DNA, 433 bp, Homo sapiens
gctattactaaaatttttattttagatttttaagataactatagtagtagtaatgtctatactatgttgtttgtaatagtaataatacttgcagtaatcactaaattttaactaatactatctttgcttccagtagtgttctatgagtataattttatcaacatgtaaatatgtgaggcattgattctcataataattctatatgctaggtacttaaagcatccccattttccaaatgtaggaaacaggcaaaaagaaggtaaatacttggccagattactcctgtaatcccagcactttgggaggccaaggcaggcagatggcttgagctcaggagtttggaaccagcctgggcaacattgtgaaaccccatcyctactaaaaatgcacaaaaagaactaatttaagtttcttgtaggattctggttataaa

SEQ ID NO: 291343 - DNA, 282 bp, Homo sapiens
ggagtttggaaccagcctgggcaacattgtgaaaccccatctctactaaaaatgcacaaaaagaactratttaagtttcttgtaggattctggttataaaacactggtcaaacacacagggcatggatagggcagggccagggacaaggtcaggccaggaaggggccagggccaaggcagggccagagctggacttggaggtgtcctggtctgatttgccctgccccaacgttggcccagccctgctctggcacatcctgtcatgtcctgtccctggcctga

SEQ ID NO: 291344 - DNA, 377 bp, Homo sapiens
agaactaatttaagtttcttgtaggattctggttataaaacactggtcaaacacacagggcatggatagggcagggccagggacaaggtcaggccaggaaggggccagggccaaggcagggccagagctggamttggaggtgtcctggtctgatttgccctgccccaacgttggcccagccctgctctggcacatcctgtcatgtcctgtccctggcctgagcattggccctggccctgtcctgcttctggccctgccccggagttgaccaggcactgccatggcccagtcctgcattgccctgccctcctctgccctggtgctaccatggcgctgcttgggccctagctctgcctcgactctggacctgccctgac

SEQ ID NO: 291345 - DNA, 377 bp, Homo sapiens
agaactaatttaagtttcttgtaggattctggttataaaacactggtcaaacacacagggcatggatagggcagggccagggacaaggtcaggccaggaaggggccagggccaaggcagggccagagctggacttggaggtgtcctggtctgatttgccctgccccaacgttggcccagccctgctctggcacrtcctgtcatgtcctgtccctggcctgagcattggccctggccctgtcctgcttctggccctgccccggagttgaccaggcactgccatggcccagtcctgcattgccctgccctcctctgccctggtgctaccatggcgctgcttgggccctagctctgcctcgactctggacctgccctgac

SEQ ID NO: 291346 - DNA, 377 bp, Homo sapiens
agaactaatttaagtttcttgtaggattctggttataaaacactggtcaaacacacagggcatggatagggcagggccagggacaaggtcaggccaggaaggggccagggccaaggcagggccagagctggacttggaggtgtcctggtctgatttgccctgccccaacgttggcccagccctgctctggcacatcctgtcatgycctgtccctggcctgagcattggccctggccctgtcctgcttctggccctgccccggagttgaccaggcactgccatggcccagtcctgcattgccctgccctcctctgccctggtgctaccatggcgctgcttgggccctagctctgcctcgactctggacctgccctgac

SEQ ID NO: 291347 - DNA, 403 bp, Homo sapiens
tttgagtccaggagttgaccagcctgggcaacatagtgagaccttgtctttattaaataaataaataaataaataaataaataaataaataaataaataggttgggcactgtggctcatatctgkcatcccagcattttgggttgccaatgcaggaggattgcttgagcccaggagtttgagaccagcctgggcagaatagcaagactccatctctgcaaataataaaatattaaccaggtgtggtggtgcgcacctggggtcccagctacctgggaggctaaggtgggaggtttgcttgaggcttcagtgaactgtgaatgcaccatgcaccactgcattccagcctaggccacagaacaggaccttgtttataaataaagaaataagtaaaaatataaata

SEQ ID NO: 291348 - DNA, 403 bp, Homo sapiens
tttgagtccaggagttgaccagcctgggcaacatagtgagaccttgtctttattaaataaataaataaataaataaataaataaataaataaataaataggttgggcactgtggctcatatctggcmtcccagcattttgggttgccaatgcaggaggattgcttgagcccaggagtttgagaccagcctgggcagaatagcaagactccatctctgcaaataataaaatattaaccaggtgtggtggtgcgcacctggggtcccagctacctgggaggctaaggtgggaggtttgcttgaggcttcagtgaactgtgaatgcaccatgcaccactgcattccagcctaggccacagaacaggaccttgtttataaataaagaaataagtaaaaatataaata

SEQ ID NO: 291349 - DNA, 572 bp, Homo sapiens
aaattgaaatgagatgagttgaaatgatgagatgtaatggtgaaatgaaatgaggaaatgagatgagatgaaatgagatgaaataatgagatgaaatgagataatgagatgagatgaaatcatgagatgaaatgatgaaatgaaatgaaatgatggatgaaattatgagatgaaagatgaaatgtaatgagatgaaatgaaatgacataatgaaatgaaataatgaaatgagatgaaataaaataatgaaatgatgaaataatgaaatgaaaatgaaatggaaatgatgagatgagaagaaatgatgagatgaaatgatgaaatgatgagatgagataaaatgagatgaaatgatgagatgagatgaaatatgatgagatgaaatgmcataatgaatgaaatgatgaaatggaataatgaaatggaaatgatgagctgagatgcaatgagttgaaatgagatgaaatgatgaaatgagatgaaatgatgagatgagatgtgatgaaatgatgacataaaatgagatgaaatgagatgtaatgatggaatgagatgagatgaaatgagatgaa

SEQ ID NO: 291350 - DNA, 572 bp, Homo sapiens
aaattgaaatgagatgagttgaaatgatgagatgtaatggtgaaatgaaatgaggaaatgagatgagatgaaatgagatgaaataatgagatgaaatgagataatgagatgagatgaaatcatgagatgaaatgatgaaatgaaatgaaatgatggatgaaattatgagatgaaagatgaaatgtaatgagatgaaatgaaatgacataatgaaatgaaataatgaaatgagatgaaataaaataatgaaatgatgaaataatgaaatgaaaatgaaatggaaatgatgagatgagaagaaatgatgagatgaaatgatgaaatgatgagatgagataaaatgagatgaaatgatgagatgagatgaaatatgatgagatgaaatgccataatgaatgaaatgatgaaatggaataatgaaatggaaatgatgagctgagatgcaatgagttgaaatgagatgaaatgatgaaatgagatgaaatgatgagatgagatgtgatgaaatgatgacatraaatgagatgaaatgagatgtaatgatggaatgagatgagatgaaatgagatgaa

SEQ ID NO: 291351 - DNA, 623 bp, Homo sapiens
caaagaagaacggagggatagagtgtgaaggtacagattttgagtttaagcacattagggggcttagtgttctggatgaagaaaacatataaaagttattgtatgttaggtattgtttgcaaaagagtagaaaatggagaaataacccagtgggttaaagaagaaacagactaaataaacaaacctgagtaagttgttcctaaattttattttagaggcaattcctcattttgcttyagttttctcaattattgcctcacttttctgtttctttctctgtcagcatacatggaaaaaggagttaattttagattcaaaacaaaaactggaaaaaaaaagtctgaaatgggtaatacctaggacctagtatatatgtgttattaaggctctatccctgaatttttaatgcagttatctatttttcatggattctttgtttattccccataaggaacacctgggtttggagaatgggaaggtagatgagaaaacccaagtgacaaagaatgtttagtttattattagaaccaactatgagttgtgacccttatcttctgcactgggaattacagattttttcagggtttttctaacgtgaaaagagtttattggtgtaggaaaac

SEQ ID NO: 291352 - DNA, 623 bp, Homo sapiens
caaagaagaacggagggatagagtgtgaaggtacagattttgagtttaagcacattagggggcttagtgttctggatgaagaaaacatataaaagttattgtatgttaggtattgtttgcaaaagagtagaaaatggagaaataacccagtgggttaaagaagaaacagactaaataaacaaacctgagtaagttgttcctaaattttattttagaggcaattcctcattttgctttagttttctcaattattgcctcacttttctgtttctttctstgtcagcatacatggaaaaaggagttaattttagattcaaaacaaaaactggaaaaaaaaagtctgaaatgggtaatacctaggacctagtatatatgtgttattaaggctctatccctgaatttttaatgcagttatctatttttcatggattctttgtttattccccataaggaacacctgggtttggagaatgggaaggtagatgagaaaacccaagtgacaaagaatgtttagtttattattagaaccaactatgagttgtgacccttatcttctgcactgggaattacagattttttcagggtttttctaacgtgaaaagagtttattggtgtaggaaaac

SEQ ID NO: 291353 - DNA, 623 bp, Homo sapiens
caaagaagaacggagggatagagtgtgaaggtacagattttgagtttaagcacattagggggcttagtgttctggatgaagaaaacatataaaagttattgtatgttaggtattgtttgcaaaagagtagaaaatggagaaataacccagtgggttaaagaagaaacagactaaataaacaaacctgagtaagttgttcctaaattttattttagaggcaattcctcattttgctttagttttctcaattattgcctcacttttctgtttctttctctgtcagcatacatggaaaaaggagttaattttagattcaaaacaaaaactggaaaaaaaaagtctgaaatgggtaatacctaggacctagtatatatgtgttattaaggctctatccctgaatttttaatgyagttatctatttttcatggattctttgtttattccccataaggaacacctgggtttggagaatgggaaggtagatgagaaaacccaagtgacaaagaatgtttagtttattattagaaccaactatgagttgtgacccttatcttctgcactgggaattacagattttttcagggtttttctaacgtgaaaagagtttattggtgtaggaaaac

SEQ ID NO: 291354 - DNA, 623 bp, Homo sapiens
caaagaagaacggagggatagagtgtgaaggtacagattttgagtttaagcacattagggggcttagtgttctggatgaagaaaacatataaaagttattgtatgttaggtattgtttgcaaaagagtagaaaatggagaaataacccagtgggttaaagaagaaacagactaaataaacaaacctgagtaagttgttcctaaattttattttagaggcaattcctcattttgctttagttttctcaattattgcctcacttttctgtttctttctctgtcagcatacatggaaaaaggagttaattttagattcaaaacaaaaactggaaaaaaaaagtctgaaatgggtaatacctaggacctagtatatatgtgttattaaggctctatccctgaatttttaatgcagttatctatttttcatggattctttgtttattccccataaggaacacctgggtttggagaatgggaaggtagatgagaaaacccaagtgacaaakaatgtttagtttattattagaaccaactatgagttgtgacccttatcttctgcactgggaattacagattttttcagggtttttctaacgtgaaaagagtttattggtgtaggaaaac

SEQ ID NO: 291355 - DNA, 594 bp, Homo sapiens
agtcacaagtctgatataaagggagggtaaaagccaaaagggtgtgtaatttatcaaattgcttcttccaaattcatttctagtactgttaacaagctggctaatagtcaatattgtcagtgtcagagatttagcttaggtctctataaggatataaaagtcaagtaataattatcattccttttatgccaaaaacgtttgctaaatagattgtgttcttcttagcaatcacaatggtgcacaagatttatgaaggaaacaagattagaagaccagtgtcaaaaaatgtaaaagcaatcttcattcatcactttctccttttcaaaatcagccatctttttctttcttcccttttttactataccttgaacttactatgtaagctaagaaaaaaattacataataatagctaacagagcacttactatgtgtcagcactgtgcaaagtttaccaacattgtctcaygtaatactcaaagcaaacttatgataggcattatgccttttacagaggaggctttaaaagggtaaataagctccctaagaagacaatgagaaacagaccaaggattagaacccaagcagattccaagg

SEQ ID NO: 291356 - DNA, 596 bp, Homo sapiens
ataaatttaaaaaaaaaaaaaacagaacaagaaagaactcagggattggcagagtgagaatacattatgagtaaagacaggaactgagaggatgcatccatgggaaagtgaattaaccatcctgggtaaagttagggaagactgacattaggaaagagtcaaagagaagacaggaaaagaaagatggagtgcgaagaccctgaatatcagtctattaactgtgaactatattctgcaagcactgrggactaattttatgtattaccatttatataacaattagccatcaacaatatatgtgattccctaacgttcttgaagcaggtcaaccttataccttaagtttctacagggcaacaatcagagtaaaaaatattctgtgtatacaatatggatctgtaggcacttaacacacttatcattttgtacctaattgtcgttcttaatttctttacatcttcttctggaaccaagtctgttttattaatgagaatgatatctgccaaagcaacttgcctaaaatagcaaacaaaaagaaatgttaagaaattttaaataatatacacgcatgcagattaatacatcaaaagagaaat

SEQ ID NO: 291357 - DNA, 513 bp, Homo sapiens
acaactttaacccgttgcttagcctaggtgtaatccacagaggatcttgtctgtctaagatgcccctctagccacatccttcccctgctcagatcttgtcattggctcccatgaactgaagttgaagtttaagctccttaggacagcatacacgcccttctatgatctgttcccagaacatatttactggtttatctcatatcatggcccactttgtattttacacttttgaaatacagaaaatcattacattctcccaataatactaagctagtatatgcctaaaagcctttgccaatattttgtcttttgttgagaattctcttagcttattttgtcacgtggttaactccttatgtcctttcacgactcacatgtcaagamttcaggaaaccttctctaactcccaggctgggctgagtgacccttttctgggtaaataatgaactctaatcatactcttcatagcacttaccatactaatttgaagtctgaagtattccattttctgcc

SEQ ID NO: 291358 - DNA, 279 bp, Homo sapiens
tcagcctgggcgacagtgggagactgtgtgtcaaaaaaaaaaaattgccaatgattgaagcctaatactgaagattctggtttattaataattagtctgttgctgggtgttaattgagctccccaagtgattactcatgtaggacttcaaaacrataatttagaaccttgtgactaaaaatctgggcaaaaataagcagcatcagtatcacctgggagcagcttcaggtctcactttagatttactctgaatctaaatattatatttttattaaaaaaa

SEQ ID NO: 291359 - DNA, 279 bp, Homo sapiens
tcagcctgggcgacagtgggagactgtgtgtcaaaaaaaaaaaattgccaatgattgaagcctaatactgaagattctggtttattaataattagtctgttgctgggtgttaattgagctccccaagtgattactcatgtaggacttcaaaacgataatttagaaccttgtgactmaaaatctgggcaaaaataagcagcatcagtatcacctgggagcagcttcaggtctcactttagatttactctgaatctaaatattatatttttattaaaaaaa

SEQ ID NO: 291360 - DNA, 623 bp, Homo sapiens
ttcttcacgtctttgtcagcatttgttatttttgtctcttctataatagccatcctaactgaagtaagatgatgcctcactgtggctttgattagcatttccttgctgattagtgrtgttgaacattttttcatatatttgttggtcatttgtatgtcttcttttgagaaatgtctgttcagagcatttgtttatatttaattagattgttgtgcttctttgctgttgatatgtttgaattccttgtatattcttgatattaatttcctgccagatgagtttatactttctcccattctgtaagttgtcttttcactcactttcttatttcctttgctgtgcagaagatttttagcttgatgtgatcctatttgtttattttttcttttgttgcctgtgcttttgatgccttattcataaaatattttcccagagcaatgtcctgaaggatctcccctatgttttcttctagtagctttaccattttgggtcttatatttgggtatttgagatactttgagttgatctttgtatagggtgagaggcagaggtctagtttcattcttctgcatatggatatccagtttttccagcaccatttattgaagagactatcctttccc

SEQ ID NO: 291361 - DNA, 1247 bp, Homo sapiens
ttcttcacgtctttgtcagcatttgttatttttgtctcttctataatagccatcctaactgaagtaagatgatgcctcactgtggctttgattagcatttccttgctgattagtggtgttgmacattttttcatatatttgttggtcatttgtatgtcttcttttgagaaatgtctgttcagagcatttgtttatatttaattagattgttgtgcttctttgctgttgatatgtttgaattccttgtatattcttgatattaatttcctgccagatgagtttatactttctcccattctgtaagttgtcttttcactcactttcttatttcctttgctgtgcagaagatttttagcttgatgtgatcctatttgtttattttttcttttgttgcctgtgcttttgatgccttattcataaaatattttcccagagcaatgtcctgaaggatctcccctatgttttcttctagtagctttaccattttgggtcttatatttgggtatttgagatactttgagttgatctttgtatagggtgagaggcagaggtctagtttcattcttctgcatatggatatccagtttttccagcaccatttattgaagagactatcctttcccwttcttcacgtctttgtcagcatttgttatttttgtctcttctataatagccatcctaactgaagtaagatgatgcctcactgtggctttgattagcatttccttgctgattagtggtgttgaacattttttcatwtatttgttggtcatttgtatgtcttcttttgagaaatgtctgttcagagcatttgtttatatttaattagattgttgtgcttctttgctgttgatatgtttgaattccttgtatattcttgatattaatttcctgccagatgagtttatactttctcccattctgtaagttgtcttttcactcactttcttatttcctttgctgtgcagaagatttttagcttgatgtgatcctatttgtttattttttcttttgttgcctgtgcttttgatgccttattcataaaatattttcccagagcaatgtcctgaaggatctcccctatgttttcttctagtagctttaccattttgggtcttatatttgggtatttgagatactttgagttgatctttgtatagggtgagaggcagaggtctagtttcattcttctgcatatggatatccagtttttccagcaccatttattgaagagactatcctttccc

SEQ ID NO: 291362 - DNA, 539 bp, Homo sapiens
gtcttcttttgagaaatgtctgttcagagcatttgtttatatttaattagattgttgtgcttctttgctgttgatatgtttgaattccttgtatattcttgatattaatttcctgccagatgagtttatactttctcccattctgtargttgtcttttcactcactttcttatttcctttgctgtgcagaagatttttagcttgatgtgatcctatttgtttattttttcttttgttgcctgtgcttttgatgccttattcataaaatattttcccagagcaatgtcctgaaggatctcccctatgttttcttctagtagctttaccattttgggtcttatatttgggtatttgagatactttgagttgatctttgtatagggtgagaggcagaggtctagtttcattcttctgcatatggatatccagtttttccagcaccatttattgaagagactatcctttccccaatgagtgttcttggcatctttgtaaaaaatccgttggctgagatatgtggattttctgggttctttatt

SEQ ID NO: 291363 - DNA, 623 bp, Homo sapiens
ttcttcacgtctttgtcagcatttgttatttttgtctcttctataatagccatcctaactgaagtaagatgatgcctcactgtggctttgattagcatttccttgctgattagtggtgttgaacattttttcatatatttgttggtcatttgtatgtcttcttttgagaaatgtctgttcagagcatttgtttatatttaattagattgttgtgcttctttgctgttgatatgtttgaattccttgtatattcttgatattaatttcctgccagatgagtttatactttctcccattctgtaagttgtcttttcactcactttmttatttcctttgctgtgcagaagatttttagcttgatgtgatcctatttgtttattttttcttttgttgcctgtgcttttgatgccttattcataaaatattttcccagagcaatgtcctgaaggatctcccctatgttttcttctagtagctttaccattttgggtcttatatttgggtatttgagatactttgagttgatctttgtatagggtgagaggcagaggtctagtttcattcttctgcatatggatatccagtttttccagcaccatttattgaagagactatcctttccc

SEQ ID NO: 291364 - DNA, 1063 bp, Homo sapiens
atgttttggttactacagttttgtagtgtattctgaggtctggtagcatgatacatccagctttgttctttttgcttaggatggctttggctattcaggatactttttgattccataaaatctctttggatttttttttaattttgtgaagaatgttcataggtattttgatagagattgcattgaatctgtaggttgcttttgagtagtactgtcactttaacaacattcatatttctgatccatgagtatgaatgtcttttcatttgtttgtatcctcttcaatttctttcattagtgttttgtagttttcattttacctccttrgttacatttatgtctgggttttttttttttggtaactattgtaaatgggtttgccttcttaatttctttttcagcaagtttgttgttcatatataaaaatgcaaccaatcttcatgtattagttttgtgtcttgcaacttcactgaatttgtttgttctaaaagttttctggtagtcttcaggttttcctatatataagatcatwatgttttggttactacagttttgtagtgtattctgaggtctggtagcatgatacatccagctttgttctttttgcttaggatggctttggctattcaggatactttttgattccataaaatctctttggatttttttttaattttgtgaagaatgttcataggtattttgatagagattgcattgaatctgtaggttgcttttgagtagtactgtcactttaacaacattcatatttctgatccatgagtatgaatgtcttttcatttgtttgtatcctcttcaatttctttcattagtgttttgtagttttcattttacctccttagttacatttatgtctgggttttttttttttggtaactattgtaaatgggtttgccttcttaatttctttttcagcaagtttgttgttcatatatawaaatgcaaccaatcttcatgtattagttttgtgtcttgcaacttcactgaatttgtttgttctaaaagttttctggtagtcttcaggttttcctatatataagatcat

SEQ ID NO: 291365 - DNA, 531 bp, Homo sapiens
atgttttggttactacagttttgtagtgtattctgaggtctggtagcatgatacatccagctttgttctttttgcttaggatggctttggctattcaggatactttttgattccataaaatctctttggatttttttttaattttgtgaagaatgttcataggtattttgatagagattgcattgaatctgtaggttgcttttgagtagtactgtcactttaacaacattcatatttctgatccatgagtatgaatgtcttttcatttgtttgtatcctcttcaatttctttcattagtgttttgtagttttcattttacctccttagttacatttatgtctgggttttttttttttggtaactattgtaaatgggtttgccttcttaatttctttttcagcaagtttgttgttcatatataaaaatgcaaccaatcttcrtgtattagttttgtgtcttgcaacttcactgaatttgtttgttctaaaagttttctggtagtcttcaggttttcctatatataagatcat

SEQ ID NO: 291366 - DNA, 939 bp, Homo sapiens
gtcctatagaaattgactaatttgacatgtgraggtgtttttattctattttcagaagtttagctttaaaaaaatttctaaacttcgatatctggtgagtgtcaatgtttttatcttattaaaagctgacagaccacactatattcaactgatttttttttaacaaggatgcaaaatcagtttaaaggaaggatatctttttcaacaaatggtgctacagcaattggacattcacaggtacaaaaactaagactgacctaaatttatactttatataaaatttagctcacataaatcacaggcttaaatgtaaaatgtaatattataaaacttaaagttgtgtatggtagctcgtgcctgtaatcccagctactactcaagtggctgaggtggaagcatcacttcaatccagcagttagtggctgcagtgagcaatgatggcaccactgcactacagcttgggcgaaacwgtcctatagaaattgactaatttgacatgtgaaggtgtttttattcwattttcagaagtttagctttaaaaaaatttctaaacttcgatatctggtgagtgtcaatgtttttatcttattaaaagctgacagaccacactatattcaactgatttttttttaacaaggatgcaaaatcagtttaaaggaaggatatctttttcaacaaatggtgctacagcaattggacattcacaggtacaaaaactaagactgacctaaatttatactttatataaaatttagctcacataaatcacaggcttaaatgtaaaatgtaatattataaaacttaaagttgtgtatggtagctcgtgcctgtaatcccagctactactcaagtggctgaggtggaagcatcacttcaatccagcagttagtggctgcagtgagcaatgatggcaccactgcactacagcttgggcgaaac

SEQ ID NO: 291367 - DNA, 455 bp, Homo sapiens
agtcaaaggatattgtttatagaaatgtaagcatacttaatggcaccaggggaaacaaagttaatatgattaaatcaaattgtgggatgaaaaatcacatagggaggacaagaaagagaatacagctaataccattgttcttagtttagagacattagctactgtcyaaagaaagagatgattttatgaaattacataaggtagccatcagaataaaagtttaactcttccaaatatcacaacatcaaaacaaaagcaataaaacaagacagcaaaagacagatatgtgcatataaatcatagcataatatactgtaatcaaaatataaccaaacacaatttatcattaaaagtaagtgggcttgactcttattagaggaaaaaatattgtcagattaaatcaaaaagcaaatctcaattctatgctggatataagataaagtgttacagaaagt

SEQ ID NO: 291368 - DNA, 455 bp, Homo sapiens
agtcaaaggatattgtttatagaaatgtaagcatacttaatggcaccaggggaaacaaagttaatatgattaaatcaaattgtgggatgaaaaatcacatagggaggacaagaaagagaatacagctaataccattgttcttagtttagagacattagctactgtctaaagaaagagatgattttatgaaattacataaggtagccatcagaataaaagtttaactcttccaaatatcacaacatcaaaacaaaagcaataaaacaagacagcaaaagacagatatgtgcatataaatcatagcataatatactgtaatcaaaatataaccaaacacaatttatcattaaaagtaagtggrcttgactcttattagaggaaaaaatattgtcagattaaatcaaaaagcaaatctcaattctatgctggatataagataaagtgttacagaaagt

SEQ ID NO: 291369 - DNA, 455 bp, Homo sapiens
agtcaaaggatattgtttatagaaatgtaagcatacttaatggcaccaggggaaacaaagttaatatgattaaatcaaattgtgggatgaaaaatcacatagggaggacaagaaagagaatacagctaataccattgttcttagtttagagacattagctactgtctaaagaaagagatgattttatgaaattacataaggtagccatcagaataaaagtttaactcttccaaatatcacaacatcaaaacaaaagcaataaaacaagacagcaaaagacagatatgtgcatataaatcatagcataatatactgtaatcaaaatataaccaaacacaatttatcattaaaagtaagtgggcttgactcttattagaggaaaaaatattgtcagattaaatcraaaagcaaatctcaattctatgctggatataagataaagtgttacagaaagt

SEQ ID NO: 291370 - DNA, 150 bp, Homo sapiens
ctcactgcagccttgacctctggggctgaagctatcstcctgcctcagtctcctaaagtgctaggatgagaggtgtgagtcaccttgccaggcccagggcaataactatgcaatgtttatataatttggagcaaaaaatatttgaaatat

SEQ ID NO: 291371 - DNA, 302 bp, Homo sapiens
aattttaagtgtaatgatgcaaaattttgtttaaaagtaaatgtatataaaaatgttgatatagactaaaaaattgaataagtaagaaggtagttagttgtcacartaggagtgaagtgaaaagcttcccctttcaccctctgaagattaccggaaatgaactgaccatacacagattaataaaagaaagggtatacaaacttacataacctgcaaaaacatgagagctatacacaaagtataagacttgaagatggctcagatcttaaacgctctcctcataggcaatagatatatagacc

SEQ ID NO: 291372 - DNA, 602 bp, Homo sapiens
aattttaagtgtaatgatgcaaaattttgtttaaaagtaaatgtatataaaaatgttgatatagactaaaaaattgaataagtaagaaggtagttagttgtcacagtaggagtgaagtgaaaagcttcccctttcaccctctgaagattaccsgaaatgaactgaccatacacagattaataaaagaaagggtatacaaacttacataacctgcaaaaacatgagagctatacacaaagtataagacttgaagatggctcagatcttaaacgctctcctcataggcaatagatatatagaccwatgtatataaaaatgttgatatagactaaaaaattgaataagtaagaaggtagttagttgtcacagtaggagtgaagtgaaaagcttcccctttcaccctctgaagattaccggaaatgaactgaccatacacagattaataaaagaaagggtatacaaacttacwtaacctgcaaaaacatgagagctatacacaaagtataagacttgaagatggctcagatcttaaacgctctcctcataggcaatagatatatagacccaggatgcagacattattttgtaaataatttcctttg

SEQ ID NO: 291373 - DNA, 646 bp, Homo sapiens
tccattagtagcgtttttaacaattgtgggccactgagtaagaataattttttttaaattaaaggttattttttaaaaagcacatttgtagaaaattactagcataatctgcctaaaataaatatacatattgaaaaaatstttgctccgaacaaaaagaaatatattcaccacacatacatacatatacacacacacacatgcacacacgcacacacacacacacacacacacacacattatggaagatttcaagaccaggcaataatttccactcaatccaaaaacaatgcaatcccagagctgaatatttaggtgaaaatatatcaggaatgggaggcattcaggtttaattttcatgttttggtagagttaggatgtgagttttcatttaaaaatattctttattttttttgctactattgtggtttctgtattgttactatacaatctgtaaactaaatagtaaaggagagaaaagtgattttcaaagaagctggcttgggaacaggtactattctgggaagatgaaaggtttcacttaatgactggtacctgtgccactctggttattttaactgttaaccttttagcaagaggtttttcttttaaaagacatcctttaatatttgggaagctagtgcaa

SEQ ID NO: 291374 - DNA, 646 bp, Homo sapiens
tccattagtagcgtttttaacaattgtgggccactgagtaagaataattttttttaaattaaaggttattttttaaaaagcacatttgtagaaaattactagcataatctgcctaaaataaatatacatattgaaaaaatctttgctcygaacaaaaagaaatatattcaccacacatacatacatatacacacacacacatgcacacacgcacacacacacacacacacacacacacattatggaagatttcaagaccaggcaataatttccactcaatccaaaaacaatgcaatcccagagctgaatatttaggtgaaaatatatcaggaatgggaggcattcaggtttaattttcatgttttggtagagttaggatgtgagttttcatttaaaaatattctttattttttttgctactattgtggtttctgtattgttactatacaatctgtaaactaaatagtaaaggagagaaaagtgattttcaaagaagctggcttgggaacaggtactattctgggaagatgaaaggtttcacttaatgactggtacctgtgccactctggttattttaactgttaaccttttagcaagaggtttttcttttaaaagacatcctttaatatttgggaagctagtgcaa

SEQ ID NO: 291375 - DNA, 597 bp, Homo sapiens
tattagtagtgttttattttattttttaatgattgatttttgagattgggatctcactatgttgcccaggctggtttcacattcccaagtttaagcaatacccctgcctcagtctcccaagtagctgggatgacaggtgtgtgtcaccatacccagctccattagtagcgtttttaacaattgtgggccactgagtaagaataattttttttaaattaaaggttattttttaaaaagcacatttgtagaaaattactagcataatctgcctaaaataaatatacatattgaaaaaatctttgctccgaacaaaaagaaatatattcaccacacatacatacatatacacacacacacatgcacrcacgcacacacacacacacacacacacacacattatggaagatttcaagaccaggcaataatttccactcaatccaaaaacaatgcaatcccagagctgaatatttaggtgaaaatatatcaggaatgggaggcattcaggtttaattttcatgttttggtagagttaggatgtgagttttcatttaaaaatattctttattttttttgctactattgtggtttctgtattgt

SEQ ID NO: 291376 - DNA, 1117 bp, Homo sapiens
atacccagctccattagtagcgtttttaacaattgtgggccactgagtaagaataattttttttaaattaaaggttattttttaaaaagcacatttgtagaaaattactagcataatctgcctaaaataaatatacatattgaaaaaatctttgctccgaacaaaaagaaatatattcaccacacatacatacatatacacacacacacatgcacacacgcacacacacacacacacacacacamacattatggaagatttcaagaccaggcaataatttccactcaatccaaaaacaatgcaatcccagagctgaatatttaggtgaaaatatatcaggaatgggaggcattcaggtttaattttcatgttttggtagagttaggatgtgagttttcatttaaaaatattctttattttttttgctactattgtggtttctgtattgttactatacaatctgtaaactaaatagtaaaggagagaaaagtgattttcaaagaagctggcttgggaacaggtactattctgggaagatgaaaggtttcacttaatgacwatacccagctccattagtagcgtttttaacaattgtgggccactgagtaagaataattttttttaaattaaaggttattttttaaaaagcacatttgtagaaaattactagcataatctgcctaaaataaatatacatattgaaaaaatctttgctccgaacaaaaagaaatatattcaccacacatacatacatatacacacacacacatgcacacacgcacacacacacacacacacacacacacattatggaagatttcaagaccaggcaataatttccactcaatccaaaaacaatgcaatcccagagctgwatatttaggtgaaaatatatcaggaatgggaggcattcaggtttaattttcatgttttggtagagttaggatgtgagttttcatttaaaaatattctttattttttttgctactattgtggtttctgtattgttactatacaatctgtaaactaaatagtaaaggagagaaaagtgattttcaaagaagctggcttgggaacaggtactattctgggaagatgaaaggtttcacttaatgac

SEQ ID NO: 291377 - DNA, 558 bp, Homo sapiens
atacccagctccattagtagcgtttttaacaattgtgggccactgagtaagaataattttttttaaattaaaggttattttttaaaaagcacatttgtagaaaattactagcataatctgcctaaaataaatatacatattgaaaaaatctttgctccgaacaaaaagaaatatattcaccacacatacatacatatacacacacacacatgcacacacgcacacacacacacacacacacacacacattatggaagatttcaagaccaggcaataatttccactcaatccaaaaacaatgcaatcccagagctgartatttaggtgaaaatatatcaggaatgggaggcattcaggtttaattttcatgttttggtagagttaggatgtgagttttcatttaaaaatattctttattttttttgctactattgtggtttctgtattgttactatacaatctgtaaactaaatagtaaaggagagaaaagtgattttcaaagaagctggcttgggaacaggtactattctgggaagatgaaaggtttcacttaatgac

SEQ ID NO: 291378 - DNA, 604 bp, Homo sapiens
tacacacacacacatgcacacacgcacacacacacacacacacacacacacattatggaagatttcaagaccaggcaataatttccactcaatccaaaaacaatgcaatcccagagctgaatatttaggtgaaaatatatcaggaatgggaggcattcaggtttaattttcrtgttttggtagagttaggatgtgagttttcatttaaaaatattctttattttttttgctactattgtggtttctgtattgttactatacaatctgtaaactaaatagtaaaggagagaaaagtgattttcaaagaagctggcttgggaacaggtactattctgggaagatgaaaggtttcacttaatgactggtacctgtgccactctggttattttaactgttaaccttttagcaagaggtttttcttttaaaagacatcctttaatatttgggaagctagtgcaatagtacacattgaggcccacataccacatgccaaatatttaaaaggcacatttctagctaaccactgtacatacatatattttttcttattttctgattttagtttttttccttgtcaacaatttatgtccacacatatcttcta

SEQ ID NO: 291379 - DNA, 558 bp, Homo sapiens
atacccagctccattagtagcgtttttaacaattgtgggccactgagtaagaataattttttttaaattaaaggttattttttaaaaagcacatttgtagaaaattactagcataatctgcctaaaataaatatacatattgaaaaaatctttgctccgaacaaaaagaaatatattcaccacacatacatacatatacacacacacacatgcacacacgcacacacacacacacacacacacacacattatggaagatttcaagaccaggcaataatttccactcaatccaaaaacaatgcaatcccagagctgaatatttaggtgaaaatatatcaggaatgggaggcattcaggtttaattttcatgttttggtagagttaggatgtgasttttcatttaaaaatattctttattttttttgctactattgtggtttctgtattgttactatacaatctgtaaactaaatagtaaaggagagaaaagtgattttcaaagaagctggcttgggaacaggtactattctgggaagatgaaaggtttcacttaatgac

SEQ ID NO: 291380 - DNA, 646 bp, Homo sapiens
tccattagtagcgtttttaacaattgtgggccactgagtaagaataattttttttaaattaaaggttattttttaaaaagcacatttgtagaaaattactagcataatctgcctaaaataaatatacatattgaaaaaatctttgctccgaacaaaaagaaatatattcaccacacatacatacatatacacacacacacatgcacacacgcacacacacacacacacacacacacacattatggaagatttcaagaccaggcaataatttccactcaatccaaaaacaatgcaatcccagagctgaatatttaggtgaaaatatatcaggaatgggaggcattcaggtttaattttcatgttttggtagagttaggatgtgagttttcatttaaaaatattctttattttttttgctactattgtggtttctgtattgttactatacaatctgtaaactaaatagtaaaggagagaaaagtgattttcaamgaagctggcttgggaacaggtactattctgggaagatgaaaggtttcacttaatgactggtacctgtgccactctggttattttaactgttaaccttttagcaagaggtttttcttttaaaagacatcctttaatatttgggaagctagtgcaa

SEQ ID NO: 291381 - DNA, 588 bp, Homo sapiens
tattgttactatacaatctgtaaactaaatagtaaaggagagaaaagtgattttcaaagaagctggcttgggaacaggtactattctgggaagatgaaaggtttcacttaatgactggtacctgtgccactctggttattttaactgttaaccttttagcaagaggtttttcttttaaaagacatcctttaatatttgggaagctagtgcaatagtacacattgaggcccacataccacatgccaaatatttaaarggcacatttctagctaaccactgtacatacatatattttttcttattttctgattttagtttttttccttgtcaacaatttatgtccacacatatcttctatcatcccactttgacaagtaatattataccttcaaaatgatgtggaagactagattggaatttagaaccgtagaaccttgtaattgtacaggcaagtttcttcctgggaaaaaataaaacaggaagaaaaggctgggcagcctctggttcaggaaggaaattcaggagtcccttatagcagcatctctagtacttgggaaccgaacagacttctcggcctgtgaggctgga

SEQ ID NO: 291382 - DNA, 588 bp, Homo sapiens
tattgttactatacaatctgtaaactaaatagtaaaggagagaaaagtgattttcaaagaagctggcttgggaacaggtactattctgggaagatgaaaggtttcacttaatgactggtacctgtgccactctggttattttaactgttaaccttttagcaagaggtttttcttttaaaagacatcctttaatatttgggaagctagtgcaatagtacacattgaggcccacataccacatgccaaatatttaaaaggcayatttctagctaaccactgtacatacatatattttttcttattttctgattttagtttttttccttgtcaacaatttatgtccacacatatcttctatcatcccactttgacaagtaatattataccttcaaaatgatgtggaagactagattggaatttagaaccgtagaaccttgtaattgtacaggcaagtttcttcctgggaaaaaataaaacaggaagaaaaggctgggcagcctctggttcaggaaggaaattcaggagtcccttatagcagcatctctagtacttgggaaccgaacagacttctcggcctgtgaggctgga

SEQ ID NO: 291383 - DNA, 557 bp, Homo sapiens
gtgcctggctaattttttgctgttgtggttgttgttagagatgaggtcttcctttattgaacaagctggtctccaactcctggcttcaagtgatmttcccacttctgcctcccaaagtgctgggactacaggtgtgagccaccatgcccagccaagttctgcttcttaacctgaggtagatactttgatgtttcattttcctttattgtacagatatactttatattctcatatgtgacacaagtcaaaatttaaaaaaacaatttaatgtttattccctttagatgaatgatgggcaaatttacataatgaattcattactgaaacaatgtatagatttcagactaggaaagtaactatttataaaagaaaagcttaaaacctgaaacagaaacaaaatcctgaaactgtaaaattgagtcaaactaaaatttaaaaaacaaagcaatgatataaagtatcatttgtccaaatgtgttctacaaaacgcttttttcttaaatatgtctgaggaaaaacaggttctaggagtaaaatatgtttgaaaaatgctgagt

SEQ ID NO: 291384 - DNA, 582 bp, Homo sapiens
ggcatgctcagctaatttttttctccttttctttttgtagagacagggtctcatcatgttgcccaggctggtcttggactccttggatcaagcaatcctgytgcctcagcctcccaaagtgctggattacaagcatgagccactgtgcccagccttaagtttttttcatacaggaggaaagaatttggaaagtaggtgtgtgtgtgtgtgtgtgtgtgtgtgtgtgtgtgtgtgtgtgtgttggttagggagccaacacatttttctgcaaagcttgaattctatgcctcagtttttcatttttgttatgtgcaaaataaaatcgtatcctgctatagatttaaacctgtgagcgaatcctactcaaaacctgattcaaactttgtgtagatctttgcctctctgtggcataagaataaattcttctggttttcttccctcagaaaaatggacttagacttcccacaagccttccagaaagaactcacctgcctcatctgcctgaattacctcatagaccccatcactataggctgcgggcacagtttctgtaggccctgcctctgcctttgctgggaagaa

SEQ ID NO: 291385 - DNA, 557 bp, Homo sapiens
gtgcctggctaattttttgctgttgtggttgttgttagagatgaggtcttcctttattgaacaagctggtctccaactcctggcttcaagtgatcttcccacttctgcctcccaaagtgctgggactacaggtgtgagccaccatgcccagccaagttctgcttcttaacctgaggtagatactttgatgtttcattttcctttattgtacagatatactttatattctcatatgtgacacaagtcaaaatttaaaaaaacaatttaaygtttattccctttagatgaatgatgggcaaatttacataatgaattcattactgaaacaatgtatagatttcagactaggaaagtaactatttataaaagaaaagcttaaaacctgaaacagaaacaaaatcctgaaactgtaaaattgagtcaaactaaaatttaaaaaacaaagcaatgatataaagtatcatttgtccaaatgtgttctacaaaacgcttttttcttaaatatgtctgaggaaaaacaggttctaggagtaaaatatgtttgaaaaatgctgagt

SEQ ID NO: 291386 - DNA, 557 bp, Homo sapiens
gtgcctggctaattttttgctgttgtggttgttgttagagatgaggtcttcctttattgaacaagctggtctccaactcctggcttcaagtgatcttcccacttctgcctcccaaagtgctgggactacaggtgtgagccaccatgcccagccaagttctgcttcttaacctgaggtagatactttgatgtttcattttcctttattgtacagatatactttatattctcatatgtgacacaagtcaaaatttaaaaaaacaatttaatgtttattccctttagatgaatgatgggcaaatttacataatgaattcattactgaaacaatgtatagatttcagactaggaaagtaactatttataaaagaaaagcttaaaacstgaaacagaaacaaaatcctgaaactgtaaaattgagtcaaactaaaatttaaaaaacaaagcaatgatataaagtatcatttgtccaaatgtgttctacaaaacgcttttttcttaaatatgtctgaggaaaaacaggttctaggagtaaaatatgtttgaaaaatgctgagt

SEQ ID NO: 291387 - DNA, 608 bp, Homo sapiens
tgagcttcattgtcattgcttggctggaggatacctcactttattctctacctccatcctcacattgccatctcctccctgcgtctctgtttcctcttcccttcttatgaggatatcaaccataytgaattatggcccactctaatgcattatgagctcatctagcatatcataattatacagcatctgcaaataatttgatttcaaattaagtcatactcacagacatcaggggctagaactctaatatatatattttctttttgaagacacaatctaacccacaaaagggggggagccgcttaagatcataaataactcaagtaacaagactgtgtgtttaaaatagcatttaaatttctccaaatggcagacagcttaattcagatcaataccaatcaggagataaacaagtgtttgtctcctaattggcatttacctgagattaaaacattatggtaaaatacattatcttcagtgatctttggtttaggtgagcattcacaaggcacacagttattatcacttgagccatctctctctaataactcttttctaatctgctggccaacaatatcaggttctttcaaatctctgattatcggacc

SEQ ID NO: 291388 - DNA, 608 bp, Homo sapiens
tgagcttcattgtcattgcttggctggaggatacctcactttattctctacctccatcctcacattgccatctcctccctgcgtctctgtttcctcttcccttcttatgaggatatcaaccatattgaattatggcccactctaatgcattatgagctcatctagcatatcataattatacagcatctgcaaataatttgatttcaaattaagtcatactcacagacatcaggggctagaactctaatatatatattttctttttgaagacacaatctaacccacaaaaggrggggagccgcttaagatcataaataactcaagtaacaagactgtgtgtttaaaatagcatttaaatttctccaaatggcagacagcttaattcagatcaataccaatcaggagataaacaagtgtttgtctcctaattggcatttacctgagattaaaacattatggtaaaatacattatcttcagtgatctttggtttaggtgagcattcacaaggcacacagttattatcacttgagccatctctctctaataactcttttctaatctgctggccaacaatatcaggttctttcaaatctctgattatcggacc

SEQ ID NO: 291389 - DNA, 608 bp, Homo sapiens
tgagcttcattgtcattgcttggctggaggatacctcactttattctctacctccatcctcacattgccatctcctccctgcgtctctgtttcctcttcccttcttatgaggatatcaaccatattgaattatggcccactctaatgcattatgagctcatctagcatatcataattatacagcatctgcaaataatttgatttcaaattaagtcatactcacagacatcaggggctagaactctaatatatatattttctttttgaagacacaatctaacccacaaaagggggggagccgcttaagatcataaataactcaagtaacaagactgtgtgtttaaaatagcatttaaatttctccaaatggcagacagcttaattcaratcaataccaatcaggagataaacaagtgtttgtctcctaattggcatttacctgagattaaaacattatggtaaaatacattatcttcagtgatctttggtttaggtgagcattcacaaggcacacagttattatcacttgagccatctctctctaataactcttttctaatctgctggccaacaatatcaggttctttcaaatctctgattatcggacc

SEQ ID NO: 291390 - DNA, 512 bp, Homo sapiens
atactttatattctcatatgtgacacaagtcaaaatttaaaaaaacaatttaatgtttattccctttagatgaatgatgggcaaatttacataatgaattcattactgaaacaatgtatagatttcagactaggaaagtaactatttataaaagaaaagcttaaaacctgaaacagaaacaaaatcctgaaactgtaaaattgagtcaaactaaaatttaaaaaacaaagcaatgatataaagtatcatttgtccaaatgtgttctacaaaaygcttttttcttaaatatgtctgaggaaaaacaggttctaggagtaaaatatgtttgaaaaatgctgagttaaacaactgaacctatgaaggaaggaatagaacttctcaagctcttgactctggaatcttttttacatggcaattaacaccatgcttcttcttggatttgtatttcagataaacacaatctgggaaacattttataatacagagggccacaccagattgaatattgccc

SEQ ID NO: 291391 - DNA, 557 bp, Homo sapiens
gtgcctggctaattttttgctgttgtggttgttgttagagatgaggtcttcctttattgaacaagctggtctccaactcctggcttcaagtgatcttcccacttctgcctcccaaagtgctgggactacaggtgtgagccaccatgcccagccaagttctgcttcttaacctgaggtagatactttgatgtttcattttcctttattgtacagatatactttatattctcatatgtgacacaagtcaaaatttaaaaaaacaatttaatgtttattccctttagatgaatgatgggcaaatttacataatgaattcattactgaaacaatgtatagatttcagactaggaaagtaactatttataaaagaaaagcttaaaacctgaaacagaaacaaaatcctgaaactgtaaaattgagtcaaactaaaatttaaaaaacaaagcaatgatataaagtatcatttgtccaaatgtgttctacaaaacgcttttttctkaaatatgtctgaggaaaaacaggttctaggagtaaaatatgtttgaaaaatgctgagt

SEQ ID NO: 291392 - DNA, 607 bp, Homo sapiens
aaagtaactatttataaaagaaaagcttaaaacctgaaacagaaacaaaatcctgaaactgtaaaattgagtcaaactaaaatttaaaaaacaaagcaatgatataaagtatcatttgtccaaatgtgttctacaaaacgcttttttcttaaatatgtctgaggaaaaacaggttctaggagtaaaatatgtttgaaaaatgctgagttaaacaactgaacctatgaaggaaggaatagaacttctcaagctcttgactctggaatcttttttacatggcaattaacaccatgcttcttcttggatttgtatttcagataaacacaatctgggaaacattttataatacagagggccacaccagattgaatattgcccccaggaatgaaatgaaaacaggaatggattctccagtaagaggtacccagatatcctaatcttcagtagctgacctaaaccctggacaagtgggatcaaaycccataaccaaacacaactttttaggaactaagtggataatcactctgtgttgtatgaacatgtgggcagtgtgtttcctacacagcttaaaagtgcaacaaaaaaagatctaggtgtcatataaaga

SEQ ID NO: 291393 - DNA, 607 bp, Homo sapiens
aaagtaactatttataaaagaaaagcttaaaacctgaaacagaaacaaaatcctgaaactgtaaaattgagtcaaactaaaatttaaaaaacaaagcaatgatataaagtatcatttgtccaaatgtgttctacaaaacgcttttttcttaaatatgtctgaggaaaaacaggttctaggagtaaaatatgtttgaaaaatgctgagttaaacaactgaacctatgaaggaaggaatagaacttctcaagctcttgactctggaatcttttttacatggcaattaacaccatgcttcttcttggatttgtatttcagataaacacaatctgggaaacattttataatacagagggccacaccagattgaatattgcccccaggaatgaaatgaaaacaggaatggattctccagtaagaggtacccagatatcctaatcttcagtagctgacctaaaccctggacaagtgggatcaaatcccataaccaaayacaactttttaggaactaagtggataatcactctgtgttgtatgaacatgtgggcagtgtgtttcctacacagcttaaaagtgcaacaaaaaaagatctaggtgtcatataaaga

SEQ ID NO: 291394 - DNA, 618 bp, Homo sapiens
cattaactactttatataaaaagaaatgcctgggagaattctgtttctagcagagtggcagactgatgccttgaacaaccctcctattacaaaactgaatactccacatgaaaacaaatcttttcaaatgcattgttaagctgtgaagagaataacgaaagttctaagaaaccaaaatctaaatgaaaacacaagtccaggcaggcactgaaaacctaaaaaaaaaaaaaaaaactgaagaggccaattgttggcaascatgtggaacagcaggaactcttcaagctgctgctggtggcggaggccaagccactgtgctcccagaacacaacacagaagcctccacactgaagcagagcacaggtgccctggagtctccaccccacccagggatcctccagcagaagtgggtgtgcccctgcatacctgcaagtcccatatgcagacctactgttcagggccgtgggataacagccaaaaataggaaatcattttactcatcaatggaaaaatggtgacacagtcatataatggaactcaacaatgacgataaatcaatgtctgccatagacaagaacatggatgtgttctgtaatactgaaccaaagaagccaggct

SEQ ID NO: 291395 - DNA, 618 bp, Homo sapiens
cattaactactttatataaaaagaaatgcctgggagaattctgtttctagcagagtggcagactgatgccttgaacaaccctcctattacaaaactgaatactccacatgaaaacaaatcttttcaaatgcattgttaagctgtgaagagaataacgaaagttctaagaaaccaaaatctaaatgaaaacacaagtccaggcaggcactgaaaacctaaaaaaaaaaaaaaaaactgaagaggccaattgttggcaaccatgtggaacagcaggaactcttcaagctgctgctggtggcggaggccaagccactgtgctcccagaacacaacacagaagcctccacactgaagcagagcacaggtgccctggagtctccaccccacccmgggatcctccagcagaagtgggtgtgcccctgcatacctgcaagtcccatatgcagacctactgttcagggccgtgggataacagccaaaaataggaaatcattttactcatcaatggaaaaatggtgacacagtcatataatggaactcaacaatgacgataaatcaatgtctgccatagacaagaacatggatgtgttctgtaatactgaaccaaagaagccaggct

SEQ ID NO: 291396 - DNA, 514 bp, Homo sapiens
ccgtaattcatgacatgggaaaattatcataatggaaaaagaagcaagctatatacagtgcatgatcctatacacacacatacatacatacatatttcctatccctttatatgcataagaaaacaagcgggaggaaagtcrtatctttagtcaagtcttgtttactaacgtactattaatgattatcttttctttttctttatacctttttgcatttttcaatttcctaaaatagccttacatgccttttatcaccaggagaaaaattacttctaaagtaatttcagtcaacatgcatactaagaactcttcagatttatctgttagaagctgtgcatgaatgccagtccttgcatctgtcttggaactcacagagagctcttttcccatggctttaagcaatactcaaaaagactagcatacctgaatttcctagtcctatgtttttttcatccaacagccagtcttgtatttctagctgttttctaaacatttcaaccaaaccattttacag

SEQ ID NO: 291397 - DNA, 1029 bp, Homo sapiens
ccgtaattcatgacatgggaaaattatcataatggaaaaagaagcaagctatatacagtgcatgatcctatacacacacatacatacatacatatttcctatccctttatatgcataagaaaacaagcgggaggaaagtcgtatctttagtcaartcttgtttactaacgtactattaatgattatcttttctttttctttatacctttttgcatttttcaatttcctaaaatagccttacatgccttttatcaccaggagaaaaattacttctaaagtaatttcagtcaacatgcatactaagaactcttcagatttatctgttagaagctgtgcatgaatgccagtccttgcatctgtcttggaactcacagagagctcttttcccatggctttaagcaatactcaaaaagactagcatacctgaatttcctagtcctatgtttttttcatccaacagccagtcttgtatttctagctgttttctaaacatttcaaccaaaccattttacagwccgtaattcatgacatgggaaaattatcataatggaaaaagaagcaagctatatacagtgcatgatcctatacacacacatacatacatacatatttcctatccctttatatgcataagaaaacaagcgggaggaaagtcgtatctttagtcaagtcttgtttactaacgtactattaatgattatcttttctttttctttatacctttttgcatttttcaatttcctaaaatagccttacatgccttttatcaccaggagaaaaattacttctaaagtaattwcagtcaacatgcatactaagaactcttcagatttatctgttagaagctgtgcatgaatgccagtccttgcatctgtcttggaactcacagagagctcttttcccatggctttaagcaatactcaaaaagactagcatacctgaatttcctagtcctatgtttttttcatccaacagccagtcttgtatttctagctgttttctaaacatttcaaccaaaccattttacag

SEQ ID NO: 291398 - DNA, 544 bp, Homo sapiens
ttccaaacacattttaccaggccagtatcaccttaatacctaagccaaaccaaaacacacacacacacacacacacacacacacacacacacacacacaccraacaaaaactacaggtcaacttctccaataaattaaatactgatgcaaacatcctaaaaaaattttagcaaatagaattcaacaacacatcaaaaacattatacatcgtgtttaagtgggatttatccctggcatgcaaggctggtttaaaatatgtaaatcaatcaatgtgatacatcacattaacaaaatgaaagataaaatgacatggtcacctcaattgatgcagtaaaagcatttaacaaagtttagcaacatttcttgataaaacctcttaatagtttatgtatagaaggaaagttcctcaacataataaacaccatttatgaaaaacccacagtctaatcatagttagtggggaacaactaaagcttttccactaagattgagtacaagatagggatggccagcctcatcacttttattcaacagagtacttgca

SEQ ID NO: 291399 - DNA, 587 bp, Homo sapiens
agagtgagaggaaataattccaaacacattttaccaggccagtatcaccttaatacctaagccaaaccaaaacacacacacacacacacacacacacacacacacacacacacacaccgaacaaaaactacaggtcaacttctccaataaattaaatactgatgcaaacatcctaaaaaaattttagcaaatagaattcaacaacacatcaaaaacattatacatcgtgtttaagtgggatttatccctggcatgcaaggctggtttaaaatatgtaaatcaatcaatgtgatayatcacattaacaaaatgaaagataaaatgacatggtcacctcaattgatgcagtaaaagcatttaacaaagtttagcaacatttcttgataaaacctcttaatagtttatgtatagaaggaaagttcctcaacataataaacaccatttatgaaaaacccacagtctaatcatagttagtggggaacaactaaagcttttccactaagattgagtacaagatagggatggccagcctcatcacttttattcaacagagtacttgcaagagcaatcagatgagaaaaaaaagg

SEQ ID NO: 291400 - DNA, 514 bp, Homo sapiens
ccgtaattcatgacatgggaaaattatcataatggaaaaagaagcaagctatatacagtgcatgatcctatacacacacatacatacatacatatttcctatccctttatatgcataagaaaacaagcgggaggaaagtcgtatctttagtcaagtcttgtttactaacgtactattaatgattatcttttctttttctttatacctttttgcatttttcaatttcctaaaatagccttacatgccttttatcaccaggagaaaaattacttctaaagtaatttcagtcaacatgcatactaagaactcttcagatttatctgytagaagctgtgcatgaatgccagtccttgcatctgtcttggaactcacagagagctcttttcccatggctttaagcaatactcaaaaagactagcatacctgaatttcctagtcctatgtttttttcatccaacagccagtcttgtatttctagctgttttctaaacatttcaaccaaaccattttacag

SEQ ID NO: 291401 - DNA, 587 bp, Homo sapiens
agagtgagaggaaataattccaaacacattttaccaggccagtatcaccttaatacctaagccaaaccaaaacacacacacacacacacacacacacacacacacacacacacacaccgaacaaaaactacaggtcaacttctccaataaattaaatactgatgcaaacatcctaaaaaaattttagcaaatagaattcaacaacacatcaaaaacattatacatcgtgtttaagtgggatttatccctggcatgcaaggctggtttaaaatatgtaaatcaatcaatgtgatacatcacattaacaaaatgaaagataaaatgacatggtcacctcaattgatgcagtaaaagcatttaacaaagtttagcaacatttcttgataaaacctcttaatagtttatgtatagaaggaaagttcctcaacataataaacaccatttatgaaaaacccacagtctaatcatagttagtggggaacaactaaagcttttccactaagattgagtacaagatagggatggccagcctcatcacttttattcaayagagtacttgcaagagcaatcagatgagaaaaaaaagg

SEQ ID NO: 291402 - DNA, 436 bp, Homo sapiens
acctatacacaaattttagaaagagacctcttgccctttattaattgaaaaagtgatgccaggggaaaagggctgtctcctttttgttggcctcgcatcccccatctgtgaaatagagactgagtgatatttacctatgggcatccatcttaaatgatyagtgggaattaaggtaattattataaattaatggctgtgtgagttataaaaggttagatattatggagttccattgtcatggagggaggcaattaaagaaatatacacttatagactgtaccatagatcttgtgacatttctagccactttgcctttcatcgttttactctatgtgatatgatcagtgttgtagtcatgcttttacagatgcctactgaaattgcactattttatagggaagaaaaataatttttcatgaagtcttacaggcagttc

SEQ ID NO: 291403 - DNA, 1243 bp, Homo sapiens
aaatgagcataggctatttatgggttcataactatgcattagtatgtggactgtctatcacagtccacatactgtggaaagtatcacaaagtgatactttctatcactgcttacacacaatatcaattgttgaatttcaaatattttgcccacaacctaccataagacatatatattgcatcccartgcatatacaatatatacaagaaatatttttacttcttatgatgagctctgaaatactctgttgtattttaagcttgaacgctgatgctaactgatgttaggtcctgcagtttgaaagatggttgagctggggtgaagtgaaacaggtgaaacctccacttcgatgttcttccctggtattgaacctcaaagagattggtaatactactaacacttgctaagaaatcaagtaggcagaattacaattaaaaagaccctgaaatcaatgctgtccttataaaaggcatcaaagaataggtgggtggatgtccaggattatgtggtcttatacagcttgtgcttatctgtagaatgcacctcaaaacatagatgcttccttccatagtggactctgagattctttttttttttttttttttttttgagatggagtctwaaatgagcataggctatttatgggttcataactatgcattagtatgtggactgtctatcacagtccacatactgtggaaagtatcacaaagtgatactttctatcactgcttacacacaatatcaattgttgaatttcaaatattttgcccacaacctaccataagacatatatattgcatcccagtgcatatacaatatatacaagaaatatttttacttcwtatgatgagctctgaaatactctgttgtattttaagcttgaacgctgatgctaactgatgttaggtcctgcagtttgaaagatggttgagctggggtgaagtgaaacaggtgaaacctccacttcgatgttcttccctggtattgaacctcaaagagattggtaatactactaacacttgctaagaaatcaagtaggcagaattacaattaaaaagaccctgaaatcaatgctgtccttataaaaggcatcaaagaataggtgggtggatgtccaggattatgtggtcttatacagcttgtgcttatctgtagaatgcacctcaaaacatagatgcttccttccatagtggactctgagattctttttttttttttttttttttttgagatggagtct

SEQ ID NO: 291404 - DNA, 551 bp, Homo sapiens
gcttttctcactccagatgctttctgctttctaagactgctttgccttcccacactgcccactcctcacctcccatatgctttatcccttgattattctgatcacaccttcttctatgctcatcctcacccctaaacagttcagcttctctgaaacaggaaagtcaaccaaatggtaagggccagaaacactggcagaagaactaagaagtttcttctgtgtcatctagagtagcatgtttaaattctctctgcataaccattggacctgatttaaacaattarctaattggtcccatttaaaggagctattttttgcagagtgaaaattttagaactacaagaattagcatttaaagtttttatcaggaaattgacatcagcaaaggatgacaataatactggtagtttgaatgataaggtcccctaaagtagaatgttaattgaatttcctaaaacctgtgtgaaagttggaagatttctgattattgtgttgagcaacttcactaaacaagagcagccctgagagatatgaaaggatcatttataata

SEQ ID NO: 291405 - DNA, 614 bp, Homo sapiens
ttgcacagaattataggtaactgcaattcatagggcttataatgttaatcattctaggaagtaattagctgaatgccttctgtacatttgctaggctaccagctcagcgacatgtattccatctgaaggacactcttcttgaaatcagaatgcgctgaactgagttttagaaattagagaagcagtctcactggcatgggaaagtaatctgccaatttcccaaagggcagatcttccaaaaataaaaatcgtccaattagagattttggctttgacagagctattgaacaggtttgtaaatcacaaacgcctttcaagccttttgtttttacaatgctgaaagagaagatcctggtagggggtcctttaaatgtggtgcatgtagaacccagatctttgtacractggaatatgccttccttctctcctcctcctcctcctcctcctcctttctctgtctctctgtctctctctctctctctctctctttctttctttgaactttgacagatctttcaaaactaaggctacacgctgctgatcatcagctctggcttcagtgatgaacttccaatctttttctaattctaagacccctaccacacacctcaaag

SEQ ID NO: 291406 - DNA, 433 bp, Homo sapiens
ttttctccttttgaaagaatagttctgtggtcattacaggatttagttctctcagtcttcctgtctctttctccttaatgcttctagagttgacattttatcattttcacttatttaatgttcttgtaatastattcttctaaaaactatgatccattgcatattccctgttgaagtctaagctcattaagttcagagattaggtctcctctttctattttatcttcctatacctgacttaatatgaagtatatttaataatgctgcagtgttgtgtgacaatggtagcaacctgtgcagtctcaagggcacagaccagttaaatgaattacttatattcctataataattatgacagaagaaaatagggaaccttgaattctcattatccattaactcttagggtccattaaacctggaattcatatgtgat

SEQ ID NO: 291407 - DNA, 583 bp, Homo sapiens
ctataaatggctttgtgaaaagacagaatgtaaactgtcttgaaggttaggaaggattcgaaacatggaaataggattgaaggcatggagatgggraattactagtgatacagtgatacagaggatactttgtttccatgatgaaacaaagcttgaaccaaagtgaagtgtatccattattaaggtccttgaatatgtttcaaaagtagaaaattaagtctattctctgaaaatcaatgggagtgcttgtttattttcatttaaataattgaattgactgtggagtttgaagttatggagacacaaatttaaatccctgttgaacaacgactaacaggtttacactgtggggtttgttgtgtttaattgatggctgacagcaggcatgcggtttagagagcaaaatatgctcaagtggttccgtatatcctttagtgtgtgtgtttgtataacactatttttaaataaacagtgtgctcctgagagtctatcactgagttaggtttttatatggtctatgtatgagaatttttatatgtggccactacaatagtggccctcccttcaaagcccatgcaacaaa

SEQ ID NO: 291408 - DNA, 583 bp, Homo sapiens
ctataaatggctttgtgaaaagacagaatgtaaactgtcttgaaggttaggaaggattcgaaacatggaaataggattgaaggcatggagatgggaaattactagtgatacagtgatacagaggatactttgtttccatgatgaaacaaagcttgaaccaaagtgaagkgtatccattattaaggtccttgaatatgtttcaaaagtagaaaattaagtctattctctgaaaatcaatgggagtgcttgtttattttcatttaaataattgaattgactgtggagtttgaagttatggagacacaaatttaaatccctgttgaacaacgactaacaggtttacactgtggggtttgttgtgtttaattgatggctgacagcaggcatgcggtttagagagcaaaatatgctcaagtggttccgtatatcctttagtgtgtgtgtttgtataacactatttttaaataaacagtgtgctcctgagagtctatcactgagttaggtttttatatggtctatgtatgagaatttttatatgtggccactacaatagtggccctcccttcaaagcccatgcaacaaa

SEQ ID NO: 291409 - DNA, 583 bp, Homo sapiens
ctataaatggctttgtgaaaagacagaatgtaaactgtcttgaaggttaggaaggattcgaaacatggaaataggattgaaggcatggagatgggaaattactagtgatacagtgatacagaggatactttgtttccatgatgaaacaaagcttgaaccaaagtgaagtgtatccattattaaggtccttgaatatgtttcaaaagtagaaaattaagtctattctctgaaaatcaatgggagtgcttgtttattttcatttaaataattgaattgactgtggagtttgaagttatggagacacaaatttaaatccctgttgaacaacgactaacaggtttacactgtggggtttgttgtgtttaattgatggctgacagcaggcatgcggtttagagagcaaaatatgctcmagtggttccgtatatcctttagtgtgtgtgtttgtataacactatttttaaataaacagtgtgctcctgagagtctatcactgagttaggtttttatatggtctatgtatgagaatttttatatgtggccactacaatagtggccctcccttcaaagcccatgcaacaaa

SEQ ID NO: 291410 - DNA, 1000 bp, Homo sapiens
caaaactgatagagtgccttccaaatattaactgaaatatgtattagaaaaattaagaagtgacaaaaagaagagtttactgcatcttcacatttcatgtgagacactgagttcgtctccacataaatggaagcaaaataagctgaaacacaaacaaacctgtggtttcaattcggcttgtggaccaccagtttgaaatatctaaattactgccttgacttcatatctttacaaatgtttcatataaaccagaaattacttaaccatagtagtagtcttttcacataattcttttttacagttttcagataactaaagcaacattatatccatgtttaataatttgaaatgctcacttytagtagaatgtagaatagtatatattaaagagtgttaacttgaagatcagagattttatgctagaatatatatwttgccattaaccatatatccttgcaatagcagttatgtctgaaagaagtaatgtgcagtagaatatgcagcataaatgtctatacttctgtattaattattgacccaaggttaaatgtatgcacatgaatgctgatgttcttggttgtaatgggttgaatttaattacttatttattcctttgttgttatcagtacccactagtgaatacctaccttaagtaaatctactgcttgttcatcaatacatgggaaaacaccagcattatggcacagatgtttatgtattatgcagagttattwtatcgacttacaaaaggcaatgctaatggccatgccattcgatgttctataaatagtcatttttgaatgtgaaaatgtgaagatgagagacaaagagagcatatactaggcatcaagcactgtattagaaaagtgaatgttttctgttctgctctgtggagtaggtaaagcagaaacagttgagtgagtagatatcacaggaagtaagatttctacatataacaaagaactttttcacacagttagagctgcctttgggaattctg

SEQ ID NO: 291411 - DNA, 602 bp, Homo sapiens
gagtaggtaaagcagaaacagttgagtgagtagatatcmcaggaagtaagatttctacatataacaaagaactttttcacacagttagagctgcctttgggaattctgaatttgccaacattggacgcatttacaaagaagctacatttgtttttcaggtatgttttaaagcagtagttttcagattatttgcaaaatgaaacaattctttcaaatggaatattacacaaaaatccaatctctaatactgagagaaacaatagaacataaatataaatttgtcttataattaatattaacaataatttacttactcgtaattcaattattggtttgacgagagtcctgatgttggtctccagtatgttaaaatctgggatttaacatttttcagtgtgtgtagtgtttgtcttattacatatatatatattttttaattgtgaaattctaatcaagcatttgagtcacctatgaagtcctggaatattgttctaatatcagcgttgcagaaagaagtcctgccctgtattgagtggaagaggtaacagggagatctagatttggctcatcactgccaactttctctaacattctcgtcccaa

SEQ ID NO: 291412 - DNA, 565 bp, Homo sapiens
catttgtggtgctttttatttttaacttgtgggagagttaattcatgattcagaaccatcatatatgtaccctttcacatcagaaatgtaggggacscttggggataaaatgaaacaaatgagaacttggaatgatatataccagtggtccttaaactgtggttcccagatcagcagcatccacatcacaggtagcttgttagaagtacctgttcttgggccccatcccagatctgctaaacagatactcctaagggtatgaccccgcaatctgtgatgtgacaagtctaatgattttgatgcaggtgacagtttgacaaacattgctatagaattcttaagcttcaaggagtatttagaaacttatattattccatagaaaaataaaaactatagaaggatataaattctcagagatagtatacctaattggtttgtgaagattagttgaataagcagtcttttgtattttttctcacagaacgaacctttagatctcaatatactctttgttaagccagaactttatattttcagaacagttttgctctgtgcttgaactatg

SEQ ID NO: 291413 - DNA, 595 bp, Homo sapiens
ttcaattcaaggaaactgaggaagcacagtacctgtagactttcaggaagccctttgagcagtcttctgtgtgctactaaaggatataggttgggagtttatgactgttatgcatttgtggtgctttttatttttaacttgtgggagagttaattcatgattcagaaccatcatatatgtaccctttcacatcagaaatgtaggggacgcttggggataaaatgaaacaaatgagaacttggaatgatatataccagtggtccttaaactgtggttcccagatcagcagcatccacatcacaggtagcttgttagaagtacctgttcttgggccccatcccagatctgctaaacagatastcctaagggtatgaccccgcaatctgtgatgtgacaagtctaatgattttgatgcaggtgacagtttgacaaacattgctatagaattcttaagcttcaaggagtatttagaaacttatattattccatagaaaaataaaaactatagaaggatataaattctcagagatagtatacctaattggtttgtgaagattagttgaataagcagtcttttgtattttttctcacagaa

SEQ ID NO: 291414 - DNA, 520 bp, Homo sapiens
aaccaacaatttagtttgagtacccagttgcctaaatgcacaagactgtgcaagtcttcattgactctataataaacaatgctttttctttcttaattattattatttttggaatcaagacttaccattcacttacctttgcttgtatatgcttctttcccctttatatttaccccaactgaaagaacaacatgaatgcaattgtctcttctatttgttatgttgtgtgtagrtttgttgctatagtgagagaaaagatttaaattgaataacattaatttaggaaagttttacagacagtacagaacagtgttagatccaggttttgtgagatctgaagattatataaatggagaaagagggagtcaatttttaattaaaagaagacaaaaaattatattttatgcacaatacaaaattttatattaagtgaatatttagaagaaaggaattataagaaatcaaacaaaaataaaagatcacagaatttggaggaatagcttttatttattaactgcct

SEQ ID NO: 291415 - DNA, 544 bp, Homo sapiens
aagatatcaggggttgttaagagcttaatgctatactgagattaaagaagttcctctgggtatgcagagagagacggttcacatgagaagcttttggattatctggtggtccagaatcaacaaaacttaaaaactaaattttttgaaggggaataaataattagcaatatcccttagaagaactctccttgttatttttagttttaaataacaatataagtgaaaatcttttgccaacaataaaattctatgcagatattaatgatcactattcctcttgatgccatgtttggttaggtttttagttagagattgaagttgtagaagaggacagagagcctatgtcatggagtaaaaattggaagaaagaaaaagctgtatgctctggaacagtgtttcccaaatgtttagatgtaaatgaccaagataagtcaatttcaaaatctggaaactggcatagtgccacctattcttcaaaattttgttaagcaaattaaaaggctacaatgtagrttattaaccccatttcataggaagaacataa

SEQ ID NO: 291416 - DNA, 1188 bp, Homo sapiens
  misc_feature (1)...(1188): n = A,T,C or G
gacaagtgatttaaattgcttgcactgcaactttcttatctttgacatatgagatgtgcaattttgggcaagtcactatcctctctgggccttcgttttttgtcatctgtaaaatagggatataatattacttattatataatattttattatttagggatattatttacccctaataaagtagagacataatattacttattataggattgttggaagttatgagagttaatgtctctaaactgcatagagcaatgccaggcacatatacactataagcatgttacccgctattaccatctgtaaaatgaggtagttctctggatcagttctgaaacttcttctagcttttatatctttatttaattgaaggattaaaaagacaaactcatagtttcatatttttggtgggaaatcacatcaatttgttagcttggcccaaatatgattgttatggttcaygttgttgcttgcagggtccaccaggtgtcacagacctgtcctgcacagaggaggcaccttccncttgctctctgaccacanaatgctccttttttcaggttcatgggaagatttttaggcaaaaattccgtggwttgattatcaggtctcaagatattatatggccataaaattacagtctaaattatttgtgtattaactcacttattgattccgcagcacttgttctactatactgtaataawgataaagtaagatatgggtattgttgattgtctgtgccacacactgtactaagcagttctggagttttcagttattaaacatttacaataaaactgttaattattttgtgccattgtcatatgacagaggataaaactaaggcttagagaggttaaacaatgcttttagggacacgtacttaggaaatgatgacaagaaggtacaaacaagatgcgtagaagaggaagatatctgaagtctgtagaaaagccttattcagccatgtattagtcagttctcaagctgctaataaagacacacccgaagcttggtgttttattttattttattttattttatttttttatttattttattttattttattttatttgagatgtagtttcacttttgtcgcccaggctagaatgtaatggtgcaatcttggctcactgcaatgtccacctcccgggttcaagtgattctcatgaggctgggtaa

SEQ ID NO: 291417 - DNA, 1185 bp, Homo sapiens
ttgattatcaggtctcaagatattatatggccataaaattacagtctaaattatttgtgtattaactcacttattgattccgcagcacttgttctactatactgtaataatgataaagtaagatatgggtattgttgattgtctgtgccacacactgtactaagcagttctggagttttcagttattaaacatttacaataaaactrttaattattttgtgccattgtcatatgacagaggataaaactaaggcttagagaggttaaacaatgcttttagggacacgtacttaggaaatgatgacaagaaggtacaaacaagatgcgtagaagaggaagatatctgaagtctgtagaaaagccttattcagccatgtattagtcagttctcaagctgctaataaagacacacccgaagcttggtgttttattttattttattttattttatttttttatttattttattttattttattttatttgagatgtagtttcacttttgtcgcccaggctagaatgtaatggtgcaatcttggctcactgcaatgtccacctcccgggttcaagtgattctcatgaggctgggtaawttgattatcaggtctcaagatattatatggccataaaattacagtctaaattatttgtgtattaactcacttattgattccgcagcacttgttctactatactgtaataatgataaagtaagatatgggtattgttgattgtctgtgccacacactgtactaagcagttctggagttttcagttattaaacatttacaataaaactgttaattattttgtgccattgtcatatgacagaggataaaactaaggcttagagaggttaaacaatgcttttagggacacgtacttaggaaatgatgacaagaaggtacaaacaagatgcgtagaagaggaagatatctgaagtctgtagaaaagccttattcagccatgtattagtcagttctcawgctgctaataaagacacacccgaagcttggtgttttattttattttattttattttatttttttatttattttattttattttattttatttgagatgtagtttcacttttgtcgcccaggctagaatgtaatggtgcaatcttggctcactgcaatgtccacctcccgggttcaagtgattctcatgaggctgggtaa

SEQ ID NO: 291418 - DNA, 607 bp, Homo sapiens
gtcattttgctttctcaacactcaattaaacttattcataaacaaatttggaacatgtccaaggtaactatataaattatctacgaaatcaagaaactttgggggactaaaggagtgtacagagagctattaataatgaaaatgaagtaaatagcataaacaagactatgtccagcatctgagatgaatggtcatgtaatattttccatcttctcaagagcccgaaatctgtcccttactacgactcctgactggtcatcagatctaatgggatcctcccaactctatctaacatgagctatcagaatgggtctactgaacctcaagtttggctggattatgcttttggctagaacaaaatcttatgatgccaccgcctgtcccacataagctttttttccacctgtgctttcatacctgtgggactcccctttstgctagaatgtccttctcttccttctcataaattcattatttggttaattttagtcgtattttaaaacttagtccaagaattaattcctttaaaaagccttccattactgttgttcttctccagatagaacatctccagggggggctaactgccccttctttgtgttatcac

SEQ ID NO: 291419 - DNA, 518 bp, Homo sapiens
ctgctatgtattggtaaggcaaagactatgttatgattacggttttcctccaccaacccctggaaaacccaccatagcccagcagcccctggaaaatctctcttgactctgtctgtctccctctttttctctctcactttattcaatgttagcaaggttattattttataatatctccatttcttattttacttaaagctaaataaatttttctctacacktgtagtcccacatttctcaatcatcagcacactatgtaccgcatttacttaatttaagattttataataatcctggggctcagaaaagacaggtaaattggttaactttcaaaaccaagtttttctaattccaaaggccatggtcttccccactgtctccttccacatttatttacatgtaatttaaactatttcatgtgagccaccagaaaacatttggccccagtgaaataactgttgaggtctcacagtggcaaaagcagactggctaaagacctgcccatagctttgctctat

SEQ ID NO: 291420 - DNA, 301 bp, Homo sapiens
tagtaaaacacttgatattattacacaacacatttaaaatagctatttatagaaaaagatctataggtcagctcactactktaattccaatgagcagcttcagtccatggaacttcagtattatggataatgatatagccagcaaatatctaagtgttatagacatagatcgtattatagataatttgtctttttatgtttttcttttttggttcgccaatatcgacatgagtgacatgagtcagtagggtataaaaaattctcaaaaaattacttttcctgtcctgacatatagaatgtt

SEQ ID NO: 291421 - DNA, 873 bp, Homo sapiens
ccaaatctgctggcacctgggtcttggagttttcagcctccagaactttaagacacacatttcagttatttaagccacccagcctatgatcttcttgttacagcagcctgaactaagacattaatctggactgttaccatttatttgtttttatagctcttttaaattgcatgaagkaatgcatgctatgtagggataatcaaatatgtttttataatacatttaatagatgtctattcagcaatttcttttggagatggattggagcttggattttgcctccaccaattactaactwtcaatattaaagaattatctgttatgtatttttttatatttatcaacttaattatttaagtttcaaagtgcatgaagattttatggagacatcatatggctaaccttcatgtttcccccacattttctaagtaaatgtgtcctttctcataaatgtttccttccaacacagcttaaaatagacwtggcttccttaagggtataaaccataaattgcataggacttgatcacaggtcaacataaatgcttcatgagaaatgttaggttagtgtaataattataaaagtgtttagtttggcattagaaatactaatttccagatcacgagagtcaaaatactgcctgcttggaaaagtattgacagtttcctggattcaataaactgcaaaactaaagattgttatgtcttattttataaaaaacaaaataaataatattgttctccaaacacgtaatggtagaatcttttaatacaaaggtctaatggtacatccaggcctaattttctcactaccagccttctaacatttgcattcactttaaccagtctgagagctatcagctgaattttaaaa

SEQ ID NO: 291422 - DNA, 1085 bp, Homo sapiens
ataagaaaagaagagagacctcaaaatttccatcttaactagctagaaaaaaaggagcaaaataaacacaaagcaagttgaagcaagaaaataagaatatgaaaagccaaaatcaatggaattgaaaaatcaaaagcaattgagaatatcagtaacaacaaaaactgatttttaaaaaatcaacaaaattggtaaacctttaggagacacagattaccaatgaaaagaatcaaagagaacatattattatagaccctacagacattaaatggataataaagcaatatatgaacaactctrtgaacataaatccaacattttagttgaaaaggaccaattcctctaaatctgcaaattgcaaaaatgactgatgatgaaatggataacatttatcatccgatttaaaagaaattgattttgaaaaaaaaggaaattttgaaaaagaaatctcaatttccatatagtttawatgctaaaaattactaatgagatgcctacaataaactctgatggaggwttcctgtcaaaaaacaaaccacagctctcaaacatggcagagacctgggctacacaagaactctttaagtggatctaatacttgaatcacactaagaacggtgcttcacatccaaattgaaaccagaacaactgaagagccagatgtccagctctggcaagatttaatataagtcacgtccacctggtcttctggtctaccagatgagttgtgacgaccattttcgcaaacgtccatgaaacacagatctttagatgttatttctttcttttcttcaattaagcacccatgcaggggccaaatactgtggctacctaataaaacatttatatttcaagcaggagaaactcatgcatttgccaaaaataattatagattataccacaagtaatttcattccttatctaaaagttgccccaaatgagatggctggagggatttacacaacataatattcaggttgtggtacaatgtatttttcataagcacctgaaattggagcacaatttattctacttccaacaaaaaagattgccctaattcttaaataaaatgattcatacacaaa

SEQ ID NO: 291423 - DNA, 616 bp, Homo sapiens
atgctaaaaattactaatgagatgcctacaataaactctgatggaggattcctgtcaaaaaacaaaccacagctctcaaacatggcagagacctgggctacacaagaactctttaagtggatctartacttgaatcacactaagaacggtgcttcacatccaaattgaaaccagaacaactgaagagccagatgtccagctctggcaagatttaatataagtcacgtccacctggtcttctggtctaccagatgagttgtgacgaccattttcgcaaacgtccatgaaacacagatctttagatgttatttctttcttttcttcaattaagcacccatgcaggggccaaatactgtggctacctaataaaacatttatatttcaagcaggagaaactcatgcatttgccaaaaataattatagattataccacaagtaatttcattccttatctaaaagttgccccaaatgagatggctggagggatttacacaacataatattcaggttgtggtacaatgtatttttcataagcacctgaaattggagcacaatttattctacttccaacaaaaaagattgccctaattcttaaataaaatgattcatacacaaa

SEQ ID NO: 291424 - DNA, 616 bp, Homo sapiens
atgctaaaaattactaatgagatgcctacaataaactctgatggaggattcctgtcaaaaaacaaaccacagctctcaaacatggcagagacctgggctacacaagaactctttaagtggatctaatacttgaatcacactaagaacggtgcttcacatccaaattgaaaccagaacaactgaagagccagatgtccagctctggcaagatttaatataagtcacgtccacctggtcttctggtctaccagatgagttgtgacgrccattttcgcaaacgtccatgaaacacagatctttagatgttatttctttcttttcttcaattaagcacccatgcaggggccaaatactgtggctacctaataaaacatttatatttcaagcaggagaaactcatgcatttgccaaaaataattatagattataccacaagtaatttcattccttatctaaaagttgccccaaatgagatggctggagggatttacacaacataatattcaggttgtggtacaatgtatttttcataagcacctgaaattggagcacaatttattctacttccaacaaaaaagattgccctaattcttaaataaaatgattcatacacaaa

SEQ ID NO: 291425 - DNA, 577 bp, Homo sapiens
ttattaatattttcattacgttttccaatacatcaagagttcttttcactgaaaaacttacatgttaattctgctaatattaatttatattagtgctatgttatgrtatttcatcaagtagaaaatgatttttaaataatcgtcatcatcattaaatacagtattaaatgcagtaaatgtgttgtgtagatttaaatgtttgtggaattcttaacctaactttattgtataaaattcagtagaaaagcatgtgaatttaggcctttaattgaaaatattatggcaaaagattccctatttccaaactgtcagctacaaaaactgataatactgccagagttttccccaaggttgaagaaccagcagtaattaaagaccatttatccagtcaaaaaacagagacacaaaatacagtatgatatcagcttggctgccacagcctcaagggcaggaaatccatcacagtgacaacagttcataaccagaaactgggcagaatgactttaaatgagtagaagcaaagacagaattttgtatggaagccagctagatattactgtcagaaaggtgccaccag

SEQ ID NO: 291426 - DNA, 601 bp, Homo sapiens
tattgttaatgatactgcaacttgaagcgacccagagaaagcatttgctattattattttttattgttagcataaagataaacccagctaagatggcatctcaattttttcttccacctagattaactacatcttttctgaaatacactgctctggtatcatagatattagaaaaagtcaatagtaattaartgcattaacgagttttacattggagcatctggtggctgacacagcttataaatctgaaaacccgaaagtacctgatccctcaactagaatgctattgaatttttaaaaagaattttgttttaaatttagcatcatcaaattcgagaatgagacaatcatttagtaaggattggaaaacatttttgtagagggtcagttagcataaatgttaggcattgtaataaggtccctgctgcaactactcaactctgtggctatgacacacaagcttccatgtacaacatgtacatgaatgggcatgatggtgttccaacacaattttatgtgtgaaaactgaaatttaaatattatataatttccacttgtcaggaaatattctttaaaacattcccctcccccaaccatttaa

SEQ ID NO: 291427 - DNA, 592 bp, Homo sapiens
tcttgatgttgctttgctaacttttccatttgtttggaatttttttctttgttcttttttgctttctatcagaattaacttccgaaagctttctgcttttctctcattttgaatagcttttgttaaaatctatatgggaatccacatctccccatagaccaggtgcactggaagatttgaggggttgggaggagagtgtggatgcagaccagtgtgagyctagaataagcctgtggcaacctgggaaaaacagggtgggaactcaaaagaattagagagatatcctcacattagatttcagtggaaagagaggggggaaagtcatgtatactggagcattcctatgtgagttcaaacaaattgcatgtaaatttggggctcactaataagggctgtgtgaccttgaacctgactttcttcaactagtaaaacttaaagacaaaaatacccaactctttcaggcaaggaggagctgaaataccagtaaatgcactaaagggtaactttgagaggtttgactttgtccaacactcagaatcaccactcacctccttaaccacaaatcactagaaacaggcatgcaatcaaagac

SEQ ID NO: 291428 - DNA, 1169 bp, Homo sapiens
aatctagtaatttgcccataagagataatcaaacaaaaaaacaaaggtgtatgtgcaaagatttgaatcttagctttatttgaaataacagaaaattggaagtcaattcatgtccatcagcgtggggctggccacctgccaattcatgtccatttccctggagggaaatgacccaaccatggagagaacgatgttcactgattgcattggcgtggcaagaactccatggcatgttgcatcatgaagaaagctgccccgcaaaatgagatgcgattgacgttgatgtgtctgtacttgtgcmaagagagatttgggaaacgaagtttactgaagtgttaacaatgggttacaagttttgaagtgattttaatttctttttttttaagtttctgttaggctgggattttccccatagatatgcatcatctatgtcagcaatccccaaccttttgggcaccaggacaggtttcgtgaaagacaatttttccacggaccacgagtgggagggacggtttcaggatgattcaagcacattacgtttatcattagattctcacaaggagcatgcaagctagatcccttgcwaatctagtaatttgcccataagagataatcaaacaaaaaaacaaaggtgtatgtgcaaagatttgaatcttagctttatttgaaataacagaaaattggaagtcaattcatgtccatcagcgtggggctggccacctgccaattcatgtccatttccctggagggaaatgacccaaccatggagagaacgatgttcactgattgcattggcgtggcaagaactccatggcatgttgcatcatgaagaaagctgccccgcaaaatgagatgcgattgacgttgatgtgtctgtacttgtgcaaagagagatttgggaaacgaagtttactgaagtgttaacaatgggttacaagttttgaagtgattttaatttcttttwttttaagtttctgttaggctgggattttccccatagatatgcatcatctatgtcagcaatccccaaccttttgggcaccaggacaggtttcgtgaaagacaatttttccacggaccacgagtgggagggacggtttcaggatgattcaagcacattacgtttatcattagattctcacaaggagcatgcaagctagatcccttgc

SEQ ID NO: 291429 - DNA, 586 bp, Homo sapiens
aaggctgagaacgggaaacttgtcatcaatggaaatcccatcaccatcttccaggagcgagatccctccaaaatcaaatggggcactgctggtgctgagtacatcgtggagcccaccggcacctttaccaccatggagaagactggggctcacttgcagggaggagccaaaagggtcatcatctctgccccctctgctgatgcctccgtgttcataatgggtgtgaacaatgagaagtatgacaacagcctcaagatcatcagcaatgcctcctgtaccaccaactgcttagcgccccgggccaaggtcctccatgacaactttggtatcgtgaaaggactcatgaccacagtccatgccatcaccgccacccagaagactgtggatggcccctccaggaaactgtggcatgacggtggtgggactctccagaacatcatccctgcctctactggcactgccaaggctgtgggcaaggtcatccctgagctgaacgggaarctcactggcatggccttctgtgtccccactgccaatgtgtcagtcgtggacctgatctaccatctggaaaaacctaccaaatatc

SEQ ID NO: 291430 - DNA, 604 bp, Homo sapiens
gctgctacatcaatatcttctgaaggggagctctagacttatagaagtgggagatcaggatggcagatattaatgatctgccaattaatattaattatgcctctctagtgagcaaattctgagaaaggtgttttcctcattggcaaaatggtttaggaagcccttgacaaggttgtaataggagttaaaaatatgtgtgaacatatgtacttgaatatgtatagtatgtatgtgaatcgtgggtatatatatataaatatgtcaatgtatattgtgcatgtatacatatataaatgagtttatgtatatatgtatataataaatactttttaataaatttttaataaaactttttaagaaatttttaataaaagctttattgtggtgtaagtaacagmacaaagtgaatatatttaaattgcacaattttagtttgatgtatgcgtactcctgtgaagttgtcatcacaaatccagaaaatgaacacacccatcacacctagcatttcctcttacccctcaatgcatctctccctcccaacctctcatcctgcaagtgactgcagacgtgggttcttaactgaatattagtttgtattttacat

SEQ ID NO: 291431 - DNA, 569 bp, Homo sapiens
gactttattcaaatttttatagcccaacaaaatatcttaaagatcattttatattaacacacaaagatctaccaaatctttactgtgtayatatatgaattttactagtagaatattttcctagaattggaaattctgggccaaagggtatatgcatattacatttaatacaaactacaaaactgaccctgaaagaggttgtaccaatttgcacaacccatttcagcatgcagaataccttcttacctacactctcgtcagcactaccactagacattaccattccgataggtgaaaaataactgctttattgagataatattcgcatacaatacattaaccctctttacatgttcaattcaatggtttttagtatattcaaggttgtgcaaccagcactgctatctaatgctacgatattttcatcacttcatacacactagcaatcactccccattccatcttcccttatcccctggaaaccacgaatctgtcttctatgtttatagagttgtctattctggacattttaaataagtggaatcttacagtatgtggtactttgtcat

SEQ ID NO: 291432 - DNA, 569 bp, Homo sapiens
gactttattcaaatttttatagcccaacaaaatatcttaaagatcattttatattaacacacaaagatctaccaaatctttactgtgtatatatatgaattttactagtagaatattttcctagaattggaaattctgggccaaagggtatatgcatattacatttaatamaaactacaaaactgaccctgaaagaggttgtaccaatttgcacaacccatttcagcatgcagaataccttcttacctacactctcgtcagcactaccactagacattaccattccgataggtgaaaaataactgctttattgagataatattcgcatacaatacattaaccctctttacatgttcaattcaatggtttttagtatattcaaggttgtgcaaccagcactgctatctaatgctacgatattttcatcacttcatacacactagcaatcactccccattccatcttcccttatcccctggaaaccacgaatctgtcttctatgtttatagagttgtctattctggacattttaaataagtggaatcttacagtatgtggtactttgtcat

SEQ ID NO: 291433 - DNA, 543 bp, Homo sapiens
tttacaaaaatagcacagagttcccatatatccttcaccagcttaccttcatgttaacaactcatacaatcatgcgatagcaatcaaaatctggaaattaacattggaaaaatattatagaccttattcaaaaattagaataagatctattgtatagactttattcaaatttttatagcccaacaaaatatcttaaagatcattttatattaacacacaaagatctaccaaatctttactgtgtatatatatgaattttactagtagaatattttcctagaattggaaattctgggccaaagggtatatgcatattacatttaatacaaactacaaaactgaccctgaaagaggttgtaccaatttgcacaacccatttcagcatgcagaatacyttcttacctacactctcgtcagcactaccactagacattaccattccgataggtgaaaaataactgctttattgagataatattcgcatacaatacattaaccctctttacatgttcaattcaatggtttttagtatattcaaggttg

SEQ ID NO: 291434 - DNA, 609 bp, Homo sapiens
ataattattgggcactttctgtgggccaggccatgttctaggcactggagcaaactcagtgccacaaaagaaaacaaatagaactctttgcactcatgagactgatagcctagtagaagagacagaaaataagaaaatagacataaataagtaaattgtttagtctaagatgggaacagtgytttaaaaaaagcagtgtgagagtatttggaagaggtgatggggggctgggagacaggtggcaattttaacagaatggtatacagtattggtcttcttgggagatagttatttgggcaatgacttgaagaaggtgaaggactgagctgagcagacattcgaaggaagtgctctccagcaggggagcagctgctgcaaatgccccagggctgaaccacactcgggggattcaacaatgaagggcagtgttgctgtagcagggagctagggcagaaaagcagaagacgggataagggagagcgctgagaaaacccatcagaacctgaggccattgtaaagccttatcctttactcggaataaaatggagaatgattagagagttttaagcaaagaagccagagtgggatgatccgatttacagggcagca

SEQ ID NO: 291435 - DNA, 641 bp, Homo sapiens
gctgctgtaccaatcactacaaacttggcgcttttaaacattagcaaatagcttcatcagctgtcacaagtatgccacccttgtgggggatgttgataagggaggaggctatacatgtgtggggcagggaatatatgggaactctctgtatcctcatttcaatttttctgtgaacctaaaactgccctmaaaaatgaagtattaaaaaaatcaattggccaagagatggtcaacaggttagtgactgctggggttagggatggtggggggtgtgggagggtaggaagaagcggatggatgtgaccatgagggcagcataaggagatctttgtggtgattcatggaataattttttttaaatcttctttatttttatttttattttttgagacagggtcttgctcttttactcaggctagagtgtggtagtaggaacatcgctcaatgtagccttggattcctggatttgagccatcctcctgcttcagtctccaggatagctgggacttacaggcatgtgccaccatgcccagctacttttaaatttttatttatttatttatttttgtagagataagagtcttgctatgttgcctagactggcctcatagttccgtatcttggatgtggtggtggtggtt

SEQ ID NO: 291436 - DNA, 571 bp, Homo sapiens
ctgcgcatattacccaattccaaagttgtttccacattcacaggtatctttatagcaacccctcactccgtggtcccaattttstgtgttcgcccattctcacagtgatataaaagagcacctagaagctgggtaatttatagagaaaagtttaattggctcatggttctgtagtctatacaggaggcatggtgattgcatctgcttggcttctggagaagcctcaagaagcttctaatcatgtggaaggtaaagtgtgagcacaagtctcacatggcaagagtaggagcaaaagagagggtgagggggaggtaccatatgcttctaaacaatcagatctcacaggaactcactcacacttgggaggatagtaccaagcccttcatgaggaatccactcccatgacccaaacatctgccaccaggacctacctccaatactgaggattacatctcaacatgagatttagaggggacatccaaactctatcacccacaaatggtccaacttcaaggtcttgcactatttgagataatgtgtgcactgctcacgatcacaaaggcttctaaaa

SEQ ID NO: 291437 - DNA, 571 bp, Homo sapiens
ctgcgcatattacccaattccaaagttgtttccacattcacaggtatctttatagcaacccctcactccgtggtcccaattttgtgtgttcgcccattctcacagtgatataaaagagcacctagaagctgggtaatttatagagaaaagtttaattggctcatggttctgtagtctatacaggaggcatggtgattgcatctgcttggcttctggagaagcctcaagaagcttctaatcatgtggaaggtaaagtgtgagcacaagtctcacatggcaagagtaggagcaaaagagagggtgagggggaggtaccatatgcttctaaacaatcagatctcacaggaactcactcacacttgggaggatagtaccaagcccttcatgaggaatccactcccatgacccaaacatctgccaccaggacctacctccaatactgaggattacatctcaacatgagatttagaggggacatccaaactmtatcacccacaaatggtccaacttcaaggtcttgcactatttgagataatgtgtgcactgctcacgatcacaaaggcttctaaaa

SEQ ID NO: 291438 - DNA, 540 bp, Homo sapiens
atcaaaatggaaattaaaaaaattctttttaaaaattcttctaaactgaatgataatagccacatagcctatcagaacctctgggatacagcaaaagtggtgctaagaggaaagttcgtagcattaaatgcctacatcaaaaagtctaaaagagctcaaatagataacctaaggtcacacctcatggaactggagaaacagaatacattcaaatccaaacctagcagaagaaaagatataacaaagatcagagcagaactaaattaaattgaaacaagaaaaacacattacaaaagataaatgaaacaaaaaactggttatttgaaagataaatgaaattgatagaccatttgcgagattacccaggaagagcraagattcaaataagctcaattagaaatgaaacgggagatgttacaactgataacacagaaatacaaaagattatttaagtgctactatgaacacctttatgtgtataagctagaaaacttagaggagatggataaattcctggaaatatacaaccctcctagatta

SEQ ID NO: 291439 - DNA, 656 bp, Homo sapiens
ccattcacattcaatgttagtattgagatgtgaggtaccattccattcatcctgctatttgttgcctgtayacctcagttttttgtttttgctttttaaattgtatttttattttataggtcctgtgagatttatgttttaagtagattctgttttgatgatgtttccaatatttatttcaagatttagtgttccttttagcagttcttgtagtggtggctcggtagtggtgaattctctcagcatttgtttgtctgaaaaagactctatctttccttcatatacaaagcttagtttcactggatacaaaattcttggctgacaattgttttgtttgaggaggctgaagatagggcctcagtctcttccagcttgtagggtttctgctgagaaatatgctgttaatgtgataggttttcctttacagattacctgatgcttttgtcttacagctcttcaaattctttcctttgtcttaactttagagaaactgatgacaatgtgcctaggtgatgatctttttttgcgatgaatattccaggtgttttttgtgcttcttgtgtttggatgtctaggtctctagcaaggctggggaatttttcctcgattactcccccaaatacgttttccaaacttttataaatctttccttcctc

SEQ ID NO: 291440 - DNA, 1099 bp, Homo sapiens
tatagtcaatcacaccataaaaccatcttgcccaccgcctttaagtaaacaggatcatggttttccatccyacctccctcctttggctgagtttccaccccactcatcacgggactctccccaggagctctttcactgccagactccctccacttgcagtagtgcacacggtctgcagcaggggatgcagaaaacagggcggtgtgttcttgtgtgctttccaatgcgtttgtatatttattgcactcttctttagtagtgtatcagatgctaacaacatctgtttcttgaatgctgaaatatttccatggatgtagtcactttgagggtacaaatctccactgtatatgtgcgtatctacatcatcatccttatttgtcacagtatttataccctcaatcacatagtttatctctgtctcccacagtttgagaggagtgccaaaggcgtcaccacactccagattgtgtcctcttgttctgtcttcgtgagagagccctctcaatgcatatacaacttcttttccatcacaggagactcttcttaagawtatagtcaatcacaccataaaaccatcttgcccaccgcctttaagtaaacaggatcatggttttccatcccacctccctcctttggctgagtttccaccccactcatcacgggactctccccaggagctctttcactgccagactccctccacttgcagtagtgcacacggtctgcagcaggggatgcagaaaacagggcggtgtgttcttgtgtgctttccaatgcgtttgtatatttattgcactcttctttagtagtgtatcagatgctaacaacatctgtttcttgaatgctgaaatatttccatggatgtagtcactttgagggtacaaatctccactgtatatgtgcgtatctacatcatcatccttatttgtcacagtatttataccctcaatcacatagtttatctctgtctcccacagtttgagaggagtgccaaaggcgtcaccacactccagattgtgtcctcttgttctgtcttcgtgagwgagccctctcaatgcatatacaacttcttttccatcacaggagactcttcttaaga

SEQ ID NO: 291441 - DNA, 1196 bp, Homo sapiens
agtacaaaatgcaattttcagatcagtaaggtaatttgtgtttccacagtgcaagtgttacaattattttttaagctcacactgtagtgcttttattcatttactcaaacttgttttgagcccctaatatgtgtcagccmccaaggattacattattagcaaaaactaaataaaaataaaaatagctgggcatggtggctcatgcctgtaatcttagcactatgggaggccaagacaggtggatcatttgatgaaacactgtctctacagaaaatacaaaaatcagccaggcatggtgaccctcacctgtagtcccagctcctcaggaggctgaggtggatggatcacctgaacccgggaggtggaggttgcagtgagccaagattgtgccactgcactgcagcctggctgatagagtgagactctgtctcaaaaaaaaaaaaaaaaggaaatgttgcatgtgttcacgaagctcacaatcaaatgggtgaggccaattgttagtcaaataatctcttaaagaaatctcaccttgtaactgtgacgagaacagagcagtggcccaggtcagtggtgacttwcttgttgggttctgcttaaatacagaaacagcttccgggaaagaatgcttccttatttaataagtgagggaggtctgctaaaattatgtcattagctaacaaaccagttggtatcattcttgttttcacaatgcaggtcagtgtttgcaggttttaaaaatgtcttcaccagcatwtcttaatgtttttgacctatggaccagaagtcaggcagtggggcagccaccaggaccacactgtctggaccccagacattctgttctgctggctgctcaccccacaagtcctgagacgcccctttggatccagcgggagctctgattgtctggtcgcagccttatttcccagcggctctagagacccaggttgcttcctccactgactttgccacaattgtgccttgacatatgtctgctcctgtgccgcccactccacactaacgctttctctgtgctctgcctcatgagccccaccacttgccctctccctgcattatgtctgctcctgcccaccgcctttgtacctctgctatttatattcccaggggaagatttcagtgggggccactttgggtaatttggccccaatcccctgtgtagtcgtctgcctttggtt

SEQ ID NO: 291442 - DNA, 595 bp, Homo sapiens
ataaaacaaacaacaccattaaaaactgggcaaaggacatgaacacacacttcccaaaagaagatgtttatgaggccaacaaacatataaaaaaaagttcaacaacactgatcattagagaaatggaaatccaaaccacaatgcgatacmgtctcacaccaatcagaatggtgattattaaaaagtcaagaaacaacagatgctgtttgaggctgtggagaaataggaacaattttacactgttggcaggaatataaattatttcaaccattgtggaagatggtgtggcgattccagcatcaggttgtactgacactggagataaaagtctattccttttactatattaaaatccttaattatttgaagacagcattaagctgaacatcaccagtttctttaacctttccctcatcctgtttgctcacacctggacctatgtgagttggccagtgccctcccacagtaagccaacagaccctgccacagttctgggtgagtacattgggattgacatctcccttgcttcttgaacttcttttaatgtggtccaagagcagactcacttgggttgttgctcagtggattacactag

SEQ ID NO: 291443 - DNA, 530 bp, Homo sapiens
aatgaataattccatttcattttttttaagtgatttacaagaaacttgttgcatagattttttaaaatcaaccaaatgcccttgaagtgtaacagttgtttactagaaagcataattactgaaaatgttgggctacattaatagaggcatatttgtcagattatggaaggcyatgatcccactataagaatgacaactttgaatatttgttatttcttaatttttgcaacaactgtgaaaggcaaataactaaggaggccctgaatcctagttgttagaggaacaggcatccatcagctttgtgaccttgggaaatcctttcaccagctccatagagttgttaatagaagaattcttgagctgatacataaaaagcacttccttcgtgtagggctgagacttaataaacaataaatagcagcaatcatttgattatctgacaagcaagaaacataaattcctttccttatgtgacttgtccaagatcccacaattggaagaagttgagccagggctgaaatgcaggctca

SEQ ID NO: 291444 - DNA, 530 bp, Homo sapiens
aatgaataattccatttcattttttttaagtgatttacaagaaacttgttgcatagattttttaaaatcaaccaaatgcccttgaagtgtaacagttgtttactagaaagcataattactgaaaatgttgggctacattaatagaggcatatttgtcagattatggaaggccatgatcccactataagaatgacaactttgaatatttgttatttcttaatttttgcaacaactgtgaaaggcaaataactaaggaggccctgaatcctagttgttagaggaacaggcatccatcagctttgtgaccttgggaaatcctttcaccagctccatagagttgttaatagaagaattcttgagctgatacataaaaagcacttmcttcgtgtagggctgagacttaataaacaataaatagcagcaatcatttgattatctgacaagcaagaaacataaattcctttccttatgtgacttgtccaagatcccacaattggaagaagttgagccagggctgaaatgcaggctca

SEQ ID NO: 291445 - DNA, 530 bp, Homo sapiens
aatgaataattccatttcattttttttaagtgatttacaagaaacttgttgcatagattttttaaaatcaaccaaatgcccttgaagtgtaacagttgtttactagaaagcataattactgaaaatgttgggctacattaatagaggcatatttgtcagattatggaaggccatgatcccactataagaatgacaactttgaatatttgttatttcttaatttttgcaacaactgtgaaaggcaaataactaaggaggccctgaatcctagttgttagaggaacaggcatccatcagctttgtgaccttgggaaatcctttcaccagctccatagagttgttaatagaagaattcttgagctgatacataaaaagcacttccttcgtgtagggctgagacttaataaacaataaatagcagcaatcatttgattatctgacaarcaagaaacataaattcctttccttatgtgacttgtccaagatcccacaattggaagaagttgagccagggctgaaatgcaggctca

SEQ ID NO: 291446 - DNA, 530 bp, Homo sapiens
aatgaataattccatttcattttttttaagtgatttacaagaaacttgttgcatagattttttaaaatcaaccaaatgcccttgaagtgtaacagttgtttactagaaagcataattactgaaaatgttgggctacattaatagaggcatatttgtcagattatggaaggccatgatcccactataagaatgacaactttgaatatttgttatttcttaatttttgcaacaactgtgaaaggcaaataactaaggaggccctgaatcctagttgttagaggaacaggcatccatcagctttgtgaccttgggaaatcctttcaccagctccatagagttgttaatagaagaattcttgagctgatacataaaaagcacttccttcgtgtagggctgagacttaataaacaataaatagcagcaatcatttgattatctgacaagcaagaaacatarattcctttccttatgtgacttgtccaagatcccacaattggaagaagttgagccagggctgaaatgcaggctca

SEQ ID NO: 291447 - DNA, 625 bp, Homo sapiens
ttattttataatactggaatgaggcaggattttccaacaatgacacaaaacatagaagtcacagatgtaaagattaaatatgaccactttaaatatttatacagtgaaaagcttaagcacacaaaatcaaaagagaaatgaaactgaaaggaaaacataagtatctcatatcccaaaaggttactttctctaatatataaaggctttcaacaaattaaaaaaaaaaaatttctcagcagagaaatgaaaaaaagatacaaaaaacagagggtttacagaaaaggaaatacaaatagctctaaaatgtattcaaaaagatgtccaatgttactcaacaatgtgacaagtacaaatttaaattagagtgaaatatcattttacttatcagattggccaagaccataaagtctgataacacactttgttagtcaaagtctggagaaacaggcactctcagacattgctgatgggaatgtgaactggtacaacctctatgggagtgatttggcaatatcaactataaaacaaatggkgtgtgtgtgtatatatatgtgtatatatatatgtatatatattaggatatatattaggttatatttgtatatatgtatattagtatatatat

SEQ ID NO: 291448 - DNA, 1155 bp, Homo sapiens
cccacatgccttagagactttgacgtttctccatcgttactcctgctgttgctctgggagacttccacgtcccttcaaatgccgacttgtgagcggccttaaagttccttgtstgactcaactgtgataacctttacagcactgtaaaggtctctggctgttcagctctcttatacctccttctcttcactctctcagagactataattttgccttggtgtctgaattttttatttatcctacttccatatttacctggcaaagccctaattccaaattaatcctacagtaatcctctgcacggatacccaggtagtgtctgaattttttatttaacctacttccatatttacctggtaaagccctaattccaaattaatcctacagtaatcctctgcagggatacccaggtagctgaacagtgtggtggaaaactgggtaaaatggtaaatggatcagttcatggtttccagtcttgtctcaatcctgaccagcatcacttaagtctttcactcagtgactctcaatcttggctgcatattagaatcatctgggaacttaaaaaaatcctggagccwcccacatgccttagagactttgacgtttctccatcgttactcctgctgttgctctgggagacttccacgtcccttcaaatgccgacttgtgagcggccttaaagttccttgtctgactcaactgtgataacctttacagcactgtaaaggtctctggctgttcagctctcttatacctccttctcttcactctctcagagactataattttgccttggtgtctgaattttttatttatcctacttccatatttacctggcaaagccctaattccaaattaatcctacagtaatcctctgcacggatacccaggtagtgtctgaattttttatttawcctacttccatatttacctggtaaagccctaattccaaattaatcctacagtaatcctctgcagggatacccaggtagctgaacagtgtggtggaaaactgggtaaaatggtaaatggatcagttcatggtttccagtcttgtctcaatcctgaccagcatcacttaagtctttcactcagtgactctcaatcttggctgcatattagaatcatctgggaacttaaaaaaatcctggagcc

SEQ ID NO: 291449 - DNA, 577 bp, Homo sapiens
cccacatgccttagagactttgacgtttctccatcgttactcctgctgttgctctgggagacttccacgtcccttcaaatgccgacttgtgagcggccttaaagttccttgtctgactcaactgtgataacctttacagcactgtaaaggtctctggctgttcagctctcttatacctccttctcttcactctctcagagactataattttgccttggtgtctgaattttttatttatcctacttccatatttacctggcaaagccctaattccaaattaatcctacagtaatcctctgcacggatacccaggtagtgtctgaattttttatttaacctacttccatatttacctggtaaagccctaattccaaattaatcctacagtaatcctctgcagggatacccaggtagctgaacagtgtggtggaaaactgggtaaaatggtaaatggatcagttcatggtttccagtcttgtctcaatcctgaccagcatyacttaagtctttcactcagtgactctcaatcttggctgcatattagaatcatctgggaacttaaaaaaatcctggagcc

SEQ ID NO: 291450 - DNA, 576 bp, Homo sapiens
aaaaatacattttatgattttaacagacatatttctaagtaaaatatgattcttgtttctccaatatcttgaatatttcttttaaatgacttaaatatggcatttctggaaaaggcagcaagatggaaagtgatctttcactaagaaaggatattataggctaggctyagtggcttacactcataatcctagcactttgggaggccgaggcaggtggtcacctgaggtcaggtgttcgagaccagcctggccaacatggtgaaacccttctctactaaaaatacaaaaataaactgggcatggtggcacacgcctgtaatcccagctacttgggaggctgaggcaggagaatcacttgaacccgggagacggaggttgcagtaagccaagatcatgccactgtactccagcctgggtgacagagccagactccatctcaccaaaaaaaaaaaaaaaaaaaggaggacattatagcttcttccaaaaaggtcatcagcatcaaaacatcttaatgcttatcccatgtgtggtaccagtgcatgggatcccatcagctccaggttttcgctgaagcac

SEQ ID NO: 291451 - DNA, 576 bp, Homo sapiens
aaaaatacattttatgattttaacagacatatttctaagtaaaatatgattcttgtttctccaatatcttgaatatttcttttaaatgacttaaatatggcatttctggaaaaggcagcaagatggaaagtgatctttcactaagaaaggatattataggctaggcttagtggcttacactcataatcctagcactttgggaggccgaggcaggtggtcacctgaggtcaggtgttcgagaccagcctggccaacatggtgaaacccttctctactaaaaatacaaaaataaacygggcatggtggcacacgcctgtaatcccagctacttgggaggctgaggcaggagaatcacttgaacccgggagacggaggttgcagtaagccaagatcatgccactgtactccagcctgggtgacagagccagactccatctcaccaaaaaaaaaaaaaaaaaaaggaggacattatagcttcttccaaaaaggtcatcagcatcaaaacatcttaatgcttatcccatgtgtggtaccagtgcatgggatcccatcagctccaggttttcgctgaagcac

SEQ ID NO: 291452 - DNA, 576 bp, Homo sapiens
aaaaatacattttatgattttaacagacatatttctaagtaaaatatgattcttgtttctccaatatcttgaatatttcttttaaatgacttaaatatggcatttctggaaaaggcagcaagatggaaagtgatctttcactaagaaaggatattataggctaggcttagtggcttacactcataatcctagcactttgggaggccgaggcaggtggtcacctgaggtcaggtgttcgagaccagcctggccaacatggtgaaacccttctctactaaaaatacaaaaataaactgggcatggtggcacacgcctgtaatcccagctacttgggaggctgaggcaggagaatcacttgaacccgggagacggaggttgcagtaagccaagatcaygccactgtactccagcctgggtgacagagccagactccatctcaccaaaaaaaaaaaaaaaaaaaggaggacattatagcttcttccaaaaaggtcatcagcatcaaaacatcttaatgcttatcccatgtgtggtaccagtgcatgggatcccatcagctccaggttttcgctgaagcac

SEQ ID NO: 291453 - DNA, 484 bp, Homo sapiens
acagcaaaccacatagctgggacaattgtatctcccatcagccatgtatggaatctcctttccttttaggttcttaccaaacatcagcyagccagcatagtcagtggatgagtccttttttaaaatgaaatttttaattttattttagtagagacagggtctttctgtgttgcccaggttggtctcgaattcctgggctcaagcaatcctcccactttgacatctcccaaagtgctggcattacaggcatgagccactgcacctggccagtcagtggatgatttctagttttattatctaacttatttaacatatttaaattatggagttttaaaatgaactctttagttctttaataaaattgtgtgaaaaacaaagtatcatcataaaatacaggttatactcattaaataggaatgctctataatgctcggggacagaaatagcctcctggaaagtgagcatatgatgagagagtagagag

SEQ ID NO: 291454 - DNA, 484 bp, Homo sapiens
acagcaaaccacatagctgggacaattgtatctcccatcagccatgtatggaatctcctttccttttaggttcttaccaaacatcagccagccagcatagtcagtggatgagtccttttttaaaatgaaatttttaattttattttagtagagacagggtctttctgtgttgcccaggttggtctcgaattcctgggctcaagcaatcctcccactttgacatctcccaaagtgctggcattacaggcatgagccactgcacctggccagtcagtggatgatttctagttttattatctaacttatttaacatatttaaaktatggagttttaaaatgaactctttagttctttaataaaattgtgtgaaaaacaaagtatcatcataaaatacaggttatactcattaaataggaatgctctataatgctcggggacagaaatagcctcctggaaagtgagcatatgatgagagagtagagag

SEQ ID NO: 291455 - DNA, 519 bp, Homo sapiens
ttttagtggcagaaacgcctacttaaaataagcaagttatacctggtacctttagcacagagataaatttagytcaattgtatttggaatataatttatcataggttaacaaattaatttacgtttctcttgtgatcattaagaatttgcattcaatttttaattttttaattttacttattgtttttttgagatggagtctcactctgtcgcccaggctggagtgcagtggcaccatcttggctcactgcagcctccaccccccggggttcaagtgattctcctgcctcagcctcccaagtagctgggattacaggtgcccgccaccacatctgggtaatttttgtatttttagtagagatggtgtttcgccgtgttggccaggctggtgtcgaactcctgacctgaggtgatctgcccgcctcggcctcccaaagtgctgggattacaagcgtgagccattgcacctggccctgaccctgaattttagaactgcctatcaccggtatttcaatagaa

SEQ ID NO: 291456 - DNA, 519 bp, Homo sapiens
ttttagtggcagaaacgcctacttaaaataagcaagttatacctggtacctttagcacagagataaatttagctcaattgtatttggaatataatttatcataggttaacaaattaatttacgtttctcttgtgatcattaagaatttgcattcaatttttaattttttaattttacttattgtttttttgagatggagtctcactctgtcgcccaggctggagtgcagtggcaccatcttggctcmctgcagcctccaccccccggggttcaagtgattctcctgcctcagcctcccaagtagctgggattacaggtgcccgccaccacatctgggtaatttttgtatttttagtagagatggtgtttcgccgtgttggccaggctggtgtcgaactcctgacctgaggtgatctgcccgcctcggcctcccaaagtgctgggattacaagcgtgagccattgcacctggccctgaccctgaattttagaactgcctatcaccggtatttcaatagaa

SEQ ID NO: 291457 - DNA, 572 bp, Homo sapiens
agtgaagactctatgaattccttggttgtggagagtctttctatgatggcttcctcagatgtggttgtaatagtcatgtactcagtgtgttggcaagtttgctatctcctatggaattgtaatggcagaggtctcttgaagcttacctcattcccctgtggtgtgcactttttaatttaatttctccccagtattttatttactgagttgatggttcaggcttcaggataggagtggtatccctgggtaggaacctgttgtagctaaagcaggtggtaaatgtaatatccaatggtggasagaggtaccagccttgatgaaggtggctgagggagctctcaattagatgcactgatgtcttaacaaggggaagagtgagagccacctcagcttccttgccaggccaagcaagaaagctatccaactcccagactcactcttatcccagtggtccagctattcaggtatttttatctgtaggcatgttgatgttctaaggagagaggaattgtgactgcctcttgtgcaagcctgaacctggaggatacctctcctgcggcaatgcagtcacc

SEQ ID NO: 291458 - DNA, 576 bp, Homo sapiens
atccccatttctcaccttatacaaaaattaactcaagatggctcaaagacttaaatctgtaaccataaacattttagacaataacactggaaaaactcttctggacattggcgtaggcaaagaattcatgaccaagactccaaaagcaaatggaacaaaaataagtaaatgggacctaattaaaaagcttctgcatggcaaaagaaataatcatcagactaaacctacaacccacagaatgggagaaaatatttgtgaactatgcatctaacaaaggactagtatccagaatctacaaaaaactcaaattagcaagaaaaaaataatcccatcaaacgtgggcaaaggacatgaatagaaatttgtcaaaagaagaygcacaaatggccaacaaacatgaaaaaatgcccaacattactattcagcagggaaatacaagttaaaaccacaatgagataccaccttactcctgcaagaatggccatgaagaaaaagtcagaaatgagtagatgttggcatggatgtggtgaaaagggaacacttttaccctactgttgggactgtatattagtgcag

SEQ ID NO: 291459 - DNA, 501 bp, Homo sapiens
tgtcttaggcatttagttgacaatcaactcagtgggagttaacagtaatgtggctgccaaaaaaggctgatgggccccgaggctgcattaatagaagtgttgtgcaagaataagggagataatggtgccactctgcctgatgctttacacacaacacttgaagggtgcagtcagccctatgggctccacatggacccatttgcaaggaatagtgacagttaaagacagtgtgcactatagcacagcacgtaaggaacagttgagggaactgagaaggcttacctttagaaaagtcttgagaaggacatggtgccttgaataacagacttggcaaaaaaaaaaaaagggggggttagagttactctgcatgatcaagaagaaagagaaccacattgtagaatccttggagggataaactagaaaaataatataggcatggatgtcagacagatctaacatggaactctggcttataaagytactctatgagtttgaataagt

SEQ ID NO: 291460 - DNA, 578 bp, Homo sapiens
cagtttgtgccaagaatttataaaatgttctatgtatgaaataatttagaaaaaaatcyttttaaaattattctaaagaatgtttagtgggatacaagtgtatacttgaggtataagatatcatcccatcaaatgctaaattttaaccagaattgtgctctatcatataatgaatcacaaatgcctgatcatttccaacaactgtgtacagcagaaaaattttatgagcctatacacagtcaacataagcaaatagacaaagctcgtcactaaaggttttaaaaaaatagatgaaaaggaaaaaagaaaatggagcagtcaaaggaaaagctgatgtaattcacaactctgatacctttctctaaacttttacctttacttgtgatattacagaactactcagccattttagaaattctgagatcccaaatgtgtcaacaatataacatactttattaagctgctttaaagtacaccctcaaaagcttgcttttttaaagcagtaatttgtatacatggcataaattgtcaacccttctgtgatcttgaaccaaattttgttttggttgtgaaattta

SEQ ID NO: 291461 - DNA, 578 bp, Homo sapiens
cagtttgtgccaagaatttataaaatgttctatgtatgaaataatttagaaaaaaatctttttaaaattattctaaagaatgtttagtgggatacaagtgtatacttgaggtataagatatcatcccatcaaatgctaaattttaaccagaattgtgctctatcatataatgaatcacaaatgcctgatcatttccaacaactgtgtacagcagaaaaattttatgagcctatacacagtcaacataagcaaatagacaaagctcgtcactaaaggttttaaaaaaatagatgaaaaggaaaaaagaaaatggagcagtcaaaggaaaagctgatgtaattcacaactctgatacctttctctaaacttttacctttacttgtgatattacagaactactcagccattttagaaattctgagatcccaaatgtgtcaacaatayaacatactttattaagctgctttaaagtacaccctcaaaagcttgcttttttaaagcagtaatttgtatacatggcataaattgtcaacccttctgtgatcttgaaccaaattttgttttggttgtgaaattta

SEQ ID NO: 291462 - DNA, 618 bp, Homo sapiens
tgaggtaaaaaacttccaaacgttcctttaattatctgttgatatctattttggttctttcattttcagttcctacaatgaaggtcccagaacagaacttacatgaatacttagaaggccaagtttctaaacctttaccagactagcaagagatgttccattcaaataagttctctgatgtatgggtgacaggcaagagctaaactgacagtgtttgctgaattctgcaagcccatagggggcaggattccacctgcttgggatcttctactggcgtaaactcagggaccaggctttataaaatgaaacrggctgcgagggaacagccaaagtgaaggcagattgtgtgctcaatgaccgtatggttttcattatcttgttctcaaggaagaattcatccaaagaacaaccaaatgaaagcaatgtgtaaaccatgtcaacccatccttggatggatgtgccacatttgctccattattggtggtgattgtataaaggtggggaaaagggagaggaagtgggaaaaatgaaggtagtgcaaaaagaaggtgcagaaggagcaagaaaaaagaaatgtcagccactcagctgtctcattatgtagcttcccacactcac

SEQ ID NO: 291463 - DNA, 607 bp, Homo sapiens
gggaactactgtttatttttcttccttgaaaatcacgtgatattgatgtgattccaagcaaatagtaygaacaatattctgaatctagctactgagttctgtattctattctggatttgttaagtttctgagtaaaggagtatttattttatcatctagaaaaatgctttaaattaggtttcatgctcaaaaagacagaaataattggctcagttctttacaaagagttaaattttgagattatggtaagcatatgatgcatactgccatattatgccactagcttgtttttttttgttattggcaaaagtgaaattagattcagtaatgcatacagtgtgatgccttcggcttacacaaacttagtaaagtctaaaaatctatcagaaggagctgttggcaaggccgtgctcatctaagtgtgcatatttacttttctacttcttatataatggatcctttaaataaaagtcactatgtagttcatcttattaaggacatcaaataagtcattgtctgaacgggaaatcaaattcaagatttgtttctttaaagtgattttattctgtcttacaaatacatgttatttcaaaaggagatattaata

SEQ ID NO: 291464 - DNA, 588 bp, Homo sapiens
gggattatattatcagatttgcttggggatgccaaacttacattctttgtccccattcctgttagccatgtcctagttttttttttcattctttcttttcttttttttctttttttttttgagacagagtcagttcatagatgactgtgccaaagacaaaaatttaacaaatataactaaagaagacaggtttgcatatcattataaaagcaatgatttccatttagttcaaattaatatttttcattaattttgctcaggtttcagaccaaattttcttatgtacatacaaaagtggaaatgatatctgctgatgtattggctctattaacagaagaactttgtaaatggtgaaatgatggtagttttgtattcttttgattagatccttcagagaaacaaaaaaagacttagcttaggcattgcatcctctaaaaagccatctttgactgcctttgggacaagcatttttagratgccttaaatatagtacatgggtaataaattcaacaagcactacagtaggaaaatattatgtatgtatatatatgaagaaagatccttcaaaaggacaagttaattcccata

SEQ ID NO: 291465 - DNA, 534 bp, Homo sapiens
atattccttctgtgaaattataatctgtacataggttaaaacagccaatgaggcttccacttcaaatagagactcaaattattccacttgtcaccaaactccacatggatcctttggaactggagatcaagggagtgaaaacactcagttgggacttataaacattgccagttcctgaagctgcttgctacactctgggagttcaggaatatttcaggataatagctaactgcatagaaatctaaaggtaaagactaaactcctctggaacatcatgcagtctttgcaagggsagcctatcatgtatttcctcaaacacatttggtacaactttcttgaagccgtgcaacctttggccatgcaaagcaggatgttattattttttttttttttgtatctgctgccagaggcctggaagaccaacagccttaaaggaagtgtaaacattttttatttagctaaatagagtgtgaactaaagttgctatattaaagatagagccaagataggcacacatacaaaaacacccagcca

SEQ ID NO: 291466 - DNA, 630 bp, Homo sapiens
agttcaaagaaaaagctacatagtttggaatattccggatgtatttatttctttgaggtctgatctcctatcccatattggatgaatagatagctattaaaatgccatgatgatttgaggaatgtcagaaaacaataattaatagctaagatttattgaaagctattttgtgctgagcactgttgccagcatgttgcctgtattttctcactctttacaaccacccaacaaggtaagtgctgttattattgtacccattttataggtaagaaggttgaggtcagatggaagataacatgatcctacagttagtaaggatatatacccaaccaatcttgttccagaaactgtggtattaagcttttccttccttgttcctttccccaaacttttttaaccccctgttccttgctagaggagcttcatttttcagtgacattgctttaaaactatggcagagaggtctatgtgagatgcaaatatttcagctgggagaaggatgaataagaagcggggcatgctatagtagaggactgacttggtatraggcaccagggccaccagaaccatggagcaggtagaaaaatcatggtaaacccagggcccagctgagaaagaaatgaagcacaa

SEQ ID NO: 291467 - DNA, 573 bp, Homo sapiens
attatgaactttgcaattcatttgttcaatttcccagaagcatttattgcgtacctgttatgtgccatttttacattaagtgacagagatgcagacatttttaggactgagggtctttaraaatagtatttatttcctacctgaaaaaaagctatggctcccagatccataaaatatctgacttgtatgtacaaaatcacttgttatcaatattttcattgacttgactttgaaaacccttgtttttatgttttatcttctaaatcagttatgctcatgtttattttttctgcttacatatgttctgccacatttccactgagcagtagaagatactactttttaaatgttattacagctttttaagggttatattagacatagtcatggaataaaagaatgtctgctaagattcatcagcctgctcctatgaattttctccttattcatattacagtggatgatacatattaattactagacacaggtgttttacaggaggaaaaaatgttttatgcttcttcacagaaactgtgtctattagaatgtgaagaagaaacaatttaccatcat

SEQ ID NO: 291468 - DNA, 601 bp, Homo sapiens
tgttttggggcaggacagaagctaagaatagttttacatttataatgggctgtaaaaacaaaacaaatcaacagcaacaaaagccaagaagactacacaagagagcacttctatggcctgcaaacctaaatattcagattctggccattatagatcagttttccaacccctaaagtatatcgtaacataatttkaaagactaaatgagataatacatacaaagtggttgataataagccaggaatatgggaagggctcaatgaatgtcacttcttattgcttttggtaataccaggaagataataatattactattctgaagtgggtccatcaattggtgatatcccaattaatgtattatctcatattctgtcttattgtacatacagccattcatctcatagtgattttccagtttacattcaaccacatatgtgatggtggtctcataatattataatggagctgaatccctaccacccagagatgtcatagttggtataaagttgtagtgaaacacattacaaacgtgcttataggtgatgcttgtataaataaatctactgcattgccagttgtataaaagtaaatagtacagtta

SEQ ID NO: 291469 - DNA, 670 bp, Homo sapiens
agcattatgacccacgcagaccacgtggaattctttaaaccattacactcagtaacaattcttctcatgcagtgtaacttgtacttcctaatttctcaagagatatttacttggacactagctctttgttttcaacagttttcstgcccttccaaattattaatccccacctgtagtcaaatgcttccatttatgaattcacaacagttgtttaagtcattgaattaagaatggaaaagtttatgtaatttttgggatgtgggaagagaaaaagaatatttttaaatgagcaagacaatcgtcttattgatgatcttatctttaaagaaaaaataataaagaaaaatgtaactggatgttcctggagctataaaagtaaagctgaaactacaattttttaaaaggcaaatgaaaaattgactagtagagatcttcaatggcctttataatcatcagaatcattcattcactctgtactcagtaggccgtaatacccccaaagagaaggctaaattgaatgagctagttactagtctccattctgctaagctactatgtgatgattggaatcgcatgcatctacccagtgacacaaagagcagagtcacatgaaaatctgtcattgaattcaaactagattttatttccccaaactgaattattctgaacc

SEQ ID NO: 291470 - DNA, 562 bp, Homo sapiens
aagtttcttaagcaatctgagatttgaagacagaacctgygaaattaggattcagtgtagaccatttgagctcaaatgcaggtgactagtgaatttggttcctaaacagtgctgcagattaaggagttaaaatagcttattaacctgcttcggctaactgtctataacaggaaatgtgacccaggtgggtttgatattcacaagattaaagcttatgtctaccatcaaatggtgaccacattaaagctgttttaatgaggccaggggagataatgaatgaatgttgcttattcactgcagaggagacagcctgaccttattctaacctctttgctgccaggtatctaaagcaacatgttagtcctgcttaaagccaaaatgggatggtccagaagataaaaacaagccaaatgcttaggagaatgattttgctggtgttaaagccaaaaaaaataaaaaaacaaaaaacaaaaactattctccctagaatccttataaaaaggacagtgtgtaacaggatggtaatcatcctcactgtcacctttatcacagacacagccat

SEQ ID NO: 291471 - DNA, 582 bp, Homo sapiens
gcagtttcctatggtgcccctcaatattgtccagttgcaacacccaaggaaaataacctacgtaaaggaatgggtggaggactcttatttaaggatctaactctctgctggtttaacttaatcctgagtaaattttggaggatctagagggactgcttatctttcaggtaagccttcataaataccaaacatttgatagatttaagacagcagtgtattagagattrcacttgctagaaaataggcagagtacagcaaattctattgccaatttattttgtttccacttgttttgccagtcagcaggagtagggggtaggtctttgtggaaactgagggcctagtgatggtttttcccaaataaaatgtaatttgtcttctgctaaaaggtgaactaaagcaaccataattagaaaaggtgggaaaggcatgaaatactctgtcacatattttggtcattgagtacaaaaactatcaagtaagggaaaattaatacaagtgagaatatattttaagacttgatcaacatatatacagtaagtaatttaagttacaatagcttcaaaatctttttggaaagaa

SEQ ID NO: 291472 - DNA, 497 bp, Homo sapiens
aaacacatacctgagactgggcaatttccaaaaaaaaaaaaaaaaaaaaaagaggtttattgcacttacagttccacctggctggggagacctcacagtcatggtggaaagtgaaaggcaaggaggagcaagtcatatcttacatggatggcagcaggcaaacaaagcttgtgcaggggaacccccatttttaaaaccatcagatctcatgagactcattcactgtcacaagaacaaggcaggaaacacctgcccccataattcagtcacatmccactgggttccacccacaaaagttggaaattgtgggagttacaattcaagatgagatttgggtggggacacagccaaaccatatcacaagctttctcacagaaagaaagaaaaaatgatgatggattatctaagttctcaataagatggaaaaaaaaataatccatacctttccatgatttggctatttgaccattttggaaaatgtaacatgaccagtctct

SEQ ID NO: 291473 - DNA, 538 bp, Homo sapiens
aggcatctgtaacagggatttagcagaacaacaaatagcatgcaagaatacagatgaaaggaaggaatgtgaagagattattaccatataaagcaaatgactatttgatgaaattgcaacaatacggasagtcatagagatacagaaaagtaatgctaattaataaatatatagttgtttagcattgatttgaattatgtcataactatgaaatgagtattacctgtcactttcttttcacaggtgaatatcaaaggaagacagacggaccttctgaaagataattattgtagactttgtattatttcagtagctgtcttggaaaagctgcctacctgagaccattgacagctcaaatttttaaaatatttgtgtaaataccttttagtagtatctgacagccttagtctacccaaatacatgatgatttttattacttatttgtggattacaccctgtctacttctaaacagattttgagcgtcgtttaacatagactatcttaaatctaaaacaaagcatgagggctatctctgct

SEQ ID NO: 291474 - DNA, 583 bp, Homo sapiens
gctttctagccacatatagctgggccatccttccaacagtatacgtcagtccaggaaatagattgctgttcaaaaatacattgaatttagttttttcagttacctttgagtagatgacacatttctatttatttttaaataaaatacaatattttaaggaaaaggtaacaaagaaattcmaattaagtggcaggatggtatctcaaagtctcttctattgtcccaaactgtaagaagctgccattggctaaacctttcagtaatgacattgaagagctcagtggtccattctgtcaagagccctgttagccccagcacctccttcagagggcacagagctgtttaggggactcggcagttaaggtctttgaggtgttgtgtagattgtattttttttttctgtaaacaactaaaatttctgttttataggcataaaatacttgttggagtaaccaagcatgtgactcacgatggcatagcctaataaagtaaatcaatttgctacctgttaatgttgtgttttaaaggaattaggaagtgaaatttgcagtttggaaaggttcacatttataaattaagctac

SEQ ID NO: 291475 - DNA, 573 bp, Homo sapiens
tttacggtactaattattttaggagtattcatattactactacttggcgttattggtattagtattactattacaatattcytaagcaatgtttgttactattcatagaatcatgaaataagtttaaatatcttacaaaatattaaagattctagtgaggctctaagagctgataagtataaaagaagatatgcatcttaacatgtaaagaaaaacaacagaagatggtcagagagcatagcaaatgttcaatggaaaaaccaaccaagaaaccctggatggacatggaagaaattctagatacagtgcatatttcaagaaaagtttaaaagaaaatacaggatctgaaactataaaacataggtttaaatttttacttatagccaatatagtggaagttattaatgaaaatccttgcttattatccaaaaactccagataaatttaaaggcctttgcagtacaacttggatgtacagttttgaattaagcgagatcagaattgtacaagagcttctagaacagaatgactttctgagccagagagcttctttggggaaaaaatataacctga

SEQ ID NO: 291476 - DNA, 573 bp, Homo sapiens
tttacggtactaattattttaggagtattcatattactactacttggcgttattggtattagtattactattacaatattcctaagcaatgtttgttactattcatagaatcatgaaataagtttaaatatcttacaaaatattaaagattctagtgaggctmtaagagctgataagtataaaagaagatatgcatcttaacatgtaaagaaaaacaacagaagatggtcagagagcatagcaaatgttcaatggaaaaaccaaccaagaaaccctggatggacatggaagaaattctagatacagtgcatatttcaagaaaagtttaaaagaaaatacaggatctgaaactataaaacataggtttaaatttttacttatagccaatatagtggaagttattaatgaaaatccttgcttattatccaaaaactccagataaatttaaaggcctttgcagtacaacttggatgtacagttttgaattaagcgagatcagaattgtacaagagcttctagaacagaatgactttctgagccagagagcttctttggggaaaaaatataacctga

SEQ ID NO: 291477 - DNA, 573 bp, Homo sapiens
tttacggtactaattattttaggagtattcatattactactacttggcgttattggtattagtattactattacaatattcctaagcaatgtttgttactattcatagaatcatgaaataagtttaaatatcttacaaaatattaaagattctagtgaggctctaagagctgataagtataaaagaagatatgcatcttaacatgtaaagaaaaacaacagaagatggtcagagagcatagcaaatgttcaatggaaaaaccaaccaagaaaccctggatggacatggaagaaattctagatacagtgcatatttcaagaaaagtttaaaagaaaatacaggatctgaaactataaaacataggtttaaatttttacttatagccaatatagtggaagttattaatgaaaatccttgcttattatccaaaractccagataaatttaaaggcctttgcagtacaacttggatgtacagttttgaattaagcgagatcagaattgtacaagagcttctagaacagaatgactttctgagccagagagcttctttggggaaaaaatataacctga

SEQ ID NO: 291478 - DNA, 511 bp, Homo sapiens
ggtagttatagatacaggtcacatagaaaattcctataagcctttctatcgttttgcagaacattttgttaaagcactgtcaacttaacatttttcatatattttttgctattacataaaaagcagtatatttggaagcaagggttttattttcctgttttcaagatattatgttgcaggtggtagaaaatcagtcagaaaaagaaaacagggaaggtggaaaacagatataaggcatgcatgcagagcactcagcttgggctgatggctrtctttttttacccattggtccaatttttctggcttttctgtgtgtgttgctgggttataattgcatatattgtgcaatcaacataaaaccaactggctgaacaggttgttcttcactagccaaaaaaaaaaaaaaggttcatgtgattagaattaaaatttctaattaagaatggtttttagacttctaatttgaaaggcttatcttattcactaaaggtctttatgaagattaagagat

SEQ ID NO: 291479 - DNA, 553 bp, Homo sapiens
ctctgtgtagacaacttccagtcccaccatggagcctagtagacttgctgggtggctagatccagaagagagacaacaagcaccacagctcagctcccaggaagccacatctctaggaaaagggggagagtatcacatcaagggaacaccccatgggacaaaggaaactgaacaacagccttcagccctagaccttccctctgacagaggctacccaaatgagaaggaaccagaaaaccaactctggtaatatgacaaacaaggttctttaacacccccaaaaaatcacactagctcaccagcaatggatccaaaccaagaagaaatacctgatttacctgaaaaagaattcagaaggttagttattaagctattcagagaagcaccagagaaaggtgaagcccaatttaaggaagtgaaaaaaagatacaagaaatgaggggagaaatyttcaataaaatagataatataattttaaaaaatcaaaacttcaggaaacaatggatgcacttataaaaatgcaaaattctctggaaagtctcagcaatagaat

SEQ ID NO: 291480 - DNA, 553 bp, Homo sapiens
ctctgtgtagacaacttccagtcccaccatggagcctagtagacttgctgggtggctagatccagaagagagacaacaagcaccacagctcagctcccaggaagccacatctctaggaaaagggggagagtatcacatcaagggaacaccccatgggacaaaggaaactgaacaacagccttcagccctagaccttccctctgacagaggctacccaaatgagaaggaaccagaaaaccaactctggtaatatgacaaacaaggttctttaacacccccaaaaaatcacactagctcaccagcaatggatccaaaccaagaagaaatacctgatttacctgaaaaagaattcagaaggttagttattaagctattcagagaagcaccagagaaaggtgaagcccaatttaaggaagtgaaaaaaagatacaagaaatgaggggagaaattttcaataaaatagataatataattttaaaaaatcaaaacttcaggaaacaatggatgcacttataaaaatgcaaaatkctctggaaagtctcagcaatagaat

SEQ ID NO: 291481 - DNA, 630 bp, Homo sapiens
tcaccaaacacataaggactcacataaacttcagataaagtggtggaaaaagacattccacgcaaatagacaccaaaagcaagcaggagtagctaatcttagatgagacaaaacaaactttaaagtgacagcagttcaaaaagacaaacagggacattatattatgacaaaaggccttgttccacaggaaaatatcacgrtcctaaacatatatgcacctaacactggagatcccaaatttataaaacaattactaatagacctactaaatgagatagacagcaacacaataataatgggggacttcaatattccactgacagcactggacaagtcatcaagacagaaagtcaacaaagaaacaatggatttaaactataccctggaacaaatgtatttaacagatatttacagaacattctacaaccacagaatatacattctactcatcagcacatggaactttctccaagatagaccatatgataggccacaaaataagcctcaataaatttaagaaaattgaaattatatcaagcactctctcagaccacagtggaataaaactcaaaatcaactccaaaaggaaaccttcaaaaccatgcaagtacatggaaattaaataatctg

SEQ ID NO: 291482 - DNA, 630 bp, Homo sapiens
tcaccaaacacataaggactcacataaacttcagataaagtggtggaaaaagacattccacgcaaatagacaccaaaagcaagcaggagtagctaatcttagatgagacaaaacaaactttaaagtgacagcagttcaaaaagacaaacagggacattatattatgacaaaaggccttgttccacaggaaaatatcacggtcctaaacatatatgcacctaacactggagatcccaaatttataaaacaattactaatrgacctactaaatgagatagacagcaacacaataataatgggggacttcaatattccactgacagcactggacaagtcatcaagacagaaagtcaacaaagaaacaatggatttaaactataccctggaacaaatgtatttaacagatatttacagaacattctacaaccacagaatatacattctactcatcagcacatggaactttctccaagatagaccatatgataggccacaaaataagcctcaataaatttaagaaaattgaaattatatcaagcactctctcagaccacagtggaataaaactcaaaatcaactccaaaaggaaaccttcaaaaccatgcaagtacatggaaattaaataatctg

SEQ ID NO: 291483 - DNA, 623 bp, Homo sapiens
ctccaatattttttatggatttaagaagctacaaataacatcaattttatagtagcaataaccaacaaagtaaaagagcttcaaatgaaaacagcagaaaattcaattggttcccttggtatttgatctaaagtaagataactttgttgacagtagaaggtttttaatttgtcttttcacccacccacttgtctttctttagcaaagatgacccaggggctgaggttgcccttaaaacttaattcatttggtttttcctggccatcagtcacacatgcatgtgggaaaagaagcaaaagaacattgagttttcatataaagcaaaacagaaaaattgattttctttttcaattatgcaactcattgaggaactgattacctggtgtgagtttgggcaaakgtattccttaactgatgatcagtgtattaaaatcctccagtgggaacatactgcctctcctcttggttctagctgctacactatatgttgtacaacttgccattcattgccagttgctcctctcagagaagcccctgtccctgaagttcactccccttcatctgaccgcagatgtcacttctgttttaatggatctgctctcctgactcatcctgctggtgac

SEQ ID NO: 291484 - DNA, 531 bp, Homo sapiens
aaaaactggacataaaagttaggatgaccttttttcaggggcatctaggaaagcattcttcrtatccttacttacaagcaagaggtggtagacatgacttttttcaagtcccttctgggggacctgaatttgtttgacactcccaggatgaaatttaactcttcccccagaggaccatcaacaaacaggaaccccatatggttctaaatatacaaaaggcagggttttctggcttcattttcactgaaaactctttgattgaatttaatattccctctgtctaaatcctctttactctctgtggctagcacttcctccaccttcacagtttacacactacacaatttaaacttcacctccttatatacactgtacttgatctgcagcaacaaaactgggttccctcccgtgattcagaatctcagtatcttgtttagttcctttatatgacatatcacaaattgtcataactttttggttttgtgcttccttctttattgactctccatccctaccactacattgctagtg

SEQ ID NO: 291485 - DNA, 504 bp, Homo sapiens
tgtcatatagttgggccttgacaataaataaaatggatgacaacttaatgtggtttggtcgtgtccccatccaaatctcatcttgaattgtagttctcacaatccccatgtattgtgggaaggacctggtgggaggtaattgaataatggagaaagytacctccatgctgttctcatgatacctagtgagtgctcacaaaatctgatggcttcataaggggcatatccgcctttgctcagctcttccccttcctgctgccatttgaagaaggacgtgtttgcttccccttccaccatgattgttaagtttcccgaggcctccccagccctgcaaaactgtgagtcaattaagcctcattcccttacaaattacccagtctctggtatttcttcatagcatttccacattaaggaaccagagaacaaaagaagttaaataacttggctgaggtcttgtaaatataaagccaggttttaaaaacatatgggagtctatagtttgta

SEQ ID NO: 291486 - DNA, 571 bp, Homo sapiens
actttctatctatctttgcctgacaaactgattgattctccaaagtgcaactcaagtattacctcatttctgaggatcattccttcatcccttcaagttccttcttctgtgtcatcattaactttctatgtgtggttttaatgtacttcaagtaatgtcttatacttattttctcatggctattgttccctttcagacttgataagtcctcaaggagagaatctatgtcttttaaaaaaatcttgatatttccttacagaggtcctggcacaaaatagatacccaatatatgtgcaactgaatagaaatttatgagggagtgataattatccgtgtcttcctttcagctatgactgtgtcccatgataaaagttttttggatgatgatcatttgtcttgtcatttttgagttcaacagcgagtgccaggggkaagatcaaggaaaaattgtctgcatcttgattccagattttaaaagctctgtaaccctcactccaagggttatgcttgcagaagagaaaacattactactgggactaaaaaacaaaatcctttcacaaatgtaactgag

SEQ ID NO: 291487 - DNA, 565 bp, Homo sapiens
tataatttttttctttaaatttgtatagtggtaggagaacactattacttaaaaataatcaaaaattatagtgyactttcaaacctggaaatttagctcataagtctgagtgaggagcattatggaagtcctaacatcagtttctctgtggaatgggtaggacatttgaatttcctgacaagagaaagggttggctggcaagttttctcacatacattgtttcaaaagacaaagatggctccaatgaccctggaataatacaactagatccttaaataacactaaaaaaaagaaatgtagtacattttaaccggtgtcaagggatggcaaatatgttctgtaaaatgccggacggcatatcttttaggctttgcagtttatatacagtccctgctacatattcctgtttttattttttaaaaccctataagaatgtatcaactattcttagttcatggtgtgcacaaaaacaatgtaggcgacattttgcccccaggcagtagtttgcttactcttgatcaagttatctaagtttatgctttcattacgatggaatacaatcatg

SEQ ID NO: 291488 - DNA, 565 bp, Homo sapiens
tataatttttttctttaaatttgtatagtggtaggagaacactattacttaaaaataatcaaaaattatagtgtactttcaaacctggaaatttagctcataagtctgagtgaggagcattatggaagtcctaacatcagtttctctgtggaatgggtaggacatttgaatttcctgacaagagaaagggttggctggcaagttttctcacatacattgtttcaaaagacaaagatggctccaatgaccctggaataatacaactagatccttaaataacactaaaaaaaagaaatgtagtacattttaacckgtgtcaagggatggcaaatatgttctgtaaaatgccggacggcatatcttttaggctttgcagtttatatacagtccctgctacatattcctgtttttattttttaaaaccctataagaatgtatcaactattcttagttcatggtgtgcacaaaaacaatgtaggcgacattttgcccccaggcagtagtttgcttactcttgatcaagttatctaagtttatgctttcattacgatggaatacaatcatg

SEQ ID NO: 291489 - DNA, 615 bp, Homo sapiens
tcttgatcaagttatctaagtttatgctttcattacgatggaatacaatcatgcttaaatgcaaaaatggttctctttcccttgtcatttataaagttaaacttactcaaatatataataagtatcttctttgtgcatgctgcactagaaggtacaaagatgactttgaagttccagacaaccaggagaagacaattatgaaaataaacaaatattaaggccaacattkctgaatgcatatcggtttcaccttattttccttcctcactagtacaacattttttgactaggaaatattttgtcagctttctttgtagctaagattagttatgatataattatgcccaatgaaatatatttggaagttgctgtgtagggaaattttaaaaaaggtgataagacttggctgccatatgctgttttctctatttttttccacttcctttctggaatgtgagtgtagtattgggggtgaagcagtaattttgcaaccattaggcaagaagcggaagtataaaatctaaaagaagtcaagagttccccagggttctgtgaaaacactttaccagcaatagatggtcatgtctggacctcctttttacatgataaaagcta

SEQ ID NO: 291490 - DNA, 1133 bp, Homo sapiens
aaaggatcatacagtatgatcaagtgagatttatctctgggatgcaaagatggtttgacacacacaaatcagtraatatgacaacacattagcagaattcaggataaaaattaggtggacatttcaatagatgcagaagtggcatttgataaaattcaacatccttttatgataataattatcaacaaagatgtatagagggaatgtatctcaacataataaatgccatctgtgccaagcccacagctaacatcatattcactgatgaaaagttgaaagcttttcctctaagattgggaacaagacaagaatgcccactctaaccacttctaataacatagtactggaagtcctagccagaacaattaggcaagaagatgaaatgaaaggcatccaaatctgaaaggaagaactaaaattgtccttgttttctgatgacatgatcttatacacagaaaaccctaaagactgcagaaaaaacttttagaactaataaatttagtaaagttgcagaatgcaaaatcaacatacaaatattcgtagcatttatgtataataacaactaawaaaggatcatacagtatgatcaagtgagatttatctctgggatgcaaagatggtttgacacacacaaatcagtaaatatgacaacacattagcagaattcaggataaaaattaggtggwcatttcaatagatgcagaagtggcatttgataaaattcaacatccttttatgataataattatcaacaaagatgtatagagggaatgtatctcaacataataaatgccatctgtgccaagcccacagctaacatcatattcactgatgaaaagttgaaagcttttcctctaagattgggaacaagacaagaatgcccactctaaccacttctaataacatagtactggaagtcctagccagaacaattaggcaagaagatgaaatgaaaggcatccaaatctgaaaggaagaactaaaattgtccttgttttctgatgacatgatcttatacacagaaaaccctaaagactgcagaaaaaacttttagaactaataaatttagtaaagttgcagaatgcaaaatcaacatacaaatattcgtagcatttatgtataataacaactaa

SEQ ID NO: 291491 - DNA, 1117 bp, Homo sapiens
aaaggatcatacagtatgatcaagtgagatttatctctgggatgcaaagatggtttgacacacacaaatcagtaaatatgacaacacattagcagaattcaggataaaaattaggtggacatttcaatagatgcagaagtggcatttgataaaattcaacatccttttatgataataattatcaacaaagatgtatagagggaatgtatctcaacataataaatgccatctgtgccaagcccacagctaacatcatattcactgatgaaaagttgaaagcttttcctctaagattgggaacaagacaagaatgcccactctaaccacttctaayaacatagtactggaagtcctagccagaacaattaggcaagaagatgaaatgaaaggcatccaaatctgaaaggaagaactaaaattgtccttgttttctgatgacatgatcttatacacagaaaaccctaaagactgcagaaaaaacttttagaactaataaatttagtaaagttgcagaatgcaaaatcaacatacaaatattcgtagcatttatgtataataacaactaawcaattagttttctcctcaatcctctgtccccaaactaacttatcagggataattacagtaacaatttggggactatcttttcagatttttaatgtgtatatagacttacataaaagtatgtctacatacacatacacacacatttgtgcaagagccatgtataaatttgtgtgtgtaataagaaatgagatcatgatatgtacagttttatgcctgttatttttcttttattgtggaaaccttttcatgtgtgcacataggaatacctcwccgttttaaactgctgatattaaaacaacgagattctattttttacttgtcagtttggtaaaattttaaaacactgttaaggccagacttagatgggcattgtgaaaaagttgctcttatatccagtaggtggggatgtaaatagtgttgatataaaaagttataatattttttccaaggaatttagacagtttattagtcagtattcttcaaagaaacagagccaataaggtatacagatacataaaattttggcccagaagttgcttttctagttttc

SEQ ID NO: 291492 - DNA, 550 bp, Homo sapiens
caattagttttctcctcaatcctctgtccccaaactaacttatcagggataattacagtaacaatttggggactatcttttcagatttttaatgtgtatatagacttacataaaagtatgtctacatacacatacacacacatttgtgcaagagccatgtataaatttgtgtgtgtaataagaaatgagatcatgatatgtacagttttatgcctgttatttttcttttattgtggaaaccttttcatgtgtgcacataggaatacctcaccgttttaaactgctgatattaaaacaacragattctattttttacttgtcagtttggtaaaattttaaaacactgttaaggccagacttagatgggcattgtgaaaaagttgctcttatatccagtaggtggggatgtaaatagtgttgatataaaaagttataatattttttccaaggaatttagacagtttattagtcagtattcttcaaagaaacagagccaataaggtatacagatacataaaattttggcccagaagttgcttttctagttttc

SEQ ID NO: 291493 - DNA, 582 bp, Homo sapiens
aaggaatatttgccagtcccttaaaaacttaatcgtactatatgcagaaacttttgattttgtttgaataatcctgtgtttttacacatcatagttttgaagaatgtggctatcatattgattattcctgaatattttggactactgtgactatctggccaaaatgaaatgtgacccaggaaaggtgatattggacagcaacaaaaatacactgattttcaatgttatgattgtttttatgtttcattatttcactgtattcattccaaagcacacatatactcactacatcaatacatccccttctgtccttcatagttactaattgtaggatgaccagttctttttataatgcagttgtttagtggacatccatggatttcagcayaatgaggaagtatcttacacaactttgcttgagatatgtttttttataggctagcaaaatcagtacattagtccagacagcacatgtaccccagcaacacggaacttgttacccatggctttccaatatcatgtgatatttccatatcgttttttacctttgccatttatcttcataagaaggctactgtgaca

SEQ ID NO: 291494 - DNA, 1178 bp, Homo sapiens
cacagaattgttcaattatgtatactttattgagcacccgttatgtatgaggcactgctctgcgggagatgatgaaaagccattttcactgctttcaatctacttgaggagacaagaaaacttcttggtagcaagcaataaaaacgcctctgactactttaagcaaacagacttaatggcaggatttcagggcctcacagaatcaaaaggcagtacagagacgagttttaggaatgagaggaatgaaaaacgaatccgtctgttaatttatctgtttgtctgtctgtgtctgcttgcctgctttttttctctctttctttctttcttctttctttcttctttctttctttctttctttctttctttcttgctttctttctttctttcttctttcttctttctttctttctttctttcttctttctttcttctttctttctttctttcttctttcttctttctctctctctctttcttcttctcttgtcttctcttctttctcttctcttctcttcatcatccgtgtatctatattacacacacacacacactccaagctggaggcccaaartgcatgaaactgggaccattcagaaaatatttctagcaggagtccwatctatattacacacacacacacactccaagctggaggcccaaagtgcatgaaactgggaccattcagaaaatatttctagcaggagtccacattctatatgctggtaawattgccactattgctacttaatcttcttctgtcataagaatgactgccactcaaagttccagaagaatctgatttctagttacatgcctgtcctggcagagccagaatttggtctcctagccttcccaagttagagatgggcattcacaagccaggaactacccttcaaccaaggttgaacacaatgggagaaggcaattctccaaaaggaaatagggggactattgaagatagaaaggattctagacattgcttactgtaggcaagatcaatgttgtcatgctgaacagacatgcaggagaatgaagaccaagaaggggatatagaatttggagataaattagaagttcattattgttggtgacaaatggagcaataatgaagcaccccctaagaatacaggaaataaggaagtaaaatgaccacatgagagttaaactgtaaactgaac

SEQ ID NO: 291495 - DNA, 561 bp, Homo sapiens
atctatattacacacacacacacactccaagctggaggcccaaagtgcatgaaactgggaccattcagaaaatatttctagcaggagtccacattctatatgctggtaaaattgccactattgctacttaatcttcttctgtcataagaatgactgccactcaaagttccagaagaatctgatttctagttacatgcctgtcctggcagagccagaatttggtctcctagccttcccaagttagagatgggcattcacaagccaggaactacccttcaaccaaggttgaacacaatgggagaaggcaattctccaaaaggaaatagggggactattgaagatagaaaggattctagacattgcttactgtaggcaagatcaatgttgtcatgctgaacagacatgcaggagaatgaagaccaagaaggggatatrgaatttggagataaattagaagttcattattgttggtgacaaatggagcaataatgaagcaccccctaagaatacaggaaataaggaagtaaaatgaccacatgagagttaaactgtaaactgaac

SEQ ID NO: 291496 - DNA, 389 bp, Homo sapiens
gatatagaatttggagataaattagaagttcattattgttggtgacaaatggagcaataatgaagcaccccctaagaatacaggaaataaggaagtaaaatgaccacatgagagttaaactgtaaactgaacactttgggtttggtaactgagaaataggcaaatatacataaaagrgactgaatgtcctccaggccagtaagactgaactggaacctgattgaaggcattactttatctaaagaaagaatgcatccttaagaagagatgctggccagcaaaggagaagcagagacacataagccagagaagagagtgccctgataagatgatgtaaacagccatttttctcagggagacacatccttatcacggaagcagacacaccg

SEQ ID NO: 291497 - DNA, 592 bp, Homo sapiens
attctattggtcaaagcaaatacataggccatccagattcaaggagagggaagaaaatgctaccctctgttggatgaagcacaatttgtggctatctttaattcatcagaggatatatgagtatttacttaaagacactttccactagactttaagctctgagaaagcaggaataatatttagtattgctcactattgttacaccagtgtctagcattggtaccaaatgaatgacagtgtcaacaaatgctaggaaagggtgaagaaagcaaatactttgttctcatgttaccttctccctttcttatgatcatgaaaggcattgctaatggatcacagaactctttcctgtgggatcctaatacgacctcaaaaatttgcttggcacagtgatccaagtagtcctttgccagtgaaaattgtcatgtatgttactcaccatgggcagtagccccggggaagcctttaggaaggtrgaaagaactaggcttaaaaatatgtgtaggatttagaagtgcagaaaaaacgaacctaggctttcactggcttttattgttccttcagatgaatttatacaaggagtctcctcttt

SEQ ID NO: 291498 - DNA, 604 bp, Homo sapiens
gcttagtggcttaagacaaaggaaaggtatttctcaaatacatgacatgctcrtcatgagtttccagggggatctactccatgagcttggggattaaaattgatgaagcctcttgtattagttccttttgtgttgctatagaggaataaccgaggctgggtaatttataaagaaaagaggtctattttggctcatggttctacagactgtacaagaagcacagtaccagcacctgcttttggtgaagacctcagcaagcttttactcatggcagaaggtgaagggggagtgggtttgtcacatggtggtagaggaagaaagggaaatgtcaggcttttaaaaataaccagctctcatgtgaactgatagatcgagaactcattcattgctgcagagatggtaccaacaccctcgtgggggatctgctcccatgacccaaggacttcccactagagctcacttacaacatttggggatcacattttaacatgagatttggaggggacaaacatccaacctatgtcacctctactgcctggaccatcacccggtgctgtggcagagagaaagcaagcatggccaatcatgcttggaatttaaagac

SEQ ID NO: 291499 - DNA, 569 bp, Homo sapiens
atttctatcaacatatatttactgagcacctacttgaagttggtcagattgaaaagcatcacagttgtaacaaaaattattctcttaattgagattctatgcctaaaaagtatatttaagtgatttcttacatagcaaacatctggatgagcttactcttccacctccatctgtttgacatttgaagtcatcaggktcatcagcaataaaggtcaaataaggagtaagtaaaggaagtgagaagtaaagtgtgcatatttactatgcatgacaaacgaagctgcaaaataagaagtggagtaagttggttccaccctggaactaaaatctggaaataaactttctgaagcataatcagacttctgctcccaaaggcaataatgccaagcccattttgattcatctccaaaatagcctctgttatcctcttccaacagcatttctttagaattaaaattgtatttggattaggattaaaaagctaatcaaggacttgttcactgcaggacaatttttaaatcttcaagatctggaagaaaggcagccaagaaccatgaaacataacagtg

SEQ ID NO: 291500 - DNA, 569 bp, Homo sapiens
atttctatcaacatatatttactgagcacctacttgaagttggtcagattgaaaagcatcacagttgtaacaaaaattattctcttaattgagattctatgcctaaaaagtatatttaagtgatttcttacatagcaaacatctggatgagcttactcttccacctccatctgtttgacatttgaagtcatcaggttcatcagcaataaaggtcaaataaggagtaagtaaaggaagtgagaagtaaagtgtgcatatttactatgcatgacaaacgaagctgcaaaataagaagtggagtaagttggttccaccctggaactaaaatctggaaataaactttctgaagcataatcagacttctgctcccaaaggcaataatgccaagcccattttgattcatctccaaaayagcctctgttatcctcttccaacagcatttctttagaattaaaattgtatttggattaggattaaaaagctaatcaaggacttgttcactgcaggacaatttttaaatcttcaagatctggaagaaaggcagccaagaaccatgaaacataacagtg

SEQ ID NO: 291501 - DNA, 588 bp, Homo sapiens
tatgttgccagattgtgtgagaatagtgacattatttctcagtcttatgttaagccccttccatacattggcttatcaaatccttacaagaaccctgcaaagcatgtgtcatattccccactgtatatggaggaaaccgaggttctaagaggttgtaaaatttgcccagattccccagctaatatgttgcaaaggcacaatgtgaatcagtttctgcctttacttctttagcctctaacagtgaaatctatactgtctggaggcagagagggaaagaggaaaaaggaggagagaacaggagagaagggaactggggcaggagaaaatggatgtttgaagggtaggcaaaaatataactcagagcaatgcaaactcactaactaggttttccactctgtataatttaatctatagtagcatctggtggaaattgttagtggtcaactcgtggaactgccagcaaagcttacattttgraagttgagtggagcatacccgttcgcttggtcttgggatgagagttgggaaaagatcaaagtgagagaagacattcaggaaacacatttctttaactgcctgcaggaggaa

SEQ ID NO: 291502 - DNA, 507 bp, Homo sapiens
taatcatagctgtcagggtcctttcagtaaacagcaagctgttgacatacaaaatatcttctgtatttcatggaaaagcaaaagggggaaatggtaaaatatacaagtcatcaaagtaaatgcttactagagtcaaaatagaatgttgcatggccttactaaattcaaggcaatgtagaatactgaagacattggaaatcctcaagagagcatttttatatttagatatagcttatattttttatatttagatacagctcttgtgaggaaaaatgcagaataagtacagacgcagtgatgacaagagatcactgataaagggaagatgtstaaactctaatgcaatgtttatatgtaattgtaaaatatgtgaggtatgcatgtggttgactcttcacctttatagatctgtcgattctagtccataaatagggtaaacagggcttgggctggtgggcagagttgggacttagagtcagagaggtcgtctggaatccatacattacc

SEQ ID NO: 291503 - DNA, 562 bp, Homo sapiens
acactgaccattatgtttacaacttttatttgtcaatttacctcaataaaacaggaaaaataacaacataaagtgaaaaaagattattagttttaattgtatggacggtaagattacaatagtagtaatagtagtagaagtagcagtagtagtaaaagtaataatagtttacatttattgaatgctttctttrtgccacttactgtttgaagttctttatgtataataactcattgaatcctcatttcaagccaaagaaaaaatctactgtaattaccccaaaaaacagaagtagaaagaggctaggaaatactagcatacggatgatttatcttaggttcttgtaggaataagaccatttaaaaattattcttatttatttttatgaagttctttgtgtgctgatatatatattaaactcaatacattttaaaaaatatattcattcatgtgtttgaaaattttttggctgaaagtatttttatataacttgaaatgtgaaacactaatacttaatgaatacccagtccaggggtgcattttctaccatgaggaacatggt

SEQ ID NO: 291504 - DNA, 562 bp, Homo sapiens
acactgaccattatgtttacaacttttatttgtcaatttacctcaataaaacaggaaaaataacaacataaagtgaaaaaagattattagttttaattgtatggacggtaagattacaatagtagtaatagtagtagaagtagcagtagtagtaaaagtaataatagtttacatttattgaatgctttctttatgccacttactgtttgaagttctttatrtataataactcattgaatcctcatttcaagccaaagaaaaaatctactgtaattaccccaaaaaacagaagtagaaagaggctaggaaatactagcatacggatgatttatcttaggttcttgtaggaataagaccatttaaaaattattcttatttatttttatgaagttctttgtgtgctgatatatatattaaactcaatacattttaaaaaatatattcattcatgtgtttgaaaattttttggctgaaagtatttttatataacttgaaatgtgaaacactaatacttaatgaatacccagtccaggggtgcattttctaccatgaggaacatggt

SEQ ID NO: 291505 - DNA, 558 bp, Homo sapiens
atcttgttcacaaatgctaatgtatccccagtgtctaggacaatatctgccaaataatatatgcctagtaaatattttatgattaactaaggcttcatctacatggtgtacaatatttaggaagaaaataagatacttctaatagcagggtaaaatttccaaacaagtgtctttctgtggcttttactatgacccagccaacccaaataagcagaattgtagaggcagcatatgattcagcccaactacttcattcattctttcaacatttgttgatggtcaactatgtgttagttactaagtggaagaaaaagataaattaaaaaaaaacagtggcttctctcaagtagctcatcattaacttgcaaaaaaataaaaaataaataaataggtaattacatcayagtagtaagtacagtaataaagagtgaacacaaagaactgttagagcacatgggaagacaaaacagcaaacctaaactcagaaaaaactaagaaggattctcagaggatgtgacatctgtgggggttactgagggtgtggcacgccattaagat

SEQ ID NO: 291506 - DNA, 631 bp, Homo sapiens
attaatcgataaaatcataatgggtaaataggattatcccagtgggaaagcactttccagggagagattagcaagtacaaaggccggggacatgascaagtctgagaccttcagggacatgcaggtcatgcagtttgtttaggacaatagacatgtgaatggaagaaagactggagaggagaggaggtggggtaggtggagagtccaggatgaatgctatctcccgggagaaatgtggatccaccagggctaggtcataaattcctttagagagaggatctgttgaagggtcctactacttaatgtcttaaaaaaattcctctgaaaatgtaaaccaaccaatttgatcaaattggaaatacttagcaaatatcacagtcatatgactatcagaacttctataaatgaataacttcaatcacataagctgaagaaaacatgaatattcccttctcatagaatttgctttttgtctctgatgacaatcattgagtgcaaggcctctactatctctaagaaaaagagacaacatggtatctggaatatttcatcttatacatttagatatgattgcagcatcagtagattagtgtcaaaatgttctgggaatatttacttaatcccaggtatt

SEQ ID NO: 291507 - DNA, 2353 bp, Homo sapiens
attaatcgataaaatcataatgggtaaataggattatcccagtgggaaagcactttccagggagagattagcaagtacaaaggccggggacatgagcaagtctgagaccttcagggacatgcaggtcatgcagtttgtttaggacaatagacatgtgaatggaagaaagactggagaggagaggaggtggggtaggtggagagtccaggatgaatgctatctcccrggagaaatgtggatccaccagggctaggtcataaattcctttagagagaggatctgttgaagggtcctactacttaatgtcttaaaaaaattcctctgaaaatgtaaaccaaccaatttgatcaaattggaaatacttagcaaatatcacagtcatatgactatcagaacttctataaatgaataacttcaatcacataagctgaagaaaacatgaatattcccttctcatagaatttgctttttgtctctgatgacaatcattgagtgcaaggcctctactatctctaagaaaaagagacaacatggtatctggaatatttcatcttatacatttagatatgattgcagcatcagtagattagtgtcaaaatgttctgggaatatttacttaatcccaggtattwtgcttgctatgagcatgctattgagcctttccatgactcattcctccctttattttacttctgttttcagggatttcagtctcaataatttggggggcgttagcatatagcctttgtctcaatctctgtgttcttgggaattctggtaaagatgggtaactagtattactattgccactgctcttcctcttactcagatttcatttctttgggttcaccaaccattgctttcatggctgattatcagctcttcactcccctactcacaaaacaaagcttatttctctattttgtgagtcaacatctttggcccagtacttcccttcttttattgccactgccagagtttctcccttaattcttactatttgctttcagatctcatctggtaatttgatctaaggtaatatgacaacaagtgcaagtgacttgacacatcacctattggagatactatatttgaatattcatagwagttttctgaaaaaagagccccaacttaactagaaaccatgggttggcaaacttttcttgcaaaaggctagggattaggggattaagtattttaggcattgwgccactacttttggggttccatagagtgccctgggagacctatgagtattggatagtacatgwgttctggatgccttcaatggaaacagctttgccattatctgttttaaatattgggccttaaaaagtctccaaaaacccatggactagaagactactaaagtatttgctaaatctaaaatattatggggatcaataaaatgataaaatctgcatgtattacatgatcctaaactgtcttataatacattctcctctttaattcatttcaattaatccactttatggatgccttgatttcactcagtcattttgatgaatgtctcagatgtaagtataaaacagggcttggcaaacctttgttgcaaaggagcagacagaaaatattttaggctttgcaggcaaagaggcaatgttcacattcttcaggcaactgttctcacctaaaggctaataacttttaaaaaattttttacattaaaaaatcttaaaaccatccttagttctcaggccatgcaaaatcacggggcaggccagatttggcctatgggccatagtttgctgattctcagwgccactacttttggggttccatagagtgccctgggagacctatgagtattggatagtacatgagttctggatgccttcaatggaaacagctttgccattatctgttttaaatattgggccttaaaaagtctccaaaaacccatggactagaagactactaaagtatttgctaaatctaaaatattatggggatcaataaaatgataaaatctgcatgtattacatgatcctaaactgtcttataatacattctcctctttaattcatttcaattaatccactttatggatgccttgatttcactcagtcattttgatgaatgtctcagatgtaagtataaaacagggcttggcaaacctttgttgcaaaggagcagacagaaaatattttaggctttgcaggcaaagaggcaatgttcacattcttcaggcaactgttctcacctaaaggctaataacttttaaaaawttttttacattaaaaaatcttaaaaccatccttagttctcaggccatgcaaaatcacggggcaggccagatttggcctatgggccatagtttgctgattctcag

SEQ ID NO: 291508 - DNA, 594 bp, Homo sapiens
tcatgttttcccagaagtcatatgcctacattttatgatccagagcaatggttttcaaaggctgaaaaacatttgaccagcagcagcacctggaccagcagcacctggtggtgtcacctgggaacttgttagaactgtctggcasaaattcagattcttgggactcactcagaccttctgaatcagaaacgctgggggtagggcccagcaaactgtattttcacaagatttccaggtgatttgatgcatactgaaggactggctcaggactagaggtgggggctcaattaacagcttaaaatgaccagtgcctacaacagagaagtatgaagcttgctcctgacctcactgcattctccaatctaactcggtggaccatcacagatgcaagagaggttacaaaaactgcaaggttttgatagcagttcaaaggaatgcttcacacagactttgccaaatgtttacctttaaatcccttttgtgcccccaagtttccacctccttctgaccaattccaaaattgttctgctgctttttcacctttgtgaattccaaacaaagcagtgcttttgaagttaatgcaagtaataacta

SEQ ID NO: 291509 - DNA, 623 bp, Homo sapiens
cccctttgtaatggccgccagggctaatgcaaggttttgagttccattattttcatatctctttcttttttaggcagccagtcacagatgatttttaacaagaagtacaggatttatatttaagaagtgcataatggaaatcgatggctttttgttgagaaaagmacagtgtcaggaaaatatctctgccactctctttccccctgtcttgtcgcagtggtggaaattttacatttgaaagtgaaaaggcttaagatataattttttaatcccatctttcctgcccacttgcatctcttccaaagcttgtcagggccagatctggaatagcaagagccattaaaaatttggcatcttgcactccgttttttggaataaactcagtgtgggccaatttatggtaaattattctcttcgtgtgtgaatttccttttctctcttggcaaattcatgcttgcttctacacccctgcacacagatcttaaacacacacatttattacagaatctgtgtgggatatgtgtgcaagtgttaaagtgtgtgcccatggctgtacccacaaatgcatatgcacatatttgcacctatgtgcctatatgataagcaaattgacttaaacagtt

SEQ ID NO: 291510 - DNA, 541 bp, Homo sapiens
aaacagctcacttacttcacaagttgttgctacaaatttctcagaatatcaataaagaagtaaatgcatcacattcacaaaaatacaaccatatgttgttattagtatttttcctacatggttaaatattcaaatatttaaagatacattttacagtagttctataggacatgaaaattcagcatctaaaacctgtaaatgcattttataaaagcttttgcagtgttgaccatttgatgtcatcatgagcagtaaccaaccctacctaattaaaaagccttaatgagcttactacacaaggaagtctaggcaatcaatatgcattcttacaargagttcattttctccattttccttagcatttatttagcaaataatctacaatcacttgccaagtatatgccaagcactgtacctagagctggcaacaaaagtattaataagactcagtaccttgttcttataaagctcacagcctagtagggaaacaaacaatccaattactatatttccaagtgttagcaaggcagtaggcaaagca

SEQ ID NO: 291511 - DNA, 584 bp, Homo sapiens
tactgccccagctaaacccagggtcggggaaactttgaagattgttgtaggaaatgcaagtgcaaatctatttagatacttggaacctttggaaactcagtttgggttacactgatttccctgaagttaagaggactctcaaattaaccagggacaaccctaaataattttccaatgaggctgttattactctgggtagaacctttgaaatgttataaaatcagatattaccttttagcaaaccaaaaggaaacacagtaactcctgagttcartgccctgttaaggacaagcgggtgatttgactgcaacatgagtaaaattgcaaagcaagaatatatagagacatgttctctgttcccattgtggagttattagtcccaacaaaacaaggagcagaaggaattccctattactccacataatcgattcatgaactactttttaaaagcctcaaaacatttgaatgattttctttttctcccttatgtagcactttctacaaactgatgtaaatgttaagatttgctagagcatgtaaatgcatccagtctaagaatgcactggaaacagaaaccagagtgg

SEQ ID NO: 291512 - DNA, 584 bp, Homo sapiens
tactgccccagctaaacccagggtcggggaaactttgaagattgttgtaggaaatgcaagtgcaaatctatttagatacttggaacctttggaaactcagtttgggttacactgatttccctgaagttaagaggactctcaaattaaccagggacaaccctaaataattttccaatgaggctgttattactctgggtagaacctttgaaatgttataaaatcagatattaccttttagcaaaccaaaaggaaacacagtaactcctgagttcagtgccctgttaaggacaagcsggtgatttgactgcaacatgagtaaaattgcaaagcaagaatatatagagacatgttctctgttcccattgtggagttattagtcccaacaaaacaaggagcagaaggaattccctattactccacataatcgattcatgaactactttttaaaagcctcaaaacatttgaatgattttctttttctcccttatgtagcactttctacaaactgatgtaaatgttaagatttgctagagcatgtaaatgcatccagtctaagaatgcactggaaacagaaaccagagtgg

SEQ ID NO: 291513 - DNA, 584 bp, Homo sapiens
tactgccccagctaaacccagggtcggggaaactttgaagattgttgtaggaaatgcaagtgcaaatctatttagatacttggaacctttggaaactcagtttgggttacactgatttccctgaagttaagaggactctcaaattaaccagggacaaccctaaataattttccaatgaggctgttattactctgggtagaacctttgaaatgttataaaatcagatattaccttttagcaaaccaaaaggaaacacagtaactcctgagttcagtgccctgttaaggacaagcgggtgatttgactgcaacatgagtaaaattgcaaagcaagaatatatagagacatgttctctgttcccattgtggagttattagtcccaacaaaacaaggagcagaaggaattccctattactccacataatcgattcatgaactactttttaaaagcctcaaaacatttgaatgattttctttttctcccttatgtagcactttctacaaactgatgtaaatgttaagatttgctagagcatgtaartgcatccagtctaagaatgcactggaaacagaaaccagagtgg

SEQ ID NO: 291514 - DNA, 628 bp, Homo sapiens
ttgtttgttggttcacgtttctcttgttttcctgtgtgtagtctgtttttgaacctcgggcaaactctggcctcatcattcagtcatgtgtcactgagtcctgggctcatggttcctacagctagcccaggaagcagaagacctgaacataggatattgttcaatttgggtaggagttgtccagtggcagtgacacaagcattagttgacagttttgaccttagatctcaggatggacttgaactttaggaacctcgatragaaagcatctggccaaacccaaggaaacactcttaatgttccttgcttccctaagcttagatgtcagtttacaaagtgagacatgcttgctcattaaagaattggaaaacgtgaaaaaaaataagaaggataaaaggcatccatttgccccaaaagtcaaagaatccaattttggtatattttgtaacaatcttttataagcctacctaaatgttgttttatttgtaatgcatttgcatttaattgaacttataaatctagcggtaaaactgcctgagggaggggaaattcttgtgatgaattacagggttattcccataatatatgataatgattcatgataaaattatttgctttcaagtttcat

SEQ ID NO: 291515 - DNA, 650 bp, Homo sapiens
gcctggtgtgaggaagtgcctgcttgatagtgggctggtgaagtgtttgctttatggtctgcaggttacagggacaatgccaarggcagcagtggagcctggtaaaaggccagatggggccctatttatttggctgtttcatttttctgtagcagcagtttattctaaatattacaacctcctgggacagaagggttacttggtcaccgctgtgtacaaagcaaaagcagtttaggggctgtcatgtagtagatgttagtacagagagtgatcaggagagactggcattaaaaacagtattgagctatcaagtcggtactgtgtgctattgctaggaatatgaagcagtttttgtttgtttttctttgtttttttttctaccctggttctttccctcttgacatagaactttgcagctagaatgattttcaagagtgaatttggccctttgctttagaaaccacctggtattttcaccttcagctgatctaagaagaaacagtaaatctttcccaagagttcactttcctcatgcttcctatctgttagcagccacatattctttgacatcaaccctatgagaacaattgattttcattattacacccttaagtcccttaacgctacaacattttgctcattcccaaatg

SEQ ID NO: 291516 - DNA, 650 bp, Homo sapiens
gcctggtgtgaggaagtgcctgcttgatagtgggctggtgaagtgtttgctttatggtctgcaggttacagggacaatgccaagggcagcagtggagcctggtaaaaggccagatggggccctatttatttggctgtttcatttttctgtagcagcagtttattctaaatattacaacctcctgggacagaagggttacttggtcaccgctgtgtacaaagcaaaagcagtttaggggctgtcatgtagtagatgttagtacagagagtgatcaggagagactggcattaaaaacagtattgagctatcaagtcggtactgtgtgctattgctaggaatatgaagcagtttttgtttgtttttctttgtttttttttctaccctggttctttccctcttgacatagaactttgcagctagaatgattttcaagagtgaatttggccctttgctttagaaaccacctggtattttcaccttcagctgatctaagaagaaacagtaaatctttcccaagagttcactttcctcatgcttcctatctgttagcagccacatattctttgacatcaaccctatgagaacaattgattttcattattacacccttaagtcccttaaygctacaacattttgctcattcccaaatg

SEQ ID NO: 291517 - DNA, 628 bp, Homo sapiens
caagagtgaatttggccctttgctttagaaaccacctggtattttcaccttcagctgatctaagaagaaacagtaaatctttcccaagagttcactttcctcatgcttcctatctgttagcagccacatattctttgacatcaaccctatgagaacaattgattttcattattacacccttaagtcccttaacgctacaacattttgctcattcccaaatgccttttctatgattcttgtcttttattttctcaattatrttgatagccctcctttgcatttcccaggttttgatgccattttccttacactaggccaggtagactctatgtaatttcactgcgcttaacaaagccatcaggataagtgtattatacacatcacagatctcttatcccacattcttgcaaataatgtattcatgacagtactttttcggtgttaacattctgatgtctattattaaactacaccagagtttgaattttgaaaagatactgttatttctacacaccttctcatacatatttaagattcttctgatgttatagttgacatatttattaaattttatattagtctctattagtcatattcatagaagtcattttagctatatgtcacataa

SEQ ID NO: 291518 - DNA, 628 bp, Homo sapiens
caagagtgaatttggccctttgctttagaaaccacctggtattttcaccttcagctgatctaagaagaaacagtaaatctttcccaagagttcactttcctcatgcttcctatctgttagcagccacatattctttgacatcaaccctatgagaacaattgattttcattattacacccttaagtcccttaacgctacaacattttgctcattcccaaatgccttttctatgattcttgtcttttattttctcaattatattgatagccctcctttgcatttcccaggttttgatgccattttcsttacactaggccaggtagactctatgtaatttcactgcgcttaacaaagccatcaggataagtgtattatacacatcacagatctcttatcccacattcttgcaaataatgtattcatgacagtactttttcggtgttaacattctgatgtctattattaaactacaccagagtttgaattttgaaaagatactgttatttctacacaccttctcatacatatttaagattcttctgatgttatagttgacatatttattaaattttatattagtctctattagtcatattcatagaagtcattttagctatatgtcacataa

SEQ ID NO: 291519 - DNA, 471 bp, Homo sapiens
agatttctggatttgtatgaaaatctgaaaaaggaattgaacttaaaaccactttgacattaatgaggggtgaacgcattttcaaagttcataaaaatcataatatcttagatttggaagaaatgttagagaccaaccakcctgtccacctggcttgctctcctaactccataagatgtctagcaagtggttgactgcactgtgcttcaacccctccagagacagagagcttactacctttcaaggcatttcctagtaactaagtttttacatttttggatcagtgagtatcttctattcatggcagaaaacatgttgagctgatcttggctttttgagtgtttcattggtattgagatgggttcctgattcatttgagggccctttataacaaatttaagggcagtttgagactcaacgtatttcaagtgattgaaccccatggcaagggtttcaggtcaccgtggcttc

SEQ ID NO: 291520 - DNA, 524 bp, Homo sapiens
taagtacgtctctaggacaagtagagagcattctttaagcttagagaaaaagcagatttctggatttgtatgaaaatctgaaaaaggaattgaacttaaaaccactttgacattaatgaggggtgaacgcattttcaaagttcataaaaatcataatatcttagatttggaagaaatgttagagaccaaccatcctgtccacctggcttgctctcctaactccataagatgtctagcaagtggttgactgcactgtgcttcaacccctccagagacagagagmttactacctttcaaggcatttcctagtaactaagtttttacatttttggatcagtgagtatcttctattcatggcagaaaacatgttgagctgatcttggctttttgagtgtttcattggtattgagatgggttcctgattcatttgagggccctttataacaaatttaagggcagtttgagactcaacgtatttcaagtgattgaaccccatggcaagggtttcaggtcaccgtggcttc

SEQ ID NO: 291521 - DNA, 507 bp, Homo sapiens
ttaccttgctttgtacagttctttgaatctttaagagctatgtgaaaatatgtattttcctttaaattgaagcatatattaagtggactaataaggcacactttttctgtcagttgctttcagtcatggtctagacggcagatggtgtatgcacaagtggggtgcatgatcagggccaccccagattttgcaaacccttctcatttttttcctttcttgtttctgctcaggaataaattaaaaatcagtcatactattaatagaatattagtaataggcacatatcacagacatatcatctcaagatgaactagtccacctcttcctctcacattttagaaactatattagaatgcacgtgacggagagtgatgctgttacggggatgacattgaaacrgcactgattttttaaaagcgagtcacaaacttctgtactttaatcattgttgatgatgcattacttacctcacacctcaaaatgatggtgagacatacctgaatatcc

SEQ ID NO: 291522 - DNA, 601 bp, Homo sapiens
ttcattttcatttgtttcaagaaaatttttaattttcatcttaattttctctttggcccagtggtcatccaggagcatgttaatttccatgtatttgtatggtttccaaagttctttctggtattgaattcttgttttattccatcatagcctgagaatatacttgatatgattacaatttgaaaaatttgttgagactaattttgtagtctcacaggtatcattttctaattgatcattgggaatgtaatgttgcttgcctggatgctaaagggtcaaagacagcaacgattttcaactcaatggctttgcaattctgtaaagttctttagctctacccaaaccagtctgacttatgacttagtttccttttttccgtgtcttaattcaggctttgtttctatataaaaacttcctttttcttcctatccttaaccaagtgttacccagcctttggagctcagtttagttctcgatgcaggaagcctctcctctgcctctcacagttcacaaaatcaagttcccttgatgaatcccttggatcttatcatctgtttcatgtatatrctatttaccagatgtctccatgctaactgaattg

SEQ ID NO: 291523 - DNA, 564 bp, Homo sapiens
atagaaatgtctgggagatgttgagtgtttttcaatgactactacagtataatgtcacaatggtcaagtactacaggagttagagcactcaagttagaagcagatggagcaaaagtatcattttagaatttaagtgcacagtataaattggaggatcgacaaggccaatgggtcaatgccaagcccarggccagtgcatcacaaatgtggaggccaaaactgtttgggaagatttgagtcttaagaggagagccaagagaagtcctacttcagtggattccaaacagagggtaactgagacctcctgtttaatgaaattacatcctctgcccatctgcaggaaagccccctacacagtcctggtacttaactggccaaatatttacccattaatacctttatttatggaggggtggtgattttaataaaaatataaatggggacacgtaaatcacagccttggtcttcaaagggttttgcaaacctcaaagcattttaaataatatgtctgaattacaaaacattttacttcacaaggtaaaaaaaaaaaaaaaaaaaaaccct

SEQ ID NO: 291524 - DNA, 564 bp, Homo sapiens
atagaaatgtctgggagatgttgagtgtttttcaatgactactacagtataatgtcacaatggtcaagtactacaggagttagagcactcaagttagaagcagatggagcaaaagtatcattttagaatttaagtgcacagtataaattggaggatcgacaaggccaatgggtcaatgccaagcccagggccagtgcatcacaaatgtggaggccaaaactgtttgggaagatttgagtcttaagaggagagccaagagaagtcctacttcagtggattccaaacagagggtaactgagacctcctgtttaatgaaattacatcctctgcccatctgcaggaaagccccctacacagtcctggtacttaactggccaaatatttacccattaatacctttatttatggaggggtggtgattttaataaaaatataaatggggacaygtaaatcacagccttggtcttcaaagggttttgcaaacctcaaagcattttaaataatatgtctgaattacaaaacattttacttcacaaggtaaaaaaaaaaaaaaaaaaaaaccct

SEQ ID NO: 291525 - DNA, 564 bp, Homo sapiens
atagaaatgtctgggagatgttgagtgtttttcaatgactactacagtataatgtcacaatggtcaagtactacaggagttagagcactcaagttagaagcagatggagcaaaagtatcattttagaatttaagtgcacagtataaattggaggatcgacaaggccaatgggtcaatgccaagcccagggccagtgcatcacaaatgtggaggccaaaactgtttgggaagatttgagtcttaagaggagagccaagagaagtcctacttcagtggattccaaacagagggtaactgagacctcctgtttaatgaaattacatcctctgcccatctgcaggaaagccccctacacagtcctggtacttaactggccaaatatttacccattaatacctttatttatggaggggtggtgattttaataaaaatataaatggggacacgtaaatcacagccttggtcttcaaagggttttgcaaacytcaaagcattttaaataatatgtctgaattacaaaacattttacttcacaaggtaaaaaaaaaaaaaaaaaaaaaccct

SEQ ID NO: 291526 - DNA, 613 bp, Homo sapiens
tactaagaacccaaaatggtttttctcccccggagccacaatgctctcagctgtggttctctgcattcacagcttcccagcccctccccttcccacagccccactcaaggtcccaatttaactcctgcattttaatccctttaagcatccatttgttcctttcctccaatcactttcagtgagactttacgtctttggcaaggggccagaggtggttttgtcagaattaatttttttttcaagtatgaagtgtagagtgttgagcaagaaatccagttttcttagttttgaggtgggagatcagggtgaggtacactgagttttttatgtattttctaagaattaaggcaggtggggtgagggtggggagcagttctgattgagctgtggtaggattcccaggagataatcaggtacggctggtttggggtgactggcaggctgaaggctccatcagtcagtctgtaggaagggctgggaaggggcctttaaatcatatcctaaagaaggagaaggtcagcaccatgagttttgtctcaatgactcagttatyggagggctggggaggtggttttgagcacactattctactgctgagtttgctcccaggaaa

SEQ ID NO: 291527 - DNA, 617 bp, Homo sapiens
tcttttttttttctctcaggccttgccctactctaatttcaatcctctctaatctttattttctactttatacttgtagttttactattctctgctccccttaatttctgtagaacaagataggatataaataaacagatgtataaataaagagtgggtttttgaaaaatgattgacarcttgaattgaaagcaagactcctgttgtgaaagaagtagagaactcagcccaaattggtaacggtttctatcagtagccaaaatgggaggatataagactcaaaccagaaaacagttttctccctgagactccaagagtgctagaggaaaaacagagaggctactgtgaagacctgcagccttaagccctgagactcacctactaaataggtgcccagcaaacggcgcattacctgagaattttttccttgaactttgactcccaaattcattcccaccacagtgattactagttgttcatagaacagaggtgtgagaagaactgtgggtgatataccaggaggaacttcaggaaagccgtttggaggactcattcttgatgccaaaatccctccctactccttgcgtttgagtatcaactgctgatctccaggagaa

SEQ ID NO: 291528 - DNA, 617 bp, Homo sapiens
tcttttttttttctctcaggccttgccctactctaatttcaatcctctctaatctttattttctactttatacttgtagttttactattctctgctccccttaatttctgtagaacaagataggatataaataaacagatgtataaataaagagtgggtttttgaaaaatgattgacagcttgaattgaaagcaagactcctgttgtgaaagaagtagagaactcagcccaaattggtaacggtttctatcagtagccaaaatgggaggatataagactcaaaccagaaaacagttttctccctgagactccaagagtgctagaggaaaaacagagargctactgtgaagacctgcagccttaagccctgagactcacctactaaataggtgcccagcaaacggcgcattacctgagaattttttccttgaactttgactcccaaattcattcccaccacagtgattactagttgttcatagaacagaggtgtgagaagaactgtgggtgatataccaggaggaacttcaggaaagccgtttggaggactcattcttgatgccaaaatccctccctactccttgcgtttgagtatcaactgctgatctccaggagaa

SEQ ID NO: 291529 - DNA, 617 bp, Homo sapiens
tcttttttttttctctcaggccttgccctactctaatttcaatcctctctaatctttattttctactttatacttgtagttttactattctctgctccccttaatttctgtagaacaagataggatataaataaacagatgtataaataaagagtgggtttttgaaaaatgattgacagcttgaattgaaagcaagactcctgttgtgaaagaagtagagaactcagcccaaattggtaacggtttctatcagtagccaaaatgggaggatataagactcaaaccagaaaacagttttctccctgagactccaagagtgctagaggaaaaacagagaggctactgtgaagacctgcagccttaagccctgagactcacctactaaataggtgcccagcaaacggcgcattacctgagaattttttccttgaactttgactcccaaattcattcccaccayagtgattactagttgttcatagaacagaggtgtgagaagaactgtgggtgatataccaggaggaacttcaggaaagccgtttggaggactcattcttgatgccaaaatccctccctactccttgcgtttgagtatcaactgctgatctccaggagaa

SEQ ID NO: 291530 - DNA, 648 bp, Homo sapiens
atttatattgtatgttaggccatttttcaatcacttctggttagtgttgactgttgactattgggttccaggtcttagtaagatcatagattaatgaactgaagtagtaggggaatgctttataggctgtttaaaattgtttgctaatttaatgtgctgaaataaatgttcatatatcaaatactgaacaaatcagacacacaaaaacaaaagctagtcatggtttttcatatatatatatatatttaatacaaaatatttatgtatgtgttggtaacactgcacattgatatatttgatgtctgtatatgaacctgtacctgaaacctctgtaagtttggtcaacccttcttygtctcatctccctgtgtctcaaaaagcagaggctatgttgtccccaacagtaagtgcttaaagcaactgataaaggtccaatgggccatgattaaggcccagttttgatgactgatgctcttgcaatacttgcttactgccctttctctctgcatctgaatcaactgagaactgtcaaatttaaaacgttgtacaaggatgtctttctcccattccactgcaatgcatctgtaaattttaaattctaatggcttattcatacttttcgaaagaaaaaaacagtctgctgccaaa

SEQ ID NO: 291531 - DNA, 1081 bp, Homo sapiens
ggcctagtaacatgaatgcctgcaattgacaaaaataaagcatggtgctcatcattcctcaccatttgcatcctaagcacacacacagtrgtcccagggccccgtctcctttcccttgacgatcacccctggttctcaggatggggcactgtcatggtaactttctgatcctgaatgagatgatcttgacccagggagtcactgaactcagtatcccttgctaagacaggatacctccctttactctttctcctgattctgacttccttccctttctcttcctcttccccattcttccactgtcatttttttggtcctcactccttccagagagctcagtcatactctgtagggatgatgcacacctctatctacatgctccccacatgctattctagatgtggaggtcagggaaggcctctgtagactggacattctgggctgaaacctgaatgaagcgatggagcaagatatggagaaaggcatgaaatctaccgaggaaacaaactgatgggttctgaaaacagtcattggagaggagtgagcaagggagcaagaggaagggtgcaggatgcagggctggacaaattgccagaggtcagawtgacacatacagaaacatatctaacttagagggtaacaaataaacacaggcaattaagtttgtcaatcttgatcattggaatagttgagaaaagccatagttaaaagacaaatataagcctcaaataaccatttttatcagcctgcwtgttgacatccatgtcatcctctggtagtgtcccctctgggggctcaccttgtgccatgtcatcatgaacatcattctttctctttgggccacagcatttttatgcagaagtcaagccattatcctcatttagcatcccatgagaggaccagtttctctctagaaaggttaacttccacagatattcaagattaagagaggtggggtccaaaatccactccttacccaacacatgtgcatgcacacgcatacacacatgcactcacacacacacacacacacacgcacgcacacacacacacaagaattgttgaatgtaataaaagttgt

SEQ ID NO: 291532 - DNA, 477 bp, Homo sapiens
tgacacatacagaaacatatctaacttagagggtaacaaataaacacaggcaattaagtttgtcaatcttgatcattggaatagttgagaaaagccatagttaaaagacaaatataagcctcaaataaccatttttatcagcctgcatgttgacatccatgtcatcctctggtagtgtcccctctgggggctcaccttgtgccatgtcatcatgaacatcattctttctctttgggccacagcayttttatgcagaagtcaagccattatcctcatttagcatcccatgagaggaccagtttctctctagaaaggttaacttccacagatattcaagattaagagaggtggggtccaaaatccactccttacccaacacatgtgcatgcacacgcatacacacatgcactcacacacacacacacacacacgcacgcacacacacacacaagaattgttgaatgtaataaaagttgt

SEQ ID NO: 291533 - DNA, 477 bp, Homo sapiens
tgacacatacagaaacatatctaacttagagggtaacaaataaacacaggcaattaagtttgtcaatcttgatcattggaatagttgagaaaagccatagttaaaagacaaatataagcctcaaataaccatttttatcagcctgcatgttgacatccatgtcatcctctggtagtgtcccctctgggggctcaccttgtgccatgtcatcatgaacatcattctttctctttgggccacagcatttttatgcagaagtcaagccattatcctcatttagcatcccatgagaggaccagtttctctctagaaaggttaacttccacagatattcaagattaagagaggtggggtccaaaatccactccttacccaacacatgtgcatgcacacgcatacacacatgcactcacacacacacacacacacacgcacrcacacacacacacaagaattgttgaatgtaataaaagttgt

SEQ ID NO: 291534 - DNA, 618 bp, Homo sapiens
gtccttctctattgacctaccaaatatcaaggagtctttttcttgtttacctcccttggtctggtcatcaatcagtcaactgataaaaaggagttgttttcctcatatttttaattcattcccttgttcctccaaaagaacttgcaattcccttttcgtaacctttaacatatcatatttatttgttcatgtctgttacttgaataagaatctgaaattcacaaggacaagaactgtggtttccctttgccccagtttctaacactttacctgacatggagtaagtagttgatacaggttgtttatttcagcttctgaatgttttggtgcactggggyatcataataatagtcatcgtaagtggaatgtactaatgaaaaagcccttttaagatctctgccttaaccacgaaagatttaccaaataaatttaacaaatctcaaatctcatagggtaatccatgatacaagcaccaaagaaagaattttagaaagttgcaagagtaagcgtctgtcttcattgacacttatttccatgagacagctcaccatcatccagatgactgtcctgggaactttattatgtggattctccagctccctggagcaccttatttgg

SEQ ID NO: 291535 - DNA, 558 bp, Homo sapiens
atccatgttgatgtgtgaatctacgtatggatcattgattttttacagctttggaatatttgtcaagtaattataccaaattttattattcatttaaccatcatggatatttggattttttcaagctttttcttattctgagtaacattgttctgatcacttctatacttgtttactggaagcatatgtacgagagtttcccttggagagaaatcacccttttatacctttttcgtatattaatggttctgtttatgggacccctattcttttccatttctctatttttctrtccccacacttaaatgttgcattgcgtaattactatgttttattatttgatggggcaagtcccccagctctgttcttctttaaacctgacttggctgttcttagctgttaattcttccatattcatttcaggataagctcattaaggtccttgaaaaatcctgttaagattttggttagaatttattaaatatgtagatcaattatagaatcattaacatgtttacaatagtgacttttcctgttgaatatgctgtccatgaatat

SEQ ID NO: 291536 - DNA, 590 bp, Homo sapiens
ataaaaggcctgagagtggctgagagtgggcttggcctagtttttacacagctcagagggatgctrtaagatccctgaggttcatttccacagtcccagcaatacatcctgcttagctcagagtaggccctaaaattatatttgtttagtggccctgaaccgcttggccatgacaagtctggcatcgcaggcaggctcagaaatatccatcagcccccagtaagaacactggtcccagagtggccagtgccattttccctgccctcattctgcaccaaagtgaagaggaggacagaatgtgtttgttcaaaatgctcccagtgtacattcaaaatccagcccctactaagacccctaggtaaacaaagcagggcttgcagaattctgtgtaggtgacatacctccaggtgttcccttatccttagcttgacatcttttaacagaggggcaaaagttgatttctgtggccagctggtgactctcagaagactctgtattcatctccccacctagactgtgagcaattcacaaagtacatgccccatgtgcttgcttatgtgaattctgtgacataaaaagagccacaggct

SEQ ID NO: 291537 - DNA, 590 bp, Homo sapiens
ataaaaggcctgagagtggctgagagtgggcttggcctagtttttacacagctcagagggatgctgtaagatccctgaggttcatttccacagtcccagcaatacatcctgcttagctcagagtaggccctaaaattatatttgtttagtggccctgaaccgcttggccatgacaagtctggcatckcaggcaggctcagaaatatccatcagcccccagtaagaacactggtcccagagtggccagtgccattttccctgccctcattctgcaccaaagtgaagaggaggacagaatgtgtttgttcaaaatgctcccagtgtacattcaaaatccagcccctactaagacccctaggtaaacaaagcagggcttgcagaattctgtgtaggtgacatacctccaggtgttcccttatccttagcttgacatcttttaacagaggggcaaaagttgatttctgtggccagctggtgactctcagaagactctgtattcatctccccacctagactgtgagcaattcacaaagtacatgccccatgtgcttgcttatgtgaattctgtgacataaaaagagccacaggct

SEQ ID NO: 291538 - DNA, 563 bp, Homo sapiens
aagaacactggtcccagagtggccagtgccattttccctgccctcattctgcaccaaagtgaagaggaggacagaatgtgtttgttcaaaatgctcccagtgtacattcaaaatccagcccctactaagacccctaggtaaacaaagcagggcttgcagaattctgtgtaggtgacatacctccaggtgttcccttatccttagcttgacatcttttaacagaggggcaaaagttgatttctgtggccagctggtgactctcagaagactctgtattcatctccccacctagactgtgagcaaytcacaaagtacatgccccatgtgcttgcttatgtgaattctgtgacataaaaagagccacaggctgggaatctggaggcttctgaccctggtctaaatgccaccaattgaactctaaagccagtgacatttagagttgaaagaaactttagagatgactctgttccaacatccaccttttataggtgaggaaatggagatgaggagaagtgaggtgcataacacggttatgcacttgacccagcagagtcagaagtaaa

SEQ ID NO: 291539 - DNA, 592 bp, Homo sapiens
gtctcttttcttctgccccaatctttcttccactccagaatctctccctgtggaccccagtgtgactttcccatccaagtcttctgatttcctggtgctccagccctttgtccacttgcccaccaggcataccttctaggacaggggctctgtttattcccaaacagggccacgtacasccaaaatagacttttgggtgcagcagtaatttgccctggggctaggtcccagcaacatcaagtctgccatggaagacagagaaatattcatgacgagttaaagttatgcccacagacaaggctgatggtccagacttgctgatcatgtgtgacccgtccgaactctccctgtgtcttgtcatcactccgttaatctgcacttgtttatcggtttttgaatgtgtgtcctgtctgcatctacaacgtgtgcctgtcacctcctgcctgcccttgactcccaaaggtcagcctcagagcctctttttcccttgagctctctctggggcacacagaggagctcagtgcagggaggagtctgcctttaccccagcccagctgttccatgttcaataacttggtctgagagcatccac

SEQ ID NO: 291540 - DNA, 529 bp, Homo sapiens
ttgttatttttatgatttatctttcaatastgtattcttccacacattactctaagcaaattcagagatatatttgtatccttctgactcttcgaggctcagttccagtgttgctcctctgaggcatcaccaccatgaatggagtactcatcaaactgattacagccagaggtgtaccctgcctgacaatatactggaatggacacactaattgttcatagttaccctccattctgattgttcactcctctgttgtagttattggtgcctgagtcttacccgattacaattcattgcattcatgcctgcctcctttggtagcaaaaattactaggatttcctagaaagccgaaaccagaccaacccttacacagctttacattccacgcagccacagcctcaatgaaaatttgctaaattaaatgcataaatcagtgtctctcagccctggataagcatccaaattacctttacagctttttcagatttgttaaaaatacaggttgccaaattatacccaaaactcagt

SEQ ID NO: 291541 - DNA, 529 bp, Homo sapiens
ttgttatttttatgatttatctttcaatactgtattcttccacacattactctaagcaaattcagagatatatttgtatccttctgactcttcgaggctcagttccagtgttgctcctctgaggcatcaccaccatgaatggagtactcatcaaactgattacagccagaggtgtaccctgcctgacaatatactggaatggacacactaattgttcatagtyaccctccattctgattgttcactcctctgttgtagttattggtgcctgagtcttacccgattacaattcattgcattcatgcctgcctcctttggtagcaaaaattactaggatttcctagaaagccgaaaccagaccaacccttacacagctttacattccacgcagccacagcctcaatgaaaatttgctaaattaaatgcataaatcagtgtctctcagccctggataagcatccaaattacctttacagctttttcagatttgttaaaaatacaggttgccaaattatacccaaaactcagt

SEQ ID NO: 291542 - DNA, 529 bp, Homo sapiens
ttgttatttttatgatttatctttcaatactgtattcttccacacattactctaagcaaattcagagatatatttgtatccttctgactcttcgaggctcagttccagtgttgctcctctgaggcatcaccaccatgaatggagtactcatcaaactgattacagccagaggtgtaccctgcctgacaatatactggaatggacacactaattgttcatagttaccctccattctgattgttcactcctctgttgtarttattggtgcctgagtcttacccgattacaattcattgcattcatgcctgcctcctttggtagcaaaaattactaggatttcctagaaagccgaaaccagaccaacccttacacagctttacattccacgcagccacagcctcaatgaaaatttgctaaattaaatgcataaatcagtgtctctcagccctggataagcatccaaattacctttacagctttttcagatttgttaaaaatacaggttgccaaattatacccaaaactcagt

SEQ ID NO: 291543 - DNA, 591 bp, Homo sapiens
gggtgagtggaagagtctgtttcattttatgcttccttgctcttcattctaagatttatttctggaccacaggagtggagggtggcatatgagaaaattatttcaattgtatcataatcttcccaaggtgtgattaaattgaggcatagggaagagaggtgacctcttccagagtcagacaccacttgatttagaaccagagggccctaattttcagcttggagctttatcaattagatatctccaatcctaccacggctggtcttaggtgtagctggccaaactccatgaacaaatggaggaagtgttccaaaatcttctagcakcttcttcaaatcatcttttttaataaattgtggtttagattcagtctacccagagataaaacgatcgactagtctgtctgcatggggagacaagatctacttataaaaataaataaataataacacagggtaaatatgataatttattggtgtgttaccaacaatgaatgctaaagaagtttgaaggaaagaacaggtatggatcaggcaacacagcttagacagattctttgtggtcccacaggacaaaactagcagtagccag

SEQ ID NO: 291544 - DNA, 951 bp, Homo sapiens
atcgcaatagcctttgaacaaattactgcctctagcttcgaaattattctccacattctgcccaccatcttcytatctttttataatccaaatctaattttagttctggtgaaatgttctcttttttccagagttgtatttgctctcttccctgtgatcttattgcatttgtacacgactttattattactcatctttaggaaattgtctttgtgttttcagtttctaactgtgaactcctcaagaatgtggaggctctcttgctaatttgcatattagctcaacttattactgattcctgcacaaaggagatgctcaaaatatttgttgaattgatcccttctactaatgaagatattaatgtattaagwattttctaaaaaataaagtttggaagatttctgtcattattttttatttttttcatcattaccctatctttctgaaactccagtggcatggttagatcttcaggtatcatcctgttggtccttgagattttgttcttttgtaagttgttttctttgtcttgtttcggttaaatgagttttttctcctgatccgtcttcaagttcactgactctgtgctccgttatctccatcctgctgttgaactcagtgagatttttattggaggatagaagaaggtgtttattgtattttcccatcctaaaatttcagtttggttctttatatctttgatttctttgctaaagctttttgtttaacctttgttgcaagagtgttcacaattgcttctggaaacatttgtataatagctactttaaagwctttgtcagctaattccaacatctattgtcatctcagctttgctgtctgttgattgtcttttctcatgtgaattgaaatgtttgtgcttctttctatgctgagtcatttttgacattttgtgaattacttcaagattctttggagtcttgtttaaattct

SEQ ID NO: 291545 - DNA, 548 bp, Homo sapiens
tttttctggcaattcagatatttcatcttggtttggctccattgctggtgtctgatatgatcgtttggggatgttaaaaaactttgatgtgtcatattaccagaattgtttttctagttccttctcatttgggtagactctgttagagggaagatctgggagtcaaaggctgctgttcatattctttcatcccatggggtgttcccttgatgtggtgttctcccctttctcctaggaatggggcttcctgacagcctaactatggtgattgtttttgcttttctggatctagccacccagtggakctactgggctctggggctggtaatggggagtatctgcaaagaatcctgtgatatgatccatcttcaggtcttgtggccatggataccagcacctgccttggtgaagttagcaggggagtgaagtggactctgtaagcatccttggttgtgtttttgtttagtgcactggttttgtgttggttggcctctagccaggaggtggcactttcaagaattcattggctgtggtcctatagggagaat

SEQ ID NO: 291546 - DNA, 531 bp, Homo sapiens
ctgttggtctaagttgggacagaaaatacatttagaacaaataatacacatgcgcacacacacacacacacacacacacacacacacttctacacacttcttaaatacagagtttaacaccctgggatatggtacacacatccagatggcttttggaagcatggaaaaatgatggctacattatgtaaaatggaaatgccagaattgccatgacagatgttgaaagaaggagttgaaaggcccagagaagtaggcgatttagagtagatacgttttgtgtgactatgaatgcccccagaggactctggtccacacaatgacccaaaggaaggtgctgatgggcgggccccagcattaataagttcagtggaggcactcctttctaagccaaggctgacagtagcatttgcagaaatagactcatcaattgcaataggggatgataacrattagaaacaataaaggtcaggtggcagggtgtaaccttcagaatacaggccagtgtagttaccatgatgaatagcatgaata

SEQ ID NO: 291547 - DNA, 491 bp, Homo sapiens
aaattatcatatttgtctttcttctcatacagttgtttcttcatttttttgaaacaactttttaaaaatgtatgtgtaaaattattgttaaggtgtaacactcataaaatcaaataggcaaaaataagaaataaaaatggtctgtaaacagaccactcctaatatttgggtacccttttacattttaatatttacctgaatttttattcataaaaatgagatttttttatgatgttttataattttttgatacatttgtttcattttttctaagttcataattctaatagattatgattttataaatatgagctgtgcaatatttgcagaccaatttaacttcactagratacaaaattttgaagatactatatttcaaattggatatgtttatagttgggtatgtttttagtgtggcatcgcaattctataaacatatgaagtaagttgctcctttaagcaaaactcccaattaaagagaaaattccctc

SEQ ID NO: 291548 - DNA, 561 bp, Homo sapiens
  misc_feature (1)...(561): n = A,T,C or G
ggaggttgcagtgagccaacacatgctgtaaatgtgtcactctggcactcagacactctagcctgggtgacaagagtgaaactctgtcttaaaaaaaaaaaaaaaaaaaaaaanaatatatatatatatatatatgtatgtatatgtgtgtgtgtgtgtgtgtgtgtgtgtgtgtgtatgtatcaaatacatgattgtttcaaatcatttaggaactttaatttttccccataagtagttatatttatttaggtaaatccaattactattttgttgaaatataagttgttgagatgttagcaaatatrataaatccttttacataaaataaaattagtatttgacaactaaaagaagacagttaatttgttgaaaaataaacgtagagataaaaatgacttttttttttcaattattttgctgttttacatctatttataaagaattaatttaaacacttaatactgaaaaccttaattgctcacaggtcacctttagaaggaaatctggccttactttatacactgagaggcacaatttgccatgtagcttaccattctg

SEQ ID NO: 291549 - DNA, 618 bp, Homo sapiens
tccaggcacaaaaagacaaataagacatagtcttacaagagctaaaatatttgctcatatggagatagggagtggaaaagatagaaaatagagactgggaagcataagtagagggaaagggagatgaaggtaaagagaagtgggttaaarggtgtaaatatacagtaagattgtaaaaataaattcaatcttaaatagaagactgggtgtctacagttgaagaaaacatattttactctggtggtagacatgctaattaccctgccttgatcactatgaattatatacatgtaataaaattttacatgttccccgtaactttgtacaaaaaggaaaagagatgaagtcattataacttgaggttttgagaccttcttaatatatagatgaaaatgttacgatgtttatattaaactaacaaatttatgatgcctctgagcccatattcagttcactaataggaattccagtttattagtgtttttcttttcctcagaacatgcacaggctcttgaaataagtcaacacaactctatacagacctgctgctgcctgctgggagaatgagtacttccacagtacttttcaaatcaagctatgcagtttgtcctccccaat

SEQ ID NO: 291550 - DNA, 625 bp, Homo sapiens
cttactttgtgttttacctttgacattcaaatcattattctgtgtaatacttattttaaatatgtgcactcagtgatgttcatttttactttttatatggtgagtcaatttctaagcattatcttccaaataaccctatttttctgtgatttgtttttaaaattttactataaaatttatttcaaatataaaccataatgcaatgtacttctttgtacttattacctagctttaataatcatcaatgcatgaacacatttttatatataaccctcaaatactcaaccacgtcttcatcccctcttgatcctaagacaaacataaatcttatgtcacttcatcgacagtgagtaatcattaatatrtatttctaagatataggtttctataaaccttaacataatctaatattgatttgttatttatattttctcaaatatacatttttggtgctttccaatgtttgataaatccagataagaaatccctgtgtcttacatttgattaatatattgcttaaatcctttaatatctgtaatataatttttgaaaaaatcaggtcattgattctgtagactttcctgactctggattttattttatacaacaccatttaatatattct

SEQ ID NO: 291551 - DNA, 1120 bp, Homo sapiens
aagtcatgttatttcctaaaagcgattaacatcatgcatggatcatttctcaactgagtgtttaggactgtaatttcctggatagcctgaatatcatcaatagaatgccttccatagtgggctttagaagataagtgtctgacaggaatggaaatagatgtatctattcacccttatatcttccattttcattatctaaggrcacttttaacaatggatagacacaatttcattgaataataacatttttagactgaaaaaattaaacaaagtataaaataagtataatatttactgtttttggaatgcgtgaattatacaacatgtatatagacatagaagccattcttatggaaaagaaaaatctaagttataactagcccgtaagtattttagtctatattttgcaatttttaattgtggctgtgtggcctcataactagagacacagggttcacatatttatgtgtgaagaaaagagcagaattaatcctttgggggaagcaatggtgtttcctgttttatcacctcctatgccctgcctcaatttttttattttaattgaagagawtgttttaaattttcttgagtaaatacgtaagagcagtttctaggttatatggcaaacatatatttaacttatatgaaaatgccaaattagttttcaaagtggttgtaccaccaacaacgtatgagaggtctaattccttcacatccttctgaacaattagtattttcagcctttttaaatttttcgccattttwgtgattatgaagatgtacataattggttttttaactgacatttacataataattaatgatattgagtgattttcatgtggttgttggcaacttatatagtcattggtatgtcttatatcatgaagtatctaatcatttgttaattttaaaaatgttcatttttttcattcagttgcaaaatttctttaatatatacatatatttgcaaatatgtattctcagtctaataagacatgcttttctatttaagtgtacaacttcttttcaaaagcaaatggtttaaattttatgttcagtttaacaattgatgaattgtcaatatttattgttcagtgtttcttgttctgtataaaca

SEQ ID NO: 291552 - DNA, 549 bp, Homo sapiens
tgttttaaattttcttgagtaaatacgtaagagcagtttctaggttatatggcaaacatatatttaacttatatgaaaatgccaaattagttttcaaagtggttgtaccaccaacaacgtatgagaggtctaattccttcacatccttctgaacaattagtattttcagcctttttaaatttttcgccattttagtgattatgaagatgtacataattggttttttaactgacatttacataataattaatgatattgagtgattttcatgtggttgttggcaacttatatagtcattggtatgtcttatatcatgaagtatctaatcatttgttaattttaaaaatrttcatttttttcattcagttgcaaaatttctttaatatatacatatatttgcaaatatgtattctcagtctaataagacatgcttttctatttaagtgtacaacttcttttcaaaagcaaatggtttaaattttatgttcagtttaacaattgatgaattgtcaatatttattgttcagtgtttcttgttctgtataaaca

SEQ ID NO: 291553 - DNA, 607 bp, Homo sapiens
attaatagtgttctttgaaatgttaaaaaacaatctagttctattagtctgttctcaaactgctataaagaactgcccaactgggtaatttatagaggaaagaggtttaattggctctgttctgcatggatggggaggcctctggaaacttacactcatggtggaaggggaagcaaacacatccttcttcaaatgggggcatgagagagaagtgctgagcaaaagggtaaaagctgckccctataaaaccatcagatctcattagaactactcacgatcatgacaacagcatggaggtaattaccctcatgatttaattatctcccaccaggtccctcccatgacacatggggattatgggaactactattcaagatgatatttgggtggggacacagccaaagcataccattccacccatgggccctcccaaatctcatgttctcccatttcaaaacacaatcatgcctttccaccagtcccccaaattgacagctcattccaacactaacacaaaagtccaagtccaaaatctcatctgagaccaaaaaagtctattcactgatgagcctgtaaaatcaaaagcaagtgagttccaccctggata

SEQ ID NO: 291554 - DNA, 602 bp, Homo sapiens
ctgctaaacactgaagtgtagattaaatgtacctctagtgtgctctcaaagcacagttattccagttcacaccagaacacagattgttttcttgtctgtatctaccaaaagactctcaggcctgggagtagaggagctatgtctaggttaattatttcataataayaataaagatgatgaaatatgctttttccagggccccagacctcacatggatttagtaataaaattcattaaatgaatgagcaaaggacaaatttgaccctacttatttagggctttgtgagacaagacagaagttcctaaagttctttcctttagttactagaaggacatagtataatcatattagtcattcccattatagtaaaaatgactcatctgtttcaaataagtgagaactcatgttgtattagtctgttctcatgctactaataaaaacatacctgagactgggtaatttataaaggaaagaggtttaattgattcacaggttcacatggctgtggaggcctcacaatcatggcagaaggcaaaggaggagcaaagtcatttcttacatggcagcaggcaagagagagagcatgtgcagggaaaatccc

SEQ ID NO: 291555 - DNA, 578 bp, Homo sapiens
ctctgctaaacactgaagtgtagattaaatgtacctctagtgtgctctcaaagcacagttattccagttcacaccagaacacagattgttttcttgtctgtatctaccaaaagactctcaggcctgggagtagaggagctatgtctaggttaattatttcataataacaataaagatgrtgaaatatgctttttccagggccccagacctcacatggatttagtaataaaattcattaaatgaatgagcaaaggacaaatttgaccctacttatttagggctttgtgagacaagacagaagttcctaaagttctttcctttagttactagaaggacatagtataatcatattagtcattcccattatagtaaaaatgactcatctgtttcaaataagtgagaactcatgttgtattagtctgttctcatgctactaataaaaacatacctgagactgggtaatttataaaggaaagaggtttaattgattcacaggttcacatggctgtggaggcctcacaatcatggcagaaggcaaaggaggagcaaagtcatttcttacatggcagcaggcaaga

SEQ ID NO: 291556 - DNA, 1154 bp, Homo sapiens
ctgctaaacactgaagtgtagattaaatgtacctctagtgtgctctcaaagcacagttattccagttcacaccagaacacagattgttttcttgtctgtatctaccaaaagactctcaggcctgggagtagaggagctatgtctaggttaattatttcataataacaataaagatgatgaaatatgctttttccagggccccagacctcacatggatttagtaataaaattcattaaatgaatgagcaaaggacaaatktgaccctacttatttagggctttgtgagacaagacagaagttcctaaagttctttcctttagttactagaaggacatagtataatcatattagtcattcccattatagtaaaaatgactcatctgtttcaaataagtgagaactcatgttgtattagtctgttctcatgctactaataaaaacatacctgagactgggtaatttataaaggaaagaggtttaattgattcacaggttcacatggctgtggaggcctcacaatcatggcagaaggcaaaggaggagcaaagtcatttcttacatggcagcaggcaagagagagagcatgtgcagggaaaatcccwtcaagctatgtctgcacttcatccaaaaaactaaacaacattttaattttacaggaattattttcagcagaattttaattttgcttattaatttcttagtttctcctacattttgaataacttattttaaattcttttcaggattctcactctggtaaggagaaaactatcgagttcagattctacatgaagaagccctgaactcagcaagtcatcacataaaaatgttaagaggtctatgtctcacaaaaaaattcaagcccaagctggactgagggtaaattagctcaaactcagaaagaattcagctcaacagctaatwggattaaggcaattatccccaagtctagatgtctagcagaggccaataatccaccatattagaagatagccatatctggaacttacatgatttttatttaaccattgccattctggttctggccatgatggagaagctagtatcagatttcactcccataataaacaaatataaaaatgaccaatacatatgaagcaactattttcagacttcaacagtgataaacata

SEQ ID NO: 291557 - DNA, 607 bp, Homo sapiens
aaaaaaacaacttaaagtgcagggctggaaagatgtcttgaggaagaccttcctattcttatgcaaatgagcttctccaaaagggagagaaaagtttaattgctgtttcttccctggggctccatccagccagactcyttggctggggaagggggagacactgtggactcctggcagggaacactggccagcctgctgtataggggggccttgggccatgtgtcccatccccagctgtgagggaaggtgaggtgagccacggctctcctgtttgtcccatgtgcacacctatggccattagggtaaagataagataggtgccattacagtcccaaatagaagaaaaatatcatagaaatgatggagtttgagcgaggccaacattcctaaatcctgagagttttggcaggttgctgggtgcagtttcctctatcctcagaagaagtctgctgacaagaaaaagctcaaaaatgaaagggaaagagattttttggtctgcattttactcacattttctcatatccttgtatggcaccaaaatgatgcagaattttttgctccctacgtcagctaaaatttaggttcttgtctcaatactaggaaaact

SEQ ID NO: 291558 - DNA, 404 bp, Homo sapiens
taacaatttaaaagtgtatccattaaaaagtctcaagatacatgaaacatacattagtagagctgaaaggatgcatagaccaatttcagtttataataaagaccccaccggtacactctcagcgactgatacaactactagccaaaaaatcaccaaggatatagaagatctraataactgaagcaattaatgattttgaattgatgcatataaacactccacaaaacaagagaaatacacttttttttcaagcaaccatggaacatacttaaaatgccaaaagtggagaacaatgtagtagttacctggactaaagggcagacgggtggtgggagggaggtgaaggtggcaataaaggggctacatgaaagatccttatggtgatggaactaacctatatttgg

SEQ ID NO: 291559 - DNA, 404 bp, Homo sapiens
taacaatttaaaagtgtatccattaaaaagtctcaagatacatgaaacatacattagtagagctgaaaggatgcatagaccaatttcagtttataataaagaccccaccggtacactctcagcgactgatacaactactagccaaaaaatcaccaaggatatagaagatctaaataactsaagcaattaatgattttgaattgatgcatataaacactccacaaaacaagagaaatacacttttttttcaagcaaccatggaacatacttaaaatgccaaaagtggagaacaatgtagtagttacctggactaaagggcagacgggtggtgggagggaggtgaaggtggcaataaaggggctacatgaaagatccttatggtgatggaactaacctatatttgg

SEQ ID NO: 291560 - DNA, 648 bp, Homo sapiens
gagaaatgaaaatatgcaccacataaaaacttacacacaaatgttcatagtagcattcttcataatagccccaaaatgaaaacaactcaaatatccaccaatctatgaatggataattgaatatgatctatcctctcaatggaatattactcataataaaaataaatgaaggactgatacatgtttgaccatagaataactcgaaaatcatatgctaattgaaataagccagttacaaaaggccacatgttgtattatccyacgtatacaaaatgtccagtgtagacacatttatagtgacaaagagtatgtgagtggttgcttagagttttgaggagggacaaatatgatgtgatagttaacatgtacaaagcgttcctttgaggagggacataagtgttctaaaattatattttgctgatagttccacaaatctgaatatactaaaaaacattgaatcatacactgtgagtgggtgaatgaaatggtatgtaacttatatctcaataaaattgaaaagaaacttcagaacagagcttgaaaagaaagaggaaacagaatgtgaaaaaacacatactttaaaaatgtctaatcttgtataattttgctttctttatcaaaattatatgtaatgttaaacatttaaaa

SEQ ID NO: 291561 - DNA, 507 bp, Homo sapiens
tcaaacacacgttgcctgcaaaccaatactagaccagactcaactagacagtctggcatatctcattctgtcatatatgtcatatacagatgtctccaacttgcaatggtccaacttatgatttttcaactttattgatggtgcaaarggaaaattttaatcttttccagagctaatgatatgcagtacaatattttctatgctgggcagccgcagaaagccgcaactccagtcagccaaatgatcacaggataaacagccaatactctatggtgtactgtgttgccagaattttgtagatattgtgttttgtgattttgcatctcatcatgtctgcaaaatgaccatctgtgcctcatgctaccaatggaacgaaaaagtggaaggaaggcaattactcttgagttgaaactaaggataatttcccagcatgcaggcagcaagccagcaatggccattgcctgtgatttagggcttttcccagtgcatgatcttgaccatcttaag

SEQ ID NO: 291562 - DNA, 625 bp, Homo sapiens
taacagtccaacctaggtcaagaaatgttttctgtatggtacctgagcatgtcaatgatcctayacatacagaaatgtttataacaagtcataggtggttccaacacttcaaaaggcatcacatcataattttcaaaatgtggaggtcagcagtgaggcagcaaatgccaatactaaaggtgctaaaccttttagggagagatataaaatagatgtgggtgagaaatatttgtcagaacaaatatttaatgttgatgaaacaagcttgttctggaaatttatgctggattgtccttacattcatcaagagtctaagacaatgacaggattcaagggattcagactatataaggctacttttgggtggaaatgtttcagagttcaaattaaagcctttcctaatctacaactcagagaattctagagcattcaagaatgtgaacaagcatatgtttcttgtttattattgccataacaagaaagcctggatggcatctgcttgtttgaagggtggtttttgagctgttttattctttaggcaaaagaatattgtgggcaaaacaacatcttcttcaagatttctctggttttaacaatgtcccagggcatccctagcatataggtg

SEQ ID NO: 291563 - DNA, 625 bp, Homo sapiens
taacagtccaacctaggtcaagaaatgttttctgtatggtacctgagcatgtcaatgatcctacacatacagaaatgtttataacaagtcataggtggttccaacacttcaaaaggcatcacatcataattttcaaaatgtggaggtcagcagtgaggcagcaaatgccaatactaaaggtgctaaaccttttagggagagatataaaatagatgtgggtgagaaatatttgtcagaacaaatatttaatgttgatgaaacaagcttgttctggaaatttatgctggattgtccttacattcatcaagagtctaagacaatgacaggattcaagggattcagactatataaggctacttttgggtggaaatgtttcagagttcaaattaaagcctttcctaatctacaactcagagaattctagagcattcaagaatgtgaacaagcatatgtttcttgtttattattgccataacaagaaagcctggatggcatctgcttgtttgaagggtggtttttgagctgttttattctttaggcaaaagaatattgtrggcaaaacaacatcttcttcaagatttctctggttttaacaatgtcccagggcatccctagcatataggtg

SEQ ID NO: 291564 - DNA, 325 bp, Homo sapiens
ctgcttgtttgaagggtggtttttgagctgttttattctttaggcaaaagaatattgtgggcaaaacaacatcttcttcaagatttctctggttttaacaatgtcccagggcatccctagcatataggtgacttgcatcctggtggaaggctgtgtatttgtaactgaatataccgcactcatttaaccaatgaccaaggcacaatggctacattcaaaggayactatttacaccaaatacttttcacaaactgttgaagcaactgaatctggctgaacacttatagagttttggaaacgttttgaacaatctaaatgctgtccg

SEQ ID NO: 291565 - DNA, 499 bp, Homo sapiens
gtaggccacttgaaacacaaaattatagaagtttatgatagttaaggattttagagtgaattaacaactcctgacctcatgttctaaaactcttctctgggctaatttcacatatacagatttttgtatgaaccattcgggaatattaaaggaaatataaatctgtcatctttctaggctcagtgtccatgcctgtaaaatgaaggagtttgcttaaatgcactctaaaatccttaacctcttagatgtttaaggtttccaatgattttggaaagtttacagccattattttttagactatttttcctgcttgcttctcaattttctatcctgatattcttttttacatatgctggtgtgtttaattgtatctgccctatattctcctraaagtttgtttgtttttcttcattattttgtttctgttcttcagaatgaaccataacttttattttcaacttcactgaatttatcttctgccagtttaaatctactgttg

SEQ ID NO: 291566 - DNA, 640 bp, Homo sapiens
agttccaaaatttattatgtgtcatttagtttgtgtttgactgaaagatgaaagtagctgttatgtttctacttatggataataattctgttacattgtactacagatattaaattaatttctgaccacatgatggaagagtccaaataaaataagctatataattatttaaatcacatatagccttcactgtatttgttttcactataggtacattaaattccatttttatttattgtttttttattctacatgtatttctaaatatcattagttgtgggcaatataaaatttttttgttaagaacatttgaagtcataattaagtcactctattgccaaagtaaagagaggcttctggttatttctgcattccaaatttctcatgtttaaaaatacaraaggacattcttaataatgttaataatgtcactaagttcttagggaacgatagaatgaaatttacagagaagtgtttcataacattttgtgaagaaaatactttgtacctaggatttatgatttgggaaaaaactcaaaaatttgtcttttacaaatgttggtgtttggtagtcatcagtaattatcttgacagggtatatgtttatatttttagcctctatatagtcaaaagtacaaga

SEQ ID NO: 291567 - DNA, 645 bp, Homo sapiens
ttcagactactttttctacaaacaaccatagttgttagtcttatttgtagtatagacaaattttgttcaagcttcctttttatgatgtatctgaaataataaattgttttaatgtcttctttgaatataaaaaatagtagttccaaaatttattatgtgtcatttagtttgtgtttgactgaaagatgaaagtagctgttatgtttctacttatggataataattctgttacattgtactacagatattaaattaatttctgaccacatgatggaagagtccaaataaaataagctatataattatttaaatcacatatagccttcactgtatttgttttcactataggtacattaaattccatttttatttattgtttttttattctacatgtatttctaaatatcattagttgtgggcaatataaaatttttttgttaagaacatttgaagtcataattaagtcactctattgccaaagtaaagagaggcttctggttatttctgcattccaaatttctcatgtttaaaaatacaaaaggacattcttaataaygttaataatgtcactaagttcttagggaacgatagaatgaaatttacagagaagtgtttcataacattttgtgaagaaaatactttgta

SEQ ID NO: 291568 - DNA, 394 bp, Homo sapiens
agatacagaaccaacccaatagcaactcaatgaaaggacagttttgctccccgcaaatggggacaacccacatttctatctggccatattgtctaccgtctcaccttctcagttgacaaactatattcaaaacccctaaaactttgtgtgatctacagatgggaaaagatagaaagtcaaaagccatctgtggaagagaaaagtatcaataataaatggatacccccacaagtcaagagtcacacagataattaccaaagttgtaattatttaaatagtggatcagcccagtaacctctttatgaaaagtccagcaggcgattttccaagtttagaatragtttttaccatataagcaagacgtatttcctgcagagggtatagaagaggaatt

SEQ ID NO: 291569 - DNA, 445 bp, Homo sapiens
aaatttatataaatataatatttcttttaataactatgtatcaatctgtagtctgtacataaatgtgtctctctttgtatagacaaagaaagatgaatgcagggagctgtgaataagttaggaagttctagaaaaaaatagattctgaattaaaaatggaaagaactgaatagcactggaagcacacacaataacctggtagaaaatggtccaattctgagtccctcaggagaagaaaggctgagattttctccctrcttctgtgaataaagcctctcaatgatcttgcctgtaatacaattctaataaaatgtgatgaagaaaataataaattgtctgtcatatttctcctgaacaatggtggtagaaatgagaggtaatggaaaagaaaatgaaggtgaaggggaaagaagtagctgaaagttgctattggagataggcaaga

SEQ ID NO: 291570 - DNA, 879 bp, Homo sapiens
aaatttatataaatataatatttcttttaataactatgtatcaatctgtagtctgtacataaatgtgtctctctttgtatagacaaagaaagatgaatgcagggagctgtgaataagttaggaagttctagaaaaaaatagattctgaattaaaaatggaaagaactgaatagcactggaagcacacacaataacctggtagaaaatggtccaattctgagtccctcaggagaagaaaggctgagattttctccctgctyctgtgaataaagcctctcaatgatcttgcctgtaatacaattctaataaaatgtgatgaagaaaataataaattgtctgtcatatttctcctgaacaatggtggtagaaatgagaggtaatggaaaagaaaatgaaggtgaaggggaaagaagtagctgaaagttgctattggagataggcaagawaatatacctcagacataagtgtattttgaaaatagactgtactttgtattattaataaaaggtaagaactacattatttttttgtaaaatgttaaatatatgacgtttcccttgtgatatatttgttctgctgtatgcttatttcattcatattcataaacaaacacacacatacacacatatgtatatgcaaagtctgtctatttgaaaataacagaactaattaatgcttacatagtttatacccaacttccaaaaatgacttaatagtcttaagtcttaatgatctaagataatttgcctgtaacccattcaccactcttcagagtccctggttctgtaccaccagaaagcctcaggagtattcaggagacattgcacwatttaaatcttaatgacttaaatgacttagtaatattctaatcatgaaatt

SEQ ID NO: 291571 - DNA, 433 bp, Homo sapiens
aatatacctcagacataagtgtattttgaaaatagactgtactttgtattattaataaaaggtaagaactacattatttttttgtaaaatgttaaatatatgacgtttcccttgtgatatatttgttctgctgtatgcttatttcattcatattcataaacaaacacacacatacacacatatgtatatgcaaagtctgtctatttgaaaataacagaactaattaatgcttacatagtttatacccaacttccaaaaatgacttaatagtcttaagtcttaatgatctaagataatttgcctgtaacccattcaccactcttcagagtccctggttctgtaccaccagaaagcctcaggagtattcaggagacattgcactatttaaatcttaatgacttaaaygacttagtaatattctaatcatgaaatt

SEQ ID NO: 291572 - DNA, 431 bp, Homo sapiens
gaaaaccgaagtgtcactttatggtattatttttagattgacttagaacagctgcatagtctttcttcttcatgtactgttttctggaactgtgttcacttgaaggattgaggctgaaacattcaagacatctggatgacatggctggcacttgttgctggctgtagcctgggggtctgctgagactggacagcatgactttgctcttctcatatggctctttctccagtttatttggatttttcagagcatggtggttctgaaaagaaatatttcaagatgtgaaggtagaacytgcaaattttttaggacactgcctcagaattaatcacagcatctcttctgctgtattctatcagtcaaacccaatcacaggaccaggaagatctgagagtagatgaaatagttcatgtttctcagtagagatatgg

SEQ ID NO: 291573 - DNA, 1262 bp, Homo sapiens
tatctagaacacatattcactgacattatgggaataggttttattcatgcagctttcatttggaagatgaaagtccattcagtccagtcatctgttrgagaaaaatgttaactacattgtgtcacttaaaattaaattgcagcttcaaatcaaagaaacagagttagaaaggatgataatgatcccactccttcatgttttcattccctgttagtttattttcccagatatgttaaatataattgcttttgttaaatatcgacctgattttatgttttattgttaaaaattataattataatttatcctgtctggtattttctgaactttttgaatctgtgctttggcatctgtcaataatttggaaagttattgatctcgattattattactgtaaatattgcttctccattctttattwtatctagaacacatattcactgacattatgggaataggttttattcatgcagctttcatttggaagatgaaagtccattcagtccagtcatctgttagagaaaaatgttawctacattgtgtcacttaaaattaaattgcagcttcaaatcaaagaaacagagttagaaaggatgataatgatcccactccttcatgttttcattccctgttagtttattttcccagatatgttaaatataattgcttttgttaaatatcgacctgattttatgttttattgttaaaaattataattataatttatcctgtctggtattttctgaactttttgaatctgtgctttggcatctgtcaataatttggaaagttattgatctcgattattattactgtaaatattgcttctccattctttattwtatctagaacacatattcactgacattatgggaataggttttattcatgcagctttcatttggaagatgaaagtccattcagtccagtcatctgttagagaaaaatgttaactacattgtgtcacttaaaattaaattgcagcttcaaatcaaagaaacagagttagaaaggatgataatgatcccactccttcatgttttcawtccctgttagtttattttcccagatatgttaaatataattgcttttgttaaatatcgacctgattttatgttttattgttaaaaattataattataatttatcctgtctggtattttctgaactttttgaatctgtgctttggcatctgtcaataatttggaaagttattgatctcgattattattactgtaaatattgcttctccattctttatt

SEQ ID NO: 291574 - DNA, 660 bp, Homo sapiens
tacagtcatgtgttggttaatgacaggttatgttatgagacatgcattgttaggtgatttcatcattgtgtgaacatcaaagtatacttacataaacccagatggtatagcctactacacacctaggctatgtggtatggcctattgctccgaggcctgtacagcacgttattatactgaatactgcaggcaattgtaacataagattagtatttatgtatctaaacayagaaaaggtacagtaaaaatataatattttaatcttaagggacgactgtcttacacacagtccatcgcagacttaaatgccattactcagtgcataatcatctcagcagatgcaaaacatttgacaaaattctgctcattcacgatggcaaaacaaacatcctccatctaggcatctactaagagctttcctcagataacgtatttaataaagcaccagaatcactcctgtaaagtttgaaacaagagtaggatgtctgcgatcatcaatatgactcaacgtagtacagaacatcctagctaatgcaggaaatagaaagaaaataaatggaggtggttcttctgttagggctaggttccaaggttaggatgtaaatgcgaaatggcagaaagtcaggttctctttgattacgatacagctggggtagggtc

SEQ ID NO: 291575 - DNA, 554 bp, Homo sapiens
ttctttttacaatcaactgctatttaggctactgatcacacttaacttgcaacttgctttctacacaaattaagaatgccatctagttctcatgtatgagccagcaytgggggtgtacacacgcgtgcgcacacatatacacagcctcctccaccgaaggcatttcctggcacaaggggcatcctaaacttgctccatttccaaggtgtgaccctctatccccaaattcatccctttttcttcatttcaaagttcagcctaatccgctattttgcagcagctatggccatttatcccccttgatttcttgacatcatcttctctgcttctggctggggaacttttgatttgaatacagttgtctgtgtggggatcctgcatgttaatgatgtggtgagctggcagggatgataggtgagagtacacagtgtactttttctagttacgtttcgcctcatcactgctataggggcctttctaaacgcctgccacaccaggagagagacctacagacccaagcttacccgtttctgggcagcctccaggggacaggt

SEQ ID NO: 291576 - DNA, 500 bp, Homo sapiens
gtgcccagtccagctgcgaacccccacactccgagccaggacccagtaagagatcccagcttcctccctcttccaggactggggttccccagattctggacgcacccctcaaacatgctagggctgaaaaaagtcctaccccgccccccagccacgccgccagcctccagcccagccccggaggggcctcctctccagaggctaaaagggaccatgaatggttgccacagtagccttcccccgcaccgcgcaagggtcctcagacccccgaggaggacagacccgcgtggccccgaagggatacctccctctcctcccggaagccagcaggtccccgcagggagtgtgctctcagagggtccccgggaatctggggaagacttggggggtggctggattcgggtgcagcccctcccggggcgggcggaggtcggcgctgcggcgcgtccccggggggcactcacgatggtmacgctggctttgcgcaggtcgcggttctc

SEQ ID NO: 291577 - DNA, 374 bp, Homo sapiens
aaatttgatctcatgattaaacggtgattcaatggctcttggaaactggcacctcagaataaactcgaaaacaccaagtgttccaaatgacatcatctttcaccaagatggctgcttttagsaaacagcttaaatgccaacagcaactaaaccccagtttctcccaggtattttttagcttagtgctggagggcttctgaactctgtcactgtttgtatagcaggagggaggaaatgcttggctttgctcttgagaaacatataggcaatctaaatcattctgttacaagtgatccagtttaatttgcactgaaacttagttctctcacttttttgggatctagtacatgagacaatgagttaaattggaaacg

SEQ ID NO: 291578 - DNA, 568 bp, Homo sapiens
gtgctggagggcttctgaactctgtcactgtttgtatagcaggagggaggaaatgcttggctttgctcttgagaaacatataggcaatctaaatcattctgttacaagtgatccagtttaatttgcactgaaacttagttctctcacttttttgggatctagtacatgagacaatgagttaaattggaaacggattctggaaagctcacttgagggttgaaatggaagagtaaagctagcagggagaagcaccacagggggaaacagatttaacaacattctttcccctttattcagcactgtgatcgaatcttaagagtaggtctggctgccatacctcacaagtttctattgctccctattccatattatcttaaagcttccacttttagagcttattgcaacaggaacattccttccaggcagagcagggggcaaattaactctctcttagcgtcaccmcaaaactaaccgccttggaaaggcggactcacactgcttcaagtcagcagaggggtggagtttgaagcgcctggttttcttaaagggcccaagtcatggttaagct

SEQ ID NO: 291579 - DNA, 578 bp, Homo sapiens
atcaattggttaattgcataaatcttctgagaatgcagttactatgtgcatccatgatgagaagttacagttcatgctgaagagaactgaaaagatttaaaatcacctaagaacaaagtcaatagatattaatcattcgtgaagataagcaacacctgagagcaatagcaagctgactcaatttgattacatcggatatattttcatttgtttcccatgaaatcataatcttatcagaaatacagttactaaagaaaagtattacaggtagtggaggataatgtgggtggtatgatgaaagatactgttcctatagtcaggaaaaaccagccattaattttattgaagtgaaaaatgtataacattaaagttgcagatctgggctttattatcagaataacatcattttggatagaattgagagattctctaaaatgctattgatagacacatttcatttkatagtagcaaaaacactatatttattaatatcatcaccaatctcatcagaagagttttcaagctcacagcagctttcaagctcacagtagcagatacaagtttccaacatgcaattt

SEQ ID NO: 291580 - DNA, 578 bp, Homo sapiens
atcaattggttaattgcataaatcttctgagaatgcagttactatgtgcatccatgatgagaagttacagttcatgctgaagagaactgaaaagatttaaaatcacctaagaacaaagtcaatagatattaatcattcgtgaagataagcaacacctgagagcaatagcaagctgactcaatttgattacatcggatatattttcatttgtttcccatgaaatcataatcttatcagaaatacagttactaaagaaaagtattacaggtagtggaggataatgtgggtggtatgatgaaagatactgttcctatagtcaggaaaaaccagccattaattttattgaagtgaaaaatgtataacattaaagttgcagatctgggctttattatcagaataacatcattttggatagaattgagagattctctaaaatgctattgatagacacatttcattttatagtagcaaaaacactatatttattaatrtcatcaccaatctcatcagaagagttttcaagctcacagcagctttcaagctcacagtagcagatacaagtttccaacatgcaattt

SEQ ID NO: 291581 - DNA, 540 bp, Homo sapiens
tgtaccctaaggaaaatttgatggtaaagctgtcattaccagaactcaagtaaggtcactgggttacactaacccatttggaaaatatcaagccattctgagatctaactctgtttgctaaagattcacagtttttatcatcccccaaagacagtgctaaaacaaacagttctgctgcctgctttgttctgccacctcaggtgacatgcaacagaagcagagcatggagttcctgaacaaagactagaaacagaaaatatagttcttcctggaacaaagaaactgccaataaaaagagaaacacggccaggcacagtggctcatgcctataatcccagcacttttagaggccgaagcaagaggatcgcttgagccccagagtttgcgaccagcctaggcaacagagtgaggctctgtctctacaaaaaaagattagctgsacacggtggtgcgcgcacctgtagtcccagctactcaggagactgaggtgagaggactgctggagcccagaaggtcaaggctgcagtgagcatgagtgca

SEQ ID NO: 291582 - DNA, 614 bp, Homo sapiens
ggggtaaatgagctctgtgtttgattaattctacatgatcctgcttgtagacgctgggggaggagctagcctcctttccatccccctggagtcggaacccagacctgggccaaggaggttcattttcccacgtgtaggaagctgatgggcccctattccctgcaacatttggctccttaggttctctgagtcaccccctgaccctaatcatctgcagcaagggctcagatccatcgggccaacctcacccaagagggcttaatgagcacctggcagctaagtgctttgagatctttcagatgaaaagggctgtcagttgttctggggttattaatgccagggtagtggcggcagcaattactctagacgatcaggacatccagcttcctttgtccttgaagtgagtgcctggttctaggaggaatggctgactgccttsctatatctgccttgggtgctgatgggatgctaacaaggttctttttactgtttgccatcctccctccacagctggacaggtagcactgcagaagctcagtaaattctgaaatactcactctctagggggtgaagtgactctgaagagtgtagaatgacagaagcgagaagccagg

SEQ ID NO: 291583 - DNA, 610 bp, Homo sapiens
ataatttatagagtctattctttttatagagatatttccttgctgctcaaccagcgagcttgctgggtttagaggattaatctttgacgtagtaaatatgctcaagttgtaattcagtctcagggataaagggaacttagacttgtcttgtataagggaaaaaatattaaatggatttgttgaggacccgccgtggtagtccttattgtctcttgtacctcagcattgcagctttggaactgcaagggaccttattaatcttctcatacaatgtccttattttacagatgaggagactgagatttatggtacatgaggtggtggcagatccagggctgaaacccgtgtctcttgactcacacttttgaaactgcactgtgctactgcrcatcacaaactctagcctcacttgcaaggctccccttaaccgccttcccctcggttcttttctgtcccttcctgttgtctattttcggcaaactgagctcctccctggcctcctgtccatgccacacgttttctgcctctgaaacctcctgtaagcactccccctcctcaggctggattgcctttacttttctctcccttctgctccttgcttcctctccaa

SEQ ID NO: 291584 - DNA, 532 bp, Homo sapiens
gctatttttattattgttttgttattactatttaacatatgcaaaaacagagacttargttgagtaacttgccctgtttcacatatacagtaagcaacagagcttaggtttgaatcccagttctgagtagagctccagttttcagccactcttgtagttaggatatggagtgcatgctagggaggggtggtaatttgtaatgagactgccaaatagtttggggctagagtgtaaatggccttgtataccattagaggtttttaaacagaggagtaacaagataggacctgcattttagaaaggcaattccccaaaactaggactgtgtggacaacaggcccactggatcttcccatctcaaagtgaagctgagggttcagcttctaaaatagccagctcttggtcatcgcattcagctccacagttgatccagccaactgagctgcagagctgctctagctggctgcctatgagaagtggaaggaaagagaattggagcaactatcaggttaataaactctgtggagagagc

SEQ ID NO: 291585 - DNA, 532 bp, Homo sapiens
gctatttttattattgttttgttattactatttaacatatgcaaaaacagagacttaggttgagtaacttgccctgtttcacatatacagtaagcaacagagcttargtttgaatcccagttctgagtagagctccagttttcagccactcttgtagttaggatatggagtgcatgctagggaggggtggtaatttgtaatgagactgccaaatagtttggggctagagtgtaaatggccttgtataccattagaggtttttaaacagaggagtaacaagataggacctgcattttagaaaggcaattccccaaaactaggactgtgtggacaacaggcccactggatcttcccatctcaaagtgaagctgagggttcagcttctaaaatagccagctcttggtcatcgcattcagctccacagttgatccagccaactgagctgcagagctgctctagctggctgcctatgagaagtggaaggaaagagaattggagcaactatcaggttaataaactctgtggagagagc

SEQ ID NO: 291586 - DNA, 532 bp, Homo sapiens
gctatttttattattgttttgttattactatttaacatatgcaaaaacagagacttaggttgagtaacttgccctgtttcacatatacagtaagcaacagagcttaggtttgaatcccakttctgagtagagctccagttttcagccactcttgtagttaggatatggagtgcatgctagggaggggtggtaatttgtaatgagactgccaaatagtttggggctagagtgtaaatggccttgtataccattagaggtttttaaacagaggagtaacaagataggacctgcattttagaaaggcaattccccaaaactaggactgtgtggacaacaggcccactggatcttcccatctcaaagtgaagctgagggttcagcttctaaaatagccagctcttggtcatcgcattcagctccacagttgatccagccaactgagctgcagagctgctctagctggctgcctatgagaagtggaaggaaagagaattggagcaactatcaggttaataaactctgtggagagagc

SEQ ID NO: 291587 - DNA, 532 bp, Homo sapiens
gctatttttattattgttttgttattactatttaacatatgcaaaaacagagacttaggttgagtaacttgccctgtttcacatatacagtaagcaacagagcttaggtttgaatcccagttctgagtagagctccagttttcagccactcttgtagttaggatatggagtgcatgctagggaggggtggtaatttgtaatgagactgccaaatagtttggggctagagtgtaaatggccttgtataccattagaggtttttaaacagaggagtaacaagataggacctgcattttagaaaggcaattccccaaaactaggactgtgtggacaacaggcccactggatcttcccatctcaaagtgaagctgarggttcagcttctaaaatagccagctcttggtcatcgcattcagctccacagttgatccagccaactgagctgcagagctgctctagctggctgcctatgagaagtggaaggaaagagaattggagcaactatcaggttaataaactctgtggagagagc

SEQ ID NO: 291588 - DNA, 573 bp, Homo sapiens
gctcctttgatgggaatgctgtccagttcatctccttctagcacagtgtgtagcacgtagtggggcatcagtaaatgtctattagaaataagaagcacacgtccacatgcataccatgattggcggaggraagaaatggtacagatactttctgaactagtggtggatgaatgatggatataatagacaacatttactgagatcttagtatgtagtaggcattttgttatgcactttacatagataacctaattaaatgctttatatgtttagattgtgaaatatgacacattcataagagtgcataaagaatacacatgcatttaatgaataatgcagcaaatagaaacaatcatataatcaccactcagattaaattttttttttttttggccagcaccttagaagccccctgtatgttctttctcatcacagtcctttccccttcccaaaactaactattccgtattttgtgatagtaattctctggcttttcatcatggttttattacctcgaacaatgtagtttggctatttttgaattttatgtgaatgaactcacactgtgtatat

SEQ ID NO: 291589 - DNA, 1165 bp, Homo sapiens
agagagtgggctccttagagaccctttgcagaaagttcttttcaaacaggtgtttcatgtttagcactctcttgtaatttgattctagccttgagctggaaattcatagccatctatgcaattaggatagatgcctctattcctcacttttcaaagaccttccaaacccaacacattaccacttaatgtccccataaaaaaacaccctttctgaaagcatcctcctctacaaagagtgatttaaacctgttatcaaaactrggttttcaaaattagttctaacatcgttttcccctgttgtaaaaatgtgccttaaaaaaacactacctctgttctccattaaaaaggactttaaacaaggacttcaacccattaatgaaaataaacactcgaccaagtgttcaagatttaaaaccagtcagataatactagggaaattggtcatctatcacaaaagagatgtgatacagtgtctacctcttataattttttggtcactttaattaaaatatgcaattaattgttcagtctactagtttaaagaaacatwacttaacgatggcttagacattttcatttttaaaatgttaattggcaacaatgtacaattcaagaccttgtgaaaatattcttcaaaaatgaagatgtctgcagacaaatgaaagctgcaaaaattcatcacctgtaataatcaacaaaagctatactaaggctaaagcaaaaagattctagataaacacatgaaactggagaaaaaaacaagagcaccagaaaggataaaatgtgtgagaaattataagtaagtattattatatagcagtagttgtcctggggattgtgaaaatattggtaagagtaagctatttgttggwaaaatagcataaaaaaagggaagagggtaatggagtgaaactatcctaagtttcttatattgttcaatgaagtagtaaaagttacaatttagacagtaaaaattaaaaatgcatattgtgatctctataataaccattaagagaataaagaaatacaaatttaaaaagttataaaaggataaaaataataaatatttgttaaactcaaaagaaggcaagaaaggaggaatttttaaaaaagacatgcagtaaagagaaaaaaaagagcaagacagcagtcttaagcccagcta

SEQ ID NO: 291590 - DNA, 615 bp, Homo sapiens
acttaacgatggcttagacattttcatttttaaaatgttaattggcaacaatgtacaattcaagaccttgtgaaaatattcttcaaaaatgaagatgtctgcagacaaatgaaagctgcaaaaattcatcacctgtaataatcaacaaaagctatactaaggctaaagcaaaaagattctagataaacacatgaaactggagaaaaaaacaagagcaccagaaaggataaaatgtgtgagaaattataagtaagtattattatatagcagtagttgtcctggggattgtgaaaatattggtaagagtaagctatttgttggtaaaatrgcataaaaaaagggaagagggtaatggagtgaaactatcctaagtttcttatattgttcaatgaagtagtaaaagttacaatttagacagtaaaaattaaaaatgcatattgtgatctctataataaccattaagagaataaagaaatacaaatttaaaaagttataaaaggataaaaataataaatatttgttaaactcaaaagaaggcaagaaaggaggaatttttaaaaaagacatgcagtaaagagaaaaaaaagagcaagacagcagtcttaagcccagcta

SEQ ID NO: 291591 - DNA, 601 bp, Homo sapiens
tgggcaaatccaaatatgtcctgacacctgctatgcagctaatgatttggcaaattcttttacctccttaccaattagtaaggacagttggaaataattcacttttagctggcaaggaccccttcactgttagatgtcaaaaactttcccagtccatggtagacaggagccttgattgtctagatatcctgtgggacataatgctgacaataaaatatggatcacatcacccaaatgtcttagtagacatatttgtgcctctgtggtggaaagtaytgacatttccagtgcttgacaattcagcaatgtttctaaatgtggcctggatgttactgggatattcttcttatataaaaggaaaatttctgcacctaagataacctaaaactcaggaagagatagagtgctttttagattcctttacatactagaaaaaaatcatattattcactttggtgtgttgctctagcccatttacagaatagcccaaaagagctttaatctgagaaagaaaaggctctgttgcttactcatttgcaaggtgctctgatggtgagtccagttaagcctgtttacttattcagtgctatctgaagtttca

SEQ ID NO: 291592 - DNA, 601 bp, Homo sapiens
tgggcaaatccaaatatgtcctgacacctgctatgcagctaatgatttggcaaattcttttacctccttaccaattagtaaggacagttggaaataattcacttttagctggcaaggaccccttcactgttagatgtcaaaaactttcccagtccatggtagacaggagccttgattgtctagatatcctgtgggacataatgctgacaataaaatatggatcacatcacccaaatgtcttagtagacatatttgtgcctctgtggtggaaagtactgacatttccagtgcttgacaattcagcaatgtttctaaatgtggcctggatgttactgggatattcttcttatataaaaggaaaatttctgcacctaagataacctaaaactcaggaagagatagagtgctttttagattcctttacatactagaaaaaaatcatattattcactttggtgtgttgctctagcccatttacagaatagcccaaaagagctttaatctgagaaagaaaaggctctgttgcttactcatttgcaaggtgctctgatggtgagtccagttaagcmtgtttacttattcagtgctatctgaagtttca

SEQ ID NO: 291593 - DNA, 601 bp, Homo sapiens
tctcaagtatgaatttttattggaaagaattgaaacatacaaatacaaatcagaaattatagctttaaaaaaaagctctcaccctcaggagataaaatggttaaaattagctggtaaattcttcagtgtttctttcatgcataaatatatgcatgcttattatataaaggggatcatattatacatgttattttaaatgtaagtactgtcatttaatttatcattacaaaatgacagaatgttaataacatttctctgtcacttatttaagccctcttctgttattgaaaaattgcatctctacctttttcataattttacataaatatacatgtttataaatatttattcacagttgatttcccccttacaatttcttgaaacagaattgctggatgagatgatgccaatatgtgtaarccatttaatacataggcaaactgtcttacaaaaatgtcttgcctctttacatcccaatcagcgatgttggagaacatatttctccccctactttcttcagcactgagtatattatttaaatgttgatatcaaaatcaagtggtgtttatcctaggaatgcaaagttggtttattcataaac

SEQ ID NO: 291594 - DNA, 602 bp, Homo sapiens
tctagggatacagtggtaagcacaaccaacagtctcttgcctttgggcatctgcaaatcaatataaaatatagaaaataaataattgcattcatgcaaaatgctgtaaaagagaagttacagtgttgccagagtacattacaaagttacccaaccatttctacagaggaaagcttcccatagktagtggtatctattcgcaacacagaaatgaggagtagcattaacattagctagataaaggtgcttgggaggatggccaggggagagcctatttcattcaaaacaccaacaagagtcatgagagaagaccgaatgctaaaggaaccaagagaactccagcatagctagagcaagggagtattacgagtggtgccagacaaaggtaaagtggtggtaaaggccagaatgtgcaaagtactaaaggtcagtataaaggcttttaaatttcattctaaggtaaataaaaaccattggaagatttcaagcataatatattttatcttttaaaaatagcattctgacttctgtgtagagagtagactagggaggttaaagtggccatgaaaaagtgagttaacctattggagtgtcagcagtgta

SEQ ID NO: 291595 - DNA, 606 bp, Homo sapiens
ccatcttctgaacctcagtcattgattgatgactagggtgtagggagggggtgtgaggagcagagcatggactttgggtcaggtggcaattctgttaagaaggcactgtcaccatcatrtccagcagtagggggatgggtgcgctgtaggtcaaggggagagtggagatgggaatatccactataattccttacggactgatttccggctgcttctccaatatactcctgtagcatcctgccctgcaccagcccatccttcacaggctatcacaggtgctataatctccaaggcagcagaaattactgctatgtatttttaatgtggtagcccagagcctcacacacagtaggcacccaataaagatctgttaatgatgaacagagaaagctaaaatcacatagaaattcttcagtagggaatttcttttgaagcagcttacactcttcaagatgtcaagttatttgtgctcatttgtatgcagttaaaaatcatctgcttcatgacgggcaagagacagagtcttgatattcacatttttttagtaagaatcctctgaacaggtgtgatttctctctacactgtacctcctgtaaattgctcttc

SEQ ID NO: 291596 - DNA, 606 bp, Homo sapiens
ccatcttctgaacctcagtcattgattgatgactagggtgtagggagggggtgtgaggagcagagcatggactttgggtcaggtggcaattctgttaagaaggcactgtcaccatcatgtccagcagtagggggatgggtgcgctgtaggtcaaggggagagtggagatgggaatatccactataattccttacggactgatttccggctgcttctccaatatactcctgtagcatcctgccctgcaccagcccatccttcacaggctatcacaggtgctataatctccaaggcagcagaaattactgctatgtatttttaatgtggtagcccagagcctcacacacagtaggcacccaataaagatctgttaatgatgaacagagaaagctaaaatcacatagaaattcttcagtagggaatttcttttgaagcagcttacactcttcaagatgtcaagttatttgtgctcatttgtatgcagttaaaaatcatctgcttcatgaygggcaagagacagagtcttgatattcacatttttttagtaagaatcctctgaacaggtgtgatttctctctacactgtacctcctgtaaattgctcttc

SEQ ID NO: 291597 - DNA, 606 bp, Homo sapiens
ccatcttctgaacctcagtcattgattgatgactagggtgtagggagggggtgtgaggagcagagcatggactttgggtcaggtggcaattctgttaagaaggcactgtcaccatcatgtccagcagtagggggatgggtgcgctgtaggtcaaggggagagtggagatgggaatatccactataattccttacggactgatttccggctgcttctccaatatactcctgtagcatcctgccctgcaccagcccatccttcacaggctatcacaggtgctataatctccaaggcagcagaaattactgctatgtatttttaatgtggtagcccagagcctcacacacagtaggcacccaataaagatctgttaatgatgaacagagaaagctaaaatcacatagaaattcttcagtagggaatttcttttgaagcagcttacactcttcaagatgtcaagttatttgtgctcatttgtatgcagttaaaaatcatctgcttcatgacgggcaagagacagagtcttgatattcacatttttttagtaagaatcctctgaacaggtgtgatttctctctayactgtacctcctgtaaattgctcttc

SEQ ID NO: 291598 - DNA, 601 bp, Homo sapiens
agaaggttttcctggatactcaatctaacatgcccttaacccaasttctatggcattagcttcatgagagcacaggcttgccatctcattcctcacctaaaatactacctgtgataattagttttatatggcaacttggctaagctgtagtacccagtgggtttggtcaagtagcagtctacacgttgctgtgaatgtattttttagatgttattaatacttaaaccagtagacttggagtaaagcatcttagcctccataatgttggtggtcctcattcaatcaattgaaagccttaggagatactaaggtccccagaagaggatggaattctaccttcagaccacctttggactcaagactgcaacttctggcaggttccttgcagaatttccagcctagtagcattccctgtagattttggacttaccagtccccacgatcacataagccaattccttaaaataagttgctttcagagagagaaagagagagagaaagactggttttgtttttgttttctggacagcaatgactaatacactactatatgcagtcacatagtaagccctctgactgcaggtgtgatgtttatgctgtg

SEQ ID NO: 291599 - DNA, 521 bp, Homo sapiens
ctgtcagcagttctacctttgctttctgtgggccttcagcatgcaatgactccttcacatgtgtttccttatctggaatatgggcatgagatctactcccacaatactgttgtgagatatcattgagattgtctgtaaatcactctgaccaacctgtggtacatagtaagaaytcaaatgattgttgtcaattttactgctctcattgcagtggtgatgtgattactattattttcattattatcattatggtccagctttctggaatagttccagattaggtagcattacctaaatgctccttctcttccccccacaacacacaaagtgtaattaaaattttaatatgtgtaataatatatataacaaaatatattttagacatgaaagagaactttaagaaaccaataaccaaataagcatagcaaaaaaggagccagatgtaattaatatgctggcatggaaggaaacttactatcaacaaaggtcaagctttttgtacatgataccgaaaaagcggg

SEQ ID NO: 291600 - DNA, 521 bp, Homo sapiens
ctgtcagcagttctacctttgctttctgtgggccttcagcatgcaatgactccttcacatgtgtttccttatctggaatatgggcatgagatctactcccacaatactgttgtgagatatcattgagattgtctgtaaatcactctgaccaacctgtggtacatagtaagaactcaaatgattgttgtcaattttactgctctcattgcartggtgatgtgattactattattttcattattatcattatggtccagctttctggaatagttccagattaggtagcattacctaaatgctccttctcttccccccacaacacacaaagtgtaattaaaattttaatatgtgtaataatatatataacaaaatatattttagacatgaaagagaactttaagaaaccaataaccaaataagcatagcaaaaaaggagccagatgtaattaatatgctggcatggaaggaaacttactatcaacaaaggtcaagctttttgtacatgataccgaaaaagcggg

SEQ ID NO: 291601 - DNA, 521 bp, Homo sapiens
ctgtcagcagttctacctttgctttctgtgggccttcagcatgcaatgactccttcacatgtgtttccttatctggaatatgggcatgagatctactcccacaatactgttgtgagatatcattgagattgtctgtaaatcactctgaccaacctgtggtacatagtaagaactcaaatgattgttgtcaattttactgctctcattgcagtggtgatgtgattactattattttcattattatcattatggtccagctttctggaatagttccagattaggtagcattacctaaatgctccttctcttccccccacaacacacaaagtgtaattaaaattttaatatgtgtaataatatatataacaaaatatattttagmcatgaaagagaactttaagaaaccaataaccaaataagcatagcaaaaaaggagccagatgtaattaatatgctggcatggaaggaaacttactatcaacaaaggtcaagctttttgtacatgataccgaaaaagcggg

SEQ ID NO: 291602 - DNA, 649 bp, Homo sapiens
ttataagtgagagctttcctaaggcttttagtagttttcttttaaaattcactttagcagtcttttgtggtgagttgtttggttttcagattggtttaattttacctagtattgcatcatagaaaagcaaaaatatgaagaatgtgtataatcttacataaaatttgtttgcaagtctgagctctttagttaatgtgtacttgtatgcccccgtgtgaattcagaaaaggctcagaaacccaaacatacttacagttacactttgatatgtaagagataagcagcagtattttgacagacaattcttgtgtggtttgatttggtaggactatccgtcttatcccagttttggccagggtcagtacgcacagtattataacagctcaccgtatccagcacattatatgaccagcagcaacaccagcccaacgacaccatccaccaatgccacttaccagcttcaagaaccgccatctggcatcaccagccaagcagttacrgatcccacagcaggtaattatgtgaatattattagtcctgcaggtgatattttcaatggtttcaatgcatttttctacagtcatatattcatgcagtggttgcacaattttggcagcttttggcaaggactaaatataagtcaagcagc

SEQ ID NO: 291603 - DNA, 579 bp, Homo sapiens
tttaactccctgtataccttcaaatttcccatgccaaatctcctctgagctccaaaccctaatatacttggcatctgcaggtagatgctgcctcacagtcaacatgcccaaaactgaggttcctgtcttcctttgtcaacygtgctcctcttgcatttcctggctcttaacttctttctctgcctcacttacccctatacccattggtcactgcccactataaattctacttcgtaaatgaaatgcaccaaatccatcaccttcccatacccattgccagcgctttatttcaggtcttcaatatttcttgctcaaattaatacaaaaaaatctctccctgatttctccacttcagctcacctgcccctaattcatcctgccatggtggccataattctgtcctatgaatatgaccatgcgacccctttcctttgatgcctcccattgcacacaggagaaaacacaaattccatgaagctcacacaagcctctttagactctggcccctgcctccctctgcaacatgcccttgctctcatactgtacacacaccaggaaccctgaaccattaacagttcc

SEQ ID NO: 291604 - DNA, 601 bp, Homo sapiens
atttattccttacctgaacctgagaaattgtttaaagacccgtcggctgtcgttgaagctgtttcactgctgctcattggctctgttttaactacaaaaataaacaacatacatcgatattgaattaatagttatttgtaaagacatggaagagaagatataacattcagagtaatgacaagaaaatcatttcaaaaaacattttccctaactgaacatatatcataagcataaatagactccttttaaaaaaattcacatattaagttctttccccttaggaaacaatctattgtcacaagttaccctttaaaagcagcactgtaaaagtaattaaattcatcattgttttacatatttactgaattacttattgataaattatctctcaaaatctacatgatgtgatataaaatcatttcctggggttgtggaaaaaatctgttattyggtcagagtcaaaaggatagaacagaaagatgtggggaagcaggaagtaagtgggtgtcgacaccagcaggtcttcctgatgctcaagggcaaggtctcccccaccacacacacacacaccttctgggttctccagcatggctaaaaaacc

SEQ ID NO: 291605 - DNA, 593 bp, Homo sapiens
actactttgtgaatgcttgactacaccaaaaccactcctgtttctgtacccctaaaattgacaccagctattctccatatgattagcttaatcgaatgtagccttcactcccaagaggcacattcaattatacttgaaatccattaaaactaggcaaaaaggttagaaaggaaaggaagaggatacttttcttttaggccccaataacactgcttttcaccattgttcaaacatacccatctatacactaaggaataaagactcccttttcccaatgaacccagttttttaaaaggytcactgttgaagagaagaggatgtacataaaataaccaccaggatattcatgattttatcaggtactgtaattgaatactttgatcaccagggacctgatgctaaagactggtgatttattgtaatgtaaaatagtttctgaatgaaagccaaagaaacagagactacttctggctttattgtagccaaacatacatccaccagagagttaaaaagatgagaatgatctctggccaccaaaattttatccatcccattcccactagcaccaccacatttataaatatgctgtagat

SEQ ID NO: 291606 - DNA, 603 bp, Homo sapiens
cttcctcatctgtaagtgtgggtgaatactcaggtgagaataaaaaaagataaatgcttctaaatcattccacactgtgctaggtccagggcccatgcttttatagtcactctatcactatagtgtctctttaygacaaatcaaagtctttcttaagatatagataactgggtccaaatgtatcatgaacttcacattaaagttaagcttcccctttaaaagaaagttagaagaatccgaagtaaagggatgtatccaagatcagccatgaggccacacttcaagagagccaaaattaaatcaaggtaacttggaaataactcaagaaggcaggaccaaattgtgattatatgaagaaaacttatgttttgatcattaaaaggcagtgtatattttctgaagaaacaggctaatagaaggagaatggtttacatggcaattgtgatcaataattccaggagaaaatgtggccatctttttctgacattttttaggggaggctggcccataaaaatgagaaaaccatcttccttcgtcataaatttcagtgtggatctatctatcagaccattggagctcggtgacattagctatcaagatcat

SEQ ID NO: 291607 - DNA, 590 bp, Homo sapiens
attaccatgaacataatcataataagctctcacttataaattgtgggtcctaaacgttaacataaacccttgataagcttatgaagacytgctttctctctactatagtataggcaatatttgacagtcactgacatatgacagataattttttcctacccaaaccaaaaatggaaaatttgtaacatgtatgtattttttttctattatattgtacgcttagagtgaaagagaggagaatgaattactcttgacccttactccaagttagcaaggtgagaagaaatgtaacagaccccactttatttatatactgctcacaccaaggcatccttggatatcataagaaatcaggaattacttaaaagcagggaatctatgaccaaaggcatatgaatttgactaaatactaccattcactaaggttcacatatctcccaggagggaaccagaggtttctctcagaaaattggatgttctcagagagatatatttctgctcataccaaagttctggcccaaccagcggagagatgccacagaactgtgattctctgcactattagcaattggaagtagggaaaagctgtc

SEQ ID NO: 291608 - DNA, 631 bp, Homo sapiens
tcattgatatttacaaacaatccagtccaacgtctacatttaaacaaattcggctatatttaacaacaaaagggaaaataaaggaaataattccaagttttcactggtcacacaacaaaacaacacaaattgatactgcagtgtgtacatgatcaataagaagataaaacacactcaaaggttaaaaatgttatgcacacaaatatgtataatatacatgtgtatatatgtatatgcatttggtgaaacgaaaccaatctacgcaatgttacaataactggaaacatgaagctcctaacaatgagtactgattggtaagtcacattattacctaaaggggaaatataagagtagttttatgattttgacaactgaaatcataaccacctaataacaaagcatatactgatgaagaaacaaggtgcaaagtaaatagtgagaaggcagacactcaccttcggtgccattgggagtcatggaattactatttatatgagagttaccgagtttggggccactggsggattcactactaccactcagacggctatgcgggctggttagatcctgcatttccatagacctaaagacaagaagccttccatttgacagatgtaccaaattcataaca

SEQ ID NO: 291609 - DNA, 395 bp, Homo sapiens
tcaggtatcccttcatcatatgcactatcaaaagatgtcacttgctttacctatacagccagtcacatgaagcttttaaaatttcatttttctcttacacagttcatcaagtcacaaggtctaatgtgagacaatgacatctrttataattttcaaagaaaaaatacagtcatcgttgtctttttatattaaaaaggaccaaaggcattacttttctaaaagaaaaggcaactatgtaaagaagtaaaatggaaatagatcactcttctgtggaatctgtttcatctaataaattagcactaggtactcccttataatttaccacccagttgtaatttaatgggtctccaaaccaaataaaacacttgaaacctatagtctagtgacagggaatg

SEQ ID NO: 291610 - DNA, 568 bp, Homo sapiens
acagcaatcttttatgggcattttcctagaatctatgtatacatcatctgcttgttaaatgtctgtattattccattcatgcttctaataaagacatacccaagactgggtaatttataaagaaaagaggtttaactgactcacagttcagcatggctggggaggcctcaggaaacctacaatcatggaggaaggggaagcaaacatattcttcttcacatggtggcagcaaggagaagtgcagagcaaatgcagggaaaagccccttataacaccatcagatctcatgagaactcactatcatgagaacatcatggaggtaaccatccccatgattcaattatctcccactgggtccctcccatgacacatgggaattatgggagctacaattcaaaatgagatttgggtggagacacagcaaaaccatatcaatgacgttggttcctargactttattcttatccttccatctctcattctgttcagatcaccttgtggactcaagcacactgatggcttcaaccaccacccactcccctctatcagatcttagatctcaactgga

SEQ ID NO: 291611 - DNA, 575 bp, Homo sapiens
aacaatgcttgaaattttacatttagctattgtattcatgcttccaattgtttaacaattattttagacataagagagtaagaaattatttttctaatccatgaaagattatattgacaaatccagaatatatgaactatataaaatcaaaacagtgggaatattatgtaaagtatgtcacatttatatacaagttacttgcccacattatagttaaatgtatcatattacatattttatgttgaaatttaatttttatttatataaccaaatgaaatattaaataaatgatgcatataattatgaagaaaattagtaaaatcatgatgaatgtaatgtgaccactaattgatatggtatagctcatgcttcataattatgtaacaaagagcttagtcactgactaaaagtaatatccatgtgcatatttactacttttaaagagtttcattttcctgaagcaaaattagatggattaaaaacaatcacgtttacccataaattgkgtatggttactacttttgaatatccaatatgtaataattactattgcatacaatttaaaccaaaagtaa

SEQ ID NO: 291612 - DNA, 615 bp, Homo sapiens
atctgccttttggacagataatttaatttttctgagctacacttttcttattggcaaaaagaaggagttcattggataataagtgtgagatagcagtgtaaaccataaaagttgaayaaagatgcagtctttttattactgatccaacacattttctgctactattcttcttcaagtctaatcccctaaatatactttatcactatttaccctttttgcttatgatttctgccacttgtaattctctgtttcccactccctctttgctgcctggaataacaaagtctgcatggtttcctgcttcctcctctgaacccccaaagtaagcaataaataatagctcttgttcatgaagtacttatgagtatttttctaggtggttcacattgttcccctaacagccctgtaattgctcccattttataggctgctttttccaaggccacagagcaagggaggtccaaagttgcaggtggcaggccagtgcagtggttaaggagctgtgatgattcctgttcattcactgcattcccttttatattcatgaacaagaacagtaaggctgtgttccattaaacagcaagaatgtacatttccgctgtatactactggtag

SEQ ID NO: 291613 - DNA, 588 bp, Homo sapiens
agctcttgttcatgaagtacttatgagtatttttctaggtggttcacattgttcccctaacagccctgtaattgctcccattttataggctgctttttccaaggccacagagcaagggaggtccaaagttgcaggtggcaggccagtgcagtggttaaggagctgtgatgattcctgttcattcactgcattcccttttatattcatgaacaagaacagtaaggctgtgttccattaaacagcaagaatgtacatttccgctgtatactactggtagtgaggcagaggggctgsctgttaaaggaaaagagagaaaccttcaagatatggccagaagagagatgaagcatgcctgtttggctggcatttgaaaaaatgtgcttctgtttgttttgagagtttagattctatgtcactctacagcataaagaggtttcatatatagacacatatattatttcatcctttttatctaatttggcattgatatacaaggaagaaaataaaatcagggctctgtcctttgggattagattggccatcatcactccagagccaccactcacatagcctggggcttggctctgt

SEQ ID NO: 291614 - DNA, 573 bp, Homo sapiens
tatataaaattcaaatttgggagcattcaatcaagtttcattggaacacagccacatttattcattggttgcttttgcactactaaggcagaactgtrtagttatggcaagcatatggcccgcaaagcctgaaatatttactatctgttgctttacagaaaatgtttgccaacccttggactggaggttccaaaagggagatcatcctggttaagtaaccagatctcctgcaacccagtgaggacactggtgtcctactgctctggtgccatgctaagagtttagcttcttcatcaaccaccatggaagaaaatcctccaccaaaagagcttggagttgtgttgtcccctaaagcagagtaggaacaacaatctctactggcgaactgagctgttctgatgaaatgggcgatataaactgctttcagtttttctttcctcaaggtactgaatgatcacagaaacacacccacaagggaggctgtttatctaaactcactatgacaagtgagatcctcttagaagcctagtgagttataaaacaaatactctagagagcaactacaagttcaat

SEQ ID NO: 291615 - DNA, 539 bp, Homo sapiens
cgatcaaattgccttgggtccttggattttactttagtatactatggtgtgasggttaaaaagtagactttatgtgacatactaaggaaaacaatagcttcagtttgttcaaatacttaaaacagaattcctttctgcaacccaaatgtaagtacaattaaacattttgtggtctttagatactcctaattaagaggaatgcttgttttagatggtttaatatttggggtattatactgaatgttgaaatgtgtgattcatgttctttcaaaagatataaacctgaaaagtatcctctgcctctttcagggattctgttttaatagtatcaatgatctggtttacctgaaatacagagtaaagcaaagccaaagatctgggatttttgagttagtatgttttaaatgtggaagattcttaaaaacaacaccctggttgatagagagttacaggctggtggcttgtttttttaatcaatacaaggagaaacaaatagtttaccaagaggtcagagcgcccgtagaggagccctctgctgc

SEQ ID NO: 291616 - DNA, 598 bp, Homo sapiens
aaggctcacatggacatttgttccttcccacctggagattatctttatcttggtgtaatttaactcactttttatgggtcaatacctgtaaattaaaaataaatccaacaaaatcccaaagcttaattaaaaaaatttcagaatttcaaaataccttttcttccattaaattgtcattgcaattctaagtagattgaactgaatagaaacacttgaattattggcattttattaagaaaagaataaaaactagtgatcaaggaatagtacatggacacttggaggaaaggattgatagaataagtaattctgtgcaacaagtacagaattttttgtgaccagtattctaattgtgcttctgcttgatactgttttgtagtattcttttctgtggtatataaaaagaattaatgctcttctttaagtatttcattaataattagraggtaaattactttattccttttaattctatctcaaacaaaatcaactgtatatgaatttcttataaaatatatacaaataatctaaattatgtacgacttcagcatttatagttttattttaaaaccatcagaaccaatgttttctagatagg

SEQ ID NO: 291617 - DNA, 654 bp, Homo sapiens
attctgtcttgctatccaaggacttctttcctgtagtcattctccttgccataccacatgtattttccttcctatggaatcattcctgctgacatccagacatgcctaaatatcttttatttaaaaatgaaaccaccttcccttgattccatgatgccttccacacaccatagcccatctctttgtgtctgtctctgtgggaattcttgatcctttctgtcttcactgtcagccctcatcctcttctcaacccattcccatctggctgatgtcttccacttcattgacatggtgcttatcagggtcattaacagccaacattcttgcccaatctaacagtcgctcacttctctgtcctcatcttacttgactttggccacatttgacacaggagtataccactccctccttcttgaaacactattctccaggtttctgtgatagctcatacttttccacctaycttgtggaattctctctaccatacaattctctcttcaaagctcttcttcttggccctatttctaattgttggtaccaaaatgctcaatcttaggcccccttctcaatttttcattccttcccctgtgccatctagttttatggcgtcgggactcccaaaactataccttcaaatttgcctctctcttctga

SEQ ID NO: 291618 - DNA, 639 bp, Homo sapiens
ttctttacctatttcttaatgaattgcagtaatcttagttctttgattggttatatttggctcagttgtgtctttaatattatctgtggcttttaaaaatagtatttgtctctgactacagaagaaataagcatatgctttacagaatttgggacatacagaaaagcataaataaaaaaataataaaaccacaaattccataaacaatcaatgttaaacttctacgatttatatttccataagacagtcaacatatatttccattatttatgcaatatatatttactgggtcctcctatgggccaggtcctgtgctagagaaattagcagtgaatatattatacatagggtatacattttataatagaattgtgagccaacaatatgtgtgtatattcctcaaatattagtttttaaaaattaactttttattaaacaaatattacagctcaatgaatttctataaactaaatgcatgggtataactaacamccagatgaagaaacaaaatatgatggatttcataagttagaaatgtttattgttataaattcttgcctttatctctgattagtaaaaagtcctagatgtataattggtacaaatggtattaaccttttataggatctcaatacttat

SEQ ID NO: 291619 - DNA, 604 bp, Homo sapiens
tactcccaagcctaaattgtttggtgatgtctcaagttgttcgaagttataaaattagatgtcgatattatgcagctttaacaggaatgagcctttggtcccatctctggctgggcccaagcagtggggagccctgaaggcatgattccagttgtaatatagcttagtgtttatctactaactgtgattttcctctttgtggcttccccagtagggatttctctaatggaaaatggtaattaaatattgacttaaaaaatcctttcttatgcttaagtgcattgtagttgtataatctactctgtgrttggaaaattctttaagacaatttaataatatttaaaaaaatagtactatgtggactctattataacctgtaaaaaacaatacaaattcatatataataattttgagtatgtaaaaacatatgtactcaaaaaaagactggaatatcaatattagcagtggtcattttgggtggtaatagtattagtgacttgctatcatataaaatacgttttagtgcttctcaaattctctgcaataaacaagaattacttttatagtcagaataaaaagtaaatttaatttttgaatacatatt

SEQ ID NO: 291620 - DNA, 497 bp, Homo sapiens
gatgagaacacatggacacagggaggggaaccacacacactagggcctgttgaaggccggtgtgaggagagggagagcatcaggaggaataactaatggacgctgttcttaatacataggtgatgggatgatctgtgcagcaagccattgtggcataagtttacctacataacaaatgtgcacatcgtgtacatgtacctctgaacttaaaaggtaaaataaaattaatatgctaaaaaataaataactaaattcatgtgttatattctctgttaaaaaaagttatgtatgctcatagaaaaatgaaagagtataaacagtataaagattcatttgttcatatatagtcaaaatgtagactgaataagtgaaattttgattattttgttctyactttttttctatggacatatagatgcatgcatactttctgacatatatctatgtatataatgtacacacacacacacacacacacacacacacacacacacaca

SEQ ID NO: 291621 - DNA, 611 bp, Homo sapiens
tccctaagggcagtgatagctagttcttaatccttttttcattcaaagcaagcaaaacacagccttatgtgtagttcargattgtgaaatatcttttagatcaatgaaattatcttatctaagtcattttatctgtttagataaaggtactaattataaatattatcacaaataaaaaagtctaattgtatgaaaattatgacaaaattactaagttaactaatttttgatattccatgttagggtgtgcacaccacagagaaggcataacattggaggtgagaagtaaatattagaatttttacttatatttatttttctctttatattttaaaagttgatatttcttatgcaaaatgtatagtgcatataagttattactaaacaactacatgtaggtagataactacaaatgaataaatatgcatatatattagaatatgaagtcaaaaattgtattgttgggttgagatacaatcaagatgtacagagaggagttccatttctggcaatggttaattaaactgttctggacaaccctcttgttgtccccagattataacctaaactgttattgttttcccaaaatagcttgctgtaactaaaatcag

SEQ ID NO: 291622 - DNA, 1129 bp, Homo sapiens
tcaattcagggactccaggaaacagaagctaagaacagaagcaagtgctggagatttactgagaggttacacttgtggaagatgaagtgtagcaggcacaagagttggcaggaaagccttcagatcaggatgtactacttctatagcaagtactatgacttgagagtgggtaggagcagggattgagtgtgaagagccttatgctatgatacagctgcacgtcttgctctcaaactaatgagaagctctggtgcaaagatgtcccgtagagaaggtatatattttgcagaaatggctgggccctakcaccgccaccacacttattcattggctggaaacttcccggtgagagcagctgtggcttgaatactgtagtatgtcaaaaaggtactgcattagggtgctgtcagctacctgtacttcttgcagcaagttctttcttgaaggaaaagccaagcagctccactcatggctgccacagcaagcatgatacaacatatgaacttgtaaagagtagaactgtgtttaataaaatgagtgtatacatttaaagcagttttttttwtcaattcagggactccaggaaacagaagctaagaacagaagcaagtgctggagatttactgagaggttacacttgtggaagatgaagtgtagcaggcacaagagttggcaggaaagccttcagatcaggatgtactacttctatagcaagtactatgacttgagagtgggtaggagcagggattgagtgtgaagagccttatgctatgatacagctgcacgtcttgctctcaaactaatgagaagctctggtgcaaagatgtcccgtagagaaggtatatattttgcagaaatggctgggccctatcaccgccaccacacttattcattggctggaaacttcccggtgagagcagctgtggcttgaatactgtagtatgtcaaaaaggtactgcattagggtgctgtcagctacctgtacttcttgcagcaagttctttcttgaaggaaaagccaagcagctccactcatggctgccacagcaagcatgatacaacwtatgaacttgtaaagagtagaactgtgtttaataaaatgagtgtatacatttaaagcagtttttttt

SEQ ID NO: 291623 - DNA, 528 bp, Homo sapiens
atttttattggccactcaagtttcctcttctgtgaattgccttctgatgtcctttgcctactttttcatttgcttatttgtcttttcgttaccaatttgaagacatttaaaaaatatagatactatgactttgttatttctaccataacaaatatttttctagtttgtcattgtctagggactttgtttacagtttctttttgaaggaacagtttctacctttaggtaactgaatttatcaattttcctttatagtttgtgtttttgttgtgtttaataaattcattttttactctgggacaacaaaaatagcctgcactcttttctaaatgtttgaaagttacatttcacattgaaggctttaattcatctaggctttaattcatctaggctttaattcatctaggattaatttttgaagtgaagggactgggaatctattacttttttktacatggataaatatttgtcccagcatcacatttaataaagctctatcttgctacactgcagtggttaactttatgt

SEQ ID NO: 291624 - DNA, 528 bp, Homo sapiens
atttttattggccactcaagtttcctcttctgtgaattgccttctgatgtcctttgcctactttttcatttgcttatttgtcttttcgttaccaatttgaagacatttaaaaaatatagatactatgactttgttatttctaccataacaaatatttttctagtttgtcattgtctagggactttgtttacagtttctttttgaaggaacagtttctacctttaggtaactgaatttatcaattttcctttatagtttgtgtttttgttgtgtttaataaattcattttttactctgggacaacaaaaatagcctgcactcttttctaaatgtttgaaagttacatttcacattgaaggctttaattcatctaggctttaattcatctaggctttaattcatctaggattaatttttgaagtgaagggactgggaatctattacttttttgkacatggataaatatttgtcccagcatcacatttaataaagctctatcttgctacactgcagtggttaactttatgt

SEQ ID NO: 291625 - DNA, 582 bp, Homo sapiens
tgatggcttcaggtgtaaactgcagtatctcttgtattaacagtatagccacaagaacattattttatatttctgaggtgctgtgtgtgtgtccatgcatatgatgaaaatgttaaataggctcagagttgggaagaaaactttggtagtcctaattgtgttgcacatttctgtctgcaaggtcattcattagctgttattccatgaaagtggcaggcctaactcattaaagcyattggtgttttttaaatggaaatggtttacaacaatttaacagaaaaagccctgggggtatgcagaagtttcttcattaaaagaaaattaaccctgaatttgtagcacagtaacttaataagcaatggtaatgcttgcccaaaacatacaagatcaaaaacatttccataaaaaggcttgattatattcagcaattaggacagaatgggaaagtaatggaatcatagaagtttagatctgaaaagcttgcaacagatactccatccaatctggtttcttcctcccaaccatctctatccccctcctaatatatattttacaagtgaggcaactaagtccaagaaaaat

SEQ ID NO: 291626 - DNA, 642 bp, Homo sapiens
tactctgcatttcctatataactgtaccaccaggtaaccagataacaatgaaggaaattttcttttagagaaggattctagataataacgaatgagtgatagaatcagaataccaccatttttcaaaccataatgaatctaggcattgatgatcaattgtattttatatcacaaaaagacaaaaacccagacattgtatgctttctaataggagcatttatgaagcagcattggcaaaacaaacaaacaaaaatgcatcaatctttttctggtcaagccttcaggtccatattaacctttaagaaatacaaagattataagatctttttattcaacacrtcagggaggcaattgacagacttcataatgaaaaactccagaattaaaaagcacagtttctccaacaaataattgtaaaaacaaagaaacagagaggaaacctataaaaggcacttaagacacttatcaaccaatttctatgcaagggccatatttggatcttggttcaaacatattgaaaaaaatatataacattgatgagaccattagaaattcaagcaatagacttaatatttgacgataagaaggaatattatcaattcattttttgcaaatcataatggttatgcttttttaaagttt

SEQ ID NO: 291627 - DNA, 1198 bp, Homo sapiens
aaccactttctttaagaactcctttaaaaagcactaggatagccttggtaaatgactacaaaatcagagtaaacatcctacccacttgattattaagaatagtctttacaatgactgaggtgagcactggggggctaaktttgagagattcatctagatttttattctagatcttcttgccactatcccccattgatactcctttcaattttccaaacacgtggtgaaaccattagctaatgcttaatatttatataaatccctacattatgccatcattccttccaagcaaagtagagcactgtgatgctggttgcataaagaataactgttcaatggtaagctggttatttctgggaagagatgattgtcaggcagccacaagagccaaagggttgtggtaagtatttgctgagctttttttcctttctgtatttaactccctttctagtatcaccccaaaaatctccttgaggagctagttccaattgaattatttgaaataaactttttaaaattaaattttaaagcaaaagagcaagaaagatatggtagtagccttgcaattttctatttcccatctagcttgttttggtaagagagtgwcttaggttttacccaacagaggattcacccaagtcctagtttcttacataaaaatgagcttctaaattcaagtatagcttctcccaagaatttagtactatttctattttctaataccatagttctcgctttcccacagcttcacttttcatggtttcagttacctgaagtcaactgtggtctgaaaatattacatggaaaattccagaaataaacaattcatggttttaaattgcttgctgttctgagttgcaagatgaaatctcacaccatcctaccccatcctgccagggacataaatctttcctttgtctagtgtattcacacgatgtatgcttagtagccatctgggttatcagaccaaatatcatggtatctcagggcttgtattcaagtaacactattttacttaattgttcttattttattgttagttattgttaatatcttactgttcctaatttataaattaaactttatcaaaggcatgtatgtgtttcaattacggagttttgaggtatggagtttattaaatagwagtattttttaacaataaaggagaattatttgcatcttgcctaagcaatacagc

SEQ ID NO: 291628 - DNA, 585 bp, Homo sapiens
ccatcaatacttttgatagtcacattacctgagacaagacatgggaaatataagcaaaaattgtcagtacgaaagtttcaagcccctctgggctattgatttctttctttttattttttatttcatttttattttttttgagaaagggtctcacttagtcacccaggctggagtgcagtggcatgatcttggctcactgcaacctccacttctgggctcaagcarttctccagcctcaggtcctgagtagctgggactacaagcgtgagtcaaaaaatgcctagctaatttttgtattttttgtagagatggggttttgccatatttcccaggctggtcttgaactcctgagctcaaagcaatttacctgcctcagcctccttaagtgctgagattacaagtttgagccaccatgcccatctgggctattggtttctattcttgtcattttccatagaagctggtcaatgcttttaaggcattctcagagttggaactgtaaaacctgctagaatgtcaacaaagcttgacaacagtggtcctcaactgtgggtaattttgcttgaggttaagggacattaggca

SEQ ID NO: 291629 - DNA, 628 bp, Homo sapiens
aacttgcagcacatgcttgctgtgtgatgttccataactaatcatttccagcctgatcctttcaagtcagaggcttggagttgtctggggatcatcttgataactcaaagtttcataggtgactagggttttgtgagactgaatatgccagcttttaagactggtcagttttaggccggtgcggtggctcatgcctgtaattccagcactttgggaggccgaggcaggcagatcacttgagatcaggagttcgagaccagcctggccaacatggtgaaatcctgtctctaataaaaacacaaaaattagttgggcatggtggcaggtgcctgtaattccagctactaaggaggctgaggcacgagaatctcttgaacccaggaggcggaggttgcagtgagctgagatcacaccagtgcactctagcctgggcaacagagtgagactctgtcagaaaaaaaaaaaaaaaaaaaaaggactggtcagcttttgactcacaactcagttacaggakcaccttcactttgctctatcttgcccattatgtgctgtttaatatggaggtttcaaattcaaaaatttaagcctgagatttttaatctctattttttcttgtactgatggaaaa

SEQ ID NO: 291630 - DNA, 650 bp, Homo sapiens
cccaccccttcaacatcatcacttatagcaggaataatacggactaacaggatggtagggaagtcctgggatctacagaacggcttttcagttctgcttctgccacatatacagggaggcagatgatcacagaggacaagcccatgtgctctgtctctggtcttgctgggtttgcatccccacttttctactgcttctcctgttcttgtgagatcttgactaggctatgagacctctcattgctccatgtcctcactgggtaatatctttaccttccttctagtgttgctgtgagtactgaatgagttcacataactaacaaccaagatcagtgcttggcatagtataaacactcaactcagtgttaaatattttcattatttcccttctacgagcttcagcttccagatgttaatatctgtaagataaaaatagatcagatgaggtaagcatgggacagtgctttgtaatgcataagaactattcaaataargggcattatttcttttaaaatgctgctttaaaacatagtgctgatttctttgctttatcttgtaaatttctctctaaatgctgagttctttgcttgtgctattcgatagcagaatcatgttggatattactttagatgctattgttaacatttaatc

SEQ ID NO: 291631 - DNA, 588 bp, Homo sapiens
ctcacccttagttcctgtaaggactgattgttaaaaacaacctggcacctcttcctctttctctcatttcctttctctcaccatatgatgatggctcccctttcccttctgctatgatttggaagctccctgaagcccttaccagaaacaaatgctggcatcatgcctcttatacagcctgcagaaccaggagcctaataaacctctttttaaataaattacccagmcccaggtattcctttgtagccatccaaaacagactaatacaattacacatttatgtacttatatgtagcttcattttatgtcttacagtaggagatacataactgcctcttcaatgaatgttttatttgcttactagagaggaaactgtgaaagaggaattacattatggcctcttaatagattcatctgtccattatcaataagataataatttttaaaaggaagacactgaaggaagactgagtctgggtaaatgtattgagtcaagtttgaatttgtggtatagtgagtatgagttcttggtatgcatgcctgtaaaaaattacttaatccaagaagtgtgagatgaaaagccaaaag

SEQ ID NO: 291632 - DNA, 535 bp, Homo sapiens
gagttcttactgactgtcacaagaacagcaaaggggaaatctgcccccatgatccaatcacctcccaccaggcctctcctccaacacctgggatttcaatttgacatgatatttgggcagtgacacagaaccaaaccatatcattccagccctgctcccttaaaaatctcatgtccttctcacattgcaaaatataattatcccttctcaatagtcccccaagtcttaactcatttcagcattaattcaaaagtccatggtccaaagtctcatctgagacaaagcaagtcccttccacctatgagactataaaatgaaaaacaagttagttacttctaagatacaatgggggtacaggcattgggtaaatacatccattccaaaaaggagytatcagccaaggcacagggattacaggacctatgcaagtctgcaaccaggcagggcagtcattaaatattaaagctccaaaatagtctcttatgacactatgtttcacatccaggccacaccgatgcaaggggtgaactcccaa

SEQ ID NO: 291633 - DNA, 442 bp, Homo sapiens
cagccccctcggctgctttcagaggctggcgttsaatgcctacagattttctaggtgcatggtgcaagctgttggtggatctaccatcatgggatctggagaacagccgtcctctcctcacaacttcacaaggcagtgccccagtggggactctgtgtgggggctccaactccacatttcccctctgaactatcctagcagaggttctgcatgagggctcttcctctgcagcaggcttctgcctggatgcctggacatgcaagcattcccatacattctctgaaatctagggggaggctcccaagcctcaactcttgctttctgtgtacccacaggcttaacaccacatcaagccgtcaatgtgtatactttgcaccctctggtgcagtggcctgagatgtatctggggctcttttagccacagctgcagctggatcagcaa

SEQ ID NO: 291634 - DNA, 571 bp, Homo sapiens
aagactgggcaacttacaaaagaaacaggtttaattgaacttacagtcatgtggctgaggaagcctcacaatcatgatgggaagcaaggaggagcaagtcacatcttatatggatgccagcaagaaaagagagcttgtgcaggaaaactcccccttataataaccatcagatctcatgagacttactcactatcactagaacagcacaggaaagacctgcccttatgattcaattacttcccacttggtccctctcacaacacgtgagaattcaagatgagatttgggtggggacacagccaaataatatcacctaggtaccaattttctgtattagtccgttctcacattgctctaaagaactacctgagactgggtaatttataaagaaaagaagtttaattggctcatggatctgcaggctgtacaggaagcrtaactggggaggcctcaggaaacttgtaatcatggaagaaggcaaagaggaaggaggcacatcttacatggctggagcaggaggatggggtgggggcagtgccacacacttttaaacaaccagatctcacaatag

SEQ ID NO: 291635 - DNA, 557 bp, Homo sapiens
accccataaacacaattatttatcccttaaaaataaaattttaaaaagaaaaagattagcttagggatttgaatttccaggtcaagcactgcatacatrccctaatttcttctatttttctctaaaagagaggatacccttatctcctgtagcagcagtgtgaaaattaccgaaaaccaaataaccaatctcatcctgaaactggctgaattaaaatgcaagtttaaatctcagcctcagggtgccactgttaaggtaagagcatttattgggaaagcatggggtgaagtaaactggaatggggaagtgtggaaagatcctgatgaagctggagctattgagcccctcaattcttgtaagttttcttcagcagtgtaagagatctccccacattcagcataagtgttctccatatttcaggggcagtggcatccctactcccagagatatctgcttctccactcacagtggtatcagcctttccacatccatctgaggggattaacactgcatcgcatgacgaaactgtaatggcctccactgattaaggtgccatg

SEQ ID NO: 291636 - DNA, 557 bp, Homo sapiens
accccataaacacaattatttatcccttaaaaataaaattttaaaaagaaaaagattagcttagggatttgaatttccaggtcaagcactgcatacatgccctaatttcttctatttttctctaaaagagaggatacccttatctcctgtagcagcagtgtgaaaattaccgaaaaccaaataaccaatctcatcctgaaactggctgaattaaaatgcaagtttaaatctcagcctcagggtgccactgttaaggtaagagcatttattgggaaagmatggggtgaagtaaactggaatggggaagtgtggaaagatcctgatgaagctggagctattgagcccctcaattcttgtaagttttcttcagcagtgtaagagatctccccacattcagcataagtgttctccatatttcaggggcagtggcatccctactcccagagatatctgcttctccactcacagtggtatcagcctttccacatccatctgaggggattaacactgcatcgcatgacgaaactgtaatggcctccactgattaaggtgccatg

SEQ ID NO: 291637 - DNA, 600 bp, Homo sapiens
gattaaggtacataaaaaaactacaacaacccaatcaaggcaggattactaatggcgcagactcctcaggaataaaggtttgggtcatccaagagggtgaagaataatgaccagctgaggtgcttgctgaaggcaaaggtaatatactgggtggtgaaagaagagagttatatatatatcagtcataagctcttgaccagttagggaaataaagactgtagttttaatgagtatttcctcctagttttgctatgaatatgtttgtgtatgtataatacacacacacactcacacacacacacatacacattctgttggttctatttctctggagacccctaacacaattgtttgctctttgggagtttcaatttcttcacttgttaattaggtaatactagcttaattaatggrtcaaattaaatttattatgtaagggctctacacatgttatttattatgtctaaagccttactactggaaatctggaaaaagtaaattagttcttgatgtcacttctttgtaattctttcataacaacaattagatattaaaggctcatgagttatattcagagcatacttactgtttaatttaccc

SEQ ID NO: 291638 - DNA, 523 bp, Homo sapiens
tgacagaaaacggaaatgtgtcatgttttatttaattgaatttttatctcatttcattaagccactgtagcactctttgagacaagtagtatgagtccactaaaagaagtaaattcccttgagtgtcttaagactagcattgtatattttttaagtgaaatgtgtgtcttagtcaatatcaatgccccatcttggtgaggctttgcttgtgtatttagtatgtattgggatgtgagtgactttgaattatatttgggataaatatgaggtaagtgatttccagaagttctttmtaccaaaggggccaaccttggataagtaatcattgttgctactgttggatagatcagatggccagaccattggcaatatcctaaaagcctaaaaatgtgtggattgttggccatggtatccagtgttaaaatgactactacacacattgttagtcatttgttcacactggaatcatgctctagttaagagatgaaaattgctaactcttcaggaagccccatcacatgtg

SEQ ID NO: 291639 - DNA, 541 bp, Homo sapiens
tgttgttttttctttaatgttgtgggtactgacaggatcaatagctgtttgttgacagtgtcacagatgcagtgacccttggttgagcaaacaattttcaagaattaaactgaagtagcaaggccatttattgtttgtagtatgtatgtgacaatggccaatcccctttatttaaactcatttgtaagtatctgtatattcttaatragtgtatcagatgaatctccttggaggaggatgtaatcaatgtaaagtcatacctgtgctctaggaacaaattgaatgtaattaagatcttggtgcaaagattatgtgtgatggcaggaattgagataacccaccacgggtagcagggtaaaggtgtattgagtcttttagaagttgaaggaaaaggacagctgaggggctgaacagaaacagacactgaacagaatatattagccaagtccataactgcaaagtatcactggctgattggatagagtcagtaatttaaataatattgggcacgagggccttaatgggaggggtacagcattaa

SEQ ID NO: 291640 - DNA, 525 bp, Homo sapiens
ttctttttatttggggggttcggggtggaatcttactctgtctccgctcactgaaacctttgcctcctgggctcaagccccacctcagcctcccaagtagtgggaccaaaggtgcatgccgtcatgcctcgctaattttttctagatacagggtttcgctatgttgctcaggctgatcttaaactcctgagctcaggcagtccacccacctcagccccmcaaagtgctgggattacaggcgtgagccactgtgcctggcccatattaaattatttcaatgtctagaaattaattttgtcatctgaaaggcccgcttttttttccctctggagtactgataataataatgaacttcaacataaagaggtaaaaatagtctttatatatatatatatgtatatatataaatgatgagcttatatatatatgtatatatgtgtatatatatatataatgcccatgatgactgttttattgaaaggtgatgaaaatagagagacttaagataaatgggaaggggtggta

SEQ ID NO: 291641 - DNA, 614 bp, Homo sapiens
tcactattttaagattggttggactgaagaaaagtctatttattgagcattttaaaactcaatcacataataatcttaagattgagctttcacacaaggaaagtgctctctctttaaaatgtcaggtcctatggttgtgtgttttaatttgtttaccggtttgttattgtttttgcactatgacctctcatattttctgggaataattcttcataaaacttctggaatacattatatatggcattaaaaataacaagcaaatagtatatttcaaattggatggaaatttacatccgcaactgtttatgttcaagagattgccatatgtctttcaagttggagagatttttatggtagagaatgatgatttgaggactgggagggctgtgaagggaattaagaatgatgttcaggaaagagastagtcatctgtttatgtgtatttgtaatcatataaaggaaaattttaataaagattgaaataacaaccgtaagttagtggcataaattcagaatgctcataagtaacaacagaaggcggaatagaggtaataactaggaaataagaaagtgttctagcagaaaaactgaaaaatcaaatatgtcctgctcta

SEQ ID NO: 291642 - DNA, 573 bp, Homo sapiens
aagtgaaatattcttgatgaattttagctgccttgcttgaaaaagaaagactggaatcatcagccaaatgaagatattaggactctaygtattacacgctgttagagttacaattaaataatgaatgtgaattacttagcaaagtgtttgacacatggaaagtgtcctaattttacttaacaccattttcaattcaaaaattctactgatcagtaaccaactttctcttcatttttcccttctgtgtttaatgggaataaagtacatttctacaaattattcatttgtgttctttcctttccactttcaggtcaccgaaggtacagcagttaattcagctgttaaccattttaacctgaggggttgttgaaactaaatcctcttttaaaggctttctaagatttactgatgatttcaaaatagcttgagaatcagattaactgaaacatttcctactcatttattagaaaactgatgtctgtaaaatgcttctttgacattgtgaacttctatcatctcagttttacaaaatgaatactaaagattaaaacatgaaggcagattcctcccaat

SEQ ID NO: 291643 - DNA, 573 bp, Homo sapiens
aagtgaaatattcttgatgaattttagctgccttgcttgaaaaagaaagactggaatcatcagccaaatgaagatattaggactctatgtattacacgctgttagagttacaattaaataatgaatgtgaattacttagcaaagtgtttgacacatggaaagtgtcctaattttacttaacaccattttcaattcaaaaattctactgatcagtaaccaactttctcttcatttttcccttctgtgtttaatgggaataaagtacatttctacaaattattcatttgtgttctttcctttccactttcaggtcaccgaaggtacagcagttaattcagctgttaaccattttaacctgaggggttgttgaaamtaaatcctcttttaaaggctttctaagatttactgatgatttcaaaatagcttgagaatcagattaactgaaacatttcctactcatttattagaaaactgatgtctgtaaaatgcttctttgacattgtgaacttctatcatctcagttttacaaaatgaatactaaagattaaaacatgaaggcagattcctcccaat

SEQ ID NO: 291644 - DNA, 390 bp, Homo sapiens
aaaatcttagaaattggatgtatgtgctttgtgtattatttggtgtattttgttgtacttctggatagaaactttgaagtcagtctaattggggtctaagacmctttttcgctgtatattatgtatttacttgtgttaatttacctaaatgcatagggtcttggttgctcttatgtaaaatgtagatttaaataaggtatacttgattttaattaattataaagtatgacaacctgctgtcaaacatgcattctctctaattctagtgtatgttgactatgcttttaaaaatgattaaacatactgcacttcttttgaaccttgtatatgctgtatcaaaatgtttcctcaagccccacctcctattaaattgctatttattcttcagaa

SEQ ID NO: 291645 - DNA, 493 bp, Homo sapiens
  misc_feature (1)...(493): n = A,T,C or G
tgtttaagaccatgctgtttagtttaggatacacaaaaaaaaatactctgttttcctgcttctcactaagcaaagctcagcttgattctctgcagagtttcacttttgtgtcacaacagcaaattcaaaaatggcttccrcaaagcaaataagcactgagtcagggaacttggaaagaggcttagagagaatgccagctcctcaggagggagagtacatcaccagttgtatgtgagctctccagatgtggagtggatattgccaatctgaaagaaactagacaaattagaatacatggaaaaaagttgcaagttatcttttgttctgggaaggtcttctgaattcactgtgacagcagggttcagctttgcagttacttgtcttctattcttcagacatatctagatgatagcaatcatttctcagtatcccctgaaacccatgcttagttagttgtatcatcatattnnnnnnnnnnnnnnnnnnnnnnnnn

SEQ ID NO: 291646 - DNA, 611 bp, Homo sapiens
aattcacttattggttctagaagttttttggtagagtctttagtttttttctatatataaaatcatgtcatttgcaaacagagaaaatttcacttcctcttttcctctttggatttgctatttctttctcttgcctaattgttctttctataacttacagtactatgctaaataagggtggtgaaagtgggcattcatttttttttctcagttcttaaaggaaaagcttttagattttcccaactcagtatgatgttagctatgggtttgggtccacgataatatgggccaacaataatatatggcctttgttatgttaaggtactttccttctatactttatttattaagggttttttatcatgaaaacatgttgaattttctcaaatgctttttctgcatctattgaaatgatcatatggtttttattcctcattctgttgatgtgatgtgtgatatttattgatttgcatatgctgaaccatacttgtatttctgggataaatcccacttggtcacactatattatctttgtgatgtgttgtcrgattcagttttctagtatttgttgaggatttttgtgtctatgtccgtcagggatattggcctgt

SEQ ID NO: 291647 - DNA, 572 bp, Homo sapiens
gtggtctttcaagaagatacatccagtttaaaactgtaaaaattaagatcccaaatatttgtagatacatggatttaatccagtagcgtacatttaaaaatcacatatatgtatatatggctcttaacttactaatttttatgttattgttgtctcttttcttttgtaacatggcaarcctttaaatactttgtaataagtatattttaatattaattagatgtcatatgttcctgagatcttactcttatccaagttatacatgtagccagtactagtagtcccataatgcaaattatcttaatcgacaaactcataataaatactcatatattacataaacaatgttgctaatttctaagtagcagggacttggttttctcttgattagaataatctagactatgctactctatgctaatgaacaatatcaagcaaagcaaatggttatctattgctcttgtaaattctgctctggatctgtgcaattcttgagagcaattcttccatgcagagacttaacaatccaagctgagtaacttcagtgtttccttcttgggcattctccacta

SEQ ID NO: 291648 - DNA, 571 bp, Homo sapiens
acatggatttaatccagtagcgtacatttaaaaatcacatatatgtatatatggctcttaacttactaatttttatgttattgttgtctcttttcttttgtaacatggcaaacctttaaatactttgtaataagtatattttaatattaattagatgtcatatgttcctgagatcttactcttatccaagttatacatgtagccagtactagtagtcccataatgcaaattatcttaatygacaaactcataataaatactcatatattacataaacaatgttgctaatttctaagtagcagggacttggttttctcttgattagaataatctagactatgctactctatgctaatgaacaatatcaagcaaagcaaatggttatctattgctcttgtaaattctgctctggatctgtgcaattcttgagagcaattcttccatgcagagacttaacaatccaagctgagtaacttcagtgtttccttcttgggcattctccactatctccttggcaagagaggcaaaaacctggataactgatcttactgcctcagttcagagttatcta

SEQ ID NO: 291649 - DNA, 514 bp, Homo sapiens
ttatcccaatactaaaacaggcaaatatattacaagaaaagaaaactacaaatatctttcataaacatagatgcaaaaatcttcaacaaaatattaacaaactgaatccaatagtatatgaaaacaattatacaccattrccaaattgtatttatcccaggcattcaagcctggttagacattcaaaaatttatcaacaaggctgggcgtggtgcctcacgtctgcaatcccagaacctcgggcggctgaggtgggtggatcacatgcggtcaggagtacaagaccagcatggccaacagagtgaaagcccatctctgctaaaaatacaaaaaaaaaaaaaaattatccaggtatggtggtgtgtgcctgtgatcctaggcactcaggaggctgaagcaggagaatcgcttgaacccaggtggcagaggttgcagtaagcagagattgcaccactgcactccaatctgggtgacaaagcaagacggtctcaaaaaaaaaagaaaagaaaagaaa

SEQ ID NO: 291650 - DNA, 397 bp, Homo sapiens
tgttgcaataacaaaaatatctctagttatttctggataaggtgttattatctgttgagatatgttagcaattaaactttttactaattccattattatgtaatccctaatcttttcattttaaaaattacttttaaatatatttattaacaatgatctcattattggaataggaaaaatacagacaagtcaaaaaggaaaaaataaatgaaaatcatatgagatgtcccaaagaaaaaatgtttattaactagttgtattcaatttgagtccttttgtgcttttagagtatttttaaacaaattaaactaaagtaaacaaaaggtttgtatctttctttagaaaaacctcatgaratattgaataatcttcaaaatatgataaaggctacatattt

SEQ ID NO: 291651 - DNA, 481 bp, Homo sapiens
tgcaacaattttaacacatgtgagatagcccaagaggtgtatcatatttagatggtttcagaatttcattaatctaccttctaggaatgtgatattttacagattgtacttttgtacagtacaaagacaggcagctaattcttaacagaaacttaaaagccatctctctttttccaacatgctcctcacatttctttagttgttcaaacacagaaaagtaacttatcagatgctcagctcctggtttcttatccaggtccccttcagaaartaagtaatctctacttgaataaatttacaagagacaggattcagggccagagatcatattaattgactgggcaagaatggcacctgttcagttcctccttgatagatttactataaaaacttcggtttcaaagatataaaatatatatcaccgaattgaaatatctgtgcagggcatatcagacaaattcctgcaatgaatttccaggat

SEQ ID NO: 291652 - DNA, 549 bp, Homo sapiens
tcattgttcccaattttagtatgattccacaccaccccttagccctagtgtacctgaacccaaaggtctctccagaaagtaaacttcccatcttatgccaaggtgggaaagaaacagttgtttgtatgcattggatgggaagatgatctagtattctgaatccttgttaaaacctgagccatgtatctctaactccagtgaaacttggtagctctgattctacaggggaatttgtcagaaagaatcagctgactttactggcttccccactatgggcttagtctttggcctttcctagttttctaagtgaactgttgtacccctcaaaactcatgtcccaacaatcatttctgattactcaggattctacmgttcaactgcgtggttcttctgcttttagctgggctccttcaggcacctgcagtcaggtacaagcctggaaggcaggtgtgcccatcttggcagagttcacccacattcttgcagttttgactggtacaattgggctgattcgctgctggttacatgttctcccatccttcatcatac

SEQ ID NO: 291653 - DNA, 575 bp, Homo sapiens
gcctgtaatcccagctactcaggaggctgaggcaggagaattgcttgaactccgaaggcagaggttgcagtgagccgagattgtgcygtgaactccagcctgggcgacagagtgagactctgtctcaaaaaaaactactatagccagcaatattcattttactgaatattttgtaagggataagggcaattagcattgcatggctcattccactattattcctctttttcagctctccaatcctgaagtcaaaatggaatgcatctctgctcttcctctgggcatcatctaatttttttgttcttgttttccttgtgctggaatctacaacaccctctcctagcccctcaaccagcctttcttctgcagagcaacttagttctaattagcaactacaaacctattcacctacatccaagagttcagtagtgtcttttaagtatgtaacaggcaattcttttacattttattgagatgactactttaaaaaaattggttgctacccagaactgtttagaacattgcttgctttaggtaagtgagtgaagcaagatgtgataacatagggctggggg

SEQ ID NO: 291654 - DNA, 558 bp, Homo sapiens
tccagcctgggcgacagagtgagactctgtctcaaaaaaaactactatagccagcaatattcattttactgaatattttgtaagggataagggcaattagcattgcatggctcattccactattattcctctttttcagctctccaatcctgaagtcaaaatggaatgcatctctgctcttcctctgggcatcatctaatttttttgttcttgttttccttgtgctggaatctacaacaccctctcctagcccctcaaccagcctttcttytgcagagcaacttagttctaattagcaactacaaacctattcacctacatccaagagttcagtagtgtcttttaagtatgtaacaggcaattcttttacattttattgagatgactactttaaaaaaattggttgctacccagaactgtttagaacattgcttgctttaggtaagtgagtgaagcaagatgtgataacatagggctgggggactagagttgggtaatatggtagcacatgattttgttacttgagattgcctgtaattgtagacatcagtgagcagg

SEQ ID NO: 291655 - DNA, 490 bp, Homo sapiens
aagaatctggttcataaaactgctaatccaacatcaagcagaacaataattaattaaatgccaaggaaattctttggcagattttcatgctaaatcagccagtactgaaattgttatgatatgcaatttaaatgaacaacgtaagactgatccaagtcaaaytacatctctgataatatttatttatttatttgagatggagtctcgctctgttgcccaaggctagagtacagtggcgccgatctttgctcactgcaacctccacctcctgggttcaagtgatgctcctgcctcagcctcctgagtagctggggttataggcgcatgccactatgcctggctaattttgtattcttagtagagatggggtttcatcatgttggccaggctggtcttgaactcctggcctcaagtgatctgcctgcctcggcctcccaaagtgctgggattacaggcctgagccaccgcatccagcctgataacctattta

SEQ ID NO: 291656 - DNA, 490 bp, Homo sapiens
aagaatctggttcataaaactgctaatccaacatcaagcagaacaataattaattaaatgccaaggaaattctttggcagattttcatgctaaatcagccagtactgaaattgttatgatatgcaatttaaatgaacaacgtaagactgatccaagtcaaattacatctctgataatatttatttatttatttgagatggagtctcgctctgttgcccaaggctagagtacagtggcgccgatctttgctcactgcaacctccacctcctgggttcaagtgatgctcctgcctcagcctcctgagtagctggggttataggcgcatgccactatgcctggctaattttgtattcttagtagagatggggtttcaycatgttggccaggctggtcttgaactcctggcctcaagtgatctgcctgcctcggcctcccaaagtgctgggattacaggcctgagccaccgcatccagcctgataacctattta

SEQ ID NO: 291657 - DNA, 522 bp, Homo sapiens
gctaagtcttatgctgtagtgaaaaaacagagcaattgttgggtttatgaarataagctagtttctactgaggaaagattccagtggcattcctgggggctcagtcttggtactagcagggtactggtagtatggaatttgaaagtaatccataaaatgagaaaaatcttgggtttgaccaaccagtccccacagaggttcaggtgagtagaagtcatcttttgaaaacacttaataaaacatcatgcagttttggatcctgtttccttagacactgccaccaaatacataaaggaaatttctcagaggaaagaaacatatgacatgttcataggagcagcaaaccattggtttgcaggtaggcttggcttttccaaggtgttctaacctttatgctcttctaatggttctccagattactatgacttgtgttaacaagataatgacaacattggatacctctttaaatcagcaaactgcagttcttaatcattatcacctcctgaacaaaaaccatgacca

SEQ ID NO: 291658 - DNA, 1081 bp, Homo sapiens
atttgaggaaatggcaaacactcattctacctgcaggtggaagcctgacctcctgcctttcaacttcctccagaatccttggagggttttttcttttcttgtcaccaaggcaccgctgaaatctgttagtcaaatagctttctacccatgaggaaagtgagctttgatatgtatttgcttctcattcarctatagcagcaccagttaagatgctgccaccacatgaatgtaaacgaaaaataaaacagcaggctcagttttcattctaaagtccactctctgatgggaataagaaataactcaatagcattagtatggaacattgggtgtcaggatttttgccttcatttcccatcttttttttggaaattaaactcagtacctctattatctttaagaatcagggatagtgatgatatttttcccccaagaaagaaaataagggcctataaaaatgctctttttaatgctctcaaggggaaatgctgaattgagaagcaattgggttttctagaagtccwtctcattcaactatagcagcaccagttaagatgctgccaccacatgaatgtaaacgaaaaataaaacagcaggctcagttttcattctaaagtccactctctgatgggaataagaaataactcaatagcattagtatggaacattgggtgtcaggatttttgccttcatttcccatcttttttttggaaattaaactcagtacctctattatctttaagaatcagggatagtgatgatatttttcccccaagaaagaaaataagggcctataaaaatgctctttttaatgctctcaaggggaaatgctgaattgagaagcaattgggttttctagaagtccaacaaacgtactttttaaagtggttctctgatggaatacctatagaaaawccttgcttcttcatgtgaaggtttgcattcaccaagtctgattgtgtaatagaggttaccctttttaaattaaatgaattctaaacaaagttttacttacatttccatttttgctttttaagaatggagtgattgagtctttttaggaaatgtatacactttgtggcta

SEQ ID NO: 291659 - DNA, 560 bp, Homo sapiens
tctcattcaactatagcagcaccagttaagatgctgccaccacatgaatgtaaacgaaaaataaaacagcaggctcagttttcattctaaagtccactctctgatgggaataagaaataactcaatagcattagtatggaacattgggtgtcaggatttttgccttcatttcccatcttttttttggaaattaaactcagtacctctattatctttaagaatcagggatagtgatgatatttttcccccaagaaagaaaataagggcctataaaaatgctctttttaatgctctcaaggggaaatgctgaattgagaagcaattgggttttctagaagtccaacaaacgtactttttaaagtggttctctgatggaatacctatagaaaaaccttgcttmttcatgtgaaggtttgcattcaccaagtctgattgtgtaatagaggttaccctttttaaattaaatgaattctaaacaaagttttacttacatttccatttttgctttttaagaatggagtgattgagtctttttaggaaatgtatacactttgtggcta

SEQ ID NO: 291660 - DNA, 546 bp, Homo sapiens
ctcatctgcaaaatgggaataatgtgcctgcctcagaagaatgctgtgaagtttggaggcattaatatacataaagcatttagaaaactgtctggaaatcagtgagtgttatagaagtattaaatattaccccatgtgaaatatatcataccttaatgtagttaaggttttgccagcattgtccaatagaaaactattgaacacttaaaaagtggccactgccaacacaggaaataaatataaattttatttcatttaaatttaaatagccagacatggctagtcattattatactggacagtacagatctagataaatcatttttatgctactgtttyttaaaattacctttagtatatagtattttgttagcaaattccttgaagattccaagtctctcttgtttgttgctgtatctttgatgcttagagtttgagttcagtaaataattgtttaagaaacagctgaatacttcaatcttacgttgactctgaaacgtagatctgcagcctccttgtctttcacagaaacctgtcttatttcaa

SEQ ID NO: 291661 - DNA, 586 bp, Homo sapiens
  misc_feature (1)...(586): n = A,T,C or G
aaagacaaaggacatatcaggatcccttctaggaaatagatgacacacttaacaggcatgaatgcacataattcgatgactgttagatgtaataaaacatgcccatgctagcaaccagaggaaatcatcaccacagaggctcaaatgagcaaaccacagtatggcagggagatgataattgaaaagttcccacaaacttaggaaaagactgatttttgaagccctggtaataagtagccaccagaacccatttttaagactgctcaaatgatcaacaaaaactcacttcagtgaatgtgctttttgcaagccaactactgtcaggccctcattctgaaagtcaggcaaacagggacagacacactscaataaacatgcctctgagattcaaccaatcaacaacagccttgcctactaacaatgcatgttctcactcataagtgggaattgaacaatgagaacacatggacacaggaaggggaacatcacacaccggggactgttgtggggtggggggagtggggagggatancattaggagatatacctaatgctaaatgacgagttaatgggtgtataacatggc

SEQ ID NO: 291662 - DNA, 557 bp, Homo sapiens
  misc_feature (1)...(557): n = A,T,C or G
ttcagtgaatgtgctttttgcaagccaactactgtcaggccctcattctgaaagtcaggcaaacagggacagacacactgcaataaacatgcctctgagattcaaccaatcaacaacagccttgcctactaacaatkcatgttctcactcataagtgggaattgaacaatgagaacacatggacacaggaaggggaacatcacacaccggggactgttgtggggtggggggagtggggagggatancattaggagatatacctaatgctaaatgacgagttaatgggtgtataacatggcacatgttacatatgtaacaaagctgcacgttgtgcacatgtaccctaaaacttgaagtataataataaaaaaaaagtttctacagatgatgtcagccatttgagcctctgaaaatgtgccaatcttgagttccttacctcaagttgagccctatgtaagatcaggagttttctctgcttggtgacactgtgctgagcagtctagtcttctttgacagaccaatttagggaaatacaccaaactctctttcttcccca

SEQ ID NO: 291663 - DNA, 557 bp, Homo sapiens
  misc_feature (1)...(557): n = A,T,C or G
ttcagtgaatgtgctttttgcaagccaactactgtcaggccctcattctgaaagtcaggcaaacagggacagacacactgcaataaacatgcctctgagattcaaccaatcaacaacagccttgcctactaacaatgcatgttctcactcataagtgggaattgaacaatgagaacacatggacacaggaaggggaacatcacacaccggggactgttgtggrgtggggggagtggggagggatancattaggagatatacctaatgctaaatgacgagttaatgggtgtataacatggcacatgttacatatgtaacaaagctgcacgttgtgcacatgtaccctaaaacttgaagtataataataaaaaaaaagtttctacagatgatgtcagccatttgagcctctgaaaatgtgccaatcttgagttccttacctcaagttgagccctatgtaagatcaggagttttctctgcttggtgacactgtgctgagcagtctagtcttctttgacagaccaatttagggaaatacaccaaactctctttcttcccca

SEQ ID NO: 291664 - DNA, 555 bp, Homo sapiens
tggtggtgattttcctccaattaaatttgtttgtaaggaaaaaatctattgttttctaggtaaatctgatgatatagtcacagcaaaagtatagtatattcatggcaacacattttatgaactattattccagtatctatgtgaagcaataaattatttgaattacactgtacactcttcactagtactctaagtccatcatttcttatctacaattctggaaaaaaaaatttattttgagacaagatctcactatgttgcccaggttggtcttgaactcctagggctcaagtgatcctcccatctcagccttccaagttgttaggactacaagctacaattctgaaatgtttttaaaaatttgaaaactaagtatttttcacattgcataatgtgcaaaagcaaacttatgctcatgaatttcaggrtattttcataattttaatcttaacacaaccaccctcagtgggcctgccaatattttaatgagtaaatggtcaagagataaaaaaaaaatggctaactaggcagtacaagatagtgagctaggcttag

SEQ ID NO: 291665 - DNA, 490 bp, Homo sapiens
ctattcaggctcttttctgagtccatataaattttagaatagtttaatctaattcggtgaaaaatgatggtagtttgataggaatagtattgaatctgtagactgctttgggcagtttggccattttaacaatattgattcttccaattcatcaacatggaatgttctcccatttgcttgcatcatctctgatttcttttagcagtgtttgatagttctccttggagaggtcattcacctccttgtattgttmgatgtattcctaggtgtgtgtgtgtgtgtgtgtgtgtgtgtgtggctattgcaaatgggattgcattcttaatatggctctcagcatgaacattattggtatatacaaatgtaacagatttttgtacattgactttgtatcctgaaactactgaagttgtttataagttctcagattattatggcagattctttattattttctaggtatagaatcatattgtcagtgaagacagat

SEQ ID NO: 291666 - DNA, 544 bp, Homo sapiens
agcagtcaaggcagcaggaacagcctaggtaaaagccctaaggcaagagtgtgcctgcctggcatgcccatcaaacagcatggctggagccacatgaaagagaggaagaggaatagaaaatgagatgagaggtgaaaccagggaccaaatcaagtagattttgtaatgaaaggatctgggtcttgcattcgttttctagtgctgctgtaacaaagtatcacagactggatggcttaaaccacagaaagttatattctcacagtcctggagactagcaatccaagatcaaggtgttagtagacttggtttctactgagcctctctccttggcttgcagatggctgccttctcgctgtgtgttcacatgatcattcgtaggtctayatgtcatctgcatcctaatctcctcttcctataaggacaccagttacattagattacagtccacccatctggactcatttcatcttaattacctctttaaaatacagacagattctgaagtgctgggggttaggacttcaacatatgaatgtgaggtgag

SEQ ID NO: 291667 - DNA, 552 bp, Homo sapiens
caagaagtggaattatctggcatattttaaagggctcattctggytgttttgcagagagtagacagtggaggcacaaagatatatcaggagagaccagttaggaggctgctgcgacgacccaggtgtgagatcatgatgacttggatcagggtagtagtagtggtaagaagtggtcagattctggatgtgttttcaaggtagagttaataggatttcttggcaggatgcaggatgtgaaagaaagagaagtcagggattattccaagacttttagtttgagcaactggaagagtggtgttaccttcagctgagatggggaagattgcatagggagtttgggatgtccactagatattgaagcaaaatgtttgaatgggaatttgaacattttagtccatttgaagttcaagagagaggtctggactggatatgtaaaactgggaatcattggcatatagatagtatttaaaacctcagactggaagagatcactaaggtctaagacacttatagtaaagagaatttcctatagacctagagcatttgttctc

SEQ ID NO: 291668 - DNA, 546 bp, Homo sapiens
atggaaggaaagggagattgcagacaactagtacttaaaagttttgggagaggtttttttgcaaaggaaaacaaagaaatggggcaatggctggtaagtatcagagaattgggcrtgagtttagagtgctgactgtcagaccacatcaagggccttagaaccaaggacaaggcagatccaggttgaaatgattctggacacaggtctagaatgagaaaaaggtctagaaattaattatttttgttgggtgatggcttcatgagtcagaggcaggtctgatggctggggccaactggaccagacagttctaagacacactattctttatattctatccttttcagtccaaataaaggactggagctggcatatgaattcttcacaataactcagtacaagattccttgctgtctctgacttctaggggtaggcttatttttattttatgtggctccaagggtgcaggtaagtttcagggccctctctgtctggactattgcatcagtcacttacctgactccagcttgctgcctttcactcccttct

SEQ ID NO: 291669 - DNA, 509 bp, Homo sapiens
tgcagcccaccagagtaggaggctgccaaggttaggccagcagtggacctgaggtcataaacaggaaaagaaccccaggaggaacattaattctataatgtgacccaacacgacaggtgttgaggaagcctgtggtttggygggctcacagcagccctagtactcaccccacacataccacaggattgcttattgcaacacggcaaatctaggcccttcagtgttgtgggaatgaaattcagaatgtttgcctcactgtggtcaggaactatggctggatgaataacagcccccaaatgtgtccctatcctgatccccggacttgtaaatgttatcatatctagcaaaaaggacatgaagatgtgattaagttaaggatgctgagatacggagagtatcctggatcatctaggtgggcctgatctaatcacaaggtcctcttgagagtggaacaggaggacttcgagtcagaggaggtgatgatggaagcagagatgggagtgttacac

SEQ ID NO: 291670 - DNA, 509 bp, Homo sapiens
tgcagcccaccagagtaggaggctgccaaggttaggccagcagtggacctgaggtcataaacaggaaaagaaccccaggaggaacattaattctataatgtgacccaacacgacaggtgttgaggaagcctgtggtttggtgggctcacagcagccctagtactcaccccacacataccacaggattgcttattgcaacacggcaaatctaggcccttcagtgttgtgggaatgaaattcagaatgtttgcctcactgtggtcaggaactatggctggatgaataacagcccccaaatgtgtccctatcctgatccccggacttgtaaatgttatcatatctagcaaaaaggacatgaagatgtgattaagttaaggatgctgagatacggagagtatcctggatcatctaggtgggcctgatctaatcacaaggtcctcttgagagyggaacaggaggacttcgagtcagaggaggtgatgatggaagcagagatgggagtgttacac

SEQ ID NO: 291671 - DNA, 496 bp, Homo sapiens
tatgttggggatcatctgtatttttacctatcactatgtttttgtctatccatagtgttcctatatacctggtgtatattccatagtatgtaccccatcaaattttgtttattcaacttcctagtgatagacacctaatttctcatctacctgtctgctaccacataaaaggtagcaggggacataattgattatggccctttatggatatgttgcaggcgtttctctggtgtatattcccaggcgtcagttggatggatcatacagaatataaatacacccttggtttctctaagtattgctagattgtgtctgtaccagttaactctcacatgccttttttcccctaaattcttgccaacacttggaatcattcaattttataatatttgctactctgatgtccataaagtggtatcttacagttgctttagttggtcacgttggtattggtcatattggtattgtcrggttttgttctagattgtaatgggtg

SEQ ID NO: 291672 - DNA, 526 bp, Homo sapiens
ttttttcttatctctactgtacaacaccggcgaaaccccttcaatctaaagcttttatctgtatttctatgtagattatcattaattcaaaatagttctccactactgtttattgtttctctctcattctgagactttactttttttttttttttttttttttttaattgaaacagggtttcactctgtgacctaggctggaggccggagtgcaatggtgcaatcaccgctcaccgcagcctcgaccttcccarctcaagcgatcctcccatctcagcctcctgagtagctgcgaccacaggcatgcaccaccacatccagctaatttttcatttttttatagagacggggtttcgccatgtttgcccaggctcattctgaaattgttatcatgttgacatttctatttttatatgccatatcatttaattctcttttttatgaagtcctcatcttttttttttaatttttaggcctgagggcctcttccatccttgtcaagggtagtgctaaccttttgtccttt

SEQ ID NO: 291673 - DNA, 1074 bp, Homo sapiens
ttttttcttatctctactgtacaacaccggcgaaaccccttcaatctaaagcttttatctgtatttctatgtagattatcattaattcaaaatagttctccactactgtttattgtttctctctcattctgagactttactttttttttttttttttttttttttaattgaaacagggtttcactctgtgacctaggctggaggccggagtgcaatggtgcaatcaccgctcaccgcagcctcgaccttcccagctcaagcgatcctcccatctcagcctcctgagtagctgcgaccacaggcatgcaccaccacatccagctaatttttcatttttttatagagacggggtttcgccatgtttgcccaggctcattctgaaattgttatcatgtkgacatttctatttttatatgccatatcatttaattctcttttttatgaagtcctcatcttttttttttaatttttaggcctgagggcctcttccatccttgtcaagggtagtgctaaccttttgtcctttwtcctcaatcatgaaaatgtgtcagttcaatgggaagtaaaatgggcttttaaataaagagggctagataaactcgtgcatcacaaacaaaatacatgcctgcttccaaatggagaagtaactgaaaatgtccaggcaattggactagctttcttttcatgtctccaccatttgtctttggaacctgagtcatttctatgtcagcttgcccaggtggcctggagaacataagggttgccagccaggacactaactctttaaaggtctgtttatgtctgcataactaacagtgcttatgtgtactcaggaggaaatgccaagctaacaaggaagaccacgagtccacaaaattttaatttctagttttaggagaaattaacttccacattcatgtttttgtattatgaatttgcatgacaacttwaaagtctgccatggtatttatggtaatttcattacaaaccacattttcatcttttaatttctttcctatttataattatacagctataattaaaaggtattacaatgacacgatatcctcacta

SEQ ID NO: 291674 - DNA, 578 bp, Homo sapiens
gaaacaatgtctttaaagaggtaattaaggttaaatgaggtcataagggaggagccctgatccaagagaactagagtccttatgagaagtggaagagacaccagaactctctctccatrcacacagaagaaagaccatgtgaggacacaacacagagacagccacctgcaagctaagaaaaagaggcctcaccagaaagcaaccctgccagcaccttggtcttagacttttatcctccagaactgtgagaaaataagtttctgttgtttaatccacacagtggcattttgttatggcagcctgagcagactaatacacctggagagatcttgaaaactcagtgtccaggccatgccccatgacaattaaatcagaaccttccagtcagatccaggcatcagaatgttttaaatcttccaagataatcccaacgtgcagccatattatatacaaagaggctactactaactttgaaatggcaaattttctttctctttccattttacatagctgatattccccaacatacaataaggatattatatattttcatatttactgcatgtatttgtctcaat

SEQ ID NO: 291675 - DNA, 578 bp, Homo sapiens
gaaacaatgtctttaaagaggtaattaaggttaaatgaggtcataagggaggagccctgatccaagagaactagagtccttatgagaagtggaagagacaccagaactctctctccatacacacagaagaaagaccatgtgaggacacaacacagagacagccacctgcaagctaagaaaaagaggcctcaccagaaagcaaccctgccagcaccttggtcttagacttttatcctccagaactgtgagaaaataagtttctgttgtttaatccacacagtggcattttgttatggcagcctgagcagactmatacacctggagagatcttgaaaactcagtgtccaggccatgccccatgacaattaaatcagaaccttccagtcagatccaggcatcagaatgttttaaatcttccaagataatcccaacgtgcagccatattatatacaaagaggctactactaactttgaaatggcaaattttctttctctttccattttacatagctgatattccccaacatacaataaggatattatatattttcatatttactgcatgtatttgtctcaat

SEQ ID NO: 291676 - DNA, 528 bp, Homo sapiens
ccttccagtcagatccaggcatcagaatgttttaaatcttccaagataatcccaacgtgcagccatattatatacaaagaggctactactaactttgaaatggcaaattttctttctctttccattttacatagctgatattccccaacatacaataaggatattatatattttcatatttactgcatgtatttgtctcaatttgctgtttgcttttatgactttgccatatatacacatatataggtatgtatgtagatgtatgcacacatatatgaacgaatatgaatatgaatgtatgaatatatgaatgtgtgtatatatgcctcatatacatatatgtatatataatacaaatgtgtgtacacacacatacataaatacatatacttcctttagttttcttttaatagtggaaggagtgagcagaattgcaactcaacagagctaatagcagcaggtattytgagtgaccccttgatactatgactcttacatctagaacgatagcgcaagttcattcatgga

SEQ ID NO: 291677 - DNA, 619 bp, Homo sapiens
aatagcagcaggtattctgagtgaccccttgatactatgactcttacatctagaacgrtagcgcaagttcattcatggaagctctggttcatttatgtgcttagtgttgactttgtgccagacattatactaggtgctagggactcagtagtgaataaaaatacacccaatccctgcactgatgaagcctaggaagacatgggtaattgtttccatgcacagcaagatctgtgctctggagaaaaggacgtggtctccaagagggtgaaaccaggcatgttaacagcctttggagtcacagcaggcttctctgagggcaccgtaggcatcccttcctcatgtggggttctttattaagaatgttttcttcactgcaaaccagtttagagctcaccatatgaagggagggtggactaactctaagctcaaagatagacttccatcatgtgtgcttgtggtacagtgtttagcaccataactcactttagaacagtcctgatcaccatcatgccttaaatatgcattccccactggtctctaaggaactcatctgtggcttgaccaatcacagagccattcacttttaaattatctatggagagccatgaagcagaatcac

SEQ ID NO: 291678 - DNA, 575 bp, Homo sapiens
ttctataacacccctaaaagatcacactagcttcccagcaactgatgcaaaccaagatgaaatctttaaataccagataaggaattcagaaggttgattattaagctactcaaggagataccagagaaaggtgaaaaccaacataaagaatggaaaaagagttcaggatacgaatgaacaattttccagacagacagctatcataaagaaaaaccaatcaggacttctgaaaatgaaagatacacttaggaaaatacaaaatgcagtggaaagtttcaacaatagactagaacaagtagaagaaagaatttcagaactcaaagacaaggctttctaattaacccagacagacaaagataatgaagagagaatcaaaagaaatgaacaaagtctccaagaatatgggattctgtacratggccaaaactaaaaatagctgctgttctggaggcagaagagaagtctaaaagttcagaaaacttatttggggaaataattgaagaaaacttcccctggccttgctagatacccaaatatgagaagctcaaaaacacctgggaaattcattgcaaaca

SEQ ID NO: 291679 - DNA, 537 bp, Homo sapiens
tttatgacttctatggcaaaactcaggaactatgtccattgatcagaattattagcttctttcttagttccaggggaaaatggaaggtatttgatatttattggctgaatctagcagcaggcagcctgcagttcatcagtgtggctgtcaccagtagttcaataaatccactggaatcactacagaagaatttctaatgggatcatggaaacaatttggctagtagaaaacaaatgattaaaaagtcattacattatctacacaggcgggagtagaattgcttaatttaaccacgaaagtcactacaaaagaccaaaataattacagtgtaaatggatacccaaaataagggaatcatttgattttaatgataccttgagagaaaattatggttgcagggtacatttgccagaaccacgtaaaagagctcattggcaccctcgttggactcaattgactactcattcaaatctgaggcaccccatccccatctcgggagctccttcktgttagtgtctagtctccttcattttagtg

SEQ ID NO: 291680 - DNA, 625 bp, Homo sapiens
ggatccactgtctcacattcactcaaggcatcatttctgttctttagtccctattcctttatttctttctgaaaaactggatttgtcagcctctttctttggcctctcatctcccccagcctttgggaataggtttgcatatataggagttcaacccagaacactctagtaactgatatttttaatttgatataaaagtattttgtaaaccaagatatcaaatagmaaccattatcacaattgtggcaagacaggaatacatggattctgagtgaatattcaagagactcccttttagcaaagagtaattgacctcagtgcatgccctctgcaacatatattttagaaatcctgagttctttttgctttttttcctgatactcagttgtgcacaaagaatattgaacatgtttctaagccagaagattttcagcgtgagaatttttaacagaaataacataaatgttgcaattcacagagcatttaggagtctcaacatttgtaactttgaagagtagaggggaaagaaaatgaaagaacttgaaattttaacattttcaaagctgttcccttcataaatttttcttgtcttaatatggtgaaaaactgatctgactagtcatct

SEQ ID NO: 291681 - DNA, 625 bp, Homo sapiens
ggatccactgtctcacattcactcaaggcatcatttctgttctttagtccctattcctttatttctttctgaaaaactggatttgtcagcctctttctttggcctctcatctcccccagcctttgggaataggtttgcatatataggagttcaacccagaacactctagtaactgatatttttaatttgatataaaagtattttgtaaaccaagatatcaaatagcaaccattatcacaattgtggcaagacaggaatacatggattctgagtgaatattcaagagactcccttttagcaaagagtaattgacctcagtgcatgccctctgcaacatatattttagaaatcctgagttctttttgctttttttcctgatactcagttgtgcacaaagaatattgaacatgtttctaagccagaagattttcagcrtgagaatttttaacagaaataacataaatgttgcaattcacagagcatttaggagtctcaacatttgtaactttgaagagtagaggggaaagaaaatgaaagaacttgaaattttaacattttcaaagctgttcccttcataaatttttcttgtcttaatatggtgaaaaactgatctgactagtcatct

SEQ ID NO: 291682 - DNA, 528 bp, Homo sapiens
ccatattattgtgctattataaatagtaattttaaaattcaaattgcaattgttcattactggtatgtagaaaaccaatagacttttgtatactaaccatatatcctatctccttctatacttgctcattagttacagaagttttgttgttattattgttgttttgatgattttttaaakatattctagatagataatcatatcatctgcaaagaaagctttatttcttactttccagtctgtatacttttgttttctttcttattttattgtaccagctagtagtaattcagtgcaccgttaaataagaatagtggcaggaaacatcttgccttcttttctaagcaagaaagcatatggtttctcgccaataagtataatgtttgctgcagagtttttgtagatgttcttatcaagttgaagaactttccctgtgtcattagtttgctgagagtcttcctcatgaattaatactgggttttgccaaattttctgctttagttaatataatcgtgtatttttttttca

SEQ ID NO: 291683 - DNA, 528 bp, Homo sapiens
ccatattattgtgctattataaatagtaattttaaaattcaaattgcaattgttcattactggtatgtagaaaaccaatagacttttgtatactaaccatatatcctatctccttctatacttgctcattagttacagaagttttgttgttattattgttgttttgatgattttttaaagatattctagatagataatcatatcatctgcaaagaaagctttatttcttactttccagtctgtatacttttgttttctttcttattttattgtaccagctagtagtaattcagtgcaccgttaaataagaatagtggcaggaaacatcttgccttcttttctaagcaagaaagcrtatggtttctcgccaataagtataatgtttgctgcagagtttttgtagatgttcttatcaagttgaagaactttccctgtgtcattagtttgctgagagtcttcctcatgaattaatactgggttttgccaaattttctgctttagttaatataatcgtgtatttttttttca

SEQ ID NO: 291684 - DNA, 527 bp, Homo sapiens
ctgcatggtgaggaattcccttttcccatgtctctaggacaggctctgataaaytatttttgcctggagagttatagataaaattattggcatagtcacaattattctttattcctccccctgccagggccatgtgaggatctttcttatatctttaccaagagcacttggtaatgtttctgaacacaaagcccatgaatatgtggggccctccccaaactagtccaccgtcaacctctagcagttgatcaaaattggcctttaaatgtttctaattctttatggcttcagcagcttctgcttcaggtaagcagatcctggcttgattctctggatttgcccttctctccaggtttcagagtattggtttgtcctgctaactctattcacaaatagccccccaaaagattattgtttttcaatttgctcagcattttcttgttattaaggatggtactgatgacacccaagctcttacagccaaaactggaagtccgtcatatgcttttgagggtttgtttttcctt

SEQ ID NO: 291685 - DNA, 550 bp, Homo sapiens
gctctaggcttactacacaaacctgttatgagtcacagttttagcacaatgcataacttcgaacaatgctttgaacagatgtattcatgaaaaatgttgcagaccaagttttacttttaaaaattatttttgttggaaagaagacaaatttcatggaacatgtaagttatttagttatagcagaattgtggaataatcaaaatattccaaagaattgaattctattttgtaatgtytggagaaactgataaagctgggctgctccctaattggatttacctttgcatggaaaaacaagaaaccaatgtccgtatttccttgagagactaatgaaggctggaaggcagtgagcactggtacaaatgacaaagccaaaggatgagcagtatgatcttgaattagagtagtacagaagatcattattattccaggcaaggtattagggagtgaaatgttaacaatgtagtgggtttcacctaattttcatgttgtattacatatgcagtaacagagatacaataaaaatagctaacaattattgaacagttta

SEQ ID NO: 291686 - DNA, 550 bp, Homo sapiens
gctctaggcttactacacaaacctgttatgagtcacagttttagcacaatgcataacttcgaacaatgctttgaacagatgtattcatgaaaaatgttgcagaccaagttttacttttaaaaattatttttgttggaaagaagacaaatttcatggaacatgtaagttatttagttatagcagaattgtggaataatcaaaatattccaaagaattgaattctattttgtaatgtttggagaaactgataaagctgggctgctccctaattggatttacctttgcatggaaaaacaagaaaccaatgtccgtatttccttgagagactaatgaaggctggaaggcagtgagcactggtacaaatgacaaagccaaaggatgagcagtatgatcttgaattagagtartacagaagatcattattattccaggcaaggtattagggagtgaaatgttaacaatgtagtgggtttcacctaattttcatgttgtattacatatgcagtaacagagatacaataaaaatagctaacaattattgaacagttta

SEQ ID NO: 291687 - DNA, 572 bp, Homo sapiens
tagcttgtccacgttattacacaggtgttatgcaggcccaaggtgttacacaggtagtatataatagacttacacttgaacctatgaccatctgaccaatgaatggaaaattacagcttagctaaagaagaaccccaatttaagaaaagcagatcaagcattgcctaaaaatagggttaacatcttctttcagtttagcattcttatttataaaatgtgtagaagaaaatgttttcacaagagaagtaayccataaatcagtaacccataaatcactctctaagagctttaaatgtatatttaggtgcaaaacgtaataataatgtgaaatcatgaactattttcagtcttagaataaaagccttgtttgtcaatttctaatggggatgtaaataggaagaaaaacagatcacacatgtgcttcttgtgggccagtgtgtgctcctggtgaaaatgtggccctccttgactagaaaattttcaaaggattcccaatgagaatgaatctgggtccttatcccgacatacacaaacttgccttcctctccaatttcatgtcttccaccacttgc

SEQ ID NO: 291688 - DNA, 623 bp, Homo sapiens
ggctgttattgtcactccagaatagtcatgtctacccaggttgccatcttccaaaaaaatgtcrctgtcagttaaaccttggaaacttcattgtaggcttttgaagacccacaaaaaccaccagattattgccattgtaatggcaataatgcaaaaacaaagtaatagtagaaaaaaataactactgaacattgattataaggctgatattgcactacaatctaagttccataattcaggctttgcaaacatctttactgatgaagaatctgaggctctaagaagttatgtaacttgctcaaggtcatctatttttaaatgatgtggtttaaattcaaaactactttatttgtccttatatcctcctctttgtatagtactgttagtctgaatggcagtgataagaagaataagcaagattacactttattatggcaaaactactttgaattgcagtcattggtcaccttccccaacttcatgtgctacggtaactgaaagatcagaaaactactaacgtcaaacaacgatatacatcacatacataataaaaacacaatcaacacagctgccccaatgatattttgacctgaaagaatgcatgcatgaaacttttttctgta

SEQ ID NO: 291689 - DNA, 623 bp, Homo sapiens
ggctgttattgtcactccagaatagtcatgtctacccaggttgccatcttccaaaaaaatgtcgctgtcagttaaaccttggaaacttcattgtaggcttttgaagacccacaaaaaccaccagattattgccattgtaatggcaataatgcaaaaacaaagtaatagtagaaaaaaataactactgaacattgattataaggctgatattgcactacaatctaagttccataattcaggctttgcaaacatctttactgatgaagaatctgaggctctaagaagttatgtaacttgctcaaggtcatctatttttaaatgatgtggtttaaattcaaaactactttatttgtccttatatcctcctctttgtatagtactgttagtctgaatggcagtgataagaagaataagcaagattacactttattatggcaaaactactttgaattgcagtcattggtcaccttccccaacttcatgtgctacggtaactgaaagatcagaaaactactaacgtcaaacaacgrtatacatcacatacataataaaaacacaatcaacacagctgccccaatgatattttgacctgaaagaatgcatgcatgaaacttttttctgta

SEQ ID NO: 291690 - DNA, 589 bp, Homo sapiens
gtccgtctccttgtgccatttgtgtacctcccacaaaaaaggaaaaaaaaaaaaagaaagaaaaaccaggatggttttcagttgactgcaatcccttatgcccttccgcagatmctgaaccacacacaagcctctcttggttagtgtgatatgttaagcatgtgaccaattatcacataacaatcctcacaaccacacactggaaaaaatgatcatcactagttttataaatgacttaagatttttttttgaatggatgctcactaatgtactaaatcccacacccaccagcaccataacagttctgggaacattcgtatttggtgtaaaaatgagtgacaccatggttctgagaaatcttcacttttttccagaaatctttttgaatattctaccctttggttaaagaaacctgtaaagataggaaccccaaacttgagtatgtccgaactcccttttcttgagtgtgtattttagctttgctgttaattcccatactttcagtattccctgatttgttcttgatttacctctggtaacaaacggtgtctaaaagcctggacactggcctgggtaaaggtcccgcttg

SEQ ID NO: 291691 - DNA, 547 bp, Homo sapiens
agtattgaggactttcagggatctctggacaatattttgtaagatgcagtacttaatgaatgtttctagcattggttaacactagagaagtgtgaaacaatgataaggtgattaaagactgaggctttggaatccatctgtctgagattcatgttctcagtctcccctctactacttgcttgctatgtgaacttaagtttccagttccccaygtgttaaatgggggtaaaatggtacctacctcttagcactgatgttagtattagaggactagaactggctatgtattgttattgttatagtaataacaaagcatttcatgaaaattcagaagtacctctgtggtcacataatgcaatattatccagatatgattatctccttttatttgtctttactatatgtaaggagagaactgagataatttcagaataagaactgaacatttttagaataaaaacatcccagttgttagtatttcaatcattcttctgatgagtttcaaagttcagtgtctggaaaatggctcaggtgccagtattaatac

SEQ ID NO: 291692 - DNA, 594 bp, Homo sapiens
gaggctgcttctccacctcattgccccacatgtgaagtgggggtgtcattcctcgaaaagtggatcattctccccttcccaagctcctgagcagtggtgcagaggtttgcttaaggggtggagaaattctacaaagaaactgactttatttggaataaatgtagaaaaggtcaagcctagcaattaagaggatgctggtagctccagaaaagctacaaacaagctataggtttaacgagagaaccaagaagtgacggctagaaaaaggaacaaacctcaaaaactgggctcaaaatttgcctttgaaaaatggcctgcatttaagtgaatcaggctagagcaatttatatcctcagggaataattggaaacaataaaacaaacaactggaaattagtggaggctaacagctttctgtgatacaaactaaggcagacagcttaacagagaaatcaagaaaagatacaaagacagatttgggaaagagtraaaaattagcattctgggtagttacaagactttttacaaatgtctagtttttagaacaaaaatgtacaaaacacacaaataaagagaaaaaatgtaactacaagtc

SEQ ID NO: 291693 - DNA, 568 bp, Homo sapiens
gaaactctcaccaatcagaagctcagcaacacatgaataatgggagcatcagcagaatagagaaaggaaggagtagaaaagatattcaaaaaaaatgatagctgaaaacttcttaaatttgatgaaaaacattaacctgcccttccaagaatttcaataaccacctagtaggataaacacaataagagccatatcagacacatcttagtaaaaatgtcagaagacaaagagaatcttaaaagcagcaagaagaagacaagttatcacytgtgagtaagctccaataacatgaatggctgatttctcatcagaaacaacgtgagtccagaaggaagtagaatgacatcttcaaagtctttcaactaagaatcttatatccagcaaacctaccttactgaaatgaaggcaaaataaagactttcaaaaataaataaaaacagatttgttgttgttgttagcggatctaccttataagacatattgaaagaatttcttctgcctgaaaacatgtaatcccagaaagtatttcaaatccacataaaaaaacagagtcccagtaaagataatt

SEQ ID NO: 291694 - DNA, 476 bp, Homo sapiens
cttatatccagcaaacctaccttactgaaatgaaggcaaaataaagacttycaaaaataaataaaaacagatttgttgttgttgttagcggatctaccttataagacatattgaaagaatttcttctgcctgaaaacatgtaatcccagaaagtatttcaaatccacataaaaaaacagagtcccagtaaagataattatgtaattataaaagagagtataaattcatatttctttttatttcttcattaatgaattttaaaaagcgattgtgttcaacaaccgatacgtacttgtaattgttttgttgggattatatttgacagtaacagcacaaaggagcagaatgaaagaaaagctgtattgaataaggaatggacaccaaatggttactcaaatccatagaaatagatcaaatgataaataaggttaatataacaaaactctagaaatatatacttcctcttctttgttttc

SEQ ID NO: 291695 - DNA, 476 bp, Homo sapiens
cttatatccagcaaacctaccttactgaaatgaaggcaaaataaagactttcaaaaataaataaaaacagatttgttgttgttgttagcggatctaccttataagacatattgaaagaatttcttctgcctgaaaacatgtaatcccagaaagtatttcaaatccacataaaaaaacagagtcccagtaaagataattatgtaattataaaagagagtataaattcatatttctttttatttcttcattaatgaattttaaaaagcgattgtrttcaacaaccgatacgtacttgtaattgttttgttgggattatatttgacagtaacagcacaaaggagcagaatgaaagaaaagctgtattgaataaggaatggacaccaaatggttactcaaatccatagaaatagatcaaatgataaataaggttaatataacaaaactctagaaatatatacttcctcttctttgttttc

SEQ ID NO: 291696 - DNA, 577 bp, Homo sapiens
atcatcataactccatttctgcttccctctttcttctctcccgctgttccttcatcctggaactggactcctggacttcctttatctggcaaatcactacccatcattgaaggccctgctctctctcctgcactgcctcttttaaagtctggaagaactaatccttcccttgtctgcatccacactccattttttaaaaatataaatataaggcaatcaggtatttcccaccatgctggaaataactgcagaatttaggatttaaagttacacctaaaataattattttcacactccctacttcttatacaatgtatgacacacagaacacactcaaatggttgttaaatgaatatttaatgatttatgctttccacaaaatctaatttgtggcattgtaggsgtggtaaatactaactatatttattagataagactatttctgtgctgtgtttgtttgatgagctcttaaaataactacatgcacatatacaacaaaaacaagaaaacctcccttccccatggctactcaataaataaataaaccacactcataaagcttgtcaaagtactactt

SEQ ID NO: 291697 - DNA, 483 bp, Homo sapiens
tgttctccttatagcaagttctgacctgaattcagagaggctatacagacaaatggaccttcagatgaagaatttaagtgtaagaagaaaaataatcttactaaataaagtaccttactacatcttggcaaacataaccatatggcactcttatctcctagaggtacagatgttatctttcaggatatagaataatccactcacatcttcttcattatactggtctatcttgatagattaaggccaatcttataagttcattgggatagaggtggcaaataaaacttaaattttcctcaatttttgtctcctcacaccagtatggtcttagttctctaaagaattatcactcatagtttataatagaatcaattgataaaataattattaaccattacgggtcattaatactttataaagcatgctcgcatatataytgttccaaaataactttttttgggaatttatatttcagacttggtg

SEQ ID NO: 291698 - DNA, 563 bp, Homo sapiens
gtttaatccagcatttcctatacctagttaatcaatggaactgttgagatgtaaaacccgatgctatctcacacaaagagaaaaaactcttgtagacagtacagagccccaaaaagtttttgacaaaaaaatatgatattattccaatctcaaccatacaggtattgaacagagaagaaagagacatatctaaatttaaagaagaatatacaggaaaatgcatcagaagtaaagtaagctcctggaaatatgggaattcccaaaatatttcaagaggctgatgtagttagtaagaatctctgcctgcagagctggtgttggtatacttgactctcgccaggtacttgggcacctatgtctattacctcaatttggggtaatatttgggtcagacacctcctttctccttttcaagcccatcccactcatygccacccacgcatggaatgcaggccagaaagaaatgagtaggagcttccactgcaaagagggaaacaaaaaactcaaggttaaggttgatgcttatccctaaaaattatgaaaatttccaaatgtcagataag

SEQ ID NO: 291699 - DNA, 654 bp, Homo sapiens
tgctgctgtgaaaaatcatcacaaatgtagtggctttaaacaacccaaatttacactcttgcagctctagaggtcagaaatgtaaaatgggttagcagggctgtgctatttctgtggtctcaagagagaattcattttcttgccttctctaccttcctgaagcttcctgcatttgttgatttatggccccaactttcttccagcagcatagcatcttccaatctttgtctttctttgcccaacacatcactttttttctgactctaatcctcccccctctctctctgtgattacaatgggcccatgagcataatccaggttaatctctccatcccaagatccttaaatcaatcacatatgcaaagtaccttttatcatgtgtggtaacatattcattggttctgagactaggattaaaacatctytgggggtggggcactattcaggctatcacatggagtttgccaaagttcaaatccatgtctttattactatttgcaaaaaatcttcaacgtttgctatcactaatggtcaaaactgcattgtttggtttgtgtaatgaataactttgaagtggaatctgagacaaaaattggacctttcatttgatagaagcataggctccatgactctcctagggtaagataattaaac

SEQ ID NO: 291700 - DNA, 553 bp, Homo sapiens
gcaattcttttagcaagctggtagtattggtcaactcacttcacctgtctgggtgaagaggygagctgagctcatcaacctctgaaatcttaaccagtagtaactctgaaggattagccttgacatatactgatgttgcctctcttgcttaatattttatactcatgaaaatattagtttgtaagtactggggagaaatgtattttaacacctaacagaattgctacttctgagaaagtggtagagagggatttatcaaagtcatcttgcttgtaacaataagaaatgtcagcagaggaaaaaagtgaataaaacagttaagtattttgtaatctgaggctgaaagatgctgcctgagtagtgacgattcatattaaggaaaaattcttctcttccaaatcccatcagacaacattacatgttctgcacagagttttactgcttacatgactacatttaatggaaaatacgcaatcactggaaaatgctgagtgacttggggcttgtggaagtgtgttctttggtggcagtgagaaataaaaagcagtgcttt

SEQ ID NO: 291701 - DNA, 553 bp, Homo sapiens
gcaattcttttagcaagctggtagtattggtcaactcacttcacctgtctgggtgaagaggtgagctgagctcatcaacctctgaaatcttaaccagtagtaactctgaaggattagccttgacatatactgatgttgcctctcttgcttaatattttatactcatgaaaatattagtttgtaagtactggggagaaatgtattttaacacctaacagaattgctmcttctgagaaagtggtagagagggatttatcaaagtcatcttgcttgtaacaataagaaatgtcagcagaggaaaaaagtgaataaaacagttaagtattttgtaatctgaggctgaaagatgctgcctgagtagtgacgattcatattaaggaaaaattcttctcttccaaatcccatcagacaacattacatgttctgcacagagttttactgcttacatgactacatttaatggaaaatacgcaatcactggaaaatgctgagtgacttggggcttgtggaagtgtgttctttggtggcagtgagaaataaaaagcagtgcttt

SEQ ID NO: 291702 - DNA, 329 bp, Homo sapiens
tctttctcttaagtttttctatgttttctcttatgttagcttctaaggagttttatggtttyaggtcttacgtttaagtctttgatctattgtgagttgctttttatgtatagtgtgatgtaaaaatacaatatcattcttctgcatgttgagatccagatcaatatcatttattgaaaaggttgtcttttccttattatgcattcttggtgcccttgtgaaagggcttatttatcaaatatgcatggatttatttctgggctctctgttctgctggtctttgtgtccgtttgtatgccaatacatactatttcaatcactataacttt

SEQ ID NO: 291703 - DNA, 329 bp, Homo sapiens
tctttctcttaagtttttctatgttttctcttatgttagcttctaaggagttttatggtttcaggtcttacgtttaagtctttgatctattgtgagttgctttttatgtatagtgtgatgtaaaaatmcaatatcattcttctgcatgttgagatccagatcaatatcatttattgaaaaggttgtcttttccttattatgcattcttggtgcccttgtgaaagggcttatttatcaaatatgcatggatttatttctgggctctctgttctgctggtctttgtgtccgtttgtatgccaatacatactatttcaatcactataacttt

SEQ ID NO: 291704 - DNA, 575 bp, Homo sapiens
tctaggaccatgactaagcacctctgcgtaacacatgcattgatttgaggtgtgtaggatacaaagcagttatttattgacttactgatatatataagaggcagaagacagggtcaacccttaaagtcccacggaagtcttggagtctacaagtttctgggacaccatcayttcacagaagaagaggaggggaggagagagaaggaagcaaagaaaacaaaacaacactctgtttttcctatctcctttgctggaaagaaagaaagttttccaggctttaaaagtactgaggacatggtggagacatacatgtctacttaggcttgtgttgttcctcatgtcaggctgccccgcgtttactccaacttcatctattgtcatctgcgcactcggggatgcactctcctattgagaagcgcagagagcttccgctccagacacagctgtttggagaacaaaatgcctgctcttcccataatgccttgccaacagatgggacctcatgaggaattcatgatgaaatccaaaaatgtgacaccaaggaaacatctacccatagatgattcacagtaaca

SEQ ID NO: 291705 - DNA, 575 bp, Homo sapiens
tctaggaccatgactaagcacctctgcgtaacacatgcattgatttgaggtgtgtaggatacaaagcagttatttattgacttactgatatatataagaggcagaagacagggtcaacccttaaagtcccacggaagtcttggagtctacaagtttctgggacaccatcatttcacagaagaagaggaggggaggagagagaaggaagcraagaaaacaaaacaacactctgtttttcctatctcctttgctggaaagaaagaaagttttccaggctttaaaagtactgaggacatggtggagacatacatgtctacttaggcttgtgttgttcctcatgtcaggctgccccgcgtttactccaacttcatctattgtcatctgcgcactcggggatgcactctcctattgagaagcgcagagagcttccgctccagacacagctgtttggagaacaaaatgcctgctcttcccataatgccttgccaacagatgggacctcatgaggaattcatgatgaaatccaaaaatgtgacaccaaggaaacatctacccatagatgattcacagtaaca

SEQ ID NO: 291706 - DNA, 575 bp, Homo sapiens
tctaggaccatgactaagcacctctgcgtaacacatgcattgatttgaggtgtgtaggatacaaagcagttatttattgacttactgatatatataagaggcagaagacagggtcaacccttaaagtcccacggaagtcttggagtctacaagtttctgggacaccatcatttcacagaagaagaggaggggaggagagagaaggaagcaaagaaaacaaaacaacactctgtttttcctatctcctttgctggaaagaaagaaagttttccaggctttaaaagtactgaggacatggtggagacatacatgtctacttaggcttgtgttgttcctcatgtcaggctgccccgcgtttactccaacttcatctattgtcatctgcgcactcggggatgcactctcctattgagaagcgcagagagcttccgctccagacacagctgtttggagaacaaaatgcctgctcttcccataatgccttgccaacagatgggacctcatgaggaattcatgatgaaatccaaaaatgtgacaccaaggaaacatctayccatagatgattcacagtaaca

SEQ ID NO: 291707 - DNA, 578 bp, Homo sapiens
gatgaccgacttggacatgaggtggtctaagtcagtggtcagtcacagacctggaagataagagctgtgtgaggcaaaagcatagaaaggcaaagcctgtgatgtgaggggacaagggtaacatttttgaggactagcagagacctggaacgaaatgtgctggagcctaatgattgaggaaggagaagaggaacagaggccctcagagaggttgtcatggctgattagcgtaatgtgttgcaagcatcaataaaaggtctggatttcaagtctaaagagtgatgcaatggatctttacacaatagaatggtggaatctgggcttataatgttttgaaagatgactttactctctttaccagagagatcaatgagtaagcttttgtagtggtccccagtgagtgatgctgatggttcgtagatgtttttatagtagtgcatgagtttagataaggggcatactttcaagtaaaacctactgaagttgtcagtggattggctctggatagagaaagaaggaaagarctcagggatgacttctaagttcagggtttgcactacttagtggatggtagtgta

SEQ ID NO: 291708 - DNA, 560 bp, Homo sapiens
aacaccacaaatttaaactggagtcccagcttcattactagctaagtggataagttttccaactctttaaggctcagtttcctcagataaaacatgaakaaaataataggatctgcctcccagagtggctagaagactaaaatggaaaagaaaagaatgcaaagggtttagcagggcacctgacgtggttgcactcattagctgttagtggctctcttcttgctgatatttttgcatcctgggatgaacacacatccctatccacatacttttctatgtatgatctaggcctgagtgttccatacagtgactcagaccctcaggaaggcagggagtcttggagaaagaaggcacctggccttataggtggcctggctgacccagcaactatccatagggtccagtctggaaatgtcaatgagggaaatgggccagggaggcttggttagaggggcatcacaagtcagcttcagccccacatgccataagggaatgcaagctcagtatagccatatctgtgccatttttcaatagaatccaagaatctagatttatttatg

SEQ ID NO: 291709 - DNA, 452 bp, Homo sapiens
ccttgggacccatctgatcttcagaaactgttggaacrtggtagacatgtacaaaaatttcatatgtaaagtggatcctttggttggtagacctccttaccaacaaagctaaaagtgttcctacattgctataataaacacatcggatttggatatgcctgccaaagcaccataacgcttctctcaaaattcagaactctgtctctacattacaagacagagcaaactgaaagatcaggttaatctaggataaacttcatctcttgagttcaaagacaactggcctctctaggggtttcaatcaagggttctttgaaggattgctctcaaattcattaaagaaatttcactgacttcacagactttggcattaaatagataacctgagctcttcattgcctggcaaaatgactgttcacctttgaagctctgcaaattgggattaagttggc

SEQ ID NO: 291710 - DNA, 593 bp, Homo sapiens
ttttagttttttaaagtttaaagtttttaaaagaaaatagagaagtggtggctctttctggtctctctaaccttcaaagcttaaacatgaattgaccctcaycgccaaatgatctgggtcagagtgagtgtccgtttggggaataaaaaacaaaaatgcaggagctaatcagtgcgggagctccaagtctttccaaacatatgcagctgtttcactgctgcgctgcctgcatctctgtatgcaaatattaatttgttcagcaaccttactgcacagaaatgtaaatttggggacccaaaaataagaaacagacaagtatcacttgatccttaacttcatgctaagttgttgagaaatacttggcattttaaaatgcatctatcaggcctgggagagtctgtttcctttccttgtttttctgtttccaaatctactttgcagtggctgttctgaatgctgctcggtgtttgatcccttgtgtgtcctttgtgagtgattgttctgccaccagttgccaaaatatctggatgggaagaaagactctagtccatcagtcatctgcatgcttttgttcatctggggatgggaacatc

SEQ ID NO: 291711 - DNA, 518 bp, Homo sapiens
tttgagttctgttcttctactcactagctgaatagttatgggcttagtttcctcatctgtcaaagagggccccaagaatagccatctcaggagtgaggattcagcaggagaatgctggccaaacacttagcctggcacataattattcttggcatcattgcagttgcagatgttcagtaagcgttgagtgaatttcagtgcagtgtccacagtagaagcctttacatcatttattcttacatactcccagaaagttccccaatgccgcrcattcctttaatagcttctgcatcctctggcttcattttgtcctccaactgtgacctgagtgctgcaacttagattctactcaattatgattcattgctatgtgagtctagtggatggtcaggaaatctctcctctcctagccatcccattcttgtctggtttgctcatcttttacttggagacaagagctgttcaccttgctttgattaggtggaaacaagacagtagaagagttcctgaacgtttgg

SEQ ID NO: 291712 - DNA, 581 bp, Homo sapiens
acatgtgcaccagaacttaaagtaaaataattttaaaaaatgattgttttttggttgatgatgacttttgacagtgattaaagctatataatctcaaattttgacgtagaaaaggaaaatgggttaaagcaggctgaaagtagacacagggagtctggttcggagactactacagttttccaagtggtagatgatgtagattgtatcagacattgtgtgtgtgtgaaaatatgtgtgtgtgcctatctgtgcatgaagaatggaaggacagacagaacatattatagatagcctgggtgggaaaatgagcaaattatatacctgctaagattttgaaccatgtacctgctgtttacttgatgaccgaaagcttaacttacaagttttaaatgtttactcttaggatattttctaagaataatgcttaaaagtataagcagaaaaaagttaaaaaatgtcttattcatcctgtcacsttgaaatggtgattattatcattttggtatacttccttcctgtccttgttttttcctatgagtatagctttatgttttagggattatcttggatatatatacatt

SEQ ID NO: 291713 - DNA, 551 bp, Homo sapiens
gtgccaatagaatacctgccaatatacttgacaataaacctccaaattckgtttatttctgcattaaattattcagtgggaataacttcctgtttgggatgccatcctcaggtggctgagatcttaatgtgttgatacatctacctaaatttgtagcagagtaaattagcttgtgtttaattcaactcctacacctgattattacattcgtttatactgtagagtctagaaagacttaaacatgcaatatcggtagaggttttaggatggagttgataaaaggtaaagattgatatcaacacttgagcaaagtaaataattttaattttgctctaaacacattacaaatacatcccttaaaaaaaggcaaaataaggctttacagacctcaattgtatacagtttggggaacatgtttaagaaaatgaatacaacattacaaaaatataattatagcaggaccttgaaagagaggaaggatatgcaaataaagaaaccaaaagcttctgcatcactagctttatgataaatctgtctttgattctagcaaa

SEQ ID NO: 291714 - DNA, 551 bp, Homo sapiens
gtgccaatagaatacctgccaatatacttgacaataaacctccaaattctgtttatttctgcattaaattattcagtgggaataacttcctgtttgggatgccatcctcaggtggctgagatcttaatgtgttgatacatctacctaaatttgtagcagagtaaattagcttgtgtttaattcaactcctacacctgattattacattcgtttatactgtagagtctagaaagacttaaacatgcaatatcggtagaggttttaggatggrgttgataaaaggtaaagattgatatcaacacttgagcaaagtaaataattttaattttgctctaaacacattacaaatacatcccttaaaaaaaggcaaaataaggctttacagacctcaattgtatacagtttggggaacatgtttaagaaaatgaatacaacattacaaaaatataattatagcaggaccttgaaagagaggaaggatatgcaaataaagaaaccaaaagcttctgcatcactagctttatgataaatctgtctttgattctagcaaa

SEQ ID NO: 291715 - DNA, 470 bp, Homo sapiens
tttacgggttctctcccccaaagcaacacatgatcgcaaggcaaaaagaaatactccaacacaatctaacacactctcccgaagctatattgtattttgtctgtttagtcttcaaaaytttgattaactgcagtttgagcgtaccttcctccacgaacatgtgttgggggaaagcaaggaccatagacattattactcagagcacccacctataaggaggttggaaagcaactgtggggcatgagatggtatgcacctcttgcaatacccttctctccccacacagcttggtaggtatagcaactgaatatatatatatatatatatacacacacatatgtatatatatatatacacatatatatgtgtatatatatatacacacacatatatttgaaggttttcagaagtaggttgaagaatctatcttataaatatgttgaaagagcaaaaatatcgtcaggagtaaa

SEQ ID NO: 291716 - DNA, 628 bp, Homo sapiens
gccttgtttcatctttctatcttcagggcctaataaaagatttggatataggcgatgttcaaaaaatattgaactgttagagtggagtgagatggtcacagtattgtggagagaaaggatcttcataattcctgagctgggagctggacatgattctaagttatttttgtaggtgacacctgacagagttacatagcatttgaagaacacaagctttccttttaaagtcactatacttaactcattcatttgttcattgacaattgtttattaaatttctactatgtgtcagtctttgttttgagtattgggcatttagcagagaacaaaatagataaggtttatcccttcatggaacttatattctaattggagaagtgagacccaaagcaaattttttagaaaaataaaaacatatagtggaatgygctaagtgctgtaagaaatatacagggatatacagcataatatacagggagatacagcataatttgggttgggagaggcactaaaaaaagatgaacaataattcctctttgctgaaagatgagatagattctgatatgcaaagtttcagagaaaaagcattccaaagaacctaagctgagaaagaatttttgagtctagg

SEQ ID NO: 291717 - DNA, 1193 bp, Homo sapiens
agaaagtgttgccatctttatattcgaaattcaaattaatacaactgagttatatcctctccttgagttggctaaagtaaataatgtctgctttttacccctctatgcagaaacaggtccagcataaattcttatgtctggccaccaaacagtgaattccaaatagttttcattaaattccatttttattgtgcttttccctataccctatctgyatgaaaatggtgaagatttgtagagataaaactagttaggacttgaatatttatgtttaatactggaaataactgactttgaggctcatgtactatagattacaggctcatgttttcaaactgattgctacttctcaagctgaatttatctcatcataaaaattctataagataaaatattaacagcagttttctggaagtttttttctggctctcagcctatgcaacaaaaaaaaggcatgttcttaacatggtatttgctcctgtcttctccaagttgaataattgacccaccactattaggtttggtattgaggttttgggcatttttccaaaaaaaatgtcactcgataaagaaataatgaacatatgaggaggtcttcaaaaagtttatagaaaatgtacattatgaaaawcaaatatgttctattataatccccattttacacagcgattacctaaataataggtaataaaataaaagatacacagcgattacctaaattgcctaaggtcaataagcaaaaaaaaaatggtttagatttttaaatctaagcaaactctagggtcaagttgctwaattctctgtcaaccctcaatgacaataatgactgagctgttaggtaagaagtcctttaggaatatttaaagtggttactcagagtgaaaatgtaataaacaataaaaattgaccataatatttgagggcagtgagtgtactcaaacttcccaaaccagggaggaaaatgaagcctcacacaatgattttgaggagcagctctgaaattggtaattgttaattgtatctcaatagataggtgatagaatagattttccctataacatttaactccttcccacatgatcctcactttagggtgatgatttctaagcaacattaagaactttaaacagctgaaaaagaggtaattaaaggagctgagaaaattatgctgtgaaattgaggagtgaatggga

SEQ ID NO: 291718 - DNA, 562 bp, Homo sapiens
caaatatgttctattataatccccattttacacagcgattacctaaataataggtaataaaataaaagatacacagcgattacctaaattgcctaaggtcaataagcaaaaaaaaaatggtttagatttttaaatctaagcaaactctagggtcaagttgctaaattctctgtcaaccctcaatgacaataatgactgagctgttaggtaagaagtcctttaggaatatttaaagtggtyactcagagtgaaaatgtaataaacaataaaaattgaccataatatttgagggcagtgagtgtactcaaacttcccaaaccagggaggaaaatgaagcctcacacaatgattttgaggagcagctctgaaattggtaattgttaattgtatctcaatagataggtgatagaatagattttccctataacatttaactccttcccacatgatcctcactttagggtgatgatttctaagcaacattaagaactttaaacagctgaaaaagaggtaattaaaggagctgagaaaattatgctgtgaaattgaggagtgaatggga

SEQ ID NO: 291719 - DNA, 566 bp, Homo sapiens
ctgtagtgcttagagaatatagcaagaaaaactttgatctgcctcatggtgtctaaagccttatctggaaaggtgtaaaggctgggttgtcttgaacaaagggagctggaattatctaaacagctccaatggccaatgctggctgttgcctgggatcgcagttaaggctggtgactagaacccacacatggcctctctctgaggcctgcactttctcatagcatggcmctcttaaggtagctctcacataatggctcaggggtccaaagatacatttgctaggcagcaagccagaaattatatgtattttatgactaggtcttggaagttatgttgcattatttctgctaaatttaattggatacaaattaatcacaaaccaacccagattcaaggaaagggcagttaggtaccagatatggatgacagagaagtaatgttcaaaagagtatatgggatgtgagatattgtatggccatattgggaaaatacaatctatttcatttacttttacattccagtagcaagtcagatgtacttaaatgaaggtcttggcccaagcaaca

SEQ ID NO: 291720 - DNA, 588 bp, Homo sapiens
gatctcctttgactccatgtctcacatccaggtcatgctgatgcaagaggtgggttcccatggtcttgggcagctctamccctgtggctttgcagggtatagcttctgtctcagctgcttttatgggctggtattgtgtatctgcagcttttccaggtgcatggtgcaagctgttggtggatctaccatgctaggatctggaagacagtgaccctcttctcacagctccactaggcaatgtcccagtgggaattctgtgtgggggcacccacctcacatttcctttccacgctgccttagcagaagttctctatgagcacccttcccctgaaataaacttctgcctggacatacaggcattttcatatatcctctgaaatccaggcagaggttcctaatcaattcttgactctgtgcacttgcaggctcaacaccacatggaagctgccaaggattgggccttgcaccctctgaagtcatgacccaagctgtaccttggccccttttagtcacggctggagtggctgggatgcagggcaccaagtccctagactgcagcagaaggaccctgggcccagcccatgaaat

SEQ ID NO: 291721 - DNA, 565 bp, Homo sapiens
tcacagctccactaggcaatgtcccagtgggaattctgtgtgggggcacccacctcacatttcctttccacgctgccttagcagaagttctctatgagcacccttcccctgaaataaacttctgcctggacatacaggcattttcatatatcctctgaaatccaggcagaggttcctaatcaattcttgactctgtgcacttgcaggctcaacaccacatggaagctgccaaggattgggccttrcaccctctgaagtcatgacccaagctgtaccttggccccttttagtcacggctggagtggctgggatgcagggcaccaagtccctagactgcagcagaaggaccctgggcccagcccatgaaatcattttttcttcctaggcctccaggcctgtgatgcgaggggctcctgtgaaggtctatgatgtgtcctggagacattttacccattgtcttggtgattaatattcagctcctccttacttatgcaaatttctgcagcaggcttgactttctcttcaaaaaatgggattttcttttctattacattgtcaggctgca

SEQ ID NO: 291722 - DNA, 615 bp, Homo sapiens
  misc_feature (1)...(615): n = A,T,C or G
nnnnnnnnnnnnnnnnnnnnnnnnnnnncccagagatattcatgctgtaatcaatggactttgtgattatgtcataaggcaaatatataacacaggtaaggtaatataatcaagataatagaagattccatatatatacttatcaaattccatatatatatatttgccttatgacatgtatacatatatatgtgtatatayacacacacacacacacacacacacacatatgcatgcagaagcaattaaacttacagagtttaaaatagggggattgccctaggttatttggatgagctcattgcagtaatgtgtgcccttaaaggtggaagacaggaacagatgagtcagtcagtgagataagatgaaggtagagtcagcaagatttgaaccgtgaaaggagttagattagctgttgctggctttgcagacagggaaaggagacaccaatcaaggcatgtataaggcctcttaaggctggatgtggctctcagttgagagccggcaagaaaacagggatcttaattctgctgccacaagaagttgaattttgccaacaacccgaaagagtagggaatcagattctcttctagagcctccagaaagaaactcaac

SEQ ID NO: 291723 - DNA, 651 bp, Homo sapiens
aggaagcactatttttgctctggcaacctggagtaaagaatgtggccctctatgtttgatgattgttccactgactgagtgtggcaataagtaatgactcagagctgcctccttccttgccctcagagctgaaagcatccctattaaattgaagaccagtgctttgctttcattacagtggggactgctcttgccaaaagggaattttccttaattaatgagaaaggactcttttcaagcgctacacaatgaggtcattgcaatgcaactttctcagcaaagagcagtctgtctctgaatactggactttgtagctgaggtggagaggcactttagtgtaattgttaagatgataggctttggagtcagaacaactggctagcaaatattggctgtcagcgaatttttcagtaatcttgagcatgttatttcacttctctaagccttggtttccttctcagcaactgcagatatatcatttcttatctyatagaattgttattgagattaaacaagataagaagagtaaagcacttatcacagtgtttgggacatactgggtaattattaagtggtatctattttatctcaacattgttgttagtctctttttttggactcattaatggaaggtatatattttcataaaat

SEQ ID NO: 291724 - DNA, 487 bp, Homo sapiens
tcagcaaagagcagtctgtctctgaatactggactttgtagctgaggtggagaggcactttagtgtaattgttaagatgataggctttggagtcagaacaactggctagcaaatattggctgtcagcgaatttttcagtaatcttgagcatgttatttcacttctctaagccttggtttccttctcagcaactgcagatatatcatttcttatctcatagaattgttattgagattaaacaagataagaagagtaaagcacttatcacagtgtttgggacatactgggtaattattaagtggtatctattttatctcaacattgttgttagtctctttttttggactcattaatgkaaggtatatattttcataaaatatgtgcccaggagaaaaaggatcaaaggcactctttattattcgtcatgagttaatgtcaaacccttattacttcctgcatagatttctaaattatagcttcataaaaa

SEQ ID NO: 291725 - DNA, 1089 bp, Homo sapiens
tacaattggttgacaaaaatgtcaaaagtgtcgagatatttaaattttataattgaagtggctccctctggctggcctgtattctcatgcagggattagcagctctcttccctgggatcagtcttacaaactaagaagccaaacataaattgatacttgytttctgcagcctgagtacagtgaaaaatctgctgggacaaggaaagatgaggggcagagtctggccctggccaatgttgcctttaggatgcaactggatccacctatacctgggatagaaactgaccaggataaactggtggtgagcaggctctcctctccagcacctcacttttgtatcttaggatttccaggtctttctatttaccactcaaaactacatcagatgggcatagcatgggaagtggtatagttatcagagaaacttgggctgctcaggccccacttaggaagatttgggtcatccatctttaaacaagtttccctggtataaagcatatttcatctgattttcctaggggcggcagttttgawcagttttagggtacatgtgcacattgtgcaggttagttatttttaaatgtgcaattaaattataattgactatagtcaccctcttgtgctatcaaatactaggtcttattcattctaattatcttgtacgataaccatccctatctccccctacccacaaaactatactaccctaccatacttctattctctatcttcataaatacaattgttttgacttttagattccagaaataagtgataacatatgatgtttatcttcttgtgcctggcttattttacttaacataataaactttagttccatctatattgttgcaaatgacagaatttctttcttatggctgaatagaactctgctgtgtatatgtaccacattttatttatccattcatctgttaaaggacacttatgttgcttcgaaatcttggctatgaatgcaggtatctctttgatatattgatttcctttctttggatatatgcccagtagtgggattgctgtatcatawgatagctttatttttagtttttgaggaacctccaaactgttctc

SEQ ID NO: 291726 - DNA, 604 bp, Homo sapiens
ctaataactttcccatcttttagcctaaatacagcatcactgtttgccccaggcaacaggcaaaaatgattgayagcatttcaaaattccagaagaagcacagagggtgcttcacagtttctgtcataattaattgagagtccaacaagaacatatgtttgtgtggcattacaatgggaaagtgttaaaggaaatggagttatttccacttgtagccaatggtgggcaaatgaaagcagaatcggccctacaacactgagcaaaagaaaattaaaaagtgaatctatttcaaattcagtctgtttggcaacctgtaattcataattaactggtgtttcagggcagattaattacatagtactaaccatgcaattataagtaaatttatttatttcttattcttcagcattttaggcaaggggagctcaccatacatgttaattagttttagatccactcaatgtaatttccatataaaaggtagagacgtgtaattaccaagtattcagtatttaacaagtatatgtttctcagactaaagaaacgaggtacagtgcaaaaagcagggttttaaagtcaaacttgtatttgaatatttgaatcc

SEQ ID NO: 291727 - DNA, 535 bp, Homo sapiens
gaaaatattgaaaaataaagttctgtatattaaaaacaacaaaatattactgagaaaaattttatactcaagtaagtagtgagatagacaattttatagatcaaataactcaatattattatgatggcaatttaccccaaactggatctgtacattcattacaatgccaattgtaataccacaggktttttttttttaataaaattggcaaactgatgccaaaatctgtacgaaaactcaaaggatttagaatatccagaataaccctaagaaaagaagacttacattacctaacttcaagacctaatataaacatatggagcaaccagatctcttacacattggtagcgagggtataaaatggaacaaccactatggaaaaatgtttaatcttttcatataacactaaatatttagcagctctaaaagatagaaattctacaccgggatatgtgccccatcaaaataaaatcctgtttaccaaaatacttgtataagaatgtttttaagagtttaaataaaaaataggcaaacc

SEQ ID NO: 291728 - DNA, 537 bp, Homo sapiens
ccccacatggaaaggtagaagggcagccatggaacatagttgtgtcaggaatttggttaaatattttcactcaaaagctttttatatattaaggaattaaaccaacagactaatgcatcatgagttgcctgttcatgtcttattgtttgtttcaaagtacaagtattaaaagacatttttaacaaacatctattcaaattattactagtaagtaaaattaaggagatacttaaaaatagagtaagaagaaaaggtggggttatatttattccctcaactcttactgagactctaacatgcagaccatatcccaattcaaayacttaaaaaaaattataatgaattgagctaatcatcagcattcccatttggagagagctcttgtatccagatcacatcatcaatctttaattggcctgtccttaaccaatatgcctatatctcaagcctaccttgttcaatgatcttggtcactggctgtatcttataactaatatacccatatctgcagggactcacattacagaaaacatttgt

SEQ ID NO: 291729 - DNA, 1050 bp, Homo sapiens
gccagaaaacacatgaaaaaatgctcaccatcactggccatcagagaaatgcaaatcaaaaccacaatgagataccatctcacaccagttagaatggcaatcttttatttattcttaaacaggcttttggaattcatagctctactccacctggtggcatattaggcatattatagatgtgctttagcagggctgggacgtagaaaacagtaggaagagacttaaaaatactgttccttcatagttttgtcctctttgaatgtattctattacatttgtacagattgctgacatttagatactcaagatgtattagcctgttgctttacaaagtayggcccaaaggtcaaaatgattgacatcacctgggagattattagaagtaactaatttaaggccctacttcatacctactgaaacagaatctgtattttaaaagattccaaagatgatttatactcacattaaaatttgacaaactgctctacagaaatttcagccttwtcagccttcctatattatattttcaggtaaaatgaaaatgacaacctcaacctctttgttaaatgtaatcatatttagtgttttgaatttaagtggcacttcctacaacagagacataagctgccaaacaaatataaagatcctaagctttgataacatgtttgattttcacwatgaacagtctggtctcatcacttctacacatttaccaaggcctgggcaagaacatgttccagaggctaatctcttttgtgatgacatgtggaattatattttatataatgtttaatttgctattctagactttagaaaactcctcaaaccttctatttgagaatttggcccatgtgatacaagattgttctggaatatattagcaatcacttccttcttcagctatgaaaatcatgcaagaaattttttttacaaacaatatatgtttttgatgtttagtcatcttataaatttgaaagtcttcagaaagttcaagaccaatttccaaatatgaaactgtgtgcatactcttgaagtagtatttcaggtgta

SEQ ID NO: 291730 - DNA, 635 bp, Homo sapiens
acacaacataaaatttgccatattaatcatttttacattttcaattatttttaacctggttctaatcgtagtatggatccaatatttgcaacttttcctttttattttatacatggggttatcatggaagaaattttaacatattcttgaaaactatcatttttggttttataaattattaaaataagtagatatactactgtgtcctaatttttttttagttttgaacttatgatttattcacaatttatttgataatttcaatggcaccataataaatgtcttttgcatatgatgttttgagttactatcagagtgcatggtaaatctatagtgaaaatgcagagggctaaaatggtatgtgctgttatataataaaaactgtatgtcaaatgatatgcatcatgtgatgaaaagtttgggttttttgaacratatagtacgctatatatgtttcgttatttgcataatcaatagaatctgtcaatatttgtcaaagcccaaatttgtgcttaaataatgtgaaacatatattccttatttaagactttatgtccttagtagcctttgagtagtgtcaagaacaaagtacatgcatattgtaactattttggatattccaagtaaataactgg

SEQ ID NO: 291731 - DNA, 562 bp, Homo sapiens
tctttgaggctgttgacccttgaatgaggtttctgtgggaactttttttgttgatgctgtcgttgttgctttctgtttgtttgtttttytttcaatagtcaggtccctcttctgcaaggctgctgtggtttgctgggggttcacttcatgtcctattcatctgattctttcccatgcctggatgtcactccaggaggctggagaacagcaaagatgggtgcctgttccttcctctaggatctctgaccccaaggggcaccgacctgatgccagcaggaatgctcctctttgggtgtctgacgacccctgttggggagtctcacccagttgggtggcacgggaagcagaatctgtttaatgaagcactttgcctgttcctttgtggaggggggagtgctgaactgggggaaaacgcacttttctgtgctgcgcagattcctcagagctagcaggagggaagagtttgctagtcttcgcagactatgggccccccacccactaggggctcaggcccagggagatcagagttctgtccctgagccctggctggagttgttggagt

SEQ ID NO: 291732 - DNA, 562 bp, Homo sapiens
tctttgaggctgttgacccttgaatgaggtttctgtgggaactttttttgttgatgctgtcgttgttgctttctgtttgtttgtttttctttcaatagtcaggtccctcttctgcaaggctgctgtggtttgctgggggttcacttcatgtcctattcatctgattctttcccatgcctggatgtcactccaggaggctggagaacagcaaagatgggtgcctgttccttcctctaggatctctgaccccaaggggcaccgacctgatgccagcaggaatgctcctctttgggtgtctgacgacccctgttggggastctcacccagttgggtggcacgggaagcagaatctgtttaatgaagcactttgcctgttcctttgtggaggggggagtgctgaactgggggaaaacgcacttttctgtgctgcgcagattcctcagagctagcaggagggaagagtttgctagtcttcgcagactatgggccccccacccactaggggctcaggcccagggagatcagagttctgtccctgagccctggctggagttgttggagt

SEQ ID NO: 291733 - DNA, 585 bp, Homo sapiens
tgattcaagtttcatcatatgtgttttttcgcacaaaaatgatacatgcatcaagagaaaattacaaaatatatgtgttcaatgttttaagaaatacaattttaatccaaatgataaaataatgagaaatataaaaacaatcttgctagcaaaagcaggaaagtacattagttttctcagttgctcacttatttgcatgtgaaataggatcccaataatctgttgcaaaagtagaaagagtatgagatgtgtggtacacagaaaatattaatggacatgggaaaaacagaagttatgttttatttctatataaaatataaattaccgttgactgttgttacttctattttcagtgaggtatgttctcagattttctgagaacacagcagaacaagagagacaaatagcatttaccctcaagaagcttagaatctrtgaggaaacagaggtacttttaaaggatagaaattataaaaataattatccatttatagttgtaataagttcctcaaagcaaaagcagagtgtacagtgagagcatgaaatatagacgactgacttaacctggggtaatttcctgaaaat

SEQ ID NO: 291734 - DNA, 513 bp, Homo sapiens
aagaacctaagtcttacataatgtcattgagtcctagaatcaattaagcctgacgctgcactaggatttctagcaaccagaattgaggcctagtaaaaagacctctgtggtagcatacagactttagcgaaagctgaacaactgaaatttcttcagaagttaagatttcttcctgtgttagaaacttccrtagagagttataagcaatgccttgaaagtttagaatttgaactaatcctattcaaatctagagtatcagacgctgtcttgatcagaggctcaggcttgatcttataaatgaaaggccattataaataggcaattataaagaacactggtttacagttagaaattaataaaatatattctttctatctgaagctcctataaaatgaaagactgaaaaaatatattggatatgtcaaaatccaagagaaatagttgatgatgataatgacgtgatttagtgtcctggattttctctttacaagtccagaattagcatgaaacaaa

SEQ ID NO: 291735 - DNA, 515 bp, Homo sapiens
atctgtggttgtgtgacatcaccatcgttcctgacactgaatttatatgttactaataagcaatcattttcttataataattcatacgtaagtactgaatggtaaaaaaatatgtcataccactaatacagtgaaaaaataataggtgcagggtaactaagcagcacagcttcatctccagaatccttgtgtcagctgtcaaacaacagcaataaagcaataacaaacaatggcaggctttcagtctctagttacaattctgtgttttaattaaaaggttatggtagaatgcctttttttttttttgagaagaaacatcagaagcagttgagggaccaggaggtggttcgtttaggaggcattcttctgggtgatttttaaaatattttccccagagttatctgactaattaacaataggttttgtcttagaagtccctctttgattttataacctggcataatttcttgtacytgtcttcaataagcccatcacacattttcatcatgttatct

SEQ ID NO: 291736 - DNA, 564 bp, Homo sapiens
taaatgatagacacagatccacaattactgtctctaaaatctcattcttcytgaagtcaagtggttctgaacaatgcaataaacatttaggctgataacattttcttcctggtctgccctccatacagataaaggtatataaccacaagagcatgcaaccagggagtcagcgtgtcagacaatctttggttctctaacagagaatgcagttaacagtaatgatgtcagcattttgacccagcagaggagacaattttcattcacatgcattagtgtgaagcataacctggctatctggaggaagatttttcccatgaaagcagtcttaatatgactccacataatgtgcaggctttgaaaaaataattcctgtgggctaaatagtgttttaatctgttgacagaattttaattttggccttctgaagaacctctgaagaagaccctgtggagagagaaagcaggtcaagaggaaattaaaagtagagatcttactttttcacaactaggataaatctgttaattaagccaacccagaaaaatgtaggcagtttttaacttacaa

SEQ ID NO: 291737 - DNA, 558 bp, Homo sapiens
attttattttctaatagagagcagccagtaaaattgagctgcagacatagacaagcaagctagaagattgcactggtgaatgccagcagttgtgccaatagaaggctaccggggactaggcatgttcaagrcggtagctccttgttcccttctctttgccagccacgtgtacagtaaggagcagacaacatggcacaggccaagtggaaagtccatttgcataagaagattagggtgcgatggccagccttccctgtggctatgtaacatcacaattggtccaatcaacctgtgggtcctatgtaaatcagacaccacctcctccagcctgtttatagaatccggtgcactccaccttgggctggaatttccattcgggcatacctctctcgcaagagagagagctattctcctttctctttcttttgcctattaaacctccgctcctaaaatcactccttgtgtgtgtccatgtttttaattttcttggcacgagatgatgaactttgggtatttacccagacaataatgacgcttcatttggatagagtactcaga

SEQ ID NO: 291738 - DNA, 1724 bp, Homo sapiens
attttattttctaatagagagcagccagtaaaattgagctgcagacatagacaagcaagctagaagattgcactggtgaatgccagcagttgtgccaatagaaggctaccggggactaggcatgttcaaggcggtagctccttgttcccttctctttgccagccacgtgtacagtaaggagcagacaacatggcacaggccaagtggaaagtccatttgcataagaagattagggtgsgatggccagccttccctgtggctatgtaacatcacaattggtccaatcaacctgtgggtcctatgtaaatcagacaccacctcctccagcctgtttatagaatccggtgcactccaccttgggctggaatttccattcgggcatacctctctcgcaagagagagagctattctcctttctctttcttttgcctattaaacctccgctcctaaaatcactccttgtgtgtgtccatgtttttaattttcttggcacgagatgatgaactttgggtatttacccagacaataatgacgcttcatttggatagagtactcagawatttctttcttgaacaaaatcagaattcaaatacagtggtgcattttatttaaaataatcagtttagtgtttgtttttwaagtgatatctaagtattatttcctaggattgaacagttttatgtaaagaaatatttaaattatattgtcttatattcaaagtgttcaggcaatgcataacttaaaatgtcagttcccaatatgtaaaaaaaaaaaaaagattcacaacatagccataacaataaacctaacagtcaatccctgtactttttaagcaaagggagtgccacccaaaaataggctacagtaagcccgaaagaagtgggaatatagaagactccatgtgcaagagagtggggaacacagaggtgaggtgagatatacggtaggccacactgcatccattcatactcatgtccttgctgactcttcctgccctgatactttctcatccagctggtaaagccttactcatcaaatatcaacttctctaagagcgttaacttacctgctcaagaaacatttgctcttagtctctgtatctttgagatgcctttgaggtgctttgtacatttgtaaatattccttatgttaaatacaaacatgagtaaatgtgaagaaawttgcatccaaatatagagagaaatagttcaagaatttataatttcaattatgatgcttatcatagttttggggatttagttatcaagctaagcaactcaacttttctgcttttacattgaatttttaagtaaataaatattatttttaactgcttttttgtatttagagacataatttaccttctttattctgtacaagtgttgaatcacttttattaattttctaatgttaggacaaacaaatttctagaaggaaaaaacaaacgtgaatatgatacattattatttttatgtgtcactggatttggattactaacactttgtctatgatttttctatctacatttgttacatctcaaagtttgaaattggccagtattttcctttctcacgttgtctttgttggcttttggtattaagtttgtatttgcctgagagttttccctccattttatactctaaaatactttctgcatgtttwtaattatttataatttgaatattctgttaaattcatctcaaaaatccaatttgtttagggct

SEQ ID NO: 291739 - DNA, 633 bp, Homo sapiens
ccattttctggggaggaattcaaggcttcagaaatttgcataagtaaagaagagctgaatgttaaaagccaagacaatggggagaatgtctccagggcacttcatagcagccccttccagcacattcctgaaggcctaggaggaaaaaaaatggtattgtgggccagggccaggctattgctgctctgtgcagcctcgggacatggcaccctgcatcctggccactcaagctccagccayagctaaaaggggccaaggtacagctcaggccatggcttcagagggtgcaagccctgaaacttgggggcttccatgtggtgttgggtttgcaggtgcacagaaggcaagacttgaggttttggaacctctacctagatttcagaggatgtatggaaatgcctggatgtctaggcggaagtctgctacaggggtggggccctcatggagaacctattctagggcagtgcagtggggaaagttagggttggaacccccatgcagaatccccactgcagcactgcctagtgcagctgtgagaagagggccaccatcctccagatcccagaatggtagatccaccaacagcttgcaccctttgcctggaaaacctacagacactcaatgccagcctgt

SEQ ID NO: 291740 - DNA, 372 bp, Homo sapiens
actcttgtggcacattattctcaaagggggagcttttagaatatattggtaaataggccatctctcaaaatatttttattcatttttttctgaatagaaactatgtatttgtaattttaaataattcatgggattatcctaattggatccagctttgagagccacagaactaaatgtcttagaagggactcatgcataagattagtagctgaaactatgtgacttttaaattgttctccagcatataacattcagaacacaaactttctgggggcacttttgtggtggtgcttatttctgcttttcataaytataaataaataacaatagtaacagcataacattttaatagcttttgttttatgaagacat

SEQ ID NO: 291741 - DNA, 1094 bp, Homo sapiens
tatcaatttattgacaaatattttcctcaacataaacatggcaatcagactttataacaatatgcacacatctaagagaaggacagtgggctttactaactattggaaatcatctattgtttttggatttaaaaacaacttcttagttataagaataatacacgtttattttatcaaaaatttaaaaatacagataagcaattaaaaacagtgaagaaagacttttaatttctagagcagagataactatagttggtgtataaacttacacatagtctttgtatgtatatggagagacaggtcgttaaggtcattccatatcgatgaatgtcaatgaccaaactaaatcttaataggtgaaagtatcccatagcatgatgatttatttactttgggcatttgtgctgttatttgccacatgatttcagttactatcctatattgtaggttgagcagtcctaatcagaaaatctgaaatytgaaatgctctgccatccataatgctccaaaatctgaaactgtttgagtgctgtaatggtgccacaagtggaaaattttacacctgctctcatgtgacaggtcacagtctagatgcagccaaaactttatttcatgcacaaaattattaagcacaaattawagtgctttctgtttttgagaatttggcttgaaataaaatcaaacaacatttaaatttgagawaaagtaggggcttggttatgaatattattgtgagatatgaataaactttagaaatatgtcaacattttaaaatattttattgggattttattagattttaaactgatacaaataactaagacatttcttagaaaatagctttcagatatcaaatttaatttaatgaattgttattaatcatattgtttgtgatattgtcactgtgagattcatgagaaacatgccacttaatacggaaattaataacattgtatttcctatccctgatttcaaactttttaatttttctgagaatagaaattaagggacttgttaaaaattaaattgcagtctagtacttgctctatcatttaattctggtacagcagttttatcttcacgatattactaag

SEQ ID NO: 291742 - DNA, 508 bp, Homo sapiens
gatagatacaatgatttttcccagatgcgtagccaattatgccaaaactgtttactaagtcatctatcatatattaaatacctttatgcactgggactgattctgaaattttcctaaccattgaaatatattttgattacagcggttttgtagtatgtccctccaactattctcctttactcagatatttgtggaatagtctcagcaattattatttcatattatatgtaataytgctctatccatattaagaatcaatgttataattattattagggaaactgaaaatactataatagccctaccactgaagaacatggtacattttccatttttttatgttggtattatgtctttgtttaagtatttcctaagtgtttacacttattttttactttgaatttttctattttatatttctgagtttccatttctactctaaagaaaatgctattgtttttgaatatatttacctcatatcaaatcatattatcttgtaaattatagt

SEQ ID NO: 291743 - DNA, 596 bp, Homo sapiens
tctgtcttgatgttttttatctctttctttgcaatctatttacataattacctacttttaatgtgtgatatarcagatgaacaaatttatgccccaactgtggtcattaaagccagagggaagcctgatacatttgaaaatttaatagggtcagttcatgtacttctatgtgtacaaagaaaccagtgaccttctggaaaagaactgattaaaaggaaaaaataattgaggggtacaagttgggatcagggttcagggaagagtaatttggattcagcattattagtgcatattattcagattatttgcctgcttaattaaataagcccacaactatgtgctgtagttaggagagtacaataataatgtgtagaccaactaaagcccctaagagatgaactaaattacttatctacaatttcacaggatgttaaaaacaaaacagttagaatccaggattgccgtttggtagagctgtcagtcgcatcagctacaatggcaatgggaagtaatgtagcaggcgaatagtatcaccacttctcaaggctttggcagcaaacactggtgctattggcctgtgtcctttgccctgtgga

SEQ ID NO: 291744 - DNA, 602 bp, Homo sapiens
tatggcacctaaactgttcaatcaaaaaaataatcactcctgccttgaagagaagacagaactggggaaaatggtaacgagtgctattctaatgaagggcccttcacatgaaaagtagtaagaaagtagaaataatattctctagtttttaaaattcttaagcctttacaacttagccatctataattaactgaggatatgcttaatgccccataagagcttctgttcctttcttcatgaggccaacttcctggaaagaccatagtttcctgtatttatcatgcaataaaccataggagatagcttagctagtccaaagtgaattccttcttttatttttcatctcaaattgtggccagaaaattcctcttttggcccataatgggtaatagaggccgaatacaccctgcctgaaataataacaacagtagcaaaagaatgccgaaaaagacgtaatattttcagaacactggaccttaggcaaggaaggaaaagaattgggaaacaaataaggtgaaccctgagattgcccaatctactgctttcaaggaggttccaggccacaktgcagagtccagcacatttcctaaattgaagggaca

SEQ ID NO: 291745 - DNA, 565 bp, Homo sapiens
taattgggttatggagtttaaggagatgggtaagtaaatagcacatattttggcttttatttcacagcctaaaagggtrtaaagatatagttagtcctttattcatgtattaacatatataaatatatactgtgttgattctggttgaaacggctggttttaacctgaaaaatgaatgaaaattgattttaatcttggctcaccaaacttagtgaagatatttaggtaggtttttaagatcgtgtttcagcatgacttgcaaaaaagtcttttaaataaaagtcctactcaaataaacttttttcttggtattttcccctaattattccagtttttccagaagcttctcgttgctctaaaatctttataattttcagtgtacacgtttgttcatggcaacgttactcttcatatttatttatttatttatttatttatttatttatttatttatttcggagatagagtctacctctgttgtccaggctggagtgcagtagcatgatcatagcttactgcaactcttgacctcctgggctcaagtgatactctaacctcattctct

SEQ ID NO: 291746 - DNA, 615 bp, Homo sapiens
aaagttttaagagaaagttttaaacaacagggactaaaggccttcctgtttcccctcccacttttggaaagaaggtagatataaggcaaaaagaaccaccccagtggttttcatctcataaaccaaattttcagcaacccaggaggatgcaaaacagaaacacaagaataaattatttatttataaacacacactaactaaaacaccatctcatatgctggcaattctgcatcccaaatcatttctcttcttcctgtaccaagaatcattccatgatacttaaacatgtgaatccttagctgaattagaggaaaaaaacaggctcctactatagaatccatggtttattcagtattgggtccttcctcttctaagaagtaaaaaatgttaagaaaataatctcaatcatattctgagagaaatatccttactggagtccagtggaatatcagtttattccctaaattcatccattatccatgcaatttccatctaagctgaaaaaaatgtaaatgcagtttttataaatgtctgtcctttttgaactttacagasctactggtagtagtaattattaacaccacaccatataaaatatatccatttagatatcac

SEQ ID NO: 291747 - DNA, 609 bp, Homo sapiens
cccccttacaatgcccctaaattgtaggtggtaagtataactttgcccatttaacattgaaaataaaggtttttatttgtttgattatttttcagttggggaaatcttttaaaaggagttagtggcaaaggccaaagagaatgtgggagatgtgccttgtagtttcctattcttatcgtggtctttctttcatgatttggcacattctttataaggaagttctgtggtagtcaaatttagataaggttttatttatgagaggcctagagtttttaagctaacagcaatttttaaaatcattatgaccctaaactcatttaattacaaagtattaattaattttaacaacttatcatagaatcatttatcattactttcctgcatgattttcagttcttttaagctcctagaatacagtaccttcccccctgctctccttcatgggaggaagagtatggttaaaaagacttagarcaggtagctgggaacccagattcctggatacttttctttggtggagaatttgtaggtctgtcacatatcctggataagcgattaaagtaggaggagctgtggaatcaacttccctggacctccttattacacctt

SEQ ID NO: 291748 - DNA, 615 bp, Homo sapiens
aaagttttaagagaaagttttaaayaacagggactaaaggccttcctgtttcccctcccacttttggaaagaaggtagatataaggcaaaaagaaccaccccagtggttttcatctcataaaccaaattttcagcaacccaggaggatgcaaaacagaaacacaagaataaattatttatttataaacacacactaactaaaacaccatctcatatgctggcaattctgcatcccaaatcatttctcttcttcctgtaccaagaatcattccatgatacttaaacatgtgaatccttagctgaattagaggaaaaaaacaggctcctactatagaatccatggtttattcagtattgggtccttcctcttctaagaagtaaaaaatgttaagaaaataatctcaatcatattctgagagaaatatccttactggagtccagtggaatatcagtttattccctaaattcatccattatccatgcaatttccatctaagctgaaaaaaatgtaaatgcagtttttataaatgtctgtcctttttgaactttacagagctactggtagtagtaattattaacaccacaccatataaaatatatccatttagatatcac

SEQ ID NO: 291749 - DNA, 514 bp, Homo sapiens
tctgagtgtccagcacggggctgtggcagtaactcgggaaatgtctgccgaagggtgatctgagcaggatattcacagcagacgctgctctctctgtgtgtgacaacctagttcagttagctgacatcatctggttaagcgtttcatgattctgtttgttactatttttaaaaggcaattattatttgaatgagccaattatgtattgttgctgaatctgtcaggaccacaggttaagacagtcagtggcacattttggaggaggaccttaattttgagactatctcattttttccaaagcctgtttgaatttcttcttgagggggtagccacctctattaccarcactctaatctcagaattgaaagcctcagtctccaagccaacaccaattatgtcgccagggtcctcggaagagccccatagtaaccagggcaaccctgatttagcttcctcatcctgagtaataaattacaggagaacatagccttaggctggggctgctggactgtct

SEQ ID NO: 291750 - DNA, 514 bp, Homo sapiens
tctgagtgtccagcacggggctgtggcagtaactcgggaaatgtctgccgaagggtgatctgagcaggatattcacagcagacgctgctctctctgtgtgtgacaacctagttcagttagctgacatcatctggttaagcgtttcatgattctgtttgttactatttttaaaaggcaattattatttgaatgagccaattatgtattgttgctgaatctgtcaggaccacaggttaagacagtcagtggcacattttggaggaggaccttaattttgagactatctcattttttccaaagcctgtttgaatttcttcttgagggggtagccacctctattaccagcactctaatctcagaattgaaagcctcagtctccaagccaacaccaattatgtcrccagggtcctcggaagagccccatagtaaccagggcaaccctgatttagcttcctcatcctgagtaataaattacaggagaacatagccttaggctggggctgctggactgtct

SEQ ID NO: 291751 - DNA, 574 bp, Homo sapiens
gagacctaacgctcagaaaaaaaatatgcctttcaaagtattactgtttattgacaatacacctaagmgccctgatggagatgtacaagaaggttaatgtcatttttctgccagccaatacatctactctgcagcccacgggtcagggagtaactcactttcaagtcttattatttaagaaatgcatttcacaaagctagagatgccatacatagtgatcctgtaataaatctgggtggagtaaattgacaaccttctggaaaggattcaccattctaggtgccattaagaacatttgtgattcatgggaggaggtcaaaatagctacattaacaggagtttggaagaagttgattccaatcctcacaggtgaccttgaggttttcaaaatttccgtggaggaagtaatcacagatgtggtaggaacagcaggagaattagaattagaagtggagcctaaagatgtggctaaattgttgcaatctcatgagaaaactttaatggacaagcagctgcttcttatggatgagcaaagaaagttgtttcttgagatggaatctactcttggtgaaga

SEQ ID NO: 291752 - DNA, 616 bp, Homo sapiens
agggaaactacagaccaagatctctcatggacataaagttctcaacaaaatattagcaagactaaaaatgtatgaaaagaattatatacttcaacccaatgggatttattataagtatgcaagactggtacaatatttgaaaatcagtcaatgcaatataccacatcaacaggctaatgaggaaaaatcatatcacatcaattgatgcagaaaatgcatctggcaaaatctaacactcatttatgaaagaaaattctctacaaactaagaacaaagatgatcttcctcaacttgataaaaagtgtttataaaaagctaacatcayacctaataatgaaatactgcacactttcccccaaaaaagaacaaggcaaggatatcctctctcactacttctgttcaacatcatattagaagtcctagctagtgcaataagacaagaaaaggaaataaaagatacatagattgaaaagtcagaaataaaactgtctttgttcataaatgatatgattgttcatgtacaaaatcccaaagaactgtcaagaaactctcaaactaataagctagcataggtcacaggatacaatattaatatacaaaagtcaattgctttccc

SEQ ID NO: 291753 - DNA, 616 bp, Homo sapiens
agggaaactacagaccaagatctctcatggacataaagttctcaacaaaatattagcaagactaaaaatgtatgaaaagaattatatacttcaacccaatgggatttattataagtatgcaagactggtacaatatttgaaaatcagtcaatgcaatataccacatcaacaggctaatgaggaaaaatcatatcacatcaattgatgcagaaaatgcatctggcaaaatctaacactcatttatgaaagaaaattctctacaaactaagaacaaagatgatcttcctcaacttgataaaaagtgtttataaaaagctaacatcatacctaataatgaaatactgcacactttcccccaaaaaagaacaaggcaaggatatcctctctcactacttctgttcaacatcatattagaagtcctagctagtgcaataagacaagaaaaggaaataaaagrtacatagattgaaaagtcagaaataaaactgtctttgttcataaatgatatgattgttcatgtacaaaatcccaaagaactgtcaagaaactctcaaactaataagctagcataggtcacaggatacaatattaatatacaaaagtcaattgctttccc

SEQ ID NO: 291754 - DNA, 610 bp, Homo sapiens
atcttggccaggctggtctcgaactcctgaccttgtgatccacccgccttggcctcccaaagtgctgggattacaggcatgagccaccgcgcccagcctctttttcacttttatgggataattttgctggatatacatgtctaggttggtgggatttcttctttcatcactttaaatactccacgctcttcatgcttgccttttgatgataaatcgactgtaattcttatatttgttcatctatggtaaggtgttatttttttctctggtttctttctagatcttctcttggactttggctttctgcactttgaatgagatgcctcagcgtagagtttttgrtagttatcctgtttgggttctccaagcttctttgatctctggtttggggtctgtttggaaagctatcagcttattttattaaataaaataaatgtaatttaatttatcattattaaattacatttggaaagtttatcagtttatattactttagatgtgtcatctattccattctctttttgccttttaatattcctgttatacatatattacactttctgaaattatacaactgttcttgagtgttttatggtggttattttatttt

SEQ ID NO: 291755 - DNA, 508 bp, Homo sapiens
gatgttcttagaggcaaaacacacaaaagtgtagggtgtccccctaaaactgcagccccagcagtctcacttggaggctggtccaccctcagcctccagcaatttgtcagaattaacgtttggaggctccaactgggggctggcccagcagcatctctaggtgagcagatctcagcyggtaccctgtgcattcccatctcttcagatttcccagtggcagtttgttctgcaacctcagctctctgaggggtccaagaaaggttgctgagtttctgtttgttcagcttttttcttatcataaggatgggagtgacaactccaagctttttacgtgttggaactgaaactggatgtccttgtttggctttttaaagataaatttgttattccagatgaatttctcacccagtggtttatgtgtcagaaatctgggcatctccgcttccctagtccaggggcacagatgctctgccattggactgatggcagcagtgaatttcaataggga

SEQ ID NO: 291756 - DNA, 508 bp, Homo sapiens
gatgttcttagaggcaaaacacacaaaagtgtagggtgtccccctaaaactgcagccccagcagtctcacttggaggctggtccaccctcagcctccagcaatttgtcagaattaacgtttggaggctccaactgggggctggcccagcagcatctctaggtgagcagatctcagctggkaccctgtgcattcccatctcttcagatttcccagtggcagtttgttctgcaacctcagctctctgaggggtccaagaaaggttgctgagtttctgtttgttcagcttttttcttatcataaggatgggagtgacaactccaagctttttacgtgttggaactgaaactggatgtccttgtttggctttttaaagataaatttgttattccagatgaatttctcacccagtggtttatgtgtcagaaatctgggcatctccgcttccctagtccaggggcacagatgctctgccattggactgatggcagcagtgaatttcaataggga

SEQ ID NO: 291757 - DNA, 558 bp, Homo sapiens
caacaaaaagagggggatgcccccacgattctcttacagaagtacaaatgggatgggtatgtgaccttcagatattctcaaagggaaggcagtgtgggaaggctgagcatgtaggcagarcagggcagagggctgggaagaggctggcatgtgtcaagcccgagaacttacagtgggcacaccaaggccagtatccttggatgtgaggagcctgtttcgaggaggaaggaggcgcagcacgggtgacagagtcagactactcacagtcctaactgccatggagtgacccaggacaagccatgtgacctctctgggcttcaggttcctggaccccagtgaggatcaaatgagattagacaggtaaaaatgcagagtgccaacgctatttgccggtgttattgatgttgctattatttacattaaagaaaaaatttgtagaaactagaccctaagttttcttcccaaaggttcaaacaaagctacaaaaactagaccctaatttttaaattgtggtaaaatacacacaacataaaatttaccatcttcaccatttgtcgg

SEQ ID NO: 291758 - DNA, 558 bp, Homo sapiens
caacaaaaagagggggatgcccccacgattctcttacagaagtacaaatgggatgggtatgtgaccttcagatattctcaaagggaaggcagtgtgggaaggctgagcatgtaggcagaacagggcagagggctgggaagaggctggcatgtgtcaagcccgagaacttacagtgggcacaccaaggccagtatccttggatgtgaggagcctgtttcgaggaggaaggaggcgcagcacgggtgacagagtcagactactcacagtcctaactgccatggagtgacccaggacaagccatgtgacctctctgggcttcaggttccyggaccccagtgaggatcaaatgagattagacaggtaaaaatgcagagtgccaacgctatttgccggtgttattgatgttgctattatttacattaaagaaaaaatttgtagaaactagaccctaagttttcttcccaaaggttcaaacaaagctacaaaaactagaccctaatttttaaattgtggtaaaatacacacaacataaaatttaccatcttcaccatttgtcgg

SEQ ID NO: 291759 - DNA, 428 bp, Homo sapiens
  misc_feature (1)...(428): n = A,T,C or G
gttttgacaacaattcgttcggggcaccaagcaaacatatctaatgcaaagttcttaccttgcacaaatgataaacagattgtatcctgctctggagatggagtaatattttataccaatgttgagcaagatgcagaaaccaacagacaatgccaatttacttgccacaatggaactacttatgagattatgactgtacncaatgacccttacacttttctctcttgtggtgaagatagaactggtaggtggtttgatacacgcatcaaaackagctgcacaaaagaagattgtgaagatgatattttaattagctgtcgacgtgctgccacatctgttgctatttgcccaccaataccatattaccttgccgttggttgttcttatagctcagtacaaatatatgataggcgaatgctgggcacaag

SEQ ID NO: 291760 - DNA, 607 bp, Homo sapiens
ccgggcagggaatcatggtggtggccccaggtggcagggttgggagctgggacagagacttacaagggcacccatggctgccatcactctgtacccctgcggagactgcagagtgaacgggctctatcttctctccacccatttcttctggctgttttggtctgttgatttccagtttcccaaagcaacatatctttcttggcctgtttggaaagagaactgttgctaagattattgaactcgcaagggaaagttcttgtgtttacagctgtctaacgcggggcattattctaagcagatgattgcattgttatagacagacatctacgaggtcagtttttcctaaccacygtaataaatctaatgataaccagttaacttgacaaagccatttctcaaagcagcttcagtgtttgataaatacttttccttttctggaatttctattctagttattacatttgggagtagaatgcacacccatcacaaaatgcctagcctttaagctcccacggtggaattcaatataattaaaagcaacaagtatttaagtttctagtaatgccagctctatgtgaaaaatttggggaacatccaagaaatataa

SEQ ID NO: 291761 - DNA, 608 bp, Homo sapiens
cagacaggctgtcttatctgtctcctaaggtgaaacaaaggagtaatcttggcaggtaatctcagtgtagcctttgcttacttcttcttctaattaagaaacaaaaatctggcttccttcctctctttcctaattcagcccaagagtcactgagcaggcacaagaaagggaggtgacagtggcctggcaagagtggtattggagcaaggtggcagaagcagctggtggcacctggcaatggcaacaattatgaggacagattcagagcagggtgagaggcccctcatgtagtcgagagaatggctacctacaggggccagtaaacaaacatactaaggatgatgcaaccccaagacgtcaagacagaagtatagatgtaaagrtgtatgtgtatatacacacctttgtgtgtttgcatatatggacggataaaaatacatctatttcctaattctgtccactgagagggcccagggaagcaacaactctagtagcaaagggcctactttgcatctagatcttggcttctaaatatcactctccatgaaaaggaactaaggctcctcaaagaactggctgatccagacctggaacagaaaaagcaccag

SEQ ID NO: 291762 - DNA, 604 bp, Homo sapiens
ctctttatatatatatacaaattaagactaagataatatattattcacaggccctcaatgaaaaagagtatattttctaaagaagaaaactgaacccaagtggaaagaatcagatacaagaagcattggaatcttaatcraaaacaacatgacaataaatgtgcaaaacaagggttggggcagtggtctcagggatttgtttcacttttccacacacttaggggcaggggatggtttggggatgaaactgctccacctcagatcatcagagattagattcttataagaagcgtgtagcctacatccctcacatgtacagttcacaataaggctcaagctcctatgagaatggaatgctgctgctgatctgacaggaggcagagctcgggcagtaatgcgagtgatgagaagcgggtgtcaatacagatgaagcttctgactgctgctcacctcctgccctgtggcccagttcctaataggccatgaaccagtaccaatccatggcctggggctgggggatccctgagttaggggacttggagggcttttatggaaagaaatagttgaaatgcatacactttgaccttcaagagactctgtacta

SEQ ID NO: 291763 - DNA, 604 bp, Homo sapiens
ctctttatatatatatacaaattaagactaagataatatattattcacaggccctcaatgaaaaagagtatattttctaaagaagaaaactgaacccaagtggaaagaatcagatacaagaagcattggaatcttaatcaaaaacaacatgacaataaatgtgcaaaacaagggttggggcagtggtctcagggatttgtttcacttttccacacacttaggggcaggggatggtttggggatgaaactgctccacctcagatcatcagagattagattcttataagaagcgtgtagcctacatccctcacatgtacagttcacaataaggctcaagctcctatgagaatggaatgctgctgctgatctgacaggaggcagagctcgggcagtaatgcgagtgatgmgaagcgggtgtcaatacagatgaagcttctgactgctgctcacctcctgccctgtggcccagttcctaataggccatgaaccagtaccaatccatggcctggggctgggggatccctgagttaggggacttggagggcttttatggaaagaaatagttgaaatgcatacactttgaccttcaagagactctgtacta

SEQ ID NO: 291764 - DNA, 507 bp, Homo sapiens
tgaactgtctccagtggacacagaagaagttctatttccctatttggatgaggaatgggatattgcggttaatagagttaccacatttcctatgtagttactcaaactttttcccatctcatctcacatagaatgtcataggatttgtttgacacattggggcaaacagatgaggaaactgtcagccagaggtgactgcccaggactccagtgccacagggctgaggctaagtgggccaacacctacaaatctaacactaacttaccataataacatcttttaaactattttccatatcattaagtatcaagtgttgttaccctgtagtagtacagaagtaacagtaaactagcrattaatagaaaaagctagattcctgaaggttatggcatttagaaagatcttaattgttcacaatggtaaaactaggaaacaaaagaattctatagcctcagacatgtctccctgaagaccacagctacatgtgaaacttacgtttactaagg

SEQ ID NO: 291765 - DNA, 545 bp, Homo sapiens
gtacctgggagaaaaaaaacccacaaaatcacagaaatagtgtgtggtctgtgcctgtctccaaagatgacttggaggccttcaatatttaaaggagaaaagtgggctggaggggaaagcaggaaggtatggtcatccacatgttgcaagagaaaaggagcaggtaggggaacagtcaattatgtattcacctcgcactttacaaaagatcagctgaacatagartagctacctgtggggatatttaaccttttatctgtacatatctgcttaggaacaaaagcaaaggcagttgcttacatgactcagctttcagcttaattttttccttttggcaaagtgaattggggtcccatgtttttattttcctttcacagactatagttagttttgcactaactatagccagcatccctcccccattaacccactatgagacaagccttccagccttgctgcctgcttttggaagatcttgcctactgtgtatgccctactgggtatataagtttcctgagtattttgtttttttcccatttatagtg

SEQ ID NO: 291766 - DNA, 493 bp, Homo sapiens
attagaagcaagatggagtcaattaaattagatctctttcgccgtcttggtcataattttgcaaaggcagtttcaaaggtgtcttttctttttgagacagggtctcactgtcatctaggctggagtgcagcagcatgatcatggctcactgcagccttagcctgccaggctcaagggatcctctcacctcaccctcccaaatagctgagatcacagaagcacaccaccatgcccagctaattttytattttttgtagagatggtgtggggcggcgggggggggggaggtcttaccatgtgacctaggctggtcttaaactcctgagctcaagtggtcttcttggctcaacttctcaaagtgctaggattatagatgtgaaccgccatgcccagcctgttgaaggtttcttttactctctggttttgactggcacctggctttccccagaaagagctcacttcccctgtggctctctctctagtggttggtatt

SEQ ID NO: 291767 - DNA, 630 bp, Homo sapiens
tcatgattaagtcctactaataccaagagttggattccaggattttataaagactgataatgttttattgcctctatgtttaaacatttttaaaatattaatagcatacacacatgcatgcaatccaagtaacaaacaataacacctgacacttgatccttatagtgattctggtaagtgaggatagaatttgtttattatcatcaatttataaaagtggaaaccagctcagmgaagccatctgtcttgcccaaggtcacacaggtaataaaatgcaatgctggggcaatgactttctccaggaccctcctgaattttctgcaaattactgtgcaaattagttttttaattttctgctcaaattttgcacatcagcaacactaaagagctaccttttctgttatatttgagatgtttagcaagagtacagcttgaccctgcattttcaacagcagccccatggcccagcactcatctctcccacaagataaatacagggaaattatgaggggtgaacttcggggctcacaaacaagattaaccttcatgatgcttttaattattcatgattttttctctacattctgtcaaaaacaatctgagatggctcttagctctgacaataattca

SEQ ID NO: 291768 - DNA, 576 bp, Homo sapiens
ttggttttttaaataatttgtaaatactgaatattcttttaactttcaaaagtataaaactttggccttgaatcaaattgtgttagcaatctctccacagtctttaataatgccttgaacttctacagctctttgtatttttcaaagccctttcactttgattatcttgtttgatcttcattcaaccctatgatgtaggaagcgcagctattagtgtctgcattttayagatgaagataggaggcacatgagaggatcaggcccttaaaccaaggccaaattgcaaatgacaaagtcaaggttaggacccacggatctactacaccagaggtatttcatatattcatgaaaactgtggcatcattatgtatcatctttatgagcaacaatctcatatattataatttataaccctgtgtatgtattttcatatggccttcctttaaaaagtaaagaaaaactggctgggcacggtgactcattcctgtaatcccagcactttgggaagccagggctggtggattgcttgagctcaggagttcgagaccaccctagacaacatggtaaaaccccatc

SEQ ID NO: 291769 - DNA, 593 bp, Homo sapiens
ctgcatctttaaaagacaaatggaaaaggataaatattaaagaaatttaaaacaactgtttcagttatctattggtatgcttgctgcaaaccactccaaaatgcagtggtcaaatgatgatttataatttctcacgattctgtgggttggatggttctgttgccgcactcactacttgggattccttatgcggctgcactcakctgatagctcatctgagggtggaagccccaagatggtctctacttctcctaggcctctgcccacatggcctctcattcagtaatctatcctaagcttttcacatggctgctggatcccaagcattgcaagagtcaagcctcaatgtgcaagtgtttatgtcatgcttgctaatgttcatttggccaaagcaggttttgtagccaagttcagtatcaatgtgggagggcctgaatatctggaagcatgtttcatcagggaccaccaatgtaacagtctgctgccacaacttccattcaactggattctagttaactgagatctcatccctctctctcatgctctaacataaatcattccatcttctacttacatgctttgtgcattcttgt

SEQ ID NO: 291770 - DNA, 489 bp, Homo sapiens
ttattttgttagattgtaagctccttggaaagcaaagaatgggtcttagcagcatagcaactgccacggagagaaagagtgtttaataaatgtgtactaataagtgaaaaactcttaagaaactaattccagatcccattctcaggtgaggctgaggctgctagtctattcacattctctttcttattactcaaagtggagttcatgaacattgatattccctgggaacgtcttagaaatgcaggctstctggccccaccccagacctataattttggccagatccccaggtgattcttttgacattaaacattgaaaagcactgcttatgtcaggatgcacaggaggactgaggaggcctgtctcctgctggaagacatctagtggctgcagctgggagtggctggggaaggcagagctgtcaagtagtgtccaaactgattccctaaattaggaccactgtctgtgagggtttgggcagatggccag

SEQ ID NO: 291771 - DNA, 607 bp, Homo sapiens
tatgttgagcatcttttcatgtgcttgttagccatttgtatatcttctttggagaaatgcctattcaatgtcgaactgatttttgacaaaggtatgagagcaattcaatgcaggaaagagagcttkatcaactaatagtgcagacgcaactggacatctgcaggtagaaaaaaaaaagaagaatcttgatctaagcctcacaccttatacacaaactaactcaaaatggaccatgatttaaatgtaaaaggtgaaactacaaaaattttagaataaaacataggagaaaatctttgagatttagggctaggcaaagagtttgaaaacttgacactgaaagcataatccataaaggaaaaattgataaactggacttcattaaaattaaaaacttttactctgttacagacctttttgtgaggatgaaagacaaactacagactaggagaaatatttgcaaataacatatccaagaaaggactagttttagaagattatatatatacgtaaaactcaagagtacaaaaagtctaattataaaattagcaaaagacaggcacatgaaaagatattcaacatcattagccactagggaaatgcaaattaa

SEQ ID NO: 291772 - DNA, 593 bp, Homo sapiens
gttaataaataaataataaagattgttgctgccttaacaatagcagaaatacagactattgagtcatgtgtggatactcataattcatcaattgtgtgcttaagtagtcactcttcagaaaaaggctcaagttcaccagtatcagatctatgaaggatactagctttaaaagaaactggcattatgcagatttttcagggcaccactgtgaaaagcacctgccaactttgaaatgtagaaagtttgcttttgtactatcaaagcaagattaaccttcagcaaatatttacatttgaggagtggagtttcagcagtgatggtcaaactgcagagcaaatctcaaagagaaaaacccatctgmaaaacaattaaactgtcctcaagttgaagccaaataatggaaatagatccttttggttaaaaaaaaattaaatgatcaaacttgctcctaaatagcagaactaattcacatagttcattatacatgatgatggcttaatatttttctattttaaaaaacagatttctaaaaacacaagaaaaattctggaggtgatggatacgtttagtactttggttgtggtgatagtatt

SEQ ID NO: 291773 - DNA, 1096 bp, Homo sapiens
tttggttgtggtgatagtattgtagggtatgcatatatccaaactcataaagatatatacattaaatgtgtacaattgtttgcatatcaagacactaactgcaaaagccataaaggaaaatgatggacagatttgaccacaacaaaaaactcaggagtgataagaaataagctaaacataagraacaaacttggaagctacacataataagctgcacatacttaaaatgtacaacttaataaattttgacataggtatacatccatgaaaccatcatgctggcttatttttaaaaagtaaattttacctagttttaagtctgtatcacttttaaatgacaatttctggaataattcattaattattatctttatatagtgactcatcaagggctgaaagttctttacattattctgtatttgaaatgctacaggagtatgctgaaattgcatatgtgcaaaaaactggttggcacaactctgcagawatttgtataacattcctgaagtgacgttataataatggagaacagaataatggttgccagggtctaatgagggggcagaactgggaggggagtgagtggctttaaaggtcacatgagggatacttgtggtgatggaaatcttctgtatcttgactttccatgttaawcttgtcaatatcctagttataatattgtactgtgattttgtagtatgttatgagaagctaggtagtaggtacataggaactttctatcatttttatatcatttttagaactataagttaatctatacttatttcaaaatgaagtttaactaaaaaatgaaggccaatgaatattaacaactgaaaaataaataatttactactctttaaccaattctcagatattttattttctgaaatgaaatagattcatgttttgtttgcttataaataaattgaattattttagtttgacatgttattttaaaatgaaatatttatagaaacttgaataatagcaatggaaatatcacttgccaaactattgctctgctactactttttcttaatatggacttttccacttatttttgtagaagtggaaaattcctttatcaactatg

SEQ ID NO: 291774 - DNA, 619 bp, Homo sapiens
cataccaaatctgaccaaaatgacatcagcagtaagctgtacagtcaggatgcaaactcaggtctctgactccaggctctactaaaatttgtagatatattctttttagacagaagcyaaaataaaacagttagctgtgaaagtttcagggcccatataaaataaatgtgttaaaagggggcactctcagtatttcatcattcatgagataccttgagggataaattgtgttaattatcattgattgctcccaaactttatttctgttgatctttagtcccgatagtcatatatagcacctttttgatattcattttaatctgattttataaaaacagtatatcatcttaaatatgcaattactaattttaacaactgagattgtgcttttcaaatggtatttacatacgcatactctctgaaaatctaaaagaaaaaagacaaagagatttaaaatggagaaccaatgttttatggtttggttaaataaaaagtcaaaagataaatgtggtttcaaaactttaaaattttgaagttaagattcagtgtcttcagggtctaaataacataattcaacccaacttccactgacattataactaatataatgggaacagca

SEQ ID NO: 291775 - DNA, 619 bp, Homo sapiens
cataccaaatctgaccaaaatgacatcagcagtaagctgtacagtcaggatgcaaactcaggtctctgactccaggctctactaaaatttgtagatatattctttttagacagaagccaaaataaaacagttagctgtgaaagtttcagggcccatataaaataaatgtgttaaaagggggcactctcagtatttcatcattcatgagataccttgagggataaattgtgttaattatcattgattgctyccaaactttatttctgttgatctttagtcccgatagtcatatatagcacctttttgatattcattttaatctgattttataaaaacagtatatcatcttaaatatgcaattactaattttaacaactgagattgtgcttttcaaatggtatttacatacgcatactctctgaaaatctaaaagaaaaaagacaaagagatttaaaatggagaaccaatgttttatggtttggttaaataaaaagtcaaaagataaatgtggtttcaaaactttaaaattttgaagttaagattcagtgtcttcagggtctaaataacataattcaacccaacttccactgacattataactaatataatgggaacagca

SEQ ID NO: 291776 - DNA, 619 bp, Homo sapiens
cataccaaatctgaccaaaatgacatcagcagtaagctgtacagtcaggatgcaaactcaggtctctgactccaggctctactaaaatttgtagatatattctttttagacagaagccaaaataaaacagttagctgtgaaagtttcagggcccatataaaataaatgtgttaaaagggggcactctcagtatttcatcattcatgagataccttgagggataaattgtgttaattatcattgattgctcccaaactttatttctgttgatctttagtcccgatagtcatatatagcacctttttgatattcattttaatctgattttataaaaacagtatatcatcttaaatatgcaattactaattttaacaactgagattgtgcttttcaaatggtatttacayacgcatactctctgaaaatctaaaagaaaaaagacaaagagatttaaaatggagaaccaatgttttatggtttggttaaataaaaagtcaaaagataaatgtggtttcaaaactttaaaattttgaagttaagattcagtgtcttcagggtctaaataacataattcaacccaacttccactgacattataactaatataatgggaacagca

SEQ ID NO: 291777 - DNA, 619 bp, Homo sapiens
cataccaaatctgaccaaaatgacatcagcagtaagctgtacagtcaggatgcaaactcaggtctctgactccaggctctactaaaatttgtagatatattctttttagacagaagccaaaataaaacagttagctgtgaaagtttcagggcccatataaaataaatgtgttaaaagggggcactctcagtatttcatcattcatgagataccttgagggataaattgtgttaattatcattgattgctcccaaactttatttctgttgatctttagtcccgatagtcatatatagcacctttttgatattcattttaatctgattttataaaaacagtatatcatcttaaatatgcaattactaattttaacaactgagattgtgcttttcaaatggtatttacatacgcatactctctgaaaatctaaaagaaaaaagacaaagagatttaaaatggagaaccaatgttttatrgtttggttaaataaaaagtcaaaagataaatgtggtttcaaaactttaaaattttgaagttaagattcagtgtcttcagggtctaaataacataattcaacccaacttccactgacattataactaatataatgggaacagca

SEQ ID NO: 291778 - DNA, 495 bp, Homo sapiens
cttcctcaccctttgggtaagacaattctgagcgtattttctcctgtctcccagggttctcagtgaaaccaagccccagttacccatctcccaataacttgtttgttagcgtatcctgattggcttttcttcctccctcatctccccattttcctaccatagctttctaagactccctccctaataaactacttgcactaaaacccccatataagggtgtttttgggggaacccaactggagcatataacaaggggacctgacctakacctgggtgggcctggatcttggagggccttatcagccatgtcagaaactctttcctaagagatctgtggaaagtcatttatggtcttaaacaagggaatgggtctgtggaagaatgcgaagacaggaatgaattcaggatagctgggtaggaagccatctcatcagtcaactcaggaaagattgggacctgtactagggaggaggcagtgaagagagagcctaccat

SEQ ID NO: 291779 - DNA, 598 bp, Homo sapiens
atatactcttctctgacttctggsgtcacatagctccattgtgttgaccctctcctgtggcagtggcctcttcttagtcccttttgcagaaaactgaacaggagctagcagaaacactggccaggtagtaatctttttagagccgccccaactcactgaatcacagattcagggggactatttgaagcagatggatttggggcctaacacacctaggttcaaatccctgttccatttgttactagcattgtgactttggttagggcaattaacttccctgggcctgttttcttatctttaaactggcctaattatatctaactcaaaggaacttgtaaggattagacaagacatggaaaagcaaatgctggaaatgtgagtcctcttggagatcacctagggactctgattttataggcaagaaaattaacattcaaagaaacaatgttacttttttgtacggagtcttgaacctaatttaaaaaaattcactgttagtgtacaaagaacttttaagaatccctgtcctgtgccccagtaaaggacaaaaataaaaatgctctgtgactgtaattatctaatgacttgtaataacccc

SEQ ID NO: 291780 - DNA, 598 bp, Homo sapiens
atatactcttctctgacttctggggtcacatagctccattgtgttgaccctctcctgtggcagtggcctcttcttagtcccttttgcagaaaactgaacaggagctagcagaaacactggccaggtagtratctttttagagccgccccaactcactgaatcacagattcagggggactatttgaagcagatggatttggggcctaacacacctaggttcaaatccctgttccatttgttactagcattgtgactttggttagggcaattaacttccctgggcctgttttcttatctttaaactggcctaattatatctaactcaaaggaacttgtaaggattagacaagacatggaaaagcaaatgctggaaatgtgagtcctcttggagatcacctagggactctgattttataggcaagaaaattaacattcaaagaaacaatgttacttttttgtacggagtcttgaacctaatttaaaaaaattcactgttagtgtacaaagaacttttaagaatccctgtcctgtgccccagtaaaggacaaaaataaaaatgctctgtgactgtaattatctaatgacttgtaataacccc

SEQ ID NO: 291781 - DNA, 598 bp, Homo sapiens
atatactcttctctgacttctggggtcacatagctccattgtgttgaccctctcctgtggcagtggcctcttcttagtcccttttgcagaaaactgaacaggagctagcagaaacactggccaggtagtaatctttttagagccgccccaactcactgaatcacagattcrgggggactatttgaagcagatggatttggggcctaacacacctaggttcaaatccctgttccatttgttactagcattgtgactttggttagggcaattaacttccctgggcctgttttcttatctttaaactggcctaattatatctaactcaaaggaacttgtaaggattagacaagacatggaaaagcaaatgctggaaatgtgagtcctcttggagatcacctagggactctgattttataggcaagaaaattaacattcaaagaaacaatgttacttttttgtacggagtcttgaacctaatttaaaaaaattcactgttagtgtacaaagaacttttaagaatccctgtcctgtgccccagtaaaggacaaaaataaaaatgctctgtgactgtaattatctaatgacttgtaataacccc

SEQ ID NO: 291782 - DNA, 589 bp, Homo sapiens
gatggctcttgacacatatgatataacaaagagatatgttgagaagtaaaaaataattacttagtaattgaaagaaaacatatttctagctaataaatatgaaatatattacatattatattttattacaaactttgttatacttagtatactttatgcctccaaagtcataatgtgaccttagatctgtttggaaatgtgtatacacacacacacacagatacatagatagatgattaatagatagacaaggtaatttagaatttagatacatagacatatattccttctggcatttttaaccctcagaaatgactatttctccaccccattccatggcttcactgttacaaaagttgtttactatgttttggtttcaaccmtttgctcctttctgtaattaacccaaaaagtagtgaggagagaaaattccaaatgttctcctcaagcaatcaatatgcatcctttttctaacattccatttacagaatcaggctccaaattcagtcatcattatatcccacacttatttgtaatgctcctcttagagacagaattgtatcctcccaaattcatatgttgaagccct

SEQ ID NO: 291783 - DNA, 604 bp, Homo sapiens
agctgggattacaggcgcatgctaccatgcctggctaattttttaattttttgtaaagagggggttttgccatgtttctcaggatggtcttgaactcctgagctcaagggatccacccactttggcctcccaaagtgctaggattacaggcatgagccaccgcacttggcccaaaatgactattttaatgactttgtgaaggcgtgaatatccagaagcctcccaatgactcctttcctaattctgtggaggctgggagggatggcagttctgccctaatacctttctggacatataaaatggagtttgaggtttgatagctaatgttttacatacaatgtagattaaaatgaaagatatttacttaacagcattagcaatgacagaagttcagaataagattccatcaaggcatgagtgcatgatataaaagrtctctatttgggtgctaggagtcttgaagtctagttgtggctcagccattaactagctagaaactgagccattaactgcatggttttgaactgcagttcccaaattatactggattctcagctataaactgtaaggctaataaaagtaatagtagtagtagtaatgcagt

SEQ ID NO: 291784 - DNA, 588 bp, Homo sapiens
gcttttccaggcacacagtgcaagtgttggtggatctaccattctggggtctggaggatagtagccctcttctcacagctccactaggcagtgccccagtggggactgggtgtggggtctccaaccccacagttcccttctgcactgccctagcagaggttctccatgagagtcccacccctgcagaaaacttctgcctagacatcaggcatttccacacatcctctgaaatctaggtggacgttcccaaacgtcaattcttgacttctgtgcactggtaggctcaaaaccatgtggaagctgccaaggcttggggcttacaacctctgaagtaacaacttgagctgtaccttggtctctttaagccatggctggagtggctgggatgragggcaccaacaagtcctagaggctgcacacagcaggggggccctggacccagcccaggaaaccattttcccttcctaggcctccagacctgtgatgggtgggggggctgctgtgaaggtctctgacatgccctggagacattttccccattgtcttgctgattaacatttggttcctcattacttatgcaaatgtatg

SEQ ID NO: 291785 - DNA, 638 bp, Homo sapiens
tgagtatcccttatccaaaatgcttgggatcagaactgtttgggatttttggattttttttcagattttggaatatttgcatatatataagatatcttggggatgagacccaagactaaacccagattcgtttgtctcatatacaccttatacacacagcctgaaggtaattttttataatatttttaatacttttgtgcatagaacaaagtttgtgtacactgaatcatcagaaagtgaagatgccaggtgtggaattttccacttgtagggtcatgtcagggctcaaaatgtttaggttttggaacattttggatttcagattagagatgctcaacctgtatacaactgttttgacctacagaaatagcaatttcacttggttcaacctaatataatatcaagagacagaatgacctaagcctatcccaagcacaacccctgactagctgtatgaattttaacaagtcacttaacatttctagacttcacttgctttactgcataatataaagcayaactataaaagttagactggatttgtctttaggttccccagctccataattataagagaagaggtgaggagaagtataatttatttgttcaacaattatttattaagtacctacaatgtg

SEQ ID NO: 291786 - DNA, 553 bp, Homo sapiens
aatataagtattagctgttattattactaccaccaccgctaagtttattttcagccccccaaataaagtcacatccccccaaggaataatgcttgcattttattttctgaaatgatgatggcctggctccaggctcaccatcagatctaaaaaaaaactgaaccctctcagccagagcacamtaatgtgaactggggtctgggctgctctgtgatttgggcagcagaaaaggccagatacttacgcccagtagcctgagttgcactcatttaacaaatgttaattgtatccctagtctgtgccaggcagtgtaccaaaaatttatttgttcatgatcagcactttcactgtattttctagagcccaaggccgtgttttttgttttttactataatgtgctgcttatgttaaaaaaagaaaaagttacataggaaacattttccaggatgaaactaacaagaatagtaaaagccactccaaaccatctatttctatcttcttccttatatttctacaatataaaaattttcacctttttaaatttgataaagca

SEQ ID NO: 291787 - DNA, 553 bp, Homo sapiens
aatataagtattagctgttattattactaccaccaccgctaagtttattttcagccccccaaataaagtcacatccccccaaggaataatgcttgcattttattttctgaaatgatgatggcctggctccaggctcaccatcagatctaaaaaaaaactgaaccctctcagccagagcacactaatgtgaactggggtctgggctgctctgtgatttgggcagcagaaraggccagatacttacgcccagtagcctgagttgcactcatttaacaaatgttaattgtatccctagtctgtgccaggcagtgtaccaaaaatttatttgttcatgatcagcactttcactgtattttctagagcccaaggccgtgttttttgttttttactataatgtgctgcttatgttaaaaaaagaaaaagttacataggaaacattttccaggatgaaactaacaagaatagtaaaagccactccaaaccatctatttctatcttcttccttatatttctacaatataaaaattttcacctttttaaatttgataaagca

SEQ ID NO: 291788 - DNA, 627 bp, Homo sapiens
actaaacttcaaattacagaatttttaataaatttggtggcattgattttctaatattcagtaagagataccaagttattatattttttataccaaattgttaagcaaagtgatgtcaacattagatcaagaaaagatgaaagtactttacgtaaaatggtaagaattatttgttttttggcaaatagttccttccattccattggttgccttttcactctgttgatgggttctttcrctgtgcagaagttttttagcttgatctcgtcccacttgtctacatttgcttttattgcttgtgcttttgatgttgtatccatgaaatcatttcaaagaccaatgtcatggagctttccctttgtttctttctacgagttttctagtttcagctcttatatttaattgttttattcatttgagttgatttttgcatacagtagaagggtctaatttctacccttctcctattgtatactcttgtgggaggtatcctctaatataacccccaataatctctgcctacttgtaatcacgcctttgtgtttcctgcccttgagtatgacctaggcctactgataaaataaagcaaaactgatgaggtagcttttctaagatcgggttataaaa

SEQ ID NO: 291789 - DNA, 627 bp, Homo sapiens
actaaacttcaaattacagaatttttaataaatttggtggcattgattttctaatattcagtaagagataccaagttattatattttttataccaaattgttaagcaaagtgatgtcaacattagatcaagaaaagatgaaagtactttacgtaaaatggtaagaattatttgttttttggcaaatagttccttccattccattggttgccttttcactctgttgatgggttctttcactgtgcagaagttttttagcttgatctcgtcccacttgtctacatttgcttttattgcttgtgcttttgatgttgtatccatgaaatcatttcaaagaccaatgtcatggagctttcccyttgtttctttctacgagttttctagtttcagctcttatatttaattgttttattcatttgagttgatttttgcatacagtagaagggtctaatttctacccttctcctattgtatactcttgtgggaggtatcctctaatataacccccaataatctctgcctacttgtaatcacgcctttgtgtttcctgcccttgagtatgacctaggcctactgataaaataaagcaaaactgatgaggtagcttttctaagatcgggttataaaa

SEQ ID NO: 291790 - DNA, 547 bp, Homo sapiens
cctaaaacaaccttgtttaccctgatgtttcatacagaacttgtcaatcagtgaacaaagattacagagtccacaatgggtgttaaaaggaaatttgagagttaatttctgccattgagttaactaactgagatctgttatttaatctgttgctgctgattattggtgaccatgggaagctggtgctagagacacatataaatcataatatgtgtcattttatgttttactctaattgtcaaaaacttaatatggcattttaagatccttatagtagacacaggttaattttattttttagtatacaatacaccrtctgaaaatcagccctaggcacacaaatactctgaaaatcagaactgtatttctttttttcctatagttgacttgcaagcttcccctgttcccaaactgataaagatcaaatagatataaatataggtatagatataaaatcttttactttcatatttaacaagtgtttactgaatgcctcaaatatacctgctatctactgactgacaaacatagagtcaaagaagattct

SEQ ID NO: 291791 - DNA, 590 bp, Homo sapiens
attttccccaaattcgtattttgaagtcctaactcccagtacctcagaatatgactttatttggaaacagggtatttaaatgagtaaatttaaatgaggtcactggggtaagccctaaggcaatatgactagggtcattataagaagagaagacaagtgcacaggcacacacagaggaaagatcacatgaagacatagagaaaagacagccgtctacaagccaaggagaaagacttcagaaaaagagacctacagaccctttatcttgagcttctagcctccagaactgtaagaacataaatttctgttgtttataccatccagactgtggtgctttgttatgacagtcctggcaaattaataaacttcctcaatttgattaaggaacagctacaaagaatctacaggtaacatcatagttaacattgaaaagctaaatgctttttcactaaatttatgagcaaagcaaggatgttgactttcaccactctcttattaaacrtagtgctggaagttctaaccagcaccataaagcaagaaaataaaaaaagggtttactgattgataagaaagaaattctacaaaaaaag

SEQ ID NO: 291792 - DNA, 567 bp, Homo sapiens
catactacggaatattagtctcaaaaaggaaaatttgaatggattttaaggaaactattctgagcgaaaaaatagtctccaaaggttgtatatgattgcatttatataacaatcttaaaattatagagatagagaagagattagtgattgtcaagtgttasaggcagagtaagggaggaggatagctgtcactataaaagagtaacaagcagaagccctgtgatagaactatcctgtgtcttgactgtggtgatggtcacacaaatgtaagataaaatgttttagcactaaatatacacactggtgaattctgaataagctttagtgactgtagccatgccaatttcctgcttgtgatattactgtgtactatagttatacaagatgtcacaatggggaaaactgggtgaactgggtgatggttatacagaatttctctaacttacttcttcaaactacatgttaattataattacctaaaataaaaagtaaaatagtatctttaacaataattagaacttagcgagcataaacataacagctgtttaccacacaagtgcagtgcta

SEQ ID NO: 291793 - DNA, 567 bp, Homo sapiens
catactacggaatattagtctcaaaaaggaaaatttgaatggattttaaggaaactattctgagcgaaaaaatagtctccaaaggttgtatatgattgcatttatataacaatcttaaaattatagagatagagaagagattagtgattgtcaagtgttagaggcagagtaagggaggaggatagctgtcactataaaagagtaacaagcagaagcyctgtgatagaactatcctgtgtcttgactgtggtgatggtcacacaaatgtaagataaaatgttttagcactaaatatacacactggtgaattctgaataagctttagtgactgtagccatgccaatttcctgcttgtgatattactgtgtactatagttatacaagatgtcacaatggggaaaactgggtgaactgggtgatggttatacagaatttctctaacttacttcttcaaactacatgttaattataattacctaaaataaaaagtaaaatagtatctttaacaataattagaacttagcgagcataaacataacagctgtttaccacacaagtgcagtgcta

SEQ ID NO: 291794 - DNA, 583 bp, Homo sapiens
agccctttgatatccacactaaatttctgtccagaatacatctgccagttaaatagtttaaactgaatccccacagataatcttgagccatttggaatttttttattatgtagagccaatattattatgatattgayaatcataagacaatagaacaggaaataactttatggctatatttttgttaaaataataattagaaaaggtaaacaatgatgctatctttttatacatgacaaatatcatggctctagtttatttcttggagaagaacaattatataattgttgggtagtatctttgactgtcagccctgaactaagatcttgttagagtataataaatatgtagaatctgttactttcttttgagtcctgacattctcaccagtccatttaaacaaaccaaagtgtatgttccataatgtatctatttctcacttataattattttgtgacaaaaaattctaatcgtactgatactttgaagcagaagttggtgctatagctgaaaaggcataagttttaaagataaataaaactgaatttatgtcccgaccctttgtcttacccatatgtggccc

SEQ ID NO: 291795 - DNA, 579 bp, Homo sapiens
atagccactgtagcatattaataagttaattttttgagtatgacaatgttgaaagtctacctgactcatttccatcactagatctatgatttggtgggcagcaagtgtgagtgtcagcctgcagcaaaaagtagctggagtttctgtaccaggggaggaggtagcctttgcagtatcctggagtctcataatgaagagtaataagtcaccattcatacattgatggcatttgttgcctaatgaatgttcaatattcacatagctgaatggcatacctcagttgatttgtgtatgtgtagatttttaaattgaagttttggtcacaatgtcttcagcacaatgagtctagctcatgttcactgagagcacggtttttatagaagagaaataatacaggacactttgcaaaaatcttaggtagcttaagaacaataaatttaagtgagtgtttttgtatttagaaaaagggatataatcaggccttttgttttatgaagtttyaaaagaaaaagctgccaaatatttagagatggatacttgggagtagaaaagagttcagtagttctgggtatgtgaggt

SEQ ID NO: 291796 - DNA, 621 bp, Homo sapiens
tgcccactctgctgcagcagctgggatgactcactgtgtgaaatagccagacaacacgctcgctcactcacatacccctcaccactccatacctgacctgcccttggcagatgtaagatccaggttggyagcatgagctgagcacagactgtcaggctaagtgggcagaattaacccagggagcccaagccaaacttgggcaaagatgccactggccacataggtttctggcaagaaaagggacaccccaaggatcctgcaacattatgggtatggggagttagtactggaatatatctttttggaggaagagaacacaactctacccacaacaatgaataatgatgtatacagcattaagtacactgtattaaggatcttcagagtcaaaaagatctgtatcattgaatactggaaggttctaaggaaacttgccagtggtaacaacattgctacttttatttcttggccagagatatgaaattagccagtaatgcacaattaataatagagaaaagatgatgcaagggcactatgaagactctttatgtgtactcattgggtgataaatacataagagcctcttttctacccactattcttaatcttcattgataactc

SEQ ID NO: 291797 - DNA, 621 bp, Homo sapiens
tgcccactctgctgcagcagctgggatgactcactgtgtgaaatagccagacaacacgctcgctcactcacatacccctcaccactccatacctgacctgcccttggcagatgtaagatccaggttggcagcatgagctgagcacagactgtcaggctaagtgggcagaattaacccagggagcccaagccaaacttgggcaaagatgccactggccacataggtttctggcaagaaaagggrcaccccaaggatcctgcaacattatgggtatggggagttagtactggaatatatctttttggaggaagagaacacaactctacccacaacaatgaataatgatgtatacagcattaagtacactgtattaaggatcttcagagtcaaaaagatctgtatcattgaatactggaaggttctaaggaaacttgccagtggtaacaacattgctacttttatttcttggccagagatatgaaattagccagtaatgcacaattaataatagagaaaagatgatgcaagggcactatgaagactctttatgtgtactcattgggtgataaatacataagagcctcttttctacccactattcttaatcttcattgataactc

SEQ ID NO: 291798 - DNA, 599 bp, Homo sapiens
gacttttaattattaatatgttttcctacaagggaatactaggcaaaattatgatcataagtactttggaaactgaattagtaatagggagaaatttaatgaatataaataacgttgacaaacaaaggtcaaattccaatgaaacagttctttaggaatttatgagcttttcttggatataggaaatatactgaaaaattggtttgctgtattagacaacttgaacttctcatttatctatgttatttgaggaagtccatagggtatgaaaacaacccagtaataaatttttgaaatcaagaattagattaagtaggtcaaaatatctaaagagagccaaaaagggttatcttctggtaaggtattatatttgctagttatccagattaaaaaaaaactataataattgagatatctcaactggagttataatgatggtgttgtttgacacagaggtaggtgagacaaaacataggcaaacagaaatgacaaacagcacagtattctcaattaatacaaaactaattttagaataatatatgtaaaattcaagtactcttttaatgttttatgttgrttataattgttttctaggcaga

SEQ ID NO: 291799 - DNA, 624 bp, Homo sapiens
acctatataaatttttggaattattttacacggatttgcctatgtcctcttattctatttatttatttagtcatttatttgtattaatatggactcatatgctttattagtctgttttcatgctaataagaaagacatacctgagactgggaaatttacaaagagaagtttaatggatttacagttccacatggctggggagtcctcacaatcatggtggaagacaagaaggagcaagtcacatcttacatggatggcagaaggtaaagagagcttgtgcagggaaactcccatttttaaaaccatcagatttcatgagacttattcactatcacgaggacagcataggaaagacttgcccccatgattcaattatctcctactgggtccctcccacaacacgtgggaatcatgggagttacaagatgagattygggtggggacacagagccaagccacatcatgtgcatttattctatattttacattataatacaactatatgagttattttattgctcatattcttccagctttggacactgaaagttctttcaggtggatcctatatctctttaaaatgtctccaccattgtgtccatccttacttcctggcatggcaag

SEQ ID NO: 291800 - DNA, 592 bp, Homo sapiens
ggaaattaattgaagtatggagcaaatgagcatattatcagacttatttttaatagtcctgctagcccattgtaataagaattgtctaaaggcaggtgggtgaaaacataatatgtacccatttattgtttatgcttcattttaaaatatatttatagtggcataattgtcaaatgataaacctcatatattaaaattgtataatttgataagttttaacatatatatgtctgtaaaatcataaccataattgatacataaacatgtctatcatccgtgaaggtttacacatttcccttcataatctccccataataaccctccttattccctgctttcccatcaccagacaactactgcactgtcttctatcaatataarttagtttgcactttctagaaatttatataaatgaagccacctagtatgtatcctttttgtctggtttactaataataattgaaaattggcaaaataattgaacagatacttgaccagaagacataaacatagcaaaaagcaaataagatgctcaatctttttcatcagcagataaatacaaatgaaaacatgaaaagatacacgacacaaa

SEQ ID NO: 291801 - DNA, 557 bp, Homo sapiens
gcccccacgctcaccatttgccacagtaaagaatttgctctgggcaagagaaatattttcactaactacaaattttaacatcttcttaataaaaactcacaccaattccattttttccacccagaggataaagtaagcatctcttttcatattaaaagttcgggcaggggagtgagtttgtcygaaggcaaagataatttcagcagaggaagactgatgctatagtcctatcccatctctgtcctggtgggcagtctctcctctcctttctctctctctctcttccccactctcctttgtgtgtgtgtgtgtgtgtgtgtctcctaattctgcatttttctctacagtttttgtcctctggcatactttatagtagtctctaaatttacttctctatcttctctctaaaccataagctccatgataaaagaattttgcctttccctactaccatatctccagtatctagagcagtgcctgcaaagagtggacctttaataaatacttattgaattaaaatttcccctttatcctgagagttcctgtctcccaaatta

SEQ ID NO: 291802 - DNA, 573 bp, Homo sapiens
attatattcatttagagtaatgacctctagctccatctgtgtgttttatcattcttatagagatcttttaccttcctgattagctgtattcgaaaatattttattttttgtgtatggtttttgtgattggattgcattcttgatttggccctcagcttggatgttgttggtgaacagaaatgctactgattattctatattgaatttgtatcctgaaactttgttgaagttgtttatctaggagctttagggcagagactaggattttctagatataaaaacatatagtctgtgaaaagagrtagtttgacttcctctcttcctggttagatgcctttttttttttcttgcctgattgctctggctagtgcttccactactgtgtcaaataggagtggcgaaaatggatgtccttgtcttgttctggtttgcaagggtaatgtttccagctttttcccattagtatgatgctggctgtgggtttatcatagatggctctttttattttgaagtgtgttccttcaatgcctagttgttgagggtttttaagatgaagggataaattttattgaa

SEQ ID NO: 291803 - DNA, 573 bp, Homo sapiens
attatattcatttagagtaatgacctctagctccatctgtgtgttttatcattcttatagagatcttttaccttcctgattagctgtattcgaaaatattttattttttgtgtatggtttttgtgattggattgcattcttgatttggccctcagcttggatgttgttggtgaacagaaatgctactgattattctatattgaatttgtatcctgaaactttgttgaagttgtttatctaggagctttagggcagagactaggattttctagatataaaaacatatagtctgtgaaaagagatagtttgacttcctctcttcctgkttagatgcctttttttttttcttgcctgattgctctggctagtgcttccactactgtgtcaaataggagtggcgaaaatggatgtccttgtcttgttctggtttgcaagggtaatgtttccagctttttcccattagtatgatgctggctgtgggtttatcatagatggctctttttattttgaagtgtgttccttcaatgcctagttgttgagggtttttaagatgaagggataaattttattgaa

SEQ ID NO: 291804 - DNA, 573 bp, Homo sapiens
attatattcatttagagtaatgacctctagctccatctgtgtgttttatcattcttatagagatcttttaccttcctgattagctgtattcgaaaatattttattttttgtgtatggtttttgtgattggattgcattcttgatttggccctcagcttggatgttgttggtgaacagaaatgctactgattattctatattgaatttgtatcctgaaactttgttgaagttgtttatctaggagctttagggcagagactaggattttctagatataaaaacatatagtctgtgaaaagagatagtttgacttcctctcttcctggttagatgcctttttttttttcttgcctgattgctctggctagtgcttccactactgtgtcaaataggagtggcgaaaatggatgtccttgtcttgttctggtttgcaarggtaatgtttccagctttttcccattagtatgatgctggctgtgggtttatcatagatggctctttttattttgaagtgtgttccttcaatgcctagttgttgagggtttttaagatgaagggataaattttattgaa

SEQ ID NO: 291805 - DNA, 545 bp, Homo sapiens
gtggtgtgagctccctgatcaacctcacggtgccgggaggcaagaaccaggaacaacagatctggaccaggcaggtacacctacagatcccctgatggcaggcacaagcaccagtgcctacggggatggccaccatgtgctcagagatgtgcctaggcattgaactgtgaaacctccttggctccaagttctctgcatggggatgggcagcaacttacactcttaatccaagygggtgttccagatgtcttgactatccacctgggcgtggaacagagaaggccccatgcaccaagatctctgcataggaggtgtggagtgtctcagactgctggaagaggcaagcagtttctttgaatgcctggagatctgcctgggcatggagtgtagagggtttcgctataccatgacctatgtccaggaaaggtaaggtggctcaggctgctgaaacagatgagtgggtacaacaaatgtctgatgatttgcctgggcatgaaggagagagggtcttcctgtaccaggatgttcacacaggaagggtgggg

SEQ ID NO: 291806 - DNA, 590 bp, Homo sapiens
ttttcttatttttgttttataaaattccttgaggtttttattaagataatcaaaacttaaagctaatacctaatcctcttctcccaccaggtccaagattttctgctgtcttatcacagcgccttcccttatggaacacatgtttatatgctatggcacacaaaaaagagatagatttagctgagcaggctttgtttcttgcatttcttcactccatctgtattatatttacagatagtatggtaggaaaatgaaaaactaaagtggcyacacaaatcgccctaagaatttgttattatgagccttccttcttgtatattttcaggtaaaatttataccacttagatggtacaagatgacaatctagattacagagattaccacatgacagcatccacaaagtacatgaaaaaaactcaaatctactttggataaacctaccttaatcacaagcctcaaaaaattccaaaagataaaatcacaaagcacacaagcaactgatggtcaaaaactcagtaaaaacacaggaaaacactgatggtgacccttcttcagattccacttctgacaccatttgtcaacttaagtaa

SEQ ID NO: 291807 - DNA, 1104 bp, Homo sapiens
tttgtgtcacttgtgatttctttctgcagtgttttgtagttctccttgtagaaatttttcacctcttggctagatgtattcctaggtatctttttgtgtgtatgaggctattgtaaatgtgattgtattcttgttttagcactcagcttgaacattgttggtgtatagaaatgctactcatttttctaaacttattttgtatcctaaaactttgctgaagtcatttakcagttccaggagccttttgatggagtctttagggtttcctggatatagaatcatatggtccatgaggagagagagtttgacttcttttcctatttgattgccttctatttctttctcttgcctgattgctgtggctagcacttccagtactatgttgagtaagagtggtaagagtgagtatccttgttttgtttcagttatcaaggggaatgcttccggtttttgcctgtttagcatggtgatagttgtagctttgtcttagatagctcttattattttgaggaatgttcctttaatgcctagttactttagggttttatcwaaaattaaacaataaaaaacaaaagaaaaaaccctagcaatacaaatttatgccacatgcctagggcatatttgattaattagataaacattttttaaaactgcagagttaacattttcttccctagttgtatataaacacaacaagctgagtatcctggctatatttaattaaaatccatagaagaaaggcttaatcacagcatcttcataacagttgtcgtgataggactawttataatagagttttactgacacccattattatatctcattaatacatgcaaattgccacataatttaaaatgccaagaacctaggaattctttgatcaaatgacctttgttctttcaagttacctctcccaaactccttatatgcgcacacacacacacagtatatacttaacacagactaggtgggctgcttaattaggacaagcagtgcaaagtactgagggatacatccttttccttcctaatctgtttctcacaaatacgtctgtatgatgaagaatactatgaaaggatcactccccacccccataaaaacaac

SEQ ID NO: 291808 - DNA, 554 bp, Homo sapiens
aaaattaaacaataaaaaacaaaagaaaaaaccctagcaatacaaatttatgccacatgcctagggcatatttgattaattagataaacattttttaaaactgcagagttaacattttcttccctagttgtatataaacacaacaagctgagtatcctggctatatttaattaaaatccatagaagaaaggcttaatcacagcatcttcataacagttgtcgtgataggactaattataatagagttttactgacacccattattatatctcattaatacatgcaaattgccacataatttaaaatgccaagaacctaggaattctttgatcaaatgacctttgttctttcaagttacctctcccaaactccttatatgcrcacacacacacacagtatatacttaacacagactaggtgggctgcttaattaggacaagcagtgcaaagtactgagggatacatccttttccttcctaatctgtttctcacaaatacgtctgtatgatgaagaatactatgaaaggatcactccccacccccataaaaacaac

SEQ ID NO: 291809 - DNA, 555 bp, Homo sapiens
ctgaaatctgtgtttttattatttttcttaccaactaccatgaagacaacattgtttactaatatataaacagctgaatagattaggtactgatgcctatggagaagtgatagaaaccccactgygtcttttaatccaagcttaaaccaagcagtgacagatctactttataaaataataatcaattagcaggaaaattgatcctgaatagttgagagttttggagacttcttatatgactgaacaatgggactttaggatttgctatggagcaatccaaaaagtagctctgcatatgctatggagctaccttcccacatttactgttcaatttcatttctctttcaaggtaattataataaatgtcaattatggaaatacttaaataaaatcttggccatgcacagaggctcacgtctgtaatcccagcactttggaaggctaaggtgggtggattgcttgaccccaggagttttcatgattagctttcaacaacataacaaaacccagtctctacaaaagaatacaaaaattagctgagtgcagtggcatggg

SEQ ID NO: 291810 - DNA, 548 bp, Homo sapiens
ttcttttttatgtaagttaactgttgtttcatccagtgcttgattgcttagtgttttccttggctactctgacaccaaaaaaagtaggccgaagttttggaacttacattaacaatggctagcattgtgatgatctttgatccttctgtggttagacccctcccccgacatggtaaccatatacatgatattctgctcttcctctgtgttaaaaggcaatacttctggctattattaattatataagggtaaattatatagtgtgatccactgttgaagttcaggtataaaaaacactgcacctaaagaagamaaaaactggtgctgagaaaaatcattaactgaaactaggttttacaaaaggtatcctgaatgatggattaatgtttagcttaatttttgtgcatggtgtgaagggtccaaatgtatttcttttcgcatgtgttcaattgtcccatcatcattagttgaaaagattattctttctccccatttaactgccttagcacttttgtcaataatcaattgaccatcattgttagggttta

SEQ ID NO: 291811 - DNA, 585 bp, Homo sapiens
tcaatgggtttattttctacctcatgaaccagaagaaagaaagcaaaataaacctgaagcaaggtaaaggaaaggaataatgtagacagcataaattaataaaattacaaatatagaaagtcatgatacaaacaaaagaaagaaaagcaaaaaaaaaaagaaaaattaaaatggcaaatttaagcctgatatggtttgcccacgtccccacccaaatctcaacttgaattttatcccccagaattcccacatgatgtgggagggacccatggggtggtaactgaatcatggaggccagtctttcctgtgccattctcatgatagtaagtctcatgagatctaatgagtttatcaggggtttctgcttttgcatcttcaccatttttctcttaccatggmcatgtaagaagtgacttttgcctcctgtcatgatcccgagacttccccagccatgtggaagtgtaagttcaattaaacctctttttcttcacagtctcaggtatgtctttatcagcagtgtgaaaacagactaatacaaagctatatatatatatatattttaaaattagtgaaaggccagcaaaa

SEQ ID NO: 291812 - DNA, 585 bp, Homo sapiens
tcaatgggtttattttctacctcatgaaccagaagaaagaaagcaaaataaacctgaagcaaggtaaaggaaaggaataatgtagacagcataaattaataaaattacaaatatagaaagtcatgatacaaacaaaagaaagaaaagcaaaaaaaaaaagaaaaattaaaatggcaaatttaagcctgatatggtttgcccacgtccccacccaaatctcaacttgaattttatcccccagaattcccacatgatgtgggagggacccatggggtggtaactgaatcatggaggccagtctttcctgtgccattctcatgatagtaagtctcatgagatctaatgagtttatcaggggtttctgcttttgcatcttcaccatttttctcttaccatggccatgtaagaagtgacttttgcctcctgtcatgatcccgagacttccccagccatgtggaagtgtaagttcaattaaacctctttttcttcacagtctcaggtatgtctttatcagcagtgtgaaaacrgactaatacaaagctatatatatatatatattttaaaattagtgaaaggccagcaaaa

SEQ ID NO: 291813 - DNA, 625 bp, Homo sapiens
atcttcatattataaatattttccattgacatagcataatttttttatttaaatatgtttagatatgaacatatttattatatagaacaatgctaacatatattcaagtgtaaaaaatagtaaaatattatttttatttatgtgtttggatgttaaaataaccattgaaatttatttttgtatgtaaaacataaaagcatgaaaatatrtaaaatataaaattattatacaaataatatgttaactcaaaatgccactgtgatggcaaaaagaaactgtgattttttttcaaaaattatatgatgaagatatgatcaacttacttcctttcttcccagataattaaaaccaaaatcaggatattatattttttgctgccttttagtagaaactatttctttattaagcaattcataagtcattataattctcatatttttttgttatatttaaattaaaatttctatatcattgaaatatcaattaaaatttctcagttctttcataggttaaattcttgattcattaaaaatggttgtaatataatcagaaggatttttttttttattttagatatagaagtactttccttaaagttaaagattaaaataaagttagtttctgg

SEQ ID NO: 291814 - DNA, 595 bp, Homo sapiens
  misc_feature (1)...(595): n = A,T,C or G
tcagtcacaaataattttggaagcccagtcaatgtgataaagccttccaaggtccatgtaaatactatttgaaaagtctttgttaaatatgtagaaagctgtctattgtagcttttctagaaatgaaatagaatgtgttacttcaaagtaaagtaggaaaaagagaagaaagaagtaagcatccaaaggtttatcaatcaaaatagtacaaataatacattaatggattaaaaatatgccatgaaaataaaaggtacaaactgatttgtgtgtcataagtattaatatataaaaatcaataaatctaaatacactaaaacacacagaaaaggtatttaactagttaataagaaatgaatctatgatgtttacaagagacaaacaaatgaatagttgaatgaatatgaataaataaatactcatatgaatgaacaaataagaaacatgaaaaaactttgattaaaaaatataatggscaatagaagaaccataaacgtatagatctaaacctaaaaatacttgattcaagagaacaaagataattacataataagagaagtttcaattgactagaaaataatantaattaaataat

SEQ ID NO: 291815 - DNA, 595 bp, Homo sapiens
  misc_feature (1)...(595): n = A,T,C or G
tcagtcacaaataattttggaagcccagtcaatgtgataaagccttccaaggtccatgtaaatactatttgaaaagtctttgttaaatatgtagaaagctgtctattgtagcttttctagaaatgaaatagaatgtgttacttcaaagtaaagtaggaaaaagagaagaaagaagtaagcatccaaaggtttatcaatcaaaatagtacaaataatacattaatggattaaaaatatgccatgaaaataaaaggtacaaactgatttgtgtgtcataagtattaatatataaaaatcaataaatctaaatacactaaaacacacagaaaaggtatttaactagttaataagaaatgaatctatgatgtttacaagagacaaacaaatgaatagttgaatgaatatgaataaataaatactcatatgaatgaacaaataagaaacatgaaaaaactttgattaaaaaatataatgggcaatagaagaaccataaacgtayagatctaaacctaaaaatacttgattcaagagaacaaagataattacataataagagaagtttcaattgactagaaaataatantaattaaataat

SEQ ID NO: 291816 - DNA, 554 bp, Homo sapiens
atctggaaaatttctatgctttgtaaaggcaaatgactggtttttagatattttaaaacatattaattaattaactaattacatttacataagccctagcaagaggggaactgtccatcctcttggttggaacctgagatccagcaagacctactaccatgggttaaaatgcaccagagtcctaaataaacttgaaagacagtttcggcaacaaggactgaaattcttgggcaagttctagtgcaaaatatttgaataggtatttctcaaatggagatatacaaatgacaaataggtctatgaaaaagtgctcaacatcattaatcatcagagaaatgcaagtcacagctgcaatgtgatatcatctcaccccagttaaaatagctcttatctaaaatacaggcaataacaaatactagtgaggatgtgaagaaagggtgaccctcatacactattggtggaaatgcaaattggcayagccactatgaagaacagtttggcgggtcctcaaaaatctaaaaatagacctaccagcaatcaatggtaggtagcaa

SEQ ID NO: 291817 - DNA, 523 bp, Homo sapiens
gtggaggaaagtgggggataggatgcagggctaatgtgcagatcccacttgaattcaaagagcagtgtgttgaaactcacactgtgaacttctgctccaaggaccaccacaggaacctaacaggaaaactgaacgaattcacagatcctttgaaagaaatgacatgatactgcaaattccacagggyaggcaaaaaactgtgagttcccaaagtgtgagaagggtaaaacctgcctccaaacacacatccccactggggaatgtgaaaatccagatcacaggagaaggatttaaccttacttagagatgaaatggatttaaggagctgtgtgaaatatataagtagaagcagcagcagaaagagccttgtaggcactcccagtgtccagcttgatcccagggaagccaaccctgactatatgtcacagtggcccttggggaacgcagccagcagaattagggaggggtcacagggtgagagacgcttccaactggattttgtaataatttcgactaggcacaa

SEQ ID NO: 291818 - DNA, 598 bp, Homo sapiens
acagagcattctaccaaacaactgcagaatatacatttttttcatcagcacatggaacattctgcataacagaccatatggtaggtcacaaaacaagtctcaaaaaatgtaataaagtcaaaattatatcagatatcctctcaaaccacagtgaaataaaactggaaattaattccagaagaaaccctcaaactatacaaatacatgcaaattaaataatmtgctcttgaataatctttggatcagcaataaaatcaagacggaaatttaaaaaattctttgaactgaacagataacagtgacaccacttatcaaaacctctgggatacagcaaaagcaatgttaagaggaaagatcacagcataaatgccttcatgaaaaagtctgaaagcacaccaataggcaatcaaaggtcacaactcaagaaactagagaaacacgaacaaaccaaactcaaatccagcagaagaaaagaaataataaatatcaaagcagaactaaatgaagcagaacaaaaaatacaaaagataaatgaaagaaaagctgattatttgaatagataaacaaaattcatagaccattaatgaaattaccaaga

SEQ ID NO: 291819 - DNA, 598 bp, Homo sapiens
acagagcattctaccaaacaactgcagaatatacatttttttcatcagcacatggaacattctgcataacagaccatatggtaggtcacaaaacaagtctcaaaaaatgtaataaagtcaaaattatatcagatatcctctcaaaccacagtgaaataaaactggaaattaattccagaagaaaccctcaaactatacaaatacatgcaaattaaataatatgctcttgaataatctttggatcarcaataaaatcaagacggaaatttaaaaaattctttgaactgaacagataacagtgacaccacttatcaaaacctctgggatacagcaaaagcaatgttaagaggaaagatcacagcataaatgccttcatgaaaaagtctgaaagcacaccaataggcaatcaaaggtcacaactcaagaaactagagaaacacgaacaaaccaaactcaaatccagcagaagaaaagaaataataaatatcaaagcagaactaaatgaagcagaacaaaaaatacaaaagataaatgaaagaaaagctgattatttgaatagataaacaaaattcatagaccattaatgaaattaccaaga

SEQ ID NO: 291820 - DNA, 899 bp, Homo sapiens
aaaagtcaaataatcccatcaaaaagtggacaaagaacatgaatagacaactctcaaaagaagatataaaaatggccaacaaacctatgaaaaaatgctcaacatcactaatgatcaggggatgtgaatcaaaaccacaatgtgataaccactttactcctggaagtatggccttaattaaaaaattaaaaactaatagatgttagcatgatgtggtgtaaaggcaacacttttacactgttggtagaaatataaactagtacaaccactatggaaaacagtatggagatacattayagaactaaaagtagaactaccatttgatatagcattcccactatggtatctacccagagggcaataagtcattttatgaaaaagacacttgcacacacatgtttatagcagcacaatttgcagttgcataaatatgtaaccccccagcctaawaaaagtcaaataatcccatcaaaaagtggacaaagaacatgaatagacaactctcaaaagaagatataaaaatggccaacaaacctatgaaaaaatgctcaacatcactaatgatcaggggatgtgaatcaaaaccacaatgtgataaccactttactcctggaagtatggccttaattaaaaaattaaaaactaatagatgttagcatgatgtggtgtaaaggcaacacttttacactgttggtagaaatataaactagtacaaccactatggaaaacagtatggagatacattacagaactaaaagtagaactaccatttgatatagcattcccactatggtatctacccagagggcaataagtcattttatgaaaaagacacttgcacacacatgtttatagcagcacaatttgcagttgcawaaatatgtaaccccccagcctaa

SEQ ID NO: 291821 - DNA, 611 bp, Homo sapiens
actgtaaactggatacatgtatttttacttttktaaacatttcttagctagagatacaaatgtgactgtaaactggatacatgtatttttacaaatatgactgtaaactggataaatatattttttacacttggataaatgtattttttaatacatggatattacttttttttaatatcgaggaataaacagagagccaaaaattgtggctgaaaagttctttatcctgaattcaaatagagtatgtgagcctataaaataaattaaaaagcatccagagagatgaagatgaagagaaaggtgaaaagggggaagaaagaggaggaagaaaaaataaagacttaaaaaaaaaagtaatgagagacaaaataacatttttttaaaggagggagtggtctattagatgtaagtcttttgaggatttgagtaaaagtcagtggggatctacataccccattcttgttccgtggtacctgacacaggtcattggtaaccttaacaaaagcattttcagtaggatggtttgaagccagaatccagaacaaggtggactgaggtatgaatgaaaaaggaagaagtaacattaacctctttagacattttaaaaataa

SEQ ID NO: 291822 - DNA, 611 bp, Homo sapiens
actgtaaactggatacatgtatttttacttttttaaacatttcttagctagagatacaaatgtgactgtaaactggatacatgtatttttacaaatatgactgtaaactggataaatatattttttacacttggataaatgtattttttaatacatggatattacttttttttaatatcgaggaataaacagagagccaaaaattgtggctgaaaagttctttatcctgaattcaaatagagtatgtgagcctataaaataaattaaaaagcatccagagagatgaagatgaagagaaaggtgaaaagggggaagaaagaggaggaagaaaaaataaagacttaaaaaaaaaagtaatgagagacaaaataacatttttttaaaggagggagtggtctattagatgtaagtcttttgaggatttgagtaaaagtcagtggggatctacataccscattcttgttccgtggtacctgacacaggtcattggtaaccttaacaaaagcattttcagtaggatggtttgaagccagaatccagaacaaggtggactgaggtatgaatgaaaaaggaagaagtaacattaacctctttagacattttaaaaataa

SEQ ID NO: 291823 - DNA, 555 bp, Homo sapiens
ccaattctttttcaagccttaaggggggagagacttttttcccaagccttaagggggaagtaggaattgtgggcacctgatacccctgcatattatgtgtttctatcactgaatgctcaacctatctctaatctgtctgagatacaatcaggcatgattaccgaacaatggaaactcattaagtgttcttagtctctaggcaaccacagctgtcaatcagtggagcttgaaaagaaccttttcaaatattcttaaaaaaaaaaaaaaaaaaaaaaaaaaagaataccttcttgaatatcttcacttttctccaagaccattatttttaaggcactttttagcccaraactagattgttgttactgttgtctaactaatttttttaaagtcaacttttctttcagattcaaggggtacatgtgcaggattgttacatgggtataatgcatgatgcttaggtttgggatacaaatgatcttgtcatccagatagtgagcatagcactcaacagtaagttttttaacgcttgccctcctctctccctcttctctttat

SEQ ID NO: 291824 - DNA, 516 bp, Homo sapiens
ggttgctttgtttcttagggttctgttgcttatttttttttacatgtatgtatgcctcatcattttgttgtcgttgttgaaaaccaaacatcttatgtaggctgttagaaagtgatgtgtgtgtgtgtgtgtgtgtgtgtgtgtgtgtgtgtgtgtaacagagtctcactctatcaaaccaggctggagctcagtggctcgatctcggctccctgcaaccttcacctcccaggctcaggcgatcccgcaacctcagcccccagagtagctgggaataccagcaagccaccaccaagcctggctaatattttgtattttttgtaaagacgggttttcccatgttgtccaggttagtctgtctcaaactcctgagctgaagcratctgcccacctaggcttcccaaagtactgggattacaggtgtgagccactgtgcctggcctgtgtaaatactcttaatgccttgattggccacatctttccttttgctaagtctttgttgtggggctttgagtt

SEQ ID NO: 291825 - DNA, 577 bp, Homo sapiens
ctcgtagattctggatattagatcttggtgttggatggatagtttgtgaatatttcttcccattctgtaggttgtctatatactctattgatagtttcttttgctgtgcagaagctctttagtttacttaggtcccatgtgaattttcatttttgttgcaattgcttttcaggacttagtcacaatttcccgagtccaatgtccagaatggtatttcctagttattcttttagaattcttatagttttagatcttacacgtaaatttttaatctatcttgagttaatttttgtatgcggtgaaaggtacggggtgcagttmcttttttctgagtgttgctagccagccattccagcaccatttattgaccttttcccattgcttatttttgtcgactttgtcaaagatcaagtggctgtaggtgtacgactttacttctgagttctttattcttaaactccttttataatttacttcaaacacctcagaacaaccatgttggtcctataaaaaaatacgtatattttggtcaattacaagatatgctaatctactaagagagctcaaatcatacttg

SEQ ID NO: 291826 - DNA, 570 bp, Homo sapiens
ttttaaaagaaattattctcacttctttttccatgtaatgaggtataacgaatttgagagtaattctatttgtacagtggtcattattaaagaagaaggaagcaacctgtaaggaggaatgtaaattttataaattacatgtgtcaaaaatttgtcatacaatgtccaaatggcaaataaaaaagattagtgtgatttttttttttttttttgaaatttacaaaatctatgaaaaacattctaraaagtggtcaggtttcaagacatgaataatcaatctatgaaaagcagatatttttgaagtcagcaggaaaaaggatatgtaagaaaatatatgctaataaaaatctttaaaaaataaacctatttctggcagtccctagggactgtggccacaggggtgcttgtgtcactttaacctagctccacgtggctcagaacaaagagacagactccatttctttgggataagttaaggaaagagaacaaaagtcactgtccggtaatccaaagaattcttcctaatcttgtccaaggccatcaaagtagcacatctatgaatctacagga

SEQ ID NO: 291827 - DNA, 559 bp, Homo sapiens
gctggggtaggggtgacaaaagcactccaactcactaccactaccactgggactttgctgggtcagacatgaatccagcrctgcactggtcttacccaaggcccactgtaaccatgaccttgctaccacctatgtttactcaaggccctaagctctacaatcagcaggtagcctaacttgggtctttcccttcagggtggcaagatcccctgggtcatgggggcacagggtgctctattctacagcagctaaactggcactgaaaccacaaaataaaaatccttgctctcatttcttctctttttccaagtcagaagagccactccccatgtccaccactaccaaaagcacacagggagtactgcctagctactgctgatgaaagacccaagtgcttttagtcagcttgtggtgaatgctttcaggcttgagactttcctttcagggcagtgggctcccctctggccaagggcaggttcaggcatgccatccaagatgaagtcctggaatgaggtaccccaagagccaactttgtgtgctcttatccactgtggctgag

SEQ ID NO: 291828 - DNA, 556 bp, Homo sapiens
gcagtgggctcccctctggccaagggcaggttcaggcatgccatccaagatgaagtcctggaatgaggtaccccaagagccaactttgtgtgctcttatccactgtggctgagctggtagctaagctgcaagacaaagtctcctctrttcttttttctccttttctcaagcagaagtgatctctctccataaccaccacatttgtgaatatgctgggacacagctatagccagtatgtctcagggtctcaatcaaggtcaagagcatgagctacctggttacctatgctgattattcagggcccaaaggcactttagtcagtaggtgataaatcctgctgggtgttggtggcactgaatttcaatacaaagtccctcagtcactgcactctcccttctccaagtgcacagattctttctccatgctatatagctgctaacagtgtatgggaaaggggtggtgtcaggaaatcaacactgtcttttctaccttcttcagtgcctctttcactgatataaagttaaaactaggtattgtggtctcacacctgttgttt

SEQ ID NO: 291829 - DNA, 556 bp, Homo sapiens
gcagtgggctcccctctggccaagggcaggttcaggcatgccatccaagatgaagtcctggaatgaggtaccccaagagccaactttgtgtgctcttatccactgtggctgagctggtagctaagctgcaagacaaagtctcctctattcttttttctccttttctcaagcagaagtgatctctctccataaccaccacatttgtgaatatgctgggacacagctatagccagtatgtctcagggtctcaatcaaggtcaagagcatgagctacctggttacctatgctgattattcagggcccaaaggcactttagtcagtaggtgataaatcctgctgggtgttggtggcactgratttcaatacaaagtccctcagtcactgcactctcccttctccaagtgcacagattctttctccatgctatatagctgctaacagtgtatgggaaaggggtggtgtcaggaaatcaacactgtcttttctaccttcttcagtgcctctttcactgatataaagttaaaactaggtattgtggtctcacacctgttgttt

SEQ ID NO: 291830 - DNA, 538 bp, Homo sapiens
aaaatatttcagatcttcccttgcttaaagggtctcttctcctgcttatgtctggctacctgcctactctaacatatggatatctcttatatctagttggtgtacacatcgttaaaatgtcccattactctgttgaccttttttttctgtccattatcgaggtgagatattgaattccccaataattattgtaaaactgtttctcccttcatttctgtcagtttttgtttcatatattttggtgttcttatattaggtgcatataggtttataattgtaatattcttctaatggattgaatcttttatcattgcaaactttccctctttatatctaatatcattttatttttgttttaaaatttattttccttgatattagtaaagaaagcctctccagctttcttttggttgctatttgcactgtttttaactttcaacttgtttgttktttttaaatctaaagtaaatttataggtagaatataggtggatcatgtattttatctagtctgataatttctgcatttgattggagta

SEQ ID NO: 291831 - DNA, 621 bp, Homo sapiens
tcaactgttaatcttattgaggttgttttgaaagttaacagtcatttatatttttgctgcctttatgattttttcttgtctttgactttcagcatttctagtgtgctgtgtctgttttaaatctctttgtgtttattctccttggagtttactaagttcattagatgtgtatattaatatttttgttttttaaaatcatagtgaggtggttttcagccattatattttctgatattttttcttctcttccccccccccccttttctttctggttccttcattacatgtatgttagggcgttcaatatcatcccatgtttctctgtggctctctttatttttctttattctttcttggttttctgcttatatgatttctatcaatctatgtttgttagcttaytcttctgctatttcacacatactattgagccattattgtgatttttatttttaatttcagtaaattaacttttcaattccataattttcatttgagtcttctttataacttctgtctctttactgatagtctctatttggtatgctgtcatattattatttacttctttaatcatggtttctttataattataagggttaatttaagtcttcttctgat

SEQ ID NO: 291832 - DNA, 613 bp, Homo sapiens
tctgtcagcttcatttgcagatactttcattttattattaatttttaagatatatctttgctagatacaagtttctaggttaacatttcccccccttttaggactttaataatgtcactccatagttttctggcttgcatagtttccaataagaagtctgttttttcttgtatctttgttttttaaccagtgtttcttacctacccctctccctactgcccaccatgggctgcttgtttaattttagtgtttttgttagtttgtctatttttattcttgtgggtagctgaggttcttggatctttgctttgttatctttccttaattttggaaacatcttgaccattatcttttccaatatttcttttgtttcatccattttctttcccgctccaggactcaatttcatatgtattagacaattattattgtatgtttgtctcctagcacttggattctctrctctcattaactcttttttttctcttttcttttgctttttatatttcatttaagataatttatattattcaacctatctggaagtttgtgacacctctactgtgtccattctgctgatgttcagtctagaaattatgtttaatattctcat

SEQ ID NO: 291833 - DNA, 604 bp, Homo sapiens
aaggattcagtcttgcacagcactctatatctctaatagctagrtagtcacatgcccagttttacactagaaaagagggattatagatagatatagaggaaaataaataagtagattattttatatagctcagcctattcatgagaaaaaacaaccagaagaaagggtggaaagacgagcaacaatcaaatttaaaactgttgatcatgcttatctggtccgtagtagatggcaaatccccacacaatatctttattacagtggacttcactgggagctttaaatgacaaaggagattcagctaaatatattaaaattactggctctgaaaagagaatagggcaaataaaaaaactgggtaaaattttgggtaaattattgggtaaatttttacccaaataagttgtgattcttttataaagcaaaagacgttcttgagtatgtaggctttcacctcactgagtgatggttaataaatttgaaaagacatcaagttatattttaagctaatatatttttgaaaggagcaaagaggcaagaaaaacaaataacagaagcaggaaatttagcagattaatgttatcagagaaaagatggaaaacat

SEQ ID NO: 291834 - DNA, 560 bp, Homo sapiens
accagtgggatgacttttctcttgatactgtaaattagtttttgctctggattttggggcaatatcttattatatttttgtttcttgttttttttctgctttgataaaaaatggctatagcttagaagtctactaattaaacccactcctgacaattatttattaattattttattttaaaacttaaacattgttacctcagatcaagagggtattttctatttgctgaattttttagtcagtcatcttaaatctttgggcctatgagtaataaaaactaataatagctttctgaattaaaattaaaacccaaacaaaactgtaatgaggagcttattacaagtagtcacatgaaatgattccattgtaatagacattatttatatatttccaccttcatgtattttcatcttgtgtgagtcatgtgaccatatctgttcaatgaatagaaaatttgctggtgtgattcattctcggtttcttttgctgtgccctggtgtcaatgtttacraaagcaattgctctgtcaatctgagtatgttagagagatgcagagcaga

SEQ ID NO: 291835 - DNA, 583 bp, Homo sapiens
aacctgcatacacaggcacagatacctcattaaatcattatctttggaaaaaaatcagcctaattcttatatcaaagaaaagatgaaaaacacatctgcatgattaaataatttgaataatgcaggaaagttaagggttttctataaggttaataatacatatcatctgaatttatgatcatacttatgtagatgtttaacatataaaataaacaggattagaaagtaacttattttgtttcatttaaaatgttttaatgggaaacccttagattgttggaagaagacaaaarttaaataagaaaattctgacaattatgttaatttgtgccacatggaagataaaaattcctcactcttcactattctccatgttaaaaaggcaaaacaaaatctgtaactcttttatcaaacaatcacttctttagggcttttttaagttatgtggaatagaaatgtaatttcagttaaaattagtccttgtcctttcagctggagatcagaaagggggaaaaaacctctatgtcaaaggcaagtaactagccctaaagaaaaattctggttgacctggcttgtgtcatgt

SEQ ID NO: 291836 - DNA, 562 bp, Homo sapiens
agaccatagcaacttgaaataggaaatatattaccaacagtttttattattattaaagcaaggacaaagtatgtttaaatcaactcttatgtgctctcaaaaggaaaacaaatcacaataaatagcattttaggtataacctctgaaaagccattayttaaaaaaagttattaggtaaaataaagatgtaagggagggtgattttaaaaacacaattctagtataacaaatgcttctaagaaaaaatatcaaaactgtggcaacaaatatatttaggtttgcagtcagaataattgcagaagcaaagttaaaacactctttcaataattgacattagtaaggaattacaccatatgggtatttttaaaataaggcatctgaattttgtgtatatatttttaaatgtgtgtgcatatgtgcacacaagtatataattttacatctatatatatgcacacgcatatgcaaaaacacgtaatagacaaactcttaaaagaagtggatgaaatggagtaaccaatacttcaatagatcatgaaatttatacatttatgtccaattc

SEQ ID NO: 291837 - DNA, 625 bp, Homo sapiens
  misc_feature (1)...(625): n = A,T,C or G
ctgttggtggaaatgttggtacagtcattatggaaaatagtatggaggttccttaaaaaaactaaaagaaatactactattatatgatacagcaattgcactactgggtatatatctgaaagaaaggaaatccatatrtcaaagagatatctacactttcacatttattgcagcaatcttcacaatagccaaaatatagactcaacttaagtgctcatcgatgaacaaataaagaaaatgtggtatacatgcacaatggtacattattcagccataaaaagtaatacaattctgatatttgcagcaacatgatggcctggagatcactacattaagtgaaataagctaagcacagaaatacagatantttcttggttctcactcatatatggaagctaaaaaaataagtggatctcatgaagataaagagtagattggtggctggcagaggctgagaagtgtggaagaaggaggattgaagagaagttgattaatgcctacaatatacagtttgatagaagcagtaaaacctatgtttgatagaccagcagggagaatcagtctattatatatttcaaaatagctggaagagaataattaaaatatcctagcataaagaatataa

SEQ ID NO: 291838 - DNA, 625 bp, Homo sapiens
  misc_feature (1)...(625): n = A,T,C or G
ctgttggtggaaatgttggtacagtcattatggaaaatagtatggaggttccttaaaaaaactaaaagaaatactactattatatgatacagcaattgcactactgggtatatatctgaaagaaaggaaatccatatgtcaaagagatatctacactttcacatttattgcagcaatcttcacaatagccaaaatatagactcaacttaagtgctcatcgatgaacaaataaagaaaatgtggyatacatgcacaatggtacattattcagccataaaaagtaatacaattctgatatttgcagcaacatgatggcctggagatcactacattaagtgaaataagctaagcacagaaatacagatantttcttggttctcactcatatatggaagctaaaaaaataagtggatctcatgaagataaagagtagattggtggctggcagaggctgagaagtgtggaagaaggaggattgaagagaagttgattaatgcctacaatatacagtttgatagaagcagtaaaacctatgtttgatagaccagcagggagaatcagtctattatatatttcaaaatagctggaagagaataattaaaatatcctagcataaagaatataa

SEQ ID NO: 291839 - DNA, 564 bp, Homo sapiens
tttccagggccacccatggccacccatggcccaatcagcatgcccttcctcccctctgaacccccataaaaacccggactcagccagactcaggcagatgatgggacgacctgcctgcggagaggagctacccactgtgggtcttctctcttctgagagctacacactcgtcmggacaacttgcctgcggagaggagctacccgctgccgatctctctgagctgtcctgcagctcaataaagcatctcttcaccttgatcaccgtccagctgtctgtgtacctcattctttctggatgcagaacaagaattcaggatccccttaattggggggctgaaagagctgtagcacaaacaaggctgaaatatggcccttacttgcctccttgcaggagatgagaggaagagaaaagagaaagggagaagagctgtggcccttcagaagcccagacctaggagttccctgatccaggactgtgacaccctctttggggctctgtggttcctggcatctctaagcttccaggcaccactgcattccctggtgccagctgtggaagctgct

SEQ ID NO: 291840 - DNA, 564 bp, Homo sapiens
tttccagggccacccatggccacccatggcccaatcagcatgcccttcctcccctctgaacccccataaaaacccggactcagccagactcaggcagatgatgggacgacctgcctgcggagaggagctacccactgtgggtcttctctcttctgagagctacacactcgtccggacaacttgcctgcggagaggagctacccgctgccgatctctctgagctgtcctgcagctcaataaagcatctcttcaccttgatcaccstccagctgtctgtgtacctcattctttctggatgcagaacaagaattcaggatccccttaattggggggctgaaagagctgtagcacaaacaaggctgaaatatggcccttacttgcctccttgcaggagatgagaggaagagaaaagagaaagggagaagagctgtggcccttcagaagcccagacctaggagttccctgatccaggactgtgacaccctctttggggctctgtggttcctggcatctctaagcttccaggcaccactgcattccctggtgccagctgtggaagctgct

SEQ ID NO: 291841 - DNA, 564 bp, Homo sapiens
tttccagggccacccatggccacccatggcccaatcagcatgcccttcctcccctctgaacccccataaaaacccggactcagccagactcaggcagatgatgggacgacctgcctgcggagaggagctacccactgtgggtcttctctcttctgagagctacacactcgtccggacaacttgcctgcggagaggagctacccgctgccgatctctctgagctgtcctgcagctcaataaagcatctcttcaccttgatcaccgtccarctgtctgtgtacctcattctttctggatgcagaacaagaattcaggatccccttaattggggggctgaaagagctgtagcacaaacaaggctgaaatatggcccttacttgcctccttgcaggagatgagaggaagagaaaagagaaagggagaagagctgtggcccttcagaagcccagacctaggagttccctgatccaggactgtgacaccctctttggggctctgtggttcctggcatctctaagcttccaggcaccactgcattccctggtgccagctgtggaagctgct

SEQ ID NO: 291842 - DNA, 609 bp, Homo sapiens
tgattttgttttattttctgtgattaaacctgtttactcattttctaaaattttgcagcaggtataaaggcagattaagcaaacctaattgtactgaataaatttagaaggatgtaatcttgttattaattgtcattcatttgctttatttgcatatcatgatggccttatctattttccaattagtatcccctgtttttagtttatcaagtgattccaacagaaaaatctcagtgtattttattatgggtttggtaaaagtgcccgatctagcagataattacactttccaagacacttttataggcttttatttcatagcccatgaagctcaatatttcgtgaattttatagtccatgaaataaagagctggtgtagcaataagttaaaccatttaggtttcaaaaatgaatgttaattctgagatgcattatgctataggccaattgtctaatgagtttgagagtaattttatttttatatatttgkagcagacactttatcacataaacacattttattttttactcaagaaaaagtccaagatgaaagaagtcaggcaaaatgaggaatagatttctatctctgatttcaatcatatcaggtgc

SEQ ID NO: 291843 - DNA, 469 bp, Homo sapiens
actccatttaaaaagaaaagaaaaaagaaaaagtccaactctgcctcacttactctctggtgtctgcatggcttattattctaggttatgggacaagaacccagcactcgctggcggtgagagtaaaagagctgtaacactccctcctgcttgctgaacaacaggagtgaaaaagctgcaacactaagaatgaattccacattgtgaaaaggttgaaaaaaaaaagagtaaaataaaatgttatgacatatccaattacataaaattcaagtttcagagtctatataggttttattgaaacccagccaccccrctttgattgcatttgtttatgcctgtttcagtgttataatggaagaattgagtagttgtgaaagagaatacatggcctgaaaatctaaaatatttctcttctagccctttgcagaagatggctgttagtccctagttctgatgatgggcctaagag

SEQ ID NO: 291844 - DNA, 605 bp, Homo sapiens
ttttgcccattttttatatgtatgtatgtatttttatttatttttgtagagatgctcaggctggtcttgaactcctggcctcaagcaatcctcttgcttggcctcccaaagcactgagattataggtgcttcccattgtgtccagccctcttgcccatttgaaaaactgagttttytgtttgtttatgtttttgtttgttgtttttttacaattgcactttgaaagctctttgtgtctttgtgtattctggacatcagtctaagacttgaaaatattttgtttgcctgtggcttgcacaggaatgaacacctggctttattgtgcattgctttactgcacttcacagatactgtgttttttcacaaattgagggtttgtggtgaccctggtcaagcaagtatgtcggcgccattttccccgcagtgtgtgctcacttcaattgtctgtgtaagcagcttttagcaataaagcacttttaattcagacacatagtttttagacataatgctgttgcacacatcatgtaaacgtaacttttataagcactgggaaaccagaaattcatgtgacttgttttactgacatgtttactttattgtggctt

SEQ ID NO: 291845 - DNA, 605 bp, Homo sapiens
ttttgcccattttttatatgtatgtatgtatttttatttatttttgtagagatgctcaggctggtcttgaactcctggcctcaagcaatcctcttgcttggcctcccaaagcactgagattataggtgcttcccattgtgtccagccctcttgcccatttgaaaaactgagttttttgtttgtttatgtttttgtttgttgtttttttacaattgcactttgaaagctctttgtgtctttgtgtattctggacatcagtctaagacttgaaaatattttgtttgcctgtggcttgcacaggaatgaacacctggctttattgtgcattgctttactgcacttcacagatactgtgttttttcacaaattgagggtttgtggtgaccctggtcaagcaagtatgtcggcgccattttccccgcagtgtgtgctcacttcaattgtctgtgtaagcagcttttagcaataaagcacttttaattcagacacatagtttttagacataatgctgttgcacacrtcatgtaaacgtaacttttataagcactgggaaaccagaaattcatgtgacttgttttactgacatgtttactttattgtggctt

SEQ ID NO: 291846 - DNA, 387 bp, Homo sapiens
tccatatgcacgcagccccatggacrgggcaggaggcagggcagtcaggggcagtggcaggtgtcctggcaggagggaggacgcatccctggtgagaaccatcaggagagagtctggcattgcatgaccaggctggagaaggggaagcccgcgggaccaggccacagaggggcatcttgtggcctaccagatggcggagacttccctcagggagtattccctgcacactcactgacaacacccacgaaggcatgcagattcttccagaagcagctgaaagccacacatggaagactgcagtgcagtggagaagcagttctctgggtttctcaggggcaggcaaagaggtgtgtgagccccctgggctgtggacagcaggacacctaa

SEQ ID NO: 291847 - DNA, 588 bp, Homo sapiens
cattaaaaacatctaattcataatcacagcaatactgaagagctgcatttctttttcccccaattttctcataaatcatgccataaagagcctctggtttgccaactactccaaaaaatctctctattcacaatcatattcttcaaaattctgtggaaattttatctcttgcaaaaaaggtcattttcattcatcttatttaatttacaaattacttaccttaaataaggtttattctaatgggacaagcggtgtgaacagggcttgaagacgtaagattctctttgttggagaaaaacagacattttttaaggatcaatattaatacgttttctgctcacgcaagtacataaactttggagtatttttccagtttaaggacaatcacatttaaattcattayttttgtcctatgtttaaaaactgatgtgatcgaatatatcaaatgataaaatctgtgattttgaaaattctgttttcttgaatccactttaaagttcaatttttaattaatagatgagttgatgaatgaaagagaaattttagaatgagagcgtatgatgtggggttctcccagaaaatatatag

SEQ ID NO: 291848 - DNA, 561 bp, Homo sapiens
actactgtagtctggccaagaaaagtaggttggaataagctataatcttctgcagctgatctcgaggcattaattaatagttagtgtttccttttctattacccattctagatttgaatactgatggtaaagaaaatctagattggatgagtgaagaaaaaaatagtgaatatcatattttcagaaatagttgcagaagtaaatactgattcattccactcgttttatggtccggtttttccccccttttcttttctttctttttccttctttcttttttttctgccccaagaaattgcacttgaccccaaactggaaaagttagtgagatggatttaacataaatcatgagacatttgaacaatgcaagaagtgaattctagyagacactttgattcatcgtttgcacctttttgaatcacctctgacttcatgcacaaatgtggaggagaggttgttgcatgctgaaagttatattctaagcactcatggaatggatctcaggctttctgcttcaagactttacattgaagtccaagattctgctcagtttgagcaggc

SEQ ID NO: 291849 - DNA, 510 bp, Homo sapiens
tcattttagtgctcttatgtagacgtacattttcagcaagaaattaccaatatgttaaaaataaagtttcagacagcatatgaagaaatgcgtaagataattttgctgyactacacagtacagttttgagataacagaaagtttgttgtgagatgcaaattacttttccttgatctctctgggtctattatgtgaacatttgacatgtatgacctactgtaactcctgataatacagtagtgcattgaaactgagacttaccaaagggagaaggaaaattcctaagtatatttattaatctaataattcatatacttatactatacattcttagtttctctctgtttctatgctaggctctggaaatttaaaaataaattaggtgcagctcttgtcctttaaaattgtgaagtaaaaaaacagcgggagaaagagataaggagtcaagatcattagagagaatgataaatgttctcattgatataagcacagggtagtatgttgagagga

SEQ ID NO: 291850 - DNA, 510 bp, Homo sapiens
tcattttagtgctcttatgtagacgtacattttcagcaagaaattaccaatatgttaaaaataaagtttcagacagcatatgaagaaatgcgtaagataattttgctgcactacacagtacagttttgagataacagaaagtttgttgtgagatgcaaattacttttccttgatctctctgggtctattatgtgaacatttgacatgtatgacctactgtaactcctgataatacagtagtgcattgaaactgagacttaccaaagggagaaggaaaattcctaagtatatttattaatctaataattcatatacttatactatacattcttagtttctctctgtttctatgctaggytctggaaatttaaaaataaattaggtgcagctcttgtcctttaaaattgtgaagtaaaaaaacagcgggagaaagagataaggagtcaagatcattagagagaatgataaatgttctcattgatataagcacagggtagtatgttgagagga

SEQ ID NO: 291851 - DNA, 367 bp, Homo sapiens
ttagggtttatgcattgtgttgtacattctaagggttttgacaaatgtagaatgacccatgtcyaccattatagtatcacatggaagaattttactactctaaaaatcccttgtgcttcatcttttcatccctcttttctcaagaatccctggaaagtactgggcattttaattttggcttagttttcctcttaccagaatgtaatatagttggaattatacagcatgtggccttttcaggatggtttatttcacttagcattatgctgttaacctttcatccatgactttccacagttgatagctgtcttagttgtctggctgctataacaaaataccctaaaatgagtaacttatgaacaataga

SEQ ID NO: 291852 - DNA, 592 bp, Homo sapiens
tggatacattatagtctaaactgttatacatttgtccaaacccatagactatattaactttaaaagcaataaattattaaaatgcccatactctccaaagtgatctacakaattaatagtttctatcaaataccattgatggtcttattagcaatagaataaaacaattttaaagtttaaataactttaaaagcaaaattataaacattgaatggttaaagtttcaataaatcacaaatctaggcatgttattatcagtaaaaggaatatgttagataaaagtttctcacatacatgtgagaaacaagaagcattaaaaaagtgtataggaaccataaagttgaaaaataaagcaaaaagaaaaagtattcatgtcggacacagtggctcacgcctgtaatcccagcactttgggaggccgaggcgggcagatcacctgaggtcgggagttcgaaaccagcctgggcaacatggcgaaacctcttctctactaaaaacacaaaaaattagctgggtgtggtggcactcacctgtaatcccagctactcaggaggttgaggcaggagaatcacaaggcggaggttgcagtgag

SEQ ID NO: 291853 - DNA, 287 bp, Homo sapiens
aagcttagtttttctagatacaaaatccttggctgataattattttgttttaggaagctgaagataggatcctcatgccttctagtttgtagggtttctgctaagaagtctgctgttaayctgatcagttttcctttattggttacctggtgtttttcctcacagctcttaatattattttcttcatcttgactttagataacctgatgactatgtgcctaagtggtgatctttttgcaatgaatttcccaggtgttctttgagctccttgtatttggatgtctaga

SEQ ID NO: 291854 - DNA, 511 bp, Homo sapiens
acattggctttctaattcttccctcccttggagaagsaggtactgggcaaaatgcaattgctggatccagagtatgtctgttaccattaaatgttgatgaatctgtaggcctgtgtgctaagctcagaagtacatctaagaaagaagccaaaggtacatccctagcacaatagcttcatggttcagtgcaagtactgctatccatggaaacgcgggctagccctgcatcttatgtaaatggggtcattttctttctagtaaaataaaaccattccttttgtggtttcacttcatgtacatccttagaacttggacatgtcctaacatattaccatctactctaatttaaactttactctagatgaaaacatgtttatgaaataaatattttaaggtaggaaaaaacctcactatggataggatatgttatactaccaagtgctgcttttcaggtgcaataagtgttggtttttaaaaattatattggcttagaattctcgatacagattaa

SEQ ID NO: 291855 - DNA, 594 bp, Homo sapiens
aatatttggagttttaaaatcagatatgcaaaatctactcattataattgtctagataaataaataatattagaattaagatcaaaataacccatttattctactactatcattagaaragttatatacctttcatttaattgattatcttatctctgtcttgccaaacaactagttgatttttttccacataacccattttttttaaggtaacatggataaatggtcagatgttgtgtttaggggaaagagtgaatgtcaagaaagttaagcaaatgaggggtaaagtctgagactggacttaagtaattggctcggtggaggacaatgctccatttccaggactgccttataattgctcatttacacattctaggaagtaaaacaactgaattcacttcacagtattaccaattaaactgtttaagaaaaagacctgctgataatgtattaatgataaatgttcctttaatgcacgtaaatgcatgctgggaatctgtaattgcaacatttaatttcttttagatagttatgtcaccttactcctatcgagaatatttctagtctttgtccaaatttgctccacaagaattt

SEQ ID NO: 291856 - DNA, 635 bp, Homo sapiens
atgtattaatgataaatgttcctttaatgcacgtaaatgcatgctgggaatctgtaattgcaacatttaatttcttttagatagttatgtcaccttactcctatcgagaatatttctagtctttgtccaaatttgctccacaagaattttctcttttcagcaataagtaatattgtaatagacatataaatatttaacagttttgtttttaagaatatttgcaacaccataatttaatgatacaacatttttaaagctctttcagaacagcgatgcaggaattgccacaatataataacaaaaagaaaattaatctcaacaattttttcaaataagcaaacytcaattttgatatcacacataaaaatgtttttaccttgaatatcaactttcatacagtcattgaaccaatatttattaagcatttctatgccaggcattgtccaagcatgtgtggtacagcacagaaacacacatatacataggcagatatgcatatatacacacaaacacatcccctgccttgtgaaggcttcattttaacaggacttgacactcaatcccatatgaaattttaagatcagagtgggctgacaatgtaatgtttcctagttttacaatcagctaataagaag

SEQ ID NO: 291857 - DNA, 553 bp, Homo sapiens
agaaagtaaaggaatggaagaattgctactccataggcagagcagccccaagggctgctggttgcccatttttatggttatttcttgattatatgctagacaaggtgtgaattattcatgagtttcctgggaaaggcatggacaattccaggagctgaagtttcscctctttttagaccatatagtgtaacatctggacattgccatggcatttgtaaactgttatgatgctagcaggagtgtcttctatgctagtgcattataattagcatataatgagcagtgaggactaccagagttcactctcctcaccatcttggttttggtgggttttggctggcttcttcacaaccacctgttttatcagcaagatctttattatctgtatcttgtgccaacctcctatttcatcctgtgacttagaatgcctaacttactgagaaggcagccaagcaggtttcagccttgttttacccagcccctgttcaagatggagttgctcttgttcaaatgcctctgacactgtgttgcccagggtggtctcaaactcctg

SEQ ID NO: 291858 - DNA, 526 bp, Homo sapiens
ccttttctctttgatgtgggtcatgagagtataggagcaatcaaacaaaacaaaagtgggaacagcgggaatgtaatgagacactgtttctttgagacagcgtcctgctctgccgcctaggctagagtgcggtggtgcgatcacagctcactgcagccttgaactcctgggctcaaacaatcctcctgccttagccgcccaagtagctgagaccaaggtgcgtactgccacacccagttaattttttaaagcttttgtggagatggggtctcactatgttgcccaggctggtctcaagcgatcctcctgcctcagcatcccaaagtgttgagattataggcaggagcctctgcactcagccaactagctactttttaaagctggctcttgtaacttctcaccctgaaccactgatgcaggcagtcagcttgcagtcatgattagggcctggtctgctttccaaatctacrtcagtgagagagagggggctgtgctcagagagctgcaggcatcagtgttcaccacc

SEQ ID NO: 291859 - DNA, 487 bp, Homo sapiens
aaatgaaatcccaaataaataagtgaaaacccaggacttatataccactttaacaaagggtgataaagtgtggagaagtgacaaaacaaaggaaagcagtttgagtttctagggacattcaattacagaaaggtaaatatatgggggaaactaatggaagataagtgttattttagtaaggtttgcttatgcagacacatctcatgccagctttctgtctcctgtgatgagagttgtttaccgcctcctggcatgggagagcagagggaggatgccttcacaaagggaaatttatgycatgctttaggcagaaagagagatgtcagagaattcctcgtataattgccttgagcccaaaataatacttatgccgaagtggcatattttgggctgacatagtctgatccccctttggctactataaacatttgtgtgcaggtttttgtgtgaaaataagttttctactcattttagcaaatacctggaa

SEQ ID NO: 291860 - DNA, 487 bp, Homo sapiens
aaatgaaatcccaaataaataagtgaaaacccaggacttatataccactttaacaaagggtgataaagtgtggagaagtgacaaaacaaaggaaagcagtttgagtttctagggacattcaattacagaaaggtaaatatatgggggaaactaatggaagataagtgttattttagtaaggtttgcttatgcagacacatctcatgccagctttctgtctcctgtgatgagagttgtttaccgcctcctggcatgggagagcagagggaggatgccttcacaaagggaaatttatgtcatgctttaggcagaaagagagatgtcagagaattcctcgtataattgccttgagcccaaaataatacttatgccraagtggcatattttgggctgacatagtctgatccccctttggctactataaacatttgtgtgcaggtttttgtgtgaaaataagttttctactcattttagcaaatacctggaa

SEQ ID NO: 291861 - DNA, 485 bp, Homo sapiens
tttacacttccacttgttacagtacacagtgaacagagaaacctttagaacgaacttaaaatatgtaaagaggcagctttaggctaaacttgatttaacaacacaatatattaaaayctgttggatccagctaaggagttttagggacatcagtggtttaagagcttatagaataagatgcttgtatttggaaagcagaaggaaattaatgatttaagtttgcaccttaagaaactattaatagagaaagaagagaaaagcccaaaataagcacaaaaaacaattaaaataaaaatagaaatcaatgaaagagaacacaaaaaagcagtaaagaaaaaccaatgaaacaaaataaaaaccccagttctttggggaaaaaagtcaataaaattaataaactctagctactcagctaaagaaggcaaaacaaataagttgccaatatcaggaatgagagaggaaatatcactacagattctatagtc

SEQ ID NO: 291862 - DNA, 613 bp, Homo sapiens
gacttgtttccaaataatccatcccatgatgagaagatgcttaccttctgatcctaaggaagagggccaaaaagtttttccatccayttgtctctttagaaataagacaaaaaaattaaaaagaaagtatattaatttccaatagatctagtttcttatgcccgtggtctgctcatataggttcatagacaagtcattctaaaatatcatgccatctcctcacctcccttttgtgtaaacaaatttcctttcagaagataaacatctgagaatctgtttctgcctcagaagcacacaggtggaaacagcccctaaagctctctaagggtatttgcccactttaaataaggcagttattctctgagtatctagacctaaaattaggaatgatgtatgtatttttcttgtcattattttcctgattctgtggaggtctattgaaagtattttctaacacatttaatattgcaagctacctgaagaatgggcccagtccagccccgttccagtgctcaggcctcaggaaagggaagcaaggtatgcagctttgactgggattatttgagaaagaaactctcaatactgagacacactttcaatactgagcgtccat

SEQ ID NO: 291863 - DNA, 1209 bp, Homo sapiens
atatttttggtcagtgactaaatgagtcagagcagaacaaccaaatgtagtatatgttgcctcaaaaatccaaagacacctgttaaacattgtgcctctttctcagtggtaggggcacaaaggcgcacagtgtttgcctctggacagaataatccaatatgatgaaaacaacctgactctagaaacttcgctgacatggtaggcacctaaatgttcatggattttctcctccagctactgccacgcatgtgccttaaaggtttmtagggtatctgttactccctgctatgcagatcttaacagtaaaatgtcacagatgtagtgtactaatgtgatgctctgtgaggtgttaggacagttaaggtccttgtgggcctaattttgacacagagccaaagagctgacataagccttagacaagattgttctttggaatagtgggaaaatgggctaatttaatgactacatgttagatgccaagagaggtgtcagtttgtttcaataaaaaaggccacagctgaaacagcagcttaactgaagtaaccattggttgagttttaataatccattgccattcatgaaaatccagtcaaatttgtatgttaaatctgaatatgaaaggaatcacttctccaaacaaacatawcacattaatacaaatatttattgtttcaaaataataataacaattttattgacaataaaaaaaacttcaggtttttgggtctttttgtccttatgatattctactggcaacgaacagacaaaatatgtattttgtttctctttttcatatttttagaaatcacatttttatatttttagaaatcacattttaaaatctttatttcatcttattttttaattatgtgagatatttacatgtttacaaattaaaattataaaataaggtaactttagggaggtctggattccatttctgctctcttcttattttccttatccctctatggcatacaatttttatttttttgattcattatttcattgtttcwttttaaatataagaagtactgtatttatccctttatgagacaaaaagtagcgtagtataggctgtttaaactttgttggctttgttgcttatttttactaaatatactggacatatctccacagtgatacatagaggtcttcctaatttctttttcataattacatcacttttcattctaatggatgtccatg

SEQ ID NO: 291864 - DNA, 588 bp, Homo sapiens
tcttctttttcagataactatataaacaatacataacaggtgctagttacacattttactaccataattcacaaaaagaaaatgccacagcttataaattgtgtgtgaatttcgaatttcattttgtccttaaaatgatttcctttccctaaaacttgaaagccagtacattcagttgcctatataaattaactcaacagtttggggtatgcctggagagcacgcctaacttcagtaccacgcttgccagattcaagggttcaagacacagcctggtctgtttctggttttatctagctgtgtactgstgggaaaacatttcacagtggtatcttgttcagtattactcctcctacggtgtctctgtgccctctcaatttatttcactgacaaaaagcatgtttttaatctgtctgcatcactgaactgactgagaaaacacagagcacaaaatagattctattccttgtgaattattaaagcaagttgtcagcaactgtaaatcctgctaacggatgacagcctcagaaacacagaatacactctgtacaccctattggaacacaagaaagagaatcacttcttgaa

SEQ ID NO: 291865 - DNA, 588 bp, Homo sapiens
tcttctttttcagataactatataaacaatacataacaggtgctagttacacattttactaccataattcacaaaaagaaaatgccacagcttataaattgtgtgtgaatttcgaatttcattttgtccttaaaatgatttcctttccctaaaacttgaaagccagtacattcagttgcctatataaattaactcaacagtttggggtatgcctggagagcacgcctaacttcagtaccacgcttgccagattcaagggttcaagacacagcctggtctgtttctggttttatctagctgtgtactgctgggaaaacatttcacagtggtatcttgttcagtattactcctcctacggtgtctctgtgccctctcaatttatttcactgacaaaaagcatgtttttaatctgtctgcatcactgaactgactgagaaaacasagagcacaaaatagattctattccttgtgaattattaaagcaagttgtcagcaactgtaaatcctgctaacggatgacagcctcagaaacacagaatacactctgtacaccctattggaacacaagaaagagaatcacttcttgaa

SEQ ID NO: 291866 - DNA, 568 bp, Homo sapiens
tgcctatataaattaactcaacagtttggggtatgcctggagagcacgcctaacttcagtaccacgcttgccagattcaagggttcaagacacagcctggtctgtttctggttttatctagctgtgtactgctgggaaaacatttcacagtggtatcttgttcagtattactcctcctacggtgtctctgtgccctctcaatttatttcactgacaaaaagcatgtttttaatctgtctgcatcactgaactgactgagaaaacacagagcacaaaatagattctattccttgtgaattattaaagcaagttgtcagcaactgtaaatcctgctaacggatgacagcctcagaaacasagaatacactctgtacaccctattggaacacaagaaagagaatcacttcttgaatggaaaattgaagaaattcctatttaaatttagaatatgaatttcaaggccatcctgaccatcaacccaaatccaaattaaccaataagtccttttaagccatgggtggataaagagtcataccattttgttattgtggtggtgcttgtctttcct

SEQ ID NO: 291867 - DNA, 544 bp, Homo sapiens
cccgtgcaagggtctttttggtagaacaatttattttcctttgagtatatacccagtaatgggactgctgggttgaatggtagttctatttttggttttttgagaaaccttcaaattgctttccacagtggctgaactaatttacatgcccaccaacaatgtataagcattgtcttttctctgcagcctcaccagcatctgttgttttcgactttttaacaatagccattctgactagtatgagatggyatctcattgtgggtttgatttgcatttctctgatgattagtaatgctgaccattttttcatatgtttgttggccacttgtatatcttctttccagaagcatctgttcatgtcctttgcccactttttaatggggttgattttttcttgttgatttgtttaagttccttaaagattctgaatattagacctttgtcagctgcatagtttgcaaatattttctcccattctgtagattgtttactctgttgatagttcttttgctgtgcagaaggtctttagtttaattaaggccaa

SEQ ID NO: 291868 - DNA, 589 bp, Homo sapiens
tgtgtgtgtgtgtgtgtgtgtatctgtctataaaataggctcaaatatgatgtaaaacatcctgtaacagaagcataaaccaagcccttattttattttggaaacacaaaataaggagcaattaatcccaactggggaaggatgttgcttaaaggaagacttggcatttgatgtggctgcaaagcaagtataagttctcatggatattctcattcattaggctcgaaacattcctattttattctcygttgtaatctccaccagctagcagacacctgacacataatgcgtgctctgatgtatgttgaataaattaatgagtaagataatcagtctcatcaaaatctcccaatatcctatcttcagtctttcctacctctaatcttcactgtcagtaccattgcttgagttaccttctttgagtaaaaattgagcatgtaatgcctcttctaaaaagtcagaagaaaaaaagcctttccatgggcacagaatccttgccatgagtaaacagtaaacactttaaaatctgtccccaacctgcttatccaacctcattttatcccattctacctaacagataaaatctgca

SEQ ID NO: 291869 - DNA, 519 bp, Homo sapiens
ggccactgtgcctggctccctcgcctgatttttgtaaacaaagttttattggaacacggacatattcattcatctctatgttgtcagtatctcttgttgctctacctctacaatggcgaagctgagtagctgagatatactgtatgtcccacaaagtctaaactacttactgtcattttaaaataaaaatttgggcaactccaactgcagataatcatttggaaatctagttgaaaatcaagctagtttctttgtgagaatttcttatgattctagaattcagaatgtttatgcaaagatttrttttcaaaaataacatgaaagttataaggatgtgaggatagggaatgtacagatatcaagtacatagtagagagaaaggaaatacttacatacctttttaaagattaaattgttttatttttatacttttaacataagcctgcctaattattcttcattaactaggaaaaggagtggctgctcttcataatagagtgttattggaaatgaacgttg

SEQ ID NO: 291870 - DNA, 538 bp, Homo sapiens
ttcaagcaaactaaatatggcctgagaaggactctgtactctatatttgagtccttgtggatgaactgtaacttagcctaatagtcagacaaaattgaaaacccagcttagtagtatgcacctgttacaatggctgagcgctggccaatcccagctgccatacttcaaccactcatagactgctgaatgttcaaactgcgttcaaagaaggcaaacgccgagctgtaactaatttcactgtttctgtacctcatttctgattcctgtacgccattttaccttttttgtctataartgtgttctgaccatgaggcacccctggagtttctgtgaatctgctgtgattctgggggctgcccgattcacgaatcgttcattgctcaattaaactcttttaaatttaattcagctgaagtttttcttttatcaggggaatgtaaactccccaattataataagttgaaaaactatggagttcccactgaaacataattaatcagatatgggtttacctgaaacccatagttatcttccatta

SEQ ID NO: 291871 - DNA, 640 bp, Homo sapiens
gagtctccagctcttgggattcacagaattgtttgtatttcacatatccatccatttttctttagtcttttgtagttcagtaaatgaaagcacttggctttagcagtagctctgtttttatgtttgcaaaggtctttttcattatttgtgaatttatctccaagccacaatctaggtaagatggaaacaattctcctcttctgttcatagartcagagatgttagtaaggagaaaactttagaggcaatctagtccaacatccttattttacaaactaagaaaacatttcttcttgggaaaagtaaggaaactgtatatgaagagttaacctttgttccaaagttaatcatgactttaggatttaaaaacaatttctttttctccacactatgaggtatgtctcaaacttaattagattaaacttttctaagaaccctagggttaagttacctaaagtatatgcatacagacacatgtcatttttcacttaattgctgaaacagtctcttaactgggcttttcacttaaaatctctgtaagatacccccagctccattctgccctagcctacccaacccaccaccagcccaatctccacacaaccataacagcaattactctaaatgcaaatctgatcat

SEQ ID NO: 291872 - DNA, 542 bp, Homo sapiens
ggtcttgggcagctccatccctgtggctttgcaggtacagcctctctcctggctgctttcacaggctggcattgagtatctgtggcttttccaggcacacagtgaaagctgtcagtggatccaccattctagggtctggaggatggtggccctcttctcacagttccactagcaaggccccagtagggacactgtgtgaggtctctaaccccacatttcccttccacactgccctagcagaggytgtccatgagggccccacccctgcagcaaactttttcctgggcatccaggcatttccatacatcttctgaaatctaggcagaggttcccaaacctcaattcttgacttctgtgtacccacaggctcaacaccatgtggaagctaccaaggcttggggcttccaccctctgaagccacagcccgagctgtacgttggcccctttcagccatggctggagcagctgggacacaggtcaccaaatccctaagctgcacacagcacagggaccctgggcctagcccatgaaaccactttttc

SEQ ID NO: 291873 - DNA, 547 bp, Homo sapiens
attattttctcctcccccaatgaaactgtcaaatcagacccaagtcctagtgcaacacatggttgaacaaatgacttagcatataaattccatgaagatagatatttttgtctattttatttgctgccgatccccagtatccagaacaatgcttggcacatactaggctctcaataagtaattgttgaattaatgagtgaagaaattaatgaacgaacaaaaaaatccaggcatagtcttggacatgaagagggagcaaggaggttccctacacagtcctctctgagcagctctttcccaagcacatggaaaaygaaccagcaaatctaaggttgtatgtttgtggaagtgccttaaatcttacaccgatgaaccctctccaaaagtgcaaatatgcacattcccaacactgctataaagataggaagtgagataagaagaggcagcctgtgttgccacatgtggattccagatgttagttggactagcttggcccataagtgatagatgaggtcagtttgacccttttccatagcctgcagagatt

SEQ ID NO: 291874 - DNA, 696 bp, Homo sapiens
attttgtatgctactttggtatttcttaagtatagtcagcaggaaagggtaacctgttttatgcaaaatttttttaatttgtcaaatgtttttagtgtgtctactttctgaaatagtctcaatatcctgtctgtatcctaggcagataactacacaagaacaaaacgctatatagaaaagaaaatatttgaggaaatcttaaattccataagaaagtaattcttgcaagaatgttggctacatatttttttttctgtcctgaataaattacatcattaggtctgttgaagcttttgaagctaccactattctttctgggataaaggctaattactgatttatctgccctcaaaatcccagagttaattctaattgagtactaaattaacagtaagtagttaacacagagaactaaaatttaaccgcattatatcactgtatatatttctcatgatttttgctaattagagcatttacttaaccagtaataaactacacacacacacacacacacacacacgtatacgtgtgtgtgtgtatatacttggctctgacacaactctggtgcttaattaggatatgttctattatgtattttgaatgtttatcctgctagtgygatgaacttttgttggaaaagcagaattagaaggaacagtttttcaatcagtttcatttggtaattacaggaaaacc

SEQ ID NO: 291875 - DNA, 588 bp, Homo sapiens
cccttcataagtagagtcttagtccctgagggtggatcacgtgggctcccacacatctcctcctgctgcgagctgttcgtgctctgtcagcccctctgccagaggaaggtgtatcatacagtggtctgtggcacaagaggaagaaggactcacacccrtcttaacctcagcagtgctctgtgtgccctggtgccctaatgtctacagctgtctcagtgttctttaaaatgtaaaaaagctctttcacttgttacttacagtccctctactgtccatgagattcaactaccagtgcatggggaccaggccagggctcaacgccacatgacaaaccccattctgtatccagaatcctcctcctgtccactgactgagaggtgcctttgttccctggtagatctcattgagcctggatctttctctcctcctaatgagctctccaaggagactcctttggtggggtcaccttatcaattttctacaaatattctatgctttaaatctcacttagactcgggggcagagtccctatcagctgcttttcgcttttcatctgtcccatatccaaactccatagcccagggcacc

SEQ ID NO: 291876 - DNA, 588 bp, Homo sapiens
cccttcataagtagagtcttagtccctgagggtggatcacgtgggctcccacacatctcctcctgctgcgagctgttcgtgctctgtcagcccctctgccagaggaaggtgtatcatacagtggtctgtggcacaagaggaagaaggactcacacccatcttaacctcagcagtgctctgtgtgccctggtgccctaatgtctacagctgtctcagtgttctttaaaatgtaaaaaagctctttcacttkttacttacagtccctctactgtccatgagattcaactaccagtgcatggggaccaggccagggctcaacgccacatgacaaaccccattctgtatccagaatcctcctcctgtccactgactgagaggtgcctttgttccctggtagatctcattgagcctggatctttctctcctcctaatgagctctccaaggagactcctttggtggggtcaccttatcaattttctacaaatattctatgctttaaatctcacttagactcgggggcagagtccctatcagctgcttttcgcttttcatctgtcccatatccaaactccatagcccagggcacc

SEQ ID NO: 291877 - DNA, 524 bp, Homo sapiens
atctttctctcctcctaatgagctctccaaggagactcctttggtggggtcaccttatcaattttctacaaatattctatgctttaaatctcacttagactcgggggcagagtccctatcrgctgcttttcgcttttcatctgtcccatatccaaactccatagcccagggcacctatttccttttggagaattgctcttgcccccaaatgttatcttggcagagggtaatagttgcctctgactagggaagctgcccctccaggaagtgagcgtgtgaccttgtttggccagtcggtgctcccctctgggactgtgaatcacaagtaagcaacacaaagatgttagagatgggtagaaatgctgcctactcctgctgtgggtcctgagggctggctctcacattgcccctaatgcctgcgggttccaagcctgaagctgattctctgagctcctgacatacttacaatcacttaccttttatgtaaaatagtcagggtgcacttctgttgcaaactattcaga

SEQ ID NO: 291878 - DNA, 686 bp, Homo sapiens
agctaccagataaggagaataacttggccatttatagcaaactgcctgactttggagtgagaaaccaagcaccttctaggtcctaggataggtgaattggaggtgcagctgctgaagttcccattttctacatacttcaggagccagggtgtttcatttggttttgtaaaactttgctgtaagtcatcacagttaattctttgaatggacattttagartgtaactttttttcaaaattagcagaacagatatctctgctcattctctttatacatttagttttttaaagttcccctagtatacctgttaggcactctaaataggacacagttaaagctaaaagaaggaccagttgctccctagagcctacagttcagaactatcttgttgtcatgtcctggtttggtttggtttgtttttaactcaacaagttggaaaccatgagtttaaagcaaactatttccttttcttaagcttaaagagaattttttttttaatctttagctcctcatttaggtagtgaaggcttccctgaaagacagcagtgcccttctctggaagaagaggctgggaccaaaagcctgagtctatgggttgaggattttgagcattcctttgacaagcttctatgtatttttaatataagactcataaatgaacctgatgtggtgttcatgacccatcc

SEQ ID NO: 291879 - DNA, 518 bp, Homo sapiens
ttgtgatcacgtaagtcaatactgcttaataaactccccttcatatatacatctatcctattagttctgtccctttagagaaccctgactaatacagagaccctcattgtgtrccacaggcataaattccattctgttgttaatattccctttctggaaacagtttatttaccacatactgctcatggtaactaacacaagcacacctattccagataagcttttgtagatttaggggcgatcccagcctagaatggggcagggcaagacaaagtagtcctgtaatacctgtccaaagtgtctggccctaagatggtgggaaaatcatgccactattgaatacatatgctgtcacctacccatctccacctgtagcagacatcactcatctgtcataatattttttctggtcgagcacaaatttagcctcagcatctttctcatcttaggaccacagcaacagcatgcaatgaaatttgacatgtaaaagaaatcttattttccatttctgaaatata

SEQ ID NO: 291880 - DNA, 601 bp, Homo sapiens
ccaaaggaaatctataaatatgaatagcaggtrcagtaacaatctcattgattggaaattaataaggaacaaggaaaacttaatactggtaaaatgtgtggataatatccatttattcatttatcttaaaaaaattataaattcctattttgtgccaagcattgttctaagtgctagagattgagtggtgaagagacagttcctgcccttgcatagttcacattccagtggtggatatataaactcaataaaccaatgtactcttattgtcaacaattcttattttattaataaaacaaacagagaaacaggatagagcttgactggtggaggcaggagacagatgtgaacatggcatggactatctaagacagcaggaaagtcctctctgtggagatcccatctgaaccaaagcctgaatgatgagaagtaaccaggcctgtggtgggtgtcagtagaacattccaggcacaggaacagcaagaccaaaggctttgaggtggagactagaatgaaggcaaatgtggctaaagcagaaggaaagagcaaaaaagataatggaaaattattcatttaaataattcatttaagcaccaaatgc

SEQ ID NO: 291881 - DNA, 1126 bp, Homo sapiens
ccaaaggaaatctataaatatgaatagcaggtgcagtaacaatctcattgattggaaattaataaggaacaaggaaaacttaatactggtaaaatgtgtggataatatccatttattcatttatcttaaaaaaattataaattcctattytgtgccaagcattgttctaagtgctagagattgagtggtgaagagacagttcctgcccttgcatagttcacattccagtggtggatatataaactcaataaaccaatgtactcttattgtcaacaattcttattttattaataaaacaaacagagaaacaggatagagcttgactggtggaggcaggagacagatgtgaacatggcatggactatctaagacagcaggaaagtcctctctgtggagatcccatctgaaccaaagcctgaatgatgagaagtaaccaggcctgtggtgggtgtcagtagaacattccaggcacaggaacagcaagaccaaaggctttgaggtggagactagaatgaaggcaaatgtggctaaagcagaaggaaagagcaaaaaagataatggaaaattattcatttaaataattcatttaagcaccaaatgcwtcatttaaataattcatttaagcaccaaatgcatattttttctcttttggtcgactgtattgaagtgcaattcatgtaaaataaactgtacctaatttaaaagtaaggttcaatgaattctgacacatgtgttcactttaacttactctaagaccttatacattttctctggctttaaaaattttatagttttagattttacatttgggtctatgatctattctgagttaattgtgtttagtttaagataaaggttaatattcatwttttccccataagaatctagttgtctcagcatcagttgttgaaaatcctttctctattcgattatcttggtgtctttgtcaaaagtcagttgactctgtacatgtgtctctgtttctgttgcgtactattgatctgtaagtctatcctttcactaatgccatatcttcttgattatgtagctttacagtaagttttgaaatccaggagtgtaaaatcagttttatacttttttaaatatataaaatgatttggctatt

SEQ ID NO: 291882 - DNA, 583 bp, Homo sapiens
tgggtcttctctcatcagcattttatagtgtttggcttatatgtctcatacgtattttgttaaatgtattcctaaatattttgtatttttatgctttcataaatgacttttcctacaagtttatttttcaaatttttattggtcatatacagcaatacacttgattttgtatattgacctagcattttgcaatcttgctaaatttacttattacttatgtggtttggtttgtttgaaatgaattacaaagtgtattggttgaaacatatcggtttatatgtttgtaattgaggtctaaggcaaaaaggaggctgtgatgttcaggatgagggcacctgagcacatctggaggcaccaggcagactaagcaggggctgggagcagatgaagtcaataagctatctgggaaagtcctcattctgaaaagccagcagatgggcsaagtttagttcaagaatatgcatttttgaaatgcagataccaataagaggcaagatccttatctgcagtcaaggttctttttaatttttacttaaataatttttatatttgcataagaatgccaggtcatagtaaaaggttc

SEQ ID NO: 291883 - DNA, 583 bp, Homo sapiens
tgggtcttctctcatcagcattttatagtgtttggcttatatgtctcatacgtattttgttaaatgtattcctaaatattttgtatttttatgctttcataaatgacttttcctacaagtttatttttcaaatttttattggtcatatacagcaatacacttgattttgtatattgacctagcattttgcaatcttgctaaatttacttattacttatgtggtttggtttgtttgaaatgaattacaaagtgtattggttgaaacatatcggtttatatgtttgtaattgaggtctaaggcaaaaaggaggctgtgatgttcaggatgagggcacctgagcacatctggaggcaccaggcagactaagcaggggctgggagcagatgaagtcaataagctatctgggaaagtcctcattctgaaaagccagcagatgggccaagtttagttcaagaatatgcatttttgaaatgcagataccaataagaggcaagatccttatctgcagtcaaggttctttttaatttktacttaaataatttttatatttgcataagaatgccaggtcatagtaaaaggttc

SEQ ID NO: 291884 - DNA, 575 bp, Homo sapiens
agaaaatcttcaggcacctgccaggcaagataaattacctagaaggaagaaaatcaagttggtttcagacttgctgcaacatcattcactgccaaaaaataataaagcactgaaatcaggcttactcactataaaaatatggctctgtgtacatcttactccagacaagtataggcaatagaaacaataaagcagaagactgaagctgtaaatttgtgtcatggcaatataacaaagaaaggaatgtgagaaaaatttaatgagctcattttctgaaactgcaggtagtatgaaattaataatgaaatatgatcagtagtttaggggatacaatacagatattatcaatcagcaattacttttgtgtccagaattttactgcaaccctccacacccytatagctatgtctcactttatggagagaagttcaatgctcagtgaggttaacttgctctgaatcacacaggtaggcccacaatttgaactccgttctacctaactcaaggccgattcttacttaacaaaaccatgtaatcttatgtctagatggtgaaattatacatggtttcaattt

SEQ ID NO: 291885 - DNA, 554 bp, Homo sapiens
tgcctgggacaagctagggtttatatgcgggcttatcatactaaacattgtaatggtaggtaaacaaggtggcttgggatactctcagagaataacaaggtagctctcttttaagtaagctcagtaatgtcagtaactagcaaaatgtgcttttaaagaccaacaacttgtcatcggaggaccatggtcaggccaagcatgtagctttttgtgcctaaaattgctatagatgaaagaaagtaaatgttttcctgagaacctagaggaaatacagagttaaatgaattggtgattggcatttgtgacttagtgaaagatgatacactattgtacattcttttaaaattgctgtatatgctttgaaatcagcttattgtttytcttaggccacttcaatagacttcatagacatccattccctggccccacattgctggaaaggctgcctctgaatgggaaaaaaaaaaaaaaaaaaaaaaaaaaaagacctggccttggctttcaaaccattaaatgaaggctaatgtcaaaaaagaggtttcacccaagctggg

SEQ ID NO: 291886 - DNA, 568 bp, Homo sapiens
ctaaccaaaatatctcaatgttatttagaagttggtgtgactttttaaaaaatttacctcttgcagagatatttatattttaatttttttccatttttagaaatacattcctattactactggtactgggcattattgggggtagaaaatatccaatgtcaygtaataatagttccccagtcttgtctatcaccagagtcacatgggagctcctattcctgagcccatccctggagattctgagtcaggatatctgcaggtatctgcaggaactggaaatttgtaactttaaaaagcttccaaagtggggctaatgagcaatggatgtaggaactggggtgaaaagatcaggtcctattcattaggagtttataagctgctcgggaagatcaaatcatgagaaatgctaactcacaagcttgaattatgttatgaaatgccttacatatttaacctgcttagctatgtgtgaagcatttcataaagggaaatttcacatagcccatccctcctacaaggtaggtaaagcaattgtttttattcacttttttcttaagggggtattgag

SEQ ID NO: 291887 - DNA, 568 bp, Homo sapiens
ctaaccaaaatatctcaatgttatttagaagttggtgtgactttttaaaaaatttacctcttgcagagatatttatattttaatttttttccatttttagaaatacattcctattactactggtactgggcattattgggggtagaaaatatccaatgtcatgtaataatagttccccagtcttgtctatcaccagagtcacatgggagctcctattcctgagcccatccctggagattctgagtcaggatatctgcaggtatctgcaggaactggaaatttgtaactttaaaaagcttccaaagtgkggctaatgagcaatggatgtaggaactggggtgaaaagatcaggtcctattcattaggagtttataagctgctcgggaagatcaaatcatgagaaatgctaactcacaagcttgaattatgttatgaaatgccttacatatttaacctgcttagctatgtgtgaagcatttcataaagggaaatttcacatagcccatccctcctacaaggtaggtaaagcaattgtttttattcacttttttcttaagggggtattgag

SEQ ID NO: 291888 - DNA, 546 bp, Homo sapiens
gattcatgagaaaactccaaattaagttttattttgtactccctgctgaagactgaagagtgattaccttcrtaatacatggcatcaaatgtgagttaggtcttgatttatttaacaattcaccactaaaaaagaagactggatactttcaccaaattttacttcaacaaatgaagacaaaggacactaattaggatttgcttcacaaattgttactgtttattttcttttaagaagctaaggtggtactttggcatcaggaaaattatacaaaaagaaaaggagaggcattgaactatatctctgagacaaagatgatggattctaagtatcttacctcacaaaaagaagggactgcctagttagtggtgataacaggatcagtcagaatccatgtcttccacagtctactcaatgcactttccattctgccatgcttttagagctgggaaagaggttggttgtgggttatctggaaatttgggaaaaggtcatcttgattttaaaagggctcataaattctgaatgagactaagtggactagaa

SEQ ID NO: 291889 - DNA, 565 bp, Homo sapiens
tacatttgttttgtgctgaactctacattcctgagactttgatccactgtttttgtatctgccttaagtttaatgtctattaggccttccctcatggagtctgagactttacttttgtgctgtgacatgtcagaacgtttccttctgcatggaataggtctaggatatcaagttatgctaactttggatctgcagattttaaagtccgtgagaaagcagggtgactctttaagccctcccactatgggcagtgctattttgagaaaaattaaaaagagctttggagtttgtgtgtgtgtgtgtgtgtgtgttttgttttgttttygttttttgttattttacacccagctaatttttgtggttttttgttttgttttgttttgtttcagtagaaacagggtttcgtcgtgttggcgaggctggtcttgagctcctgacctcaggtgatccacccaccttggcctcccaaagtgctgagattacaagcatgagacactgtgccaggccaagagctttggagttttctaaggaatccagtgaataccaagttccatgcttatgaaag

SEQ ID NO: 291890 - DNA, 541 bp, Homo sapiens
caatttgcctaggttattatatttgaagtgagtttcttgtacacattatatagatgggtcatatttttaaatccccttgaccaatctttatcttttagttggtatatttaggacacttacttacacttaatataactgattagagtttaactatggcaatttttgtttcttttctgtttcctcatttccgttttctctttcctgccttcctgaaggttacttgaacatgttttttcagaattatataatgtttttaagtgtatctcattgyatagaatttctagtggctgctctagatattacatcatatttacataacttattactgtataccaatgtcttcattttaccaatttgagtaaagtataaaaccttactttcctttatgccctttaatccttcccaatttgtgatacaattgttttaaatatttcctctatatgcttttagcaccacatcagaaagtattataatttttgcataaacaaccaaaaataatttataaagctcaagagaagatggaaagcctattatatttacc

SEQ ID NO: 291891 - DNA, 516 bp, Homo sapiens
caacagtaaaacatgggcctgttttaatcaatattaaattatatcttacattctgtttagcatctgaatatgtcatcattaattttttccacttagattcctaatacctacatggtaactttttctgataaaagtttacatatatatatatatatatatatatatatatatatatatatatatatrtatgtaaggcttggggtaaagagaaggtgaaggattcagaaatttttcatgacttaaatggaaaaagaatgaatcaatttaatgtttgctgaagaggttaagacctgcctattttagactttgttttcttaaataatttgggcacaaaaaaaaaaaagaaattctgttcttaaccccaatttctcttcttttctcaaaaacaaacaaaacaaattccctaaatactggactagaagggcaagagtccctgaagcaaattcaaactgttggcttttctgggccataaattccagaagaatggattttcccaggggctcttgagcttgtgat

SEQ ID NO: 291892 - DNA, 516 bp, Homo sapiens
caacagtaaaacatgggcctgttttaatcaatattaaattatatcttacattctgtttagcatctgaatatgtcatcattaattttttccacttagattcctaatacctacatggtaactttttctgataaaagtttacatatatatatatatatatatatatatatatatatatatatatatatatatgtaaggcttggggtaaagagaaggtgaaggattcagaaatttytcatgacttaaatggaaaaagaatgaatcaatttaatgtttgctgaagaggttaagacctgcctattttagactttgttttcttaaataatttgggcacaaaaaaaaaaaagaaattctgttcttaaccccaatttctcttcttttctcaaaaacaaacaaaacaaattccctaaatactggactagaagggcaagagtccctgaagcaaattcaaactgttggcttttctgggccataaattccagaagaatggattttcccaggggctcttgagcttgtgat

SEQ ID NO: 291893 - DNA, 516 bp, Homo sapiens
caacagtaaaacatgggcctgttttaatcaatattaaattatatcttacattctgtttagcatctgaatatgtcatcattaattttttccacttagattcctaatacctacatggtaactttttctgataaaagtttacatatatatatatatatatatatatatatatatatatatatatatatatatgtaaggcttggggtaaagagaaggtgaaggattcagaaatttttcatgacttaaatggaaaaagaatgaatcaatttaatgtttgctgaagaggytaagacctgcctattttagactttgttttcttaaataatttgggcacaaaaaaaaaaaagaaattctgttcttaaccccaatttctcttcttttctcaaaaacaaacaaaacaaattccctaaatactggactagaagggcaagagtccctgaagcaaattcaaactgttggcttttctgggccataaattccagaagaatggattttcccaggggctcttgagcttgtgat

SEQ ID NO: 291894 - DNA, 636 bp, Homo sapiens
ctctctaaatggatgtgagacagggtggctggcatctgggtcaggataatgccctggtgcatggcaagracatgcattgggcagcagctgcccttgctaaggagagaggttcactgacctggcttttcccccttcacctgctctccagaaagccagactctagggcagatgcacctgagaccccaggaacaggctggtggggagcgcagctcagagctttactcaggggatatggcctttgtcatcctactttgaaacaattgactatttgagcctagattgatagagggcttcaagttgattttaatccaggctcctatagtcagcgagtgaaacagagattttagttgaaataatgagacctggtattactagtcagctctccatgctggagaaccataagaaattataccaaaggcaggaaaggggatagaatatggggatcatcacgccaagaataaggtgcagcccatttagcccttgggtcttaaagagacccacagctctggataatggcagatctaggcgtgacaaagttatcatctttgtgcatcttcagagaattgtttttccttttactcctaggaacaatgtcttaagtttgttagtaaattctattgaatttattaaagatgc

SEQ ID NO: 291895 - DNA, 599 bp, Homo sapiens
tggatgttttccctgaagaaatgaagactcacagttacctaatttcaattagttagttacagaacaaaatcaagctcaaggaacaatggaagaagtttrgaagtgtcctcacaaagaattagcttggttaggtttgctccaaaagtctgcataaagactcagtggaagtttctggtaggcaaatttgggaatctaaaattaggaagaaaacccagaattttcaactatagaaagagagctgcttctcaaaacaaaatccaccccagactgagattttccagctgaagctgggaacttcacttcatgtaatctgtaaagaatcctgtgattagagggagtaaatctgattaggagcaaagggttaagaaggtgttgaagttggacacacctgagtttgtacaccagctccataattacttggctagaaatttgaggaaggcatttatcttatctgaatccaagtcttggcaatttttttttctttttgaaatggagtctcactatgttgtccaggcttgagtgcaatggcacaatctaggctcactgcaacctctgccttctggattcaagtgattgtccctgcctcagcccccctagta

SEQ ID NO: 291896 - DNA, 599 bp, Homo sapiens
tggatgttttccctgaagaaatgaagactcacagttacctaatttcaattagttagttacagaacaaaatcaagctcaaggaacaatggaagaagtttagaagtgtcctcacaaagaattagcttggttaggtttgctccaaaagkctgcataaagactcagtggaagtttctggtaggcaaatttgggaatctaaaattaggaagaaaacccagaattttcaactatagaaagagagctgcttctcaaaacaaaatccaccccagactgagattttccagctgaagctgggaacttcacttcatgtaatctgtaaagaatcctgtgattagagggagtaaatctgattaggagcaaagggttaagaaggtgttgaagttggacacacctgagtttgtacaccagctccataattacttggctagaaatttgaggaaggcatttatcttatctgaatccaagtcttggcaatttttttttctttttgaaatggagtctcactatgttgtccaggcttgagtgcaatggcacaatctaggctcactgcaacctctgccttctggattcaagtgattgtccctgcctcagcccccctagta

SEQ ID NO: 291897 - DNA, 599 bp, Homo sapiens
tggatgttttccctgaagaaatgaagactcacagttacctaatttcaattagttagttacagaacaaaatcaagctcaaggaacaatggaagaagtttagaagtgtcctcacaaagaattagcttggttaggtttgctccaaaagtctgcataaagactcagtggaagtttctggtaggcaaatttgggaatctaaaattaggaagaaaacccagaattttcaactatagaaagagagctgcttctcaaaacaaaatccaccccagactgagattttccagctgaagcygggaacttcacttcatgtaatctgtaaagaatcctgtgattagagggagtaaatctgattaggagcaaagggttaagaaggtgttgaagttggacacacctgagtttgtacaccagctccataattacttggctagaaatttgaggaaggcatttatcttatctgaatccaagtcttggcaatttttttttctttttgaaatggagtctcactatgttgtccaggcttgagtgcaatggcacaatctaggctcactgcaacctctgccttctggattcaagtgattgtccctgcctcagcccccctagta

SEQ ID NO: 291898 - DNA, 401 bp, Homo sapiens
gacagagaattaggaagagagcaatggaaaaatgttctctggaaactaatacagaaaatagtaaattgtgctaattcaaggtaagaaaagtagcaaatttggattatatgagacttcagctaaacatgagtcagggagtaaataacaaataatgaaaagaratgcactgggtgtcctggaaatcttatatgggaaggttagggaatacttcaagatctcgtttcgatagaggaggagggattttccagacataccaggggttcagcatttagggctcaggccctggtgtgcgtgtgagaggacatgttgtactgctggagcagcaagcaggtttgatacatcaggagttccaggtgtgcataaaggagtagaaaggcatgaggagggaggagaaagaatgt

SEQ ID NO: 291899 - DNA, 587 bp, Homo sapiens
cgtcaccaggtggggaaggggctgtgtatttggtgacaagcgggaggcgatgggggtggaggggaatggggacgggaaataggttctgtgtgctctccgggggtattgtgtcaggagatgcaggctggctaccatgtgacgcggtccaaagctgaagggattggccgaggcagcgcaggcggtgcagctcggccagcttgccgttcctctccctttctctcagcatcttcttggtagcctgcctgtaggtgaagaagcaccagcagcatccatggcctgtcttttggcttaacacttatctcctttggctttgacagcggacggaatagacctcagcagcggcgtggtgaggacttagctgggacctggaatcgtatcctcctgtgttttttcagactccttggaaattaaggaatgcaattctgccaccatgatggaaggtaggatgctttctgctatggttgactggcttcaggcaaggtttgggcagarcagcattaaagaatatgtgcagccagtgtatgtggcggttctagaacctggttgccaatgttttgcaagcagaaatgctgcagtttgcttgcagt

SEQ ID NO: 291900 - DNA, 587 bp, Homo sapiens
cgtcaccaggtggggaaggggctgtgtatttggtgacaagcgggaggcgatgggggtggaggggaatggggacgggaaataggttctgtgtgctctccgggggtattgtgtcaggagatgcaggctggctaccatgtgacgcggtccaaagctgaagggattggccgaggcagcgcaggcggtgcagctcggccagcttgccgttcctctccctttctctcagcatcttcttggtagcctgcctgtaggtgaagaagcaccagcagcatccatggcctgtcttttggcttaacacttatctcctttggctttgacagcggacggaatagacctcagcagcggcgtggtgaggacttagctgggacctggaatcgtatcctcctgtgttttttcagactccttggaaattaaggaatgcaattctgccaccatgatggaaggtaggatgctttctgctatggttgactggcttcaggcaaggtttgggcagaacagcattaaagaatatgtgcagccagtgtatgtggcggttctagaacctggttgccaakgttttgcaagcagaaatgctgcagtttgcttgcagt

SEQ ID NO: 291901 - DNA, 636 bp, Homo sapiens
ctctctaaatggatgtgagacagggtggctggcatctgggtcaggataatgccctggtgcatggcaagaacatgcattgggcagcagctgcccttgctaaggagagaggttcactgacctggcttttcccccttcacctgctctccagaaagccagactctagggcagatgcacctgagaccccaggaacaggctggtggggagcgcagctcagagctttactcaggggatatggcctttgtcatcctactttgaaacaattgactatttgagcctagattgatagagggcttcaagttgattttaatccaggctcctatagtcagcgagtgaaacagagattttagttgaaataatgagacctggtattactagtcagctctccatgctggagaaccataagaaattataccaaaggcaggaaaggggatagaatatggggatcatcacgccaagaataaggtgcagcccatttagcccytgggtcttaaagagacccacagctctggataatggcagatctaggcgtgacaaagttatcatctttgtgcatcttcagagaattgtttttccttttactcctaggaacaatgtcttaagtttgttagtaaattctattgaatttattaaagatgc

SEQ ID NO: 291902 - DNA, 523 bp, Homo sapiens
gtgtaattaaggagcttgaaacagggagatggtcttagattaatcaactgggacttaaatgcaaactcaagtatcgtaaaaaaaacaagaggtagagagacatttagcatagactgaagtggagaaggcartgtgaacacagagacagagattgcagtgatgtgtccacatcccgggagagagaagccaccagaagctggaagagctaaatcagactgctccctagagcttcagaaggagccagaactgatgactccaagatcttagcccagtgaaactgatctggacttctgaactatgagagagtccattcctgttgtttgaagctaccacttttttgagaacttgttacagtagcccgaggacactaacacaaatggggctccgggaaaatccagactaaaggtgttgtgttggtttgcaatctccttgcttaactttctgatactagacataaatagattggtgaaaaattttgtgattgaagaaatgtacatgaaacctacagtgtacagagaagcat

SEQ ID NO: 291903 - DNA, 1047 bp, Homo sapiens
gtgtaattaaggagcttgaaacagggagatggtcttagattaatcaactgggacttaaatgcaaactcaagtatcgtaaaaaaaacaagaggtagagagacatttagcatagactgaagtggagaaggcaatgtgaacacagagacagagattgcagtgatgtgtccacatcccgggagagagaagccaccagaagctggaagagctaaatcagactgctccctagagcttcagaaggagccagaactgatgactccaagatcttagcccagtgaaactgatctggacttctgaactatgagagaktccattcctgttgtttgaagctaccacttttttgagaacttgttacagtagcccgaggacactaacacaaatggggctccgggaaaatccagactaaaggtgttgtgttggtttgcaatctccttgcttaactttctgatactagacataaatagattggtgaaaaattttgtgattgaagaaatgtacatgaaacctacagtgtacagagaagcatwgtgtaattaaggagcttgaaacagggagatggtcttagattaatcaactgggacttaaatgcaaactcaagtatcgtaaaaaaaacaagaggtagagagacatttagcatagactgaagtggagaaggcaatgtgaacacagagacagagattgcagtgatgtgtccacatcccgggagagagaagccaccagaagctggaagagctaaatcagactgctccctagagcttcagaaggagccagaactgatgactccaagatcttagcccagtgaaactgatctggacttctgaactatgagagagtccattcctgttgtttgaagctaccacwtttttgagaacttgttacagtagcccgaggacactaacacaaatggggctccgggaaaatccagactaaaggtgttgtgttggtttgcaatctccttgcttaactttctgatactagacataaatagattggtgaaaaattttgtgattgaagaaatgtacatgaaacctacagtgtacagagaagcat

SEQ ID NO: 291904 - DNA, 482 bp, Homo sapiens
gttgtttgaagctaccacttttttgagaacttkttacagtagcccgaggacactaacacaaatggggctccgggaaaatccagactaaaggtgttgtgttggtttgcaatctccttgcttaactttctgatactagacataaatagattggtgaaaaattttgtgattgaagaaatgtacatgaaacctacagtgtacagagaagcatctgttagttataagataaatattgataattttagttgaaaatgacatatgactgttaatatctcacataacatcctgagttactcaagaatgcataaaaggggcactagatactcttctcatgtatgtgtgtgtgtctgtctatacatgtatgtacacttcatggtgcatcagctggcggaaccctcaggacaccccttcacatcctcagtgccccatttcacacatgaggaaactgttcatgacagcacatggctgatttgcataaaagtcac

SEQ ID NO: 291905 - DNA, 523 bp, Homo sapiens
gtgtaattaaggagcttgaaacagggagatggtcttagattaatcaactgggacttaaatgcaaactcaagtatcgtaaaaaaaacaagaggtagagagacatttagcatagactgaagtggagaaggcaatgtgaacacagagacagagattgcagtgatgtgtccacatcccgggagagagaagccaccagaagctggaagagctaaatcagactgctccctagagcttcagaaggagccagaactgatgactccaagatcttagcccagtgaaactgatctggacttctgaactatgagagagtccattcctgttgtttgaagctaccacttttttgagaacttgttacagtagcccgaggacactaacacaaatggggctccgggaaaatccagactaaaggtgttgtgttggtttgcaatctccttgcttaactttctgatactagacrtaaatagattggtgaaaaattttgtgattgaagaaatgtacatgaaacctacagtgtacagagaagcat

SEQ ID NO: 291906 - DNA, 482 bp, Homo sapiens
gttgtttgaagctaccacttttttgagaacttgttacagtagcccgaggacactaacacaaatggggctccgggaaaatccagactaaaggtgttgtgttggtttgcaatctccttgcttaactttctgatactagacataaatagattggtgaaamattttgtgattgaagaaatgtacatgaaacctacagtgtacagagaagcatctgttagttataagataaatattgataattttagttgaaaatgacatatgactgttaatatctcacataacatcctgagttactcaagaatgcataaaaggggcactagatactcttctcatgtatgtgtgtgtgtctgtctatacatgtatgtacacttcatggtgcatcagctggcggaaccctcaggacaccccttcacatcctcagtgccccatttcacacatgaggaaactgttcatgacagcacatggctgatttgcataaaagtcac

SEQ ID NO: 291907 - DNA, 430 bp, Homo sapiens
ataaatttgcttatttctatgacaactcmaaatgactctaatagcaatgtcacattaaaaaaaaaaagaagaaaacctggagtatttacattgaacaaaataagacatacgagagatacaaaattatttttttgagcatttaaagggttatcttgtggaagtgggatgagaattatgttgtcctggaggaaaaaatcagaagcaatttatgcagaattttggctcattttgaggatgaactttttaatgaatagaactatggcagagattggccctattttccaaacctatttctcctcatctggggccgacattttgataacattttccagactcccttgcgttaggtgtgtgcttgtgattaagttctgaccaagggtgtgtgacgtgggctgttttcaggcctggcccatgaacaccttctttgcac

SEQ ID NO: 291908 - DNA, 292 bp, Homo sapiens
catctaatttgccccacaaatgttaaaacagcaaacccgcatccccttcctcttctcatgtgctgtgagggatgacctccaggctctcagataccaagattatacaagacctaacccagagaattactcaagacactttctacacaagaagaattgtggtgctagctctcctcatagaaaaatgttttctgtctcttgttgaaattgacagcaaacasaaaaacacagaactatttgggagaacagaggacagtgatacactagggaagtaaaacacaccccttccccttgc

SEQ ID NO: 291909 - DNA, 437 bp, Homo sapiens
  misc_feature (1)...(437): n = A,T,C or G
tctcacccagataattcaggatactctcctgaccccaaaattctcaaccatgtctgccaagttatttttgacatattcataagtaatgatcatagattccagacattaggacaatgatgtctttagtgggtgtattattcattccacaaacaactctcatcatccacacaatgatcttcccttaaggtagaataaaaatatcacaaggcagatttaygaggcaatcgacctagaaaaaacctgagactctaggactgtctgatgtgtggatgtcaaatcctgggagattctgagtctctgctctatgtggactctatgttgtgtagccatttgtggaaggcttctgtgattttgtgacctagagaaaatgaatctctactaaaatcaaatctaagatagatgggcaaagggaatttaaagannnnnnnnnnnnnnnn

SEQ ID NO: 291910 - DNA, 569 bp, Homo sapiens
taggcgtgacaaagttatcatctttgtgcatcttcagagaattgtttttccttttactcctaggaacaatgtcttaagtttgttagtaaattctattgaatttattaaagatgcttctgataaattctttttatattcatttcaaaaaagaagcaatttcacactgacagagacattgttattatagcactaaatacttttacactcaacaaattcctttgagactaactgaaatttctgacagccctacactctacaactttattgtaaattttatttacaagagaattgcttggcccagattgtgccactacactccagcctgggtgacaagagcgaaactccatctcaaaaaaacaaaacgaaacaaaagcaaacaaacaaaaaaacacctactgcctcactgaattaaaggcatgttcagcagtttctttgttatttcaaagagtggsatctgcttcagcaaggtcagtttttaatgtatttgttttgtttcttttttctgtgtctggtgttctattttattataattttttaaatttgagggatgaggttttcatagtaatgaa

SEQ ID NO: 291911 - DNA, 498 bp, Homo sapiens
gcttttatgcaagatgttagtagcagtagcagcacatttttattaatatccctgaatctttcacaaaaactgactgagcaactgggataacaaggtattaactatgacaaaacaatgtaacagggtgtcatcatggatcttttgtgagcttaaaccacagggacccagrggaatcaccaattttttttggaagaaagaaaggaaaggaaaaaaatgtttaatggccctgggaactggaaaacctagaaatacaagtgctaacatctatgttcctaaattcagagattcttactaggcaaaaagaactcaacagattaatctgagagcagctgaggctggcagaaggctttctgggcctcatctcatagctgagagtgaggatggcaaaaagcaggtgctgtgagtggtctgtttcctaatattttctaggaaactaggtgctaaacgagttttcttaaatttctaccttcaggtctgtaagttaatttaaagcattac

SEQ ID NO: 291912 - DNA, 557 bp, Homo sapiens
ttgctagtagaaacgcaaagtggtacagccactttggaagacaatctagcagtttcttataaaactaaacatactcttactgaatgatccagcaattgtgctccttggtatttagtaaaatgagttgaaaactctgtccacacaaaaacctgcacatggacgtttatagcagctttatttatatttgcccaaacttggaaacaaccatgatgtccttcagtaggtgaataaatgaataagccatcgtacatccagaccgtggaatattattcagtgctaaaaagaaatgagctatcaagccaggaaaagacatggaataagcttaaatgcatattactaagttaaggaagccaatctgaaaaggctacataggccagtcmcagtggctcatgcctgcaattttagcactttgggaggcaaaggtgggaggattttttgaatccaggagttcgagatcagcctgggcaatgtggtgaaaccctttctcaaaaaaaaaaaaaaaaaaaaaaaaaaaaaagaagaagaagaaagaaagaaggaaagaaaggaaggaagga

SEQ ID NO: 291913 - DNA, 557 bp, Homo sapiens
ttgctagtagaaacgcaaagtggtacagccactttggaagacaatctagcagtttcttataaaactaaacatactcttactgaatgatccagcaattgtgctccttggtatttagtaaaatgagttgaaaactctgtccacacaaaaacctgcacatggacgtttatagcagctttatttatatttgcccaaacttggaaacaaccatgatgtccttcagtaggtgaataaatgaataagccatcgtacatccagaccgtggaatattattcagtgctaaaaagaaatgagctatcaagccaggaaaagacatggaataagcttaaatgcatattactaagttaaggaagccaatctgaaaaggctacataggccagtcccagtggctcatgcctgcaatyttagcactttgggaggcaaaggtgggaggattttttgaatccaggagttcgagatcagcctgggcaatgtggtgaaaccctttctcaaaaaaaaaaaaaaaaaaaaaaaaaaaaaagaagaagaagaaagaaagaaggaaagaaaggaaggaagga

SEQ ID NO: 291914 - DNA, 498 bp, Homo sapiens
gcttttatgcaagatgttagtagcagtagcagcacatttttattaatatccctgaatctttcacaaaaactgactgagcaactgggataacaaggtattaactatgacaaaacaatgtaacagggtgtcatcatggatcttttgtgagcttaaaccacagggacccagaggaatcaccaattttttttggaagaaagaaaggaaaggaaaaaaatgtttaatggccctgggaactggaaaacctagaaatacaagtgctaacatctatgttcctaaattcagagattcttactaggcaaaaagaactcarcagattaatctgagagcagctgaggctggcagaaggctttctgggcctcatctcatagctgagagtgaggatggcaaaaagcaggtgctgtgagtggtctgtttcctaatattttctaggaaactaggtgctaaacgagttttcttaaatttctaccttcaggtctgtaagttaatttaaagcattac

SEQ ID NO: 291915 - DNA, 626 bp, Homo sapiens
aaggctaatgtagtttggacaaagaaagccaatgggaggatgacattgcatctggccaaagatttagggaagagccaaatacttcaggctttttaaagtgatctttagataaagaggaagtcattaaggcattccaaagtaggaacatcaaatcacatctgatgggaaaaatctggccatatgtgcgtctaggatgtaaggaagccaacacggatgtgaagttcaaattgtccattgcaaataataaaatgaaggccctgggtagccttggcaagggcagatttggtacaaaatccttattggaatgggcttaagcattaacgggaataaggatctagctgttgtgtttggtggaattttatcagtctttttgttgtgtatgatatatagatggtcaaaataaagaacttctacatttttggattttgttttattttaattgagagttgaattaaaaataagaaacttttattttcaaaattggagactgtgtttaaaaagtrtagagtagggctagaaaaaaacataaaactctcctggtgaggagaatgctaatcattactctaataataataaaatacttctctcataacttaaattttttactgcttcattatttgtgtatg

SEQ ID NO: 291916 - DNA, 568 bp, Homo sapiens
ccagaaaccttggtttatcctttttatgccccttaccccttaatacaactctaacataattaagtttgaatttctactcatttctgataatgatgacagtttttgtaaagacatcccaagagtaacatggtaagatgtttcaaacataaaataaatgaaaatcaggccatcaaaaataagagcccatataaatgaaagaaaagggataaattatttcagaattagttagagtattatacctgggcaataaatttggttacaagttttctagcactaaactgaaaagggagacacccaaattacatgtcagatgacaatgcattagcagaaacgtttttccccagacatggaactcaagtagaaatttacygggggaatcactgtagcacaaagcaaactggcagtggagtcagggggtcctggttttacatctactgtctgcccccttccagattgtatgacttcgggccaggcacttaagctctccagacctcagtttttcttcatttggaaaatgaggactgatcattataagccccacagggttattgtaagaagtgttactatt

SEQ ID NO: 291917 - DNA, 656 bp, Homo sapiens
aaatggcagatgacacagacatcctaactatctcaagaatcacatgaaatatatgtatttccacgcctgctttgcttgtgtacatttgtttatattggtcaggtcaaaccacagcttcctctgactcaatgtcactgaattttccctggttactggatacagtaacatattgcctaacttcatccggtcactctctgmttccaaggagatcttagttccagatgaggcataagtcatgacagcattttaccatgttagtgaattatagaagagtcaatggactgagcctgaggagacctgagttcaagtccaggtatgccactccttagccatgggacatagggaaggtcattctgaaatcaccattgatagagtgagtcagctgaactagtttagtcgtttccaaattgcttctttagagatctgtctcagagactattacagcagggtaaggggaagattaagatgttttcaactcctaacttcaatctaagccgctccaattttatcagtttttgtttattgaatgttgactttaatttggtttaagaaagggcttctgacctgttgaactatatgattgcttacagtctgggtttaacaatctctggacacacatctattcatggcaggactggctgccctagataggacct

SEQ ID NO: 291918 - DNA, 513 bp, Homo sapiens
cacgtcttcttttgagtaagaatagataaatatcaacaatttctaattccttaaatttctcatgtagaataaactacaattgttaacaatttctcagcaatttctttacttaaatgctatttttccattgcaccttataagaattcttcttggtarattgtagaccacaagcattccacttatctattatgcaaaacacagttgtatttattaaagccattcattatagatttattaccactggcctctatttgtctagacagttaaatactcctgcgttcttctccttcattttgcaagaactcattacatttattttatttgtttggcacatgatctcacttttggttttcgcttccaggttctgcccttttattacccaatctagctaaaagagaaggaagactgacaactttcatttaactgtcaggtccttttggagtccactagctgcagtaaaatgactctacattgtacttaacgaaccatgaagagagtgagacaaataaaaaa

SEQ ID NO: 291919 - DNA, 565 bp, Homo sapiens
aaaaagaacaaaactggagaaatcacgttacctgatttcaaattatactacagggaarcaaaccaaaacagcatggtactggcaaaaaaacagacacataaaccaatggaaccgaacagagaatccagaaacagatctacacacccacagtgaacccaattttgacaaaggtgccaagaacatacactgaggaaaagacagtcccttcaataaactgtgctgggaaaactggatatccatttgcagaggaatgaatctagatacctatttcttaccatatacaaaaataaaatcaaaatggctcaaagatttgattctagacttcaaagtatgaaactactacaagaaaacattgggagaaatctccaggacattggtctgggcaaaaatttctttagcaatatgcaataagcacaggcaaagcaaaaatagacaaagggataacatcaagttaaaaagcttctgcacagcaaagcatacaatcaacaatgtgaaaagacaactcacagaatgggagaaaatatttgcaaactatccatctgacaagggatttataaccagaata

SEQ ID NO: 291920 - DNA, 565 bp, Homo sapiens
aaaaagaacaaaactggagaaatcacgttacctgatttcaaattatactacagggaaacaaaccaaaacagcatggtactggcaaaaaaacagacacataaaccaatggaacmgaacagagaatccagaaacagatctacacacccacagtgaacccaattttgacaaaggtgccaagaacatacactgaggaaaagacagtcccttcaataaactgtgctgggaaaactggatatccatttgcagaggaatgaatctagatacctatttcttaccatatacaaaaataaaatcaaaatggctcaaagatttgattctagacttcaaagtatgaaactactacaagaaaacattgggagaaatctccaggacattggtctgggcaaaaatttctttagcaatatgcaataagcacaggcaaagcaaaaatagacaaagggataacatcaagttaaaaagcttctgcacagcaaagcatacaatcaacaatgtgaaaagacaactcacagaatgggagaaaatatttgcaaactatccatctgacaagggatttataaccagaata

SEQ ID NO: 291921 - DNA, 1169 bp, Homo sapiens
cccacagtgaacccaattttgacaaaggtrccaagaacatacactgaggaaaagacagtcccttcaataaactgtgctgggaaaactggatatccatttgcagaggaatgaatctagatacctatttcttaccatatacaaaaataaaatcaaaatggctcaaagatttgattctagacttcaaagtatgaaactactacaagaaaacattgggagaaatctccaggacattggtctgggcaaaaatttctttagcaatatgcaataagcacaggcaaagcaaaaatagacaaagggataacatcaagttaaaaagcttctgcacagcaaagcatacaatcaacaatgtgaaaagacaactcacagaatgggagaaaatatttgcaaactatccatctgacaagggatttataaccagaatacataaggagctcaaacaactcaataggaaaaaaaaaatctaataatctgatcaaaaaatgggcaaaagatttgattagacatgtctcaaaaaagacatacaaatggcaaaagagcatatgaaaaggtgctcaatatcgttgatcatcatcatcagaaaaatgcaaataaaaactacaattawaaaaagaacaaaactggagaaatcacgttacctgatttcaaattatactacagggaaacaaaccaaaacagcatggtactggcaaaaaaacagacacataaaccaatggaaccgaacagagaatccagaaacagatctacacacccacagtgaacccaattttgacaaaggtgccaagaacatacactgaggaaaagacagtcccttcaataaactgtgctgggaaaactggatatccatttgcagaggaatgaawctagatacctatttcttaccatatacaaaaataaaatcaaaatggctcaaagatttgattctagacttcaaagtatgaaactactacaagaaaacattgggagaaatctccaggacattggtctgggcaaaaatttctttagcaatatgcaataagcacaggcaaagcaaaaatagacaaagggataacatcaagttaaaaagcttctgcacagcaaagcatacaatcaacaatgtgaaaagacaactcacagaatgggagaaaatatttgcaaactatccatctgacaagggatttataaccagaata

SEQ ID NO: 291922 - DNA, 565 bp, Homo sapiens
aaaaagaacaaaactggagaaatcacgttacctgatttcaaattatactacagggaaacaaaccaaaacagcatggtactggcaaaaaaacagacacataaaccaatggaaccgaacagagaatccagaaacagatctacacacccacagtgaacccaattttgacaaaggtgccaagaacatacactgaggaaaagacagtcccttcaataaactgtgctgggaaaactggatatccatttgcagaggaatgaatctagatacctatttcttaccatatacaaaaataaaatcaaaatggctcaaagatttgattctagacttcaaagtatgaaactactacaagaaaacattgggagaaatctccaggacattggtctgggcaaaaatttctttagcaatatgcaayaagcacaggcaaagcaaaaatagacaaagggataacatcaagttaaaaagcttctgcacagcaaagcatacaatcaacaatgtgaaaagacaactcacagaatgggagaaaatatttgcaaactatccatctgacaagggatttataaccagaata

SEQ ID NO: 291923 - DNA, 503 bp, Homo sapiens
taaaattaaaaaaagcaatatgactaggggaaaagatatactgttatccacaggatggctcatcttgtttaccagatttttgatactttgcaccaaagtggactttctcctagtgggaatttaggtaggatataaatatcttcacactctatccattctaaaatgtatgtctgtattcctatttccaagaaatccttggagaatattcttctctttttttccaatataatcagaaacttagatagcagccaattcattagctgcccctaatcaatcactgtagatgcattaatcacttccmtaggaagtgaactatcaaaaggatttttctttaccactgttttcaagggtttttatggagcacagatgtatgcagtagcagtctacttccagccagtatcagtatatcttggaaatgtaacagtaaaccagcctcaaattttttgttactccattaactgatcatgggaaactcccccatgaggtcatatcagtagctgagg

SEQ ID NO: 291924 - DNA, 563 bp, Homo sapiens
aggacagggatcatcacatctgcatttttcattctctaattttggtacttaaatctgttattttctccaaggaatgcattattgacatcttagaaaatagaaaggaagacagagactatttcagagacttctacttgacctttcataacataaaatccccacactggttggggaaacccatgtggctttctgccagttattaccaccgtaaatgctaaaagtggaatcataaccataggattggtctgtagcacactgaaccacaataagactgacttgaatcacagttccattgatcacttgacttaagtgctcaaaccgaagtggttttccagatctcyggagattaatatgaatttgagagtcaatatcttataagtcctggaagtcctgattactaccctttgcccagtgtatagtcactctgggacatgaccacaggtccctctggggagggctagagagaagagttatgggatttacctgaggccaatataagtgggaatgtggttttttttttttttggtatctgaatttcatagatattgacagatatagagaca

SEQ ID NO: 291925 - DNA, 645 bp, Homo sapiens
tgatgctgctgactagaagtgagaacactaaaccacaaattagttgtttttctatctctccgtactcatttgtctaggggctgaatgtgacacgacagtgattttacttgccacatgatctaaagccatgttagactgcattaacgtttgcacattgtatttgaattggttatcataactttgtgaaacacttttaggagagcattaataaaatgaaggattccttgaaacaactaccacattgaactcaagacacggtgtttgaagaaaatttgggaaagtaaatatatttagcctaagtagaattaggatggatttgagcattgttatgaaattcttgaagaactgttatgtggaatacatgcacctcatatttcatgctctgatgaacaaagaataatctttggaattcagtaaggtaagaatccagtaggctatgagtcaataaaggacaggtatattttaaaattccttttctatctaatcatagtggtttttgtaagacttcaatataataggccttcaaaaatatkctaattgaattaataagggggtagatattgaatttaacataaaaaaaccttgcaataattttaatggctgattgagacagcccttaccagagaattgttcctgtcaaagcac

SEQ ID NO: 291926 - DNA, 582 bp, Homo sapiens
acaggattttatggttttcagtgtaggggaaaatgaccatttaatacatagccatatcttcccaaacaaaagaaaaataaggtcaccatccaagtactggaactcagagtactttcttaataaaaaatgtataaaaaactacatgtgcttcccatttctcatccacattttccaaagactaattgtgcaaatcaagtaaaataataatgtccaaaatgtttgtggataatttattctattcttmtaatcttaaaaagttttgactaactttgtcgcttctttccgcaaacaaataaataaatgccaggttctagggaagattaacaaaaacaaaaaacaacaaataagtgcatagcaatataaagaaatgagaaaatgagccaggaaaaacccaaatttcaaatttacattatacaaccaatttataaaacaggaaatttatatatatgcataaaactaaaaatcttttattcaactctttaaaaaaatatctggaacccttcctacatgtctcttttggttaggcagataatggctcccaaaccctgtggagcctgtgaataatttaccctacatgacaac

SEQ ID NO: 291927 - DNA, 466 bp, Homo sapiens
tctgacaggaaatctgaaggcatattaatttgtatttattatgtatctcttgtagcttgacctattcagttatttttgccacctcaagtgttagtggacatttaaaaacacctaaaatcatggatctgagacacaaaaaaataacaaatgagttttataatcctaaaccttcttttcatccrgtttttcaggtttcactgataaactgtgtttatacagcccattaggtttgtccctgagcacttcaaaaaaggtattaaattagtaaatactgttatttagtaatgtaggcactatcattgtggatcagaaattcaagctgttaaaatgtaaaatatctggagtttttgtataaattgacctgtgcattccagatctccatgctccaaatcttcatacagtttatgtaactaatcaataggatgacttggtttttttttaatgactcttcatgtacaattgtaga

SEQ ID NO: 291928 - DNA, 1182 bp, Homo sapiens
tataagtttctcatttttcctgtgcctctatacctagaatataacatcctcaaagatagaaactatacaattttttttcatgatttttagtttattctaatttckaattctgtcaggtggcagataatgttagtaatagcattccttaattaacctggcaattgcataatacacccttgggtgatgccttctatagtgaacacaatggcagctgtatgtatatctgcagctacttcctttcaccatgccttcaagccctttgatttctcatttacctgaatattggagtgtcacatacttcaagcaatgaaccagcagataaatctacactgcagagtgaggggcccaaccactaactgaatcacaattatggggaatggggaataattagcaacagaactctgggcagtaaagcaaacggtttgcattaaagctgtctcttggcaggtgaacaggtcttagcctctggtttagggttatgaatagtaaaggtgggtaagggatgggaagaactcttcaattgaagtgagttgcttattaagaaccgtactgattgctaatcccagttttgtaagctagttctgatggcaatwtgcacttcccaatttcactaaattaaacaaacaagaatgtgaccttctgcagcagtgtcaaaaccgtaggtgttgaagagcaacactcttaagttcattgtcacattcaattaatttctgaattataccaaattgattgaaaaataatagaaatttaataaataattttacccttgttaacaaaaatatattctgaagtacacttactaaatacatattgttttacatatcagcagtttataattgagttcatcagcagaaatttgatacatgccacaaawgtaaactttattaagaatggcgaatattacattaaaaagttttacatggaattaataaatacttggtaattctaaatcagggaatgcaccaaatttaaataattgtgtgattctgaataaatattaaatttgtatctatcaaaacagtgccttttattgcagtaatttaagtaattggaattgcctcgagagtattttaatcaacctctggtatacattattgccatgtcggaaagatgtgtttaaagtagctacaaacaaagtttatactcatggtctggctgcctagcactagtgtagtcaaataa

SEQ ID NO: 291929 - DNA, 589 bp, Homo sapiens
tgcacttcccaatttcactaaattaaacaaacaagaatgtgaccttctgcagcagtgtcaaaaccgtaggtgttgaagagcaacactcttaagttcattgtcacattcaattaatttctgaattataccaaattgattgaaaaataatagaaatttaataaataattttacccttgttaacaaaaatatattctgaagtacacttactaaatacatattgttttacatatcagcagtttataattgagttcatcagcagaaatttgatacatgccacaaaagtaaactttattaagaatggcgaatattacattaaaaagttttacatggaattaataaatacttggtaattctaaatcagggaatgcaccaaatttaaataattgtgtgattctgaataaatattaaatttgtatctatcaaaacagtgccttttattgcagtaatttaartaattggaattgcctcgagagtattttaatcaacctctggtatacattattgccatgtcggaaagatgtgtttaaagtagctacaaacaaagtttatactcatggtctggctgcctagcactagtgtagtcaaataa

SEQ ID NO: 291930 - DNA, 621 bp, Homo sapiens
ttgtcaattggtatatcctcactgcagtctagttaccaactgtggacaattcggtttttcaatgaatgtgagtttctcattaatagtgatgctgattgctaaccctagttttgtaagctagttctgatagcaattagaaataaactacttcgtgccttaactataggcaatcagaacactgaaaaattctgactgatgaaatcagtttattgmctgattagtctgaatataattcaaggatttacatttacaacagcacaggttgcagtaaccatagtcctagtgaagtaatagtgtaactggtttatattttgtatagtacacacataagtaaacaaaattcttcaaataaaatgctcctgagacatatagttctaattctcaaaaagatagaaatgtacattactacattactttggtttccacaagtgtatggcaaatgcacctgatagcaataagttaagcatactctgagaataacactatggtctaaaaagaatgtgtgttcagagttctgagctaagaagtctgcgagtggccaacctggagacttattccttatctgtgaggaaggaaccctggtccattacgtggaatgcaggccacacaggggatcaatac

SEQ ID NO: 291931 - DNA, 571 bp, Homo sapiens
actccacaatgtgggactatactgctgtggaattggtagagctgggaaataggttcaggcagaaggggagatagtcaattgcagagtggtttctccatctrtgggacatgggagcagagggtataataccctccagactcaagatgagtaaaatgttacaaatcacccagccctgaggcagcacccttatgatgttaataattaggattgggccatccccttccttagctggatgattgcaggctacaatgcagcctggccaaaagaggaagacattcccatgtctgatgctgtattacagtaatgatgaaagatgaaatgaaagatgaatgacgacgaaagatgctgtcttacggtaagccctcagccagtggtgtatcacagtagtgtgtatcctgagccccttgataagacagccaatgtctcaggtggcccaagcggcttccaacttaggggaaacagagaagctgcataagcaagagatgtgtactgctggaatgaaagacaagggagccaaaggaaaggatatggccaaaaggcccattagtgtcacctgctgacaaatatcgtg

SEQ ID NO: 291932 - DNA, 604 bp, Homo sapiens
gaagaggcaaggacatcaaagtgtgcctctaggattctgatcccaattatgggaggagctgaagttagatatagtgtcataaaacaacaattctgtgctacccagtatacctttcaagtggaggacattacaaagggggccctggtgcacctggtaccccatagcaggttggctaaaggatacctttcagaaaccaaagtctgggaaacagacacagactgtggccaaatggcatgcatacctgcaagacaggagcatgttaactaatagcctcttgagcacagagcttgttttggtacttggtcctgtcccctgtgtgacaactaactgaagggcagtctttgattaaaaccactgaacatcracagatttcctcctttgtacagcaggtggggtgggggtaaacagggcccagttcctgaccaggcctggtatgcagatggctcatcatgaagcagtccttgctcttggacagccatggtcacctacctgtccactgataggatctggcttgatacaggtaaaggacatagtagccaatgggctgagctggaagtggcctggatggtcttcttctatgagccagacccaatagtcctatgta

SEQ ID NO: 291933 - DNA, 550 bp, Homo sapiens
catgcagtatgattgttattaagtgtattatttgtttttgttgttgtagtttgtattattgctgtggcatctagaaacaatgctcctgtacatacctgactccaggggaaatcatggaagaatgttgtgatgacagtgtgaggcccagtcaagggtatgttagcgggggactgtttggcagatgcacctgacagcaataacttaagcataacctgagaatgaccctgtgtgacagacacacctgacagcaataacttaagcatccctcaacaatgactctatggtctaaaaagaatatgtgttcagaattctgagctaaggaatctgggagtggacaatccagattcatttcttatccatgaggaatgaactcgggcccatcctgtggagctcaggccatasaggggatggaggaactttgatttcgataaaataaaggttgctaggtggagggcactgagtgaaaatgctatatatacttcatgccttttataagcagttgcagttctccttccagccctctgccaatggaccaccctcatgtaagttc

SEQ ID NO: 291934 - DNA, 504 bp, Homo sapiens
ccatttttgtgttattaatttcaatattgttgtgcctcagaatagggaggcccagggagagagataggaaaaaggctttaggtgaactaatcagaacacacacaatatttattcattagattcactctcttatatggctatgtttcatggttctccaaaacaattaaaatagtaacatcaaatatcacttatcacagatcaccatcatagatgtaataataattcacaagtttggaatattaggakaattaacaaaatgtgatgcagggacacaaaatgagcacatgcttttgcaaaatggcattgataggtttgctcaatgcagggttgcctaaaaaccttcaattagtaaaaagtccactatttgcaaagtgcaataacatgaggtatgcctaggcagtcacaggtagccaatgatagcgacagacatggattccagggaaggtaaagtaaatatgagagaggtttgataattaattgattaaaattgatcaataatttaat

SEQ ID NO: 291935 - DNA, 1125 bp, Homo sapiens
tacctactttggttacaccaacaactacaatgttctaaaataagttcttttcaatgtagtatagtggtaatggcaagctcgaacttaaggtaacagaactttcaaattttacctctccagatgtttatattgacatttttttggacttatttttttccacaagaaaatatgtatattgaagaaaacaacttttgagagcagtatttcattttcataacccttacaacattaacaggtcaggttttgagagttgctgcaggctactttaactattgtcaaactctttgacattaacgtatattgtttcacgttatttggcatgtaaggataatgggtccaaatgcatttccacttcttagtgaaaacatacacaattctctgctatttcaaaattaatgtyaggaataattttattttttaccatgatgcctgttttactaaatttttcatgattcactactttcacatgctgatctaatttcttacagaaaataattttgtagttatcacatgagtatcccatgagcctttgaccaaacaaggaagaatgctctcaattatgctatttcwtgagcctttgaccaaacaaggaagaatgctctcaattatgctatttcaacatttcctcaatattttaccagcacattttgatgtatgttcagttaaaagagtcagagcaagctcatttcccggaatataattctcatacacaaaggtatacattggttaaaggcattaagaaatacattgactagattctccagcccctctaataattggtaaattaaggagaatgtatatgtgatgcccaaatgcagaagtcagctaagaaaawctaaaggggagcttgtatttctaaagattatacatggtctttacttacccttgtggcctacattagtaaatttgcacataatcttgtttcctagtagctgcccccacagcaaagaaagaaatcacacagggtaagtttcccccagagacacaaagaagccaataatcctgctaacatttgctcctgtataaaaggccaagcctgcactctagtcaggtagctacctaacatttccctgctgtatttcctcaatgaggaaacaggatacatgtttccactcacaggacttg

SEQ ID NO: 291936 - DNA, 632 bp, Homo sapiens
gcctgtccagtcttgctcacctcacatcactctgacacattccatagtcacatttccctctgactgtcttccactcttgtgattaaattagaccctcctggataatacaagattatctccctaaagtcagttaactggtgaccttaattctatmtgtaaccttaactctattttgccaggcaacataacataatcataggttccatggattaggacatagacatctttgagtaatgggaagtttcattgttctgcctaccatgagaggacttctacatattaggtggatttgtatgcctacaggcaagaccaagtaggaatgtttattcctgttcaaaaagattcattaagagagtgagacaggatctcgccttgtctcccaggctgagtgtagtggcacaattatggctcactgcagcctcaaactcctgggctcaagcaatcctcccatctcagcctcctgagtagctgggacttcaggcacgtgccaccacacctggctaagttttttgtttttttgtttttgagacagggtcttgttatgctgcccaggctggtttcaaactcttagactcaaacaatcctcctacctcagcctcccaaagtgccgggattaaaggggtgagccacca

SEQ ID NO: 291937 - DNA, 440 bp, Homo sapiens
cagttaactggtgaccttaattctatctgtaaccttaactctattttgccaggcaacataacataatcataggttccatggattaggacatagacatctttgagtaatgggaagtttcattgttctgcctaccatgagaggacttctacatattaggtggatttgtatgcctacaggcaagaccaagtaggaatgtttattcctgttcaaaaagattcattaagagagtgagacaggatctcgccttgtctcccaggctgagtgtagtggcacaattatggctcactgcagcctcaaactcctgggctcaagcaatcctcccatctcagcctcctgagtagctgggacttcaggcacgtgccaccacayctggctaagttttttgtttttttgtttttgagacagggtcttgttatgctgcccaggctggtttcaaactc

SEQ ID NO: 291938 - DNA, 609 bp, Homo sapiens
tcatacataactgagaaaaaaggtataaatctagtcttctttactttccaataaatattgatacaatttttaagaaatctttttcttttctttctttctttctttttttttttttgagagagagtctcactcttttgccaggctggagtgcagtggcacgaccttggctcactgcaacctccgcctcctgagttcaagcgattctcctctctgcctcctgggytcaagtgattctcctgcctcagcctcctgagcagctgggactacaggcacccaccaccacgcccagctaatttttgtatttttagtagagacggggtttcaccaggttggccaggatggtctcgatctcttgacctggtgatctgcctgcctcggcctcccaaagtgctgcgattacaggtgtgagccactgcgcctggccaagaaatcttaaggatatttgggaacttgataatgccaccccctcaattagcttacttaagacaatcagctctcctcattaggttgtgtagataatctggtagaaagtattctatgctcccagtggtttgtagagtgtgcatttcagcatctgcttaacaatgaagactggaagagacagcaatt

SEQ ID NO: 291939 - DNA, 566 bp, Homo sapiens
ttctccttacccaacaccaacctgagtctccatccctaatcttaaaattctttatcaagtttccaagttaaaaatcagaaatgcttttgtgtcagtctttaacatttaaactgtcaggttaggaagaagagatcaacaacgtggctgggtagggccttatctttgaaaccaaagctgccaataarcaaaacacttaaaatgcgatatttcataggaattaatgttagataaagaaagggaggagctgaatttcaatttttgtccatgaagttaaagtgaagctataaaacagtcacaaatttagattgcatgcatttaatcacatgtggtaataaattgtaatagtttttcattctgcccaccattttgtgattatggtgcttcgctttctttttaggcagttttcaaaattgagatttctttattatttcaattagcaactaagtgttaagcatctactatttgtttgtttatggatgatccactcctcaaatatgggggctatgtgtctttagcatttgtgttcacagatgcgagctaaaggactggcacataaaactgaacag

SEQ ID NO: 291940 - DNA, 604 bp, Homo sapiens
cctgtgtagcactgagtcttgatgcagattacataccgagtaaatattttacaatcatgttggaatgtgtgccaaacgttaggcctgccaaagcattctttcgtctaagtttggcctcggttcagayattctatatgctacatatatcataatactatcatatgtatagatatgtgcatcttctgtgtgaaaacaaacttataatcagcatatagcatagttatggaacactatgtgtcctgaaatatttgttcattgattaatgaaacaatggggatcatctgttctactatcataaaggtatatacattctcatgattttggagtctcccagcccatattttttcgattatcacaacagtcatcatattacatatctgaaaaggcctatataagcatcaaaattatttttgtatatgaatttagaacacacattcttctacaatctagagagtaactatggttcatgttagtgtcatcacgacactaaatgatatctatctatcatctatttatctatctatctatctatctatctatctatctatctatctattacctatatagctgtctagctatttagagacagggtcttgctatgttg

SEQ ID NO: 291941 - DNA, 575 bp, Homo sapiens
ttaatagaagtatattgcccaaaaaagggaggggatatgttagcactactagcctttattctccattttcatagtcatatttaaaagataaaattgaaaaatcatatgatgtctaaaagccagttaccataaaagtgtgtcacatattgcttagagaagacattgtgaacataatttttgaagagttgtcataatgaacaagaatttatcctattctgtattacttcaggaaggaaatctaggactaaagggcaaaagctaacaaaacaatggattggaatcaacctaaataagaatgttcttttaacaaagaatttcagaaaactattaataataattaaaaagtcattagctgtgagaatactttgatttcagttatttaagttgacaacaaactatcacctggcatgctagagatagaatttaggggattaggggagaatgacataagattcagagagatctcaatttgttgcctatttctaaytttgaagtgtcattccttaatttaattaagcaaccttatttcctccacctaaatctctgatattatgaaagcataaaatagttcaatt

SEQ ID NO: 291942 - DNA, 501 bp, Homo sapiens
cagaagtagggacaatctattttaaagaatatacctcaggtcttgcccagtaaattgcatattggttcactcttgcaaacagcaaaattgtaaaaccacagaactcagaaatagactaatacatgcctttcgataatatgcagcattaggccccaatgctggcatttccactaccctctccaacatttttgtaggtggcctaaaaccagatattgtagattttgtatgtaaacaaaaktttggatggcagatcactctacaatacaaacttcagccttttgctgaatgcactgaaaataatttagatagaaaaatacaacccgcaaactaaacttacagatttcaaaataaagcagctgaatgtagaattcccacaaccttaagaaacaataaaagtctcatgttcaacaagacctttgctggttttgcaagcaaaaaggtaactgaaatattaattgcttcatcttaataaaaaggagaaaagaactaaataaaagtttc

SEQ ID NO: 291943 - DNA, 1028 bp, Homo sapiens
tatgtaccaatcctatttggaaagtaaycctattgttccatttgatagatgaggaaatatttaatagatgaggaagtgctgtgacaaaataaaagttacccaaatttatataactggctaatactaggaatcagaatttttcctctttgtttcatactagaatgggcttaggtagtgatatggtttggctgtgtccccacccaaatctcatcttgaattgtaattcccacaattcccacatgtcatgggaggaacccggtgggaggtgattaaattatgggggcatgtctttcctgcactgttcttgtgatagtgaatgggcctcatgagatccaatggttttaaaaatgggagtttccctgcacaagctctctttgwtgaggagctaaatgttaatccccaagacaatgcagaaaatgtctccaggccatgtcagwggtcttcaaggcagcccttcccatcacaagcccagaggcctaggaggaaaaagtgttttgttggctgggtccacggtacctgtgctatgtgcagcctagggatttagtgccctgtgtcccagccactccagccatggctgaaagggtccaacatagagctcaggctgtggcatcagagggggtaagccctaaactttggcagcttccatgtggtgttgagcctgtgggtgcacggaagtcaagaattgaggtttgggaacctacacctagatttcagaggatgtatggaaatacgtggatgtccaggcagaagtttgctgcaggggtgggctctcatggaggatctctgctagggcagtgcagaagggaaatgtggggtcagagctcccacacagagtccctactggggtataccctagtggagctgtgagaagaaggccatcatcctccagaccccagaatggcaaatccactgacagcttgcactgtgcacctggaagagccccagacactcaaccgcagcccgtgaaatcagcagagagggaggctgtcccctgcagagcctcaggggaggaactgcccaagaccatg

SEQ ID NO: 291944 - DNA, 650 bp, Homo sapiens
tgaggagctaaatgttaatccccaagacaatgcagaaaatgtctccaggccatgtcagaggtcttcaaggcagcccttcccatcacaagcccagaggcctaggaggaaaaagtgttttgttggctgggtccacggtacctgtgctatgtgcagcctagggatttagtgccctgtgtcccagccactccagccatggctgaaagggtccaacatagagctcaggctgtggcatcagagggggtaagccctaaactttggcagcttccatgtggtgttgagcctgtgggtgcacggaagtcaagaattgaggtttgggaacctacacctagatttcagaggatgtatggaaatacgtggatgtccaggcagaagtttgctgcaggggtgggctctcatggagratctctgctagggcagtgcagaagggaaatgtggggtcagagctcccacacagagtccctactggggtataccctagtggagctgtgagaagaaggccatcatcctccagaccccagaatggcaaatccactgacagcttgcactgtgcacctggaagagccccagacactcaaccgcagcccgtgaaatcagcagagagggaggctgtcccctgcagagcctcaggggaggaactgcccaagaccatg

SEQ ID NO: 291945 - DNA, 593 bp, Homo sapiens
ttcaacttcatttaacatttaaaacagcaattttcatagataaattgccatggaatargacaaacttttatttaatgaactgaggtttatattcagtggtgaaactgacaaaacttggaatctgaccaattcctgaatttccacgatgccagtcccactcagggagcaaagcattgctgttttgaaggaagaaaaaaaatttggttgcagagccagggaccaagtcttcagaacttcacattcactttccagcctttcagaaaatagtctagaaatcatgccttgtgtagttgaaagtgaacgctcctttgaaagaaatacaagctgtgcactgtcatctagtgcccatccagatcttacctgcatgaggtgaggctcatgatattgcccaagcaactgcaaatgtcgccctaaaataaccaacacatcagctggtgcttcttcttctttcagataatggcctcttctaacttgagttgcattcccagaaaaatcacagatcagtccaacaatcccccttgtaactgtagacaaccatctgagatttcctggggaaatatacaaattattacccatataaattgttgccaatt

SEQ ID NO: 291946 - DNA, 650 bp, Homo sapiens
tgaggagctaaatgttaatccccaagacaatgcagaaaatgtctccaggccatgtcagaggtcttcaaggcagcccttcccatcacaagcccagaggcctaggaggaaaaagtgttttgttggctgggtccacggtacctgtgctatgtgcagcctagggatttagtgccctgtgtcccagccactccagccatggctgaaagggtccaacatagagctcaggctgtggcatcagagggggtaagccctaaactttggcagcttccatgtggtgttgagcctgtgggtgcacggaagtcaagaattgaggtttgggaacctacacctagatttcagaggatgtatggaaatacgtggatgtccaggcagaagtttgctgcaggggtgggctctcatggaggatctctgctagggcagtgcrgaagggaaatgtggggtcagagctcccacacagagtccctactggggtataccctagtggagctgtgagaagaaggccatcatcctccagaccccagaatggcaaatccactgacagcttgcactgtgcacctggaagagccccagacactcaaccgcagcccgtgaaatcagcagagagggaggctgtcccctgcagagcctcaggggaggaactgcccaagaccatg

SEQ ID NO: 291947 - DNA, 500 bp, Homo sapiens
tacccttaaatctaaaataaaagttgaaatgaaaaaaaaatatatatatataataaaataggccaatagatatattagttagaatgcagagaaggatgtctggttgaaaaaatatttgtgtaaaattaagcattaatacaattatttattaatacaatgatatgtgatggtggcaatgttctactctgcgtttttcagtatggtacttaataggcatatgtggctattgatcacttgaaagtgagcactacaactgaggaagttaattttaactttgcattaaataattaattgacatttaaataggcataggtggttagcagctacaatatttggacactgagaatatggacagtgtaaaaagatataagattgcataagatcacctagtgcaatggtttgtaactgattggtaacaacaycctatattcatagaaaacatgttgcaataccccttattgttctgaaatacaattcataatacagcagtataacctgcc

SEQ ID NO: 291948 - DNA, 638 bp, Homo sapiens
tcaacataagaatttagggatgaattcaattacagcatgattgctacaattcaatccacagcatatgctataagtagataattacaattttattttattttatagtatcataggaaaataactttaaaaattaaagtaatgtttaaaagttccccaagctttcccattttatctcctttccaagaggaaatcagtattttagtcatttcacctaaactttggagttaatgtcaggctactataaattatcataagcatttacatgtagattcaattttgacattgtgtgttgactctctgtgatggtaaacaagaacactagtttacttatacataaaatccttcatcctaccaatgtaattatctctcaaattttattaaatttatatttcatattttaattactgtgtctatgtgaatatcattacggctgggtcaagtgatacactatccatttcttaaatttctcacacaaattttcccaaaaaaatgtttaattgtaatttaattatataccacctctcttttattaattataatttcacatctaaatagtctccctatacttttaaaaactcaccyaaattatctccatttaaattgatatatggagaaatctgttgtgataacttatcatt

SEQ ID NO: 291949 - DNA, 599 bp, Homo sapiens
ttcttatatataacaggattcaaaaaggctgaaattaagaggacgatatatctgtcacttagatttttctattctgatttacaatatccaatatgtattttttatttaaaaagcatgatagataaaaatagtcaattatcacaaatgtttcggcagagtgagacagtttgctcaatttcttgtgagtggttttgaaatataaaagacaaaagagtaagtttttcacatacgacaatgtctttgaattgaatagcaactgcctattgtaaaatgcaccacaaactcaatagtcagattacctgattttaattttgaggttcaattactagttgcgtactctgccaatcatttaaccttttgggggtcagttatttttctattgatttttctcccagtgtaactctgaaggttgaaaaatatactggagatgagaacacttggaaagcgtaaagcacttaccartatacacaataattatgagtattttttcagtaaaattgtgtgttgagaaatgaaaataaactggaatatttttgtaggttttaatattactgtagctcaatagaaatttcctatatgtttgctatttagggaagtta

SEQ ID NO: 291950 - DNA, 613 bp, Homo sapiens
agcagtgtttggcataattaactatagccctacaacaatcttatatatttttttgttatatatcatttacttccccttatcagttttctttatagagttrtgtttttatttgtgataattatttaattattctttaaataatttcacctcaagtttctggcccaggctcctgtccccttttgccattacccttggcaattttatctactttcacagattctattttaatatagactttgataactctttaaagtatttgtctaccatagccttcattactcaggaatacaccaatatacaatcagctgggcatatccacgggacacaaggaaccaccgattcagcatgtctaatatgatacggaactcctttaactcaccactgtttgtgtgaactccccacattcctgtgttggattcctaacctccagtatttcagaatgtgactccatgtgaaaataagctctttatagaggtaattaagttgaaatgaggtctttagtgtcattaagacttaatccaatgttactggtgtccttataaaaagagaaaatttggccgggcgcagtggttcacgcctgtaatcccagcacttcgcggggccgaagcgggcg

SEQ ID NO: 291951 - DNA, 557 bp, Homo sapiens
aaaaaatgcactggacaagttaaacaggcaagaagattttattttaaattattgcaataggggttaagactattgcaatagaaaagagatactgaactcaactccactaacggaaaaaaaggcaggagagtttttaagcactgaatgtaatcaactgttgcaggcaaatcctccagtggaaaagcactggaagatgtaagaatggagggtggttagtgtgattgagtcatctgtatttgtgacctggcacttattgaagttaggcatctaccttcccacagagactgagatagagacactatctttctgatgattactttcaacgggttggctctcaggtccttgagaaagacatcactgggttgtaaaactgacaagaggttgggagaaggtggacatctcaaagaggcagagaaagaatttrtaatggtatgttttctaaattaaatgccctaacaaagaaaatcgggacctatactcaggaagaaagctgtctgaagtatagtcaagctgaggagaactttaagaccctctaggtaaccatcatgtgaataaag

SEQ ID NO: 291952 - DNA, 651 bp, Homo sapiens
aattcatgatatatgatagaccaaattctccaacttcattgctctccttcaagatctgtttgcctattcttgcctatttgcaattacataartttaagagttatttcatcaattttagaaacactgattatattttgattggttttacattaaatccaataaatttgtgggaatttaacatatttataatattggggacactgacaaatagatgtcttgaaagcttttgttacattaatacgtaggttgttcatgtttgttagattaattactatgcattaaatgcatattatttttaagtgttctaatcatttgttgttagtatgtagaaataaaattgctatttgtatattggtcatctttgagtaaaattctcaaattcagttgtttattttataatttatctgtagattattttgaattttcttcttaaacaatcatatcatcatcacataatattattttcttcctctctaatccttgggacatttattattctttccttgatgcatcagcaaggttctctctaatccttgggacatttattattctttccttgatgcatcagcaaggttctcccaggatagtgatgaacaaaagcattaatagtggtcactccagtcttattcctaaagtcaggggaagttttca

SEQ ID NO: 291953 - DNA, 543 bp, Homo sapiens
caattaaaaccaataacaactatgatggtattctaattaaaattgtttaagtgaatattttatttttataataattaaaaattttaataatacagttttgtatataagtagatggatttcattcacatagttcagatagttcagatataattttacattcttcaactagattttatataagtggcattttttctagcaaaatgttctaagtttaaaatatattactgttgtgtgacatatattatttcctttctttaagaatttattactaaaatggggaaaatcatttattagagtacaaaataaatataaaatcaagttaccatacttcaattttaatttcagttgttatttaactaaacaaacattagcaacaaaacaaaacatgtttcctctttttggtgattatgccattttacacaatttcattgtatttacaagaacatttgagtaaacaagtgatgatagtgataaagaaaaattctgtccagatcttggtttkaacagaaattattttaatacttcattatagtttatttttat

SEQ ID NO: 291954 - DNA, 532 bp, Homo sapiens
cctggcctgtttctgattctctaggtctggaaaggggcccaataattttcacttctaacaagtggcaggatgctgctgctgctgctggtccagggaccacactttgagaagtatggtactgtgtggtacttaccggaccatttaccatacttcctgcctgcctaattgtgtcacaatatagccgtgcttctcaggcctagcaattcattagaattacctgtgaagcttttaaaatgtaaggtttggatggaatgctcagaccctaccttagacccaattaagcccacagctaaagagggtgaggcttgggtattgttcagaaagatccccaggtgattctaatggataccgagggttgagaaccacaggcatatagcaaactctggccctattctaccttaacatatgattctcatttsacaaatacatattgaccacctaatatatgtcttgaaaatgataaagtatgtaagaaatggtccctgacctcaagcagagatacatcatatgcccaaatatttaaacaaaaagc

SEQ ID NO: 291955 - DNA, 1042 bp, Homo sapiens
caatgaggaagttaagctgaacagccaaactactgttcagaatagtcaagcctaagtgttgctaaggaattttctgtccccactgagtacaactcatacctacatgtcctattatacttcacaatacacctgctggctttctcggcccttcaggaaatacctttgcttcctgaagaatgcaacaaacaacccaaaacaccaccacagccagccagctgacaccaaactgtgaactgttgtcccctctctgacagggttagatacttgagtgattaatatttgcagatagtgctaaggccaagttcaaaaaagaaagtcatatatatatatatatatatatatatatatatatatayacacacacacacacatatatatacacatatatatatgtagagtctatgtagtatggattcttcactgtatgtatgtataaattcttatatgcatgtattatattggcaaaaaggagatcattacttttttttttaaagttccctagtgggataaaattaaacctwgaagaactcactatcttggtcataattgaatatatttttaaatattgagaagacacctcaagatcttgcattcccccagggttctcatgaacctctcttattaatttacatttggtacggcttttattgcacgaccgtaggagtttataatgaacttgctgtccaagataatgctcaaacagatggttcatcagatgtccttccagccctgtaatatgaaaataataccactggaatccaactaaataaaagtttgtatttaaatccctatttatccaaaattgaaatcagwgtttgctctctatttcttttattaacttcacagtattcagagcggaagactctaatacccatagacatctaactgagtttgttggtttggacattgaaatggcttttaattaccattaccacgaagttatggaagaaattgctgacaccatggtacaaatattcaaaggacttcaagaaaggtaaaaagtattttatgcacctagatggacttaatttcaaatgtgtgg

SEQ ID NO: 291956 - DNA, 544 bp, Homo sapiens
ttgcttttgttgtttttataatcttcacttcttaatctgggcaattccacccattcctattaattgccccaaaatagtgttgatgaattgtctttgatttcccctccctgttgaaacagatgctgtyggaattttctctgtaatctttgaacttgttgctttatttggttattcagctgcttgaaggagggtataagcaggccctgaggcaagagacagctgcattctgggtttgttatttctgctcactttcctttcaaatcagttgactcccctgccaaggagcatatctgaattttgtcattcttcagtgttggcacaagtagctcactctagcaagatagttgttgtgtcacaaattctttttaatgggacttatgtaaagtgtctttttgcagctacaaggtttatctcttcacttctttcccccgacccatctcttttctggctcagctttgccttctcaccacccttcctgattatgaagctgcatctgcaaaccaaaatagaatggtcgtattgcgcctcttcagccctgtggcac

SEQ ID NO: 291957 - DNA, 1537 bp, Homo sapiens
aaaataatacctattatttaaaattacatattgtgatgtaacagtgtgggctatcatttcctaactctcagcataagtaaaatttctttaaggtttatcttatgccaatgtgcccttaccgtatttcctagcaatcccttttcaactattcaaatacaattttgattttctaaaaagataaaaatggtattttttaattatttaattaattaatttagtttttgagatggagtctggctctttcacccaggmtggagtgcgattgcacgatctcagctcactgcaacctccatctcccaggttcaagcaatcccctcacctcagccacctgaatagctgggactacaggcgcctatcaccacaccaggctaatttttttttttttttttgtatctttagtagagacagggtttcactatgtaggctaggctggtctcaaactcctgatctcaagcagttccccaccttggcgtcccaaagtgctgggattacaggcgcgagccaaaggtgcctggcctaaaaagataaagtgttagactcaacaattatagaccactgagctwaaaataatacctattatttaaaattacatattgtgatgtaacagtgtgggctatcatttcctaactctcagcataagtaaaatttctttaaggtttatcttatgccaatgtgcccttaccgtatttcctagcaatcccttttcaactattcaaatacaattttgattttctaaaaagataaaaatggtattttttaattatttaattaattaatttagtttttgagatggagtctggctctttcacccaggatggagtgcgattgcacgatctcagctcactgcaacctccatctcccaggttcaagcaatcccctcacctcagccwcctgaatagctgggactacaggcgcctatcaccacaccaggctaatttttttttttttttttgtatctttagtagagacagggtttcactatgtaggctaggctggtctcaaactcctgatctcaagcagttccccaccttggcgtcccaaagtgctgggattacaggcgcgagccaaaggtgcctggcctaaaaagataaagtgttagactcaacaattatagaccactgagctwtgcactccagcctgggtgacagagcaagactgtgtctcaaaaaagcaaaaacaaaaaacaacaccaccaaaaaaaattwaaaaacctgaggcaggaatattgcatctaacactttgttagaagaaccactacccccttttctataaccactgagtagtcttaacactagtctcatgaggctaattctcaccattactgttgtaggagaccaggaacgaaagagagccaaggatatcagcacctgagcaaagcatatggcagagtgtctttaaaatccctgagtaaatcataaagaaacatggggtaaaaatagatgagagagtcagctttaaagctggttaaataattgtacctagaggtgctgacaattgatagatgacaattatttcctaaagtaaaacaatgttaagg

SEQ ID NO: 291958 - DNA, 411 bp, Homo sapiens
tgcactccagcctgggtgacagagcaagactgtgtctcaaaaaagcaaaaacaaaaaacaacaccaccaaaaaaaatttaaaaacctgaggcaggaatattgcatctaacactttgttagaagaaccactacccccttttctataaccactgagtagtcttaacactastctcatgaggctaattctcaccattactgttgtaggagaccaggaacgaaagagagccaaggatatcagcacctgagcaaagcatatggcagagtgtctttaaaatccctgagtaaatcataaagaaacatggggtaaaaatagatgagagagtcagctttaaagctggttaaataattgtacctagaggtgctgacaattgatagatgacaattatttcctaaagtaaaacaatgttaagg

SEQ ID NO: 291959 - DNA, 521 bp, Homo sapiens
tgagaggattttagtaagtctagatactttgtaataaacaaggtggggagtagaagtgagaaagaatctttggggtttagacgagaattttaaataaagagctgtgatgtccctgttcatggacaggcatcctagcataattcaagtgaaattatccacatgagacataagaactcagagggaggatggaggacagcttgtatgactgtccctttcacttgaagactctcattataggactctttgattmtaaatcttgaaagcagtgtgtttgaatgagtaatgatctttatgatccttcaccagtcacctactcagatggagaagtccataaaaaactgttttccatttttaattaatttttaaaatttttttaaaaaaaattattaatcatttttttcattaatgccttacttgggtactcaaaaattgatttaaaacactaatatataaccataaatccttaaatcccttcattttcatatctacatatttagttggtgttttgttttttttgtttt

SEQ ID NO: 291960 - DNA, 510 bp, Homo sapiens
tacaaacagcaactgaagtaacaaaataacattccttgtctaggaaacggcttcttagtgtatttgatatgggaaaggaaccacattttgctatatacatgaatgatgaaccgtgctattagaagtctttttaacacacaaacataattatgttatagactgcttaaaataattcttgctgtcttctgtggaagaatatggcataacatccttatcctatcctccagggcagtttamaaggcccctccctgcctcgcagtgctgtccagtccctctcccaacccctccactccaccacctacctgccatcccccctacccctactctattctccagatgcattatcgttctccaatgtcatccatacaccttacactttttcctgtaatgctgttctctctacctgaaatatttttctttctctttagagtatagcagaatctcatgcgtctttcaaagactaagcagattgtcacataatttctgaatttccccccaacacctatgaga

SEQ ID NO: 291961 - DNA, 629 bp, Homo sapiens
aattctatactgatcgtaacaggggtgtattgtgtgagttaatttaagttattatattttaacaaaatttcaataagtccaggggacatccagaatgccaaaatttggatgttaaaggttttagaaactatgttatgtaaagaaatgttacttagcttgggaaatcactaaaaggatgtgtgatacctgtttttaaaaaatgtgacgagtgtgagtcataagaaaattaaccagatttgttttgtgttattcaattctggctaagaatttgttgttatagatatccaatcaagaaacagtttctctctctttctcccctacttcctccaacaaacagtctgcaaacatatgagtacagaacattaatgttccagacactgtaayaggccttcatgatagagtctttagtacggtatcatcctcgttgtcacggaagtcacagtctaacagtgttgacaggttatctatctatctgtctatatatgtctgtctgcctctctctctgtctatcttccaaggcatatacaagatacagagactaccaaaaaggaaatttgattatttaagcaaaatctgaccaacatctgtgttgaatgggatatcacacatttttaaatttataatcacag

SEQ ID NO: 291962 - DNA, 555 bp, Homo sapiens
agcaaagatttctcaccagcaaacagcccgggaatctggagagcctgacaagggaatggatgaggtgaaagggttcagagagggatgggaggagaaaagacaggcaaagggcagcccckggcgggtttaagaggccaggaccaggatgaaagaattggaggaggtaaggatggggaagagagccagagaagttgaaacatcctgggaaggggaggagggggtaaaaggttattttaaataactgacgaagtttagggtactgaacgggatggggaaaagactgagaaatgaaaattgaaagaggcctctaacattctcttggaaaggcatgaagcagggataggaataagaactgcgtgaagtgtaaagtaggaaaagtgattaaagattcgattgctttctatacagtcacccattccggaggactctttccttctgtgctgtggcccattgcaggagcaggagggacacagcgcaaaggctgatgaaggaccagaggggcagtgcttggggcagtgggcacaggtgtctgacaggaagatagtgtttcgtgca

SEQ ID NO: 291963 - DNA, 577 bp, Homo sapiens
gttgacttttttgattgatgcctctgttttcttgcacaagtaatccataccaggttaatgtttccccctataatcctgctaatataccctgcatttttccatcttcatatatttgtcagtgctttctcttctcatagaatgtcctccatcctacttccattctgtatccaaactaattcaccttgaaacttttctgatcatatataaataataaattttcacacatcttctcccctttatataattaaagtaattagtttcaaacgtgtatcttattaatctttatatacctcacagttactagcactcttttagtagactgaattacatgaaagtgctgatgtttgacagttctgacccttaaaatggaaattccacataatctaacataataatttgatgctgtcacagagccagtttggcagtgatttcaagccagggtcaaaatctggtaagtgtggacatgaaatcacttaaagtttgtattttattttgaaaattagagctcgggctggtaatctaaatttggtgaagtgtcatccatttcttaagasacataggctgcagctggtgagca

SEQ ID NO: 291964 - DNA, 566 bp, Homo sapiens
cccacgtcaactttgcatacactcatagaggactttcttattattagtgacccaaatcttggcttaaatataacttgctctcagatatgaaatacatatagtacaatctttttaaaagtgcatacttgaaaaaaccttatagttgggatcaccaaattaaataaaaataggttgattattgttttatctgacaaatatttatcgagtgtctacttcatgcaaggaactatgtgaagccttagtgatatatggggagataagatggacatggtttctgccctcatggaacttatagacaggcttatgggaaacacagacaaacaaatatgcttcacaatgcaacatgtccaagttcrtcataatctacagagtctctgtgacctgatcatttgaaaatatcaactttgttcatgcacattaaccatactagccttctgtgattgctatttcctgaatctagaattccctttttctaagatcttggcatggctagttgcttatcctcatttagatcccaattcaactattatcttctgtgtagactgaaatttctgcatggctgtgct

SEQ ID NO: 291965 - DNA, 616 bp, Homo sapiens
actttgtctttaagtgtttacagcttaattattaactttgcaacattcctaaagataaataaaaattttaaaaaatggatcacttggttgtcactcttttgaaaacagtgaaagttataactttatcttaattctttcactcatatttatttatttgaaaatattatatagggctacttttgtactttacaaatactgtagtcagtgtaattgaattatgcaaatggaatgcatgtttttctttttaaaaacatgtgacttatgcagtctattgcacaaatcctctataatatctccatgaaaacttctgytaagatataaattggtaacacacacttttgaaggtaacacagacaggattatgtacggactcaataaatattgttgaattcagtaacaagaactatttccctttctagagctacccaaagtaagtcacttccttttcttcactcatggttaacctgtgcatgcttccataattgaattcattctattgaactttgttttcactattgattttaaattatacaaatattacactatcacatgagagagaatgctagagttcacttctgtcgccaccaacatatccggttctttttacaagttactg

SEQ ID NO: 291966 - DNA, 616 bp, Homo sapiens
actttgtctttaagtgtttacagcttaattattaactttgcaacattcctaaagataaataaaaattttaaaaaatggatcacttggttgtcactcttttgaaaacagtgaaagttataactttatcttaattctttcactcatatttatttatttgaaaatattatatagggctacttttgtactttacaaatactgtagtcagtgtaattgaattatgcaaatggaatgcatgtttttctttttaaaaacatgtgacttatgcagtctattgcacaaatcctctataatatctccatgaaaacttctgctaagatataaattggtaacacacacttttgaaggtaacacagacakgattatgtacggactcaataaatattgttgaattcagtaacaagaactatttccctttctagagctacccaaagtaagtcacttccttttcttcactcatggttaacctgtgcatgcttccataattgaattcattctattgaactttgttttcactattgattttaaattatacaaatattacactatcacatgagagagaatgctagagttcacttctgtcgccaccaacatatccggttctttttacaagttactg

SEQ ID NO: 291967 - DNA, 496 bp, Homo sapiens
tcatgataatgtgaataatgtaagatactaytgaaattaaaaacaatggtaaaattttcaaaataataaaaatattaaaattcaaagtcaaagaaagcttccaaaagtagaactgcatacaaaagaaaaaccgttaaacaaaagaggagtcagagagaatcaattcaggagttctaacgtttggttaataatatttctaggggaaggaaaaaatgaagagaaatttaatttgaaaatataagcacataaagataattccctagatctcaagaatttgaaattccagatggaaatatccactaggtgtccaaaacactgataataaaattagaaatcaattagaacccaaaggataaagagcaggtgctaaaaaggaaaaactagttatctacaaagaatgagattaagaatagcagcagaattctcataaaaagtattgaatgtccaatatcagactaagaatgacattacagatctagggacatttttaccctag

SEQ ID NO: 291968 - DNA, 496 bp, Homo sapiens
tcatgataatgtgaataatgtaagatactactgaaattaaaaacaatggtaaaattttcaaaataataaaaatattaaaattcaaagtcaaagaaagcttccaaaagtagaactgcatacaaaagaaaaaccgttaaacaaaagaggagtcagagagaatcaattcaggagttctaacrtttggttaataatatttctaggggaaggaaaaaatgaagagaaatttaatttgaaaatataagcacataaagataattccctagatctcaagaatttgaaattccagatggaaatatccactaggtgtccaaaacactgataataaaattagaaatcaattagaacccaaaggataaagagcaggtgctaaaaaggaaaaactagttatctacaaagaatgagattaagaatagcagcagaattctcataaaaagtattgaatgtccaatatcagactaagaatgacattacagatctagggacatttttaccctag

SEQ ID NO: 291969 - DNA, 1037 bp, Homo sapiens
tttctgaaagagacagaaaaaaaacagttcttaacacataatgtaatattaaacagatagggatggggggaatcgactattatgcaggcaaaaagttgaaagaaaaagaatgyccatgaaaaactccaagacatatctatatatctatatctccatatatagatacaattgcagtcatttgatactatttgttactgaagtgagagaggtttcattatcataataacgtaaacatgacttacttattttcaaagtttaggatcaacctgtagataagtttatagagaaggtaaagaagacctagctacaatttctgaagagaaagtatgtgttcttaaccttgactgtatagaagaaaaaattcaaatttcagaattagaaaggtgggtgtgaaaaacactgaagcaaacgctagaagccctaacaccaattttcaaagtggaagatgagatattttctagtgtgacataataaggaattaaatatattacttaatgatacatagattatcaatagatwtttctgaaagagacagaaaaaaaacagttcttaacacataatgtaatattaaacagatagggatggggggaatcgactattatgcaggcaaaaagttgaaagaaaaagaatgtccatgaaaaactccaagacatatctatatatctatatctccatatatagatacaattgcagtcatttgatactatttgttactgaagtgagagaggtttcattatcataataacgtaaacatgacttacttattttcaaagtttaggatcaacctgtagataagtttatagagaaggtaaagaagacctagctacaatttctgaagagaaagtatgtgttcttaaccttgactgtatagaagaaaaaattcaaatttcagaattagaaaggtgggtgtgaaaaacactgaagcaaacgctagaagccctaacaccaattttcaaagtggaagatgagatattttctagwgtgacataataaggaattaaatatattacttaatgatacatagattatcaatagat

SEQ ID NO: 291970 - DNA, 523 bp, Homo sapiens
attgagtttataataactataaactcatgcctctgaaaataaaatgttttaaaaaggacaactgtcttaaaaaatataactttatatcaagttcattgatttatataactttattaccaagttcattgatttactcaagccatttttaatttagattatatattcaaggttcataacattcctaatttaaaaattaagaaaattaattataaagctcacaatagtacgttagttcaacaactagttctcattttagttatcaataactgggattctctaaattcatctatttcttcaacagacatttattgcacatctactatattccaggtactgagctctacagatragtaaggcacagtcattactctcaaggaactcatagtctcacggggaaaatcaaaacgtgaatatattttaaagtgacaagtgctgcaatagaagtatttccagcatgatacttaaatagagacaatgacaggactagctttaataagggaatagggaaaggctttgcaaaaga

SEQ ID NO: 291971 - DNA, 565 bp, Homo sapiens
cctatatttaatctcctctggatttaatgtttattagaggttattatataacttactatggtgataaacacagtaagagatgataactaaaaaagttactggatgcctagaaatyaaaaggcccaaagggagatgaagatatcaaagacgggcctaatccatttcatttgagaaaatggttttgaaaaatagctcaaaaagaaatgaactcgtttcttttcagtgtttttagttatacaagttattcttataaaatttcaaaatattaaaagaaaactaatatctcctttgagctctcttccatcctagttatctctatgcctccccattatttgttttacttttcaaatacaagaggattcataaacaacctgagtacaactataacgctcagaaaaatttacattgatcagcaatttgtgtccctctcatttatctattctttttattcacctttattgaggtatagttgataaataaaaattgtatgtatttaaagtacacagctgaatgttttgatatatgtgtacattgtgaaatgatcatggcaattaagctaattaac

SEQ ID NO: 291972 - DNA, 565 bp, Homo sapiens
cctatatttaatctcctctggatttaatgtttattagaggttattatataacttactatggtgataaacacagtaagagatgataactaaaaaagttactggatgcctagaaattaaaaggcccaaagggagatgaagatatcaaagacgggcctaatccatttcatttgagaaaatggttttgaaaaatagctcaraaagaaatgaactcgtttcttttcagtgtttttagttatacaagttattcttataaaatttcaaaatattaaaagaaaactaatatctcctttgagctctcttccatcctagttatctctatgcctccccattatttgttttacttttcaaatacaagaggattcataaacaacctgagtacaactataacgctcagaaaaatttacattgatcagcaatttgtgtccctctcatttatctattctttttattcacctttattgaggtatagttgataaataaaaattgtatgtatttaaagtacacagctgaatgttttgatatatgtgtacattgtgaaatgatcatggcaattaagctaattaac

SEQ ID NO: 291973 - DNA, 565 bp, Homo sapiens
cctatatttaatctcctctggatttaatgtttattagaggttattatataacttactatggtgataaacacagtaagagatgataactaaaaaagttactggatgcctagaaattaaaaggcccaaagggagatgaagatatcaaagacgggcctaatccatttcatttgagaaaatggttttgaaaaatagctcaaaaagaaatgaactcgtttcttttcagtgtttttagttatacaagttattcttataaaatttcaaaatattaaaagaaaactaatatctcctttgagctctcttccatcctagttatctctrtgcctccccattatttgttttacttttcaaatacaagaggattcataaacaacctgagtacaactataacgctcagaaaaatttacattgatcagcaatttgtgtccctctcatttatctattctttttattcacctttattgaggtatagttgataaataaaaattgtatgtatttaaagtacacagctgaatgttttgatatatgtgtacattgtgaaatgatcatggcaattaagctaattaac

SEQ ID NO: 291974 - DNA, 600 bp, Homo sapiens
tattttaagaccagttctactttatcaaactattttaccttctcagcagttacaagtgcatgcaacaaacataattttggtgataaaatcttcaattctaaatacctgggtatattgcatgcataagtgtatttattgtaaatttctcacatccttagctatagtttgaaaagctgaactggtagtaactagggtatcatgtcagctaacagtcatatcagtatttgggttgtaaataaagaaacataggtgggatcaaagccaatgccttctgtattagcttactgtggctgccataacaaattaccacaaatgtagtgcttaaaacagcatcaatttattatcttaaaattccagaagtctggaaggggtcttactgggctaaaatcaatagatcagtaaggctacatccctttcttgtggtggtaggagtctgtttccttgcttcttccatcctctagaggctacctcattgcttggcttgtggcccacttcctccatcttcaaagatgacaacattgcatckctctctgccctttttccacactgagtcacatcttccccttttaccacagctggttgcttttatggattcttgtg

SEQ ID NO: 291975 - DNA, 530 bp, Homo sapiens
tcaataaaagcccatacattattttctgtgtatggatcagaataaaagcacaaagcagcaacagcaaataaggatgtataaatcagtgattcaaataaatatacatgactacatagccacacaaataaggaatttaattatatacatactgtgacaatatccttaatgctttgtaactataaataaatttataatttcctccccctccccccmaaaaaaacaattaagaaactatgaaataatgtgagaaagcaaaggcttggaaccaagggcctgcctgtgagctgtgtgatcttggacagtaatgttgccttctacagccaaattcccccacctataaaaatggaataacaatatctacctcactgaataattaggagggttagatgggataatatttggggcttacattttaattgttaaaagatcaggtaattccagtaattattacaattgtagttaaaacaacataaacttccttcaaacccaaaagtactatgtaaggtgtcaggaatctcaattaagagtgt

SEQ ID NO: 291976 - DNA, 639 bp, Homo sapiens
tgttaaatatcactggaacatatgctattgctttacacttccatagcttcattcctgttactggagagtagcaccattttcaaaagtgagtaagtcataagatcaacctggaaaaatccatcttaagatgttccccttgacaaatcgaaaggatagctcaccatacttatttaactgctaagttgaaaatagccatttgtctaattatgcttttatataactttttggtaactcattatttcaactttaaaagtcaaattctagggatatggaattgtgaaagaaaagactttgcattcacaagtcagtgcgtgaatcgcaatcaggcaaaaatacagtgatctcatcygtaacacataaactgggtaattttttatttatgaagtaatgcaaataacttaatatagattactacactaactcatagtatactttacttcagttaaataacaccattttgggcattactgaaatataaatggacgtgaagcatgcaaaataaaattatgacattttggcatacattgtgcttctcaaaaagaaaaaaacacacacgctagactctgaagtcatcatattctgctattaaagagcttgatcatatctgcctcagattttactgagggcattgaaagcttc

SEQ ID NO: 291977 - DNA, 632 bp, Homo sapiens
gttatgaaatagttcttatctagcactccactcttgcatctgttcaatatgcagttttatcagcaaactggcagaagacatctggccaagaggaaagaaaaacttgtatgagattatggatttctgaaaatgactaattttttaaaaatctctagcagtggtttcgattgtgaaaatacagtaaaccttcccaatgattgatgcagagcaatctatttttttttaaastcaagactttaaaaaagggaatgtaaatattctagagagatgcaggatcttactgatggccagagtaagaatctggcatttttttcctgcatatttacacagggcagttctttttagcatgttattaccctcttgctttgtaaatgctggtttacatttttgatcattgtaaacgctaacagagcacaagtattcatatttctttctttccttcctaaatatggataataggctctatttgacagcacagttgggattagaaatactgtatgaaatatgtcttgagaaatatctacagcacagagatcagaaaattacaacccatgaaccaaatccagcctttcatctgtttttctagttttattggaacatagccaggctcattctatggctactcttaatta

SEQ ID NO: 291978 - DNA, 585 bp, Homo sapiens
taggatgtccccaacttgttatttgatttcaaatataacctgtgagtgggactgatagaattattcaggacactagctgcactctctatacaagatcacatcacatgaccacattgaaactggaacaagatcatagtttcaggcattgtcaatcttctgtcatctggagacggctgcaacattgatgtcatttgttgttccagttcttaattagtattttctttcagtccgttctgccagaagaaatgtcataacttttatcttcatcttgacacattctactttctattttttttatttcctgtattacgatgtaagttccttgaggtcaagggctatggttttatttatctttgtttctattgctacaccttgcacagaaattgaaaggttctacacttatttcctctgcttggaacacttatcccatggacaygcacggggctctgtccctcagcccttcactcagtttaaacatcaccttatcaaagagtcttcctaaactaccctacttaaagtagtaactacacaactcttttatccaaccactacccacacatccctttccccttacccggctttatt

SEQ ID NO: 291979 - DNA, 555 bp, Homo sapiens
taaaataaaataataataataggcataatgaaaaaccaaagaataggaaatatctacaaccaatggtacctagatgggaaagggcatgaaaagacatttatataataaaaagataaaaaataaatattaacaaatcaaagtaataacaacaaacaagacagatggcatttgatgtgtgccagacactcttttaagcacttttcacatattaacacatgcaatcttataagatatgcaaaattattttcctttyttttttttttttttttttttgagacagaatcactctgttacccaggctggagtacagaggcatgatctctgctcactgcaacctccacctcctgagttcaagcaattttcgtacctcagcctcccatgtagctgggattacaggcatgtactatgacacccggctaatttttgtatttttagcagagatgcggtttcaccatgttggccagactgggctggaactcctgaccacaagtgatctgcccatctcagcctcccaatgtgctgggattaaaggcataagacacagaagataaatta

SEQ ID NO: 291980 - DNA, 590 bp, Homo sapiens
atgggtaaacattaaaaagtatgacaacacaccctcttggtgggactacggggaaacagggactgtcacacattgttagaggcaatgccaacttgcacacctttttggagaggaatttaacaatgtttaataaaactgcatgtacatttacctttctatctagcaatgacacttttaggaatttaccctgaatatacattgctaatacacatgcatgaggttattcattgcagcactgtttgtaattgcaaaatattggaaatgaagtaaatgctcatacataggagagtgattgaacagaatttcgtacatccacacagtgcagtactaagaaactagaacagaatgaggaaaacctctataaactaatacagagtaatatccaagatatttaacttaaggaaaaaaagccaagtgtaatgcatgtcaattgtggggccttgccaacatgaaggggatggaaactgccctcaaggcaatgctgtgctgaggggctggaggagtggcgragggggatgggatgtgaggcttctttctgtgtgcagcctgtgcatgtcttgctgctgctttgcagaaatgcttcaattact

SEQ ID NO: 291981 - DNA, 540 bp, Homo sapiens
taattgctgcaggaaagaatcatcaatggatgctaaaattaataggtgaatgtataatgagaaacataaatttatatagtctcaaagcatttcttcataaaatgccttttaattattaaagggaaaatagtaacttaacagtggagaaacctggtggacaccatcttaaccacgtaattgaaggtaacaccaccagtaataagacatacaggcatgacattcctccacactgagaagggtacagcatcacttctgmggtatttctgccacatgcaaaaacatgagacacccaggaggaggaggtgggaggcagacaggaagagagggaagaaaaagggataggtattggtggaggtttgatactaccacctccattaagatgttgatagtgaagacaggaagatgtggaggcagtacgtagattacaagaaaaattgtgaatcaacagaatttgaggatcagtatcagatgagaaacaatggattctgaagagagtagaaggaggtttaaggaagatacccagatttgtgggctgatgta

SEQ ID NO: 291982 - DNA, 550 bp, Homo sapiens
gaatatatttgtgtattagaygagcaaaaaggattttaaagaatgtaattctgtactagttagaataggctaagctgcagtaacaaaatgacccaaagaattaaggatgattaaaggagaagtcataactctacagtgggttttcaattcaatggggttggggtttctctccactttgtcttaagggacccagggtcccttcatctcgtggcgctaccatcctttaaagcatccatgtcatctgccttcagctaacaggaaaacaagtacaaagtacacactgtaggtgaaatgtgtcaggcctgaaaatggcccacgttatttctactcaatgcccaacgggaaagacttaatcactcagctgcaactaattgcaagtgaggcccaggaagaagaggaaagtagacatacagggctctgttacaaacattaaaaataacaaactaaaatgcaattagccttggcatagtaaaaagcataattttatattagacatgactgtaatttccctaaaagtttcttatccactgcaaccaacccttttttcaca

SEQ ID NO: 291983 - DNA, 595 bp, Homo sapiens
ggaaatgttctttgtattgattggagtagggtttatatggcttccaatcatagacttaaaatctgtgcatttgactgtaattttacctacgaaaaaatgtgtgtcactaaaattattacatagcatgaacctttagacttacttgtaaacatttaagactgaatgttaaagctgcaaatgtcagagctattgtatgtagtgcatatttttccactgtactcaataaatgttattttgttatttgtaggctgtcatgtatttaaaccagatctagacctttataaattggtttcgcctattgagaatttmgtatggtattagtaaaaacagtaccgttttattttttaaaattactatgttttatatattaatttttatgtttaaaaattctacatacatccaaaaattccagttgtaacagatttttaagtaactcacgtctagagtaaaactttggctccttctctgaccattcatattttatttttatagagttttggtaaaccttgctttcttattcgtaggttcttaaaaaccagcattttaatgttttgataatgagaatccacagtatgcatttggtacaagtcttgaa

SEQ ID NO: 291984 - DNA, 595 bp, Homo sapiens
ggaaatgttctttgtattgattggagtagggtttatatggcttccaatcatagacttaaaatctgtgcatttgactgtaattttacctacgaaaaaatgtgtgtcactaaaattattacatagcatgaacctttagacttacttgtaaacatttaagactgaatgttaaagctgcaaatgtcagagctattgtatgtagtgcatatttttccactgtactcaataaatgttattttgttatttgtaggctgtcatgtatttaaaccagatctagacctttataaattggtttcgcctattgagaatttcgtatggtattagtaaaaacagtaccgttttattttttaaaattactatgttttatatattaatttttatgtttaaaaattctacatacatccaaaaattccagttgtaacagatttttaagtaactcacgtctagagtaaaactttggctccttctctgaccattcatattttatttttayagagttttggtaaaccttgctttcttattcgtaggttcttaaaaaccagcattttaatgttttgataatgagaatccacagtatgcatttggtacaagtcttgaa

SEQ ID NO: 291985 - DNA, 536 bp, Homo sapiens
ttaaaattttattattttgccatgattgttgtagaaatgactcattaacaattttttttttagtaaaagataacatctttgcatttcttacacgctcagaagtgggttgaattctatactgaaccataagtaatgaatgtctttgaagttttcattctgtctcttttcccattggtaattaacttattttatttttaatatagttcccacgtcccatttcctactctttttcctacaccactctaaagcaatcagttcaagtctctctgggaaggacaatgtcctrgttaaaaaggataattaagggtacttaaagcaagacaaaatttatattagattatcataaatgaagttttatttttaaatagccttctaaaaagcccctgttgataagcttcttctggttgcagtttattctttaaatactgttctaccagcattattgaacaactgctttcagcggggtaaaaatatctggtgcaatctgctccaatgctcattatccttgttaaaaggcagactctgacaatagtatc

SEQ ID NO: 291986 - DNA, 550 bp, Homo sapiens
tttcagcggggtaaaaatatctggtgcaatctgctccaatgctcattatccttgttaaaaggcagactctgacaatagtatctaagggttacatgtaaaccaaayggttaaaaataggatcctaatttataatgacctttgcacttgtttatcctcaaacctgagtgatttgcaccagaagtgacttctaaacttttagttttacatttcctcacatggtacatatttagaatgtataaaaaaaccaatgtaccagtggccttaaaggttgaaggtactgataggtaacaaagattctcatatgaagtgtgaatacttgttttctaataccaggcctccctgggggatgaacccttgcatttgcttccctatcaactcttgggtaagaggaaggctccctggaccattctactagaaggggtacagccttcgctgcctgaaggaacacccacacctgagaatcaccctgcctgaggtacagagcagaaaggcgaagggaggacagtgcagccagatttgggtgttacctcgatggccagttggaactgct

SEQ ID NO: 291987 - DNA, 611 bp, Homo sapiens
ttttagtttagagaaaagctggataatgatgtgattatttatacctctcttaatgagaagacagctttattccagaatctgtatgagcttactggcatattctgatgtgatgtagcttccttagctgttttgtcatcattatccttttactctgatcactgataacccttgttggtataattttctattactggtatttttaatcttccaggttcataaaactggctagttattcttctgtgagcatacaaatatgtgcaagttaagaaacatcataattaaaatgagaaaatgttggttctactaattttgagctgtgtgacattgcaaacatcatttaagctccctaaggctcagttttctcatctgtaaaatgtgaacactttccttgcataagggatggggtaaagagaaaataaaataattaatgtaaaagcatttttcaaactgtaaaatgaatattracattgatcaatcattctaggcaacaatttacctaataggttagatgatctttaaagataatttccagttctaacattccacactactttcaaaactcaaagagtgcccctacatctatagggtatccaagaaaatcagttagtaga

SEQ ID NO: 291988 - DNA, 551 bp, Homo sapiens
aagaatatcactacttggggacttaagagctaggccaaaagttcagctcagtctgagcttgagggggaactggacatgaagatctttattgcttcttcakgtcaggaaagctcagctaagcccaagtcaggagaatggatttgattaagtggatgtggatatccacaaatggtgatgccatttaagctgggcaggctgagccttgtaaccatgtaggctgggaagccgcctgtagatggctgtgttctcaaggtcatacctacagcaaagctttgaggttgtactcaaggcaactgactctaaggaccactattgtagatgatttatcacaaggcatagttgtttctgaaacgctagccacaggaaaaataatcagctcctcagatggtagcagggagcctgtcatatgtccagtgttccttacttctaaaaatccatggtctatgagactgcacatgttcatccttcatggttttatagaccgtggccatatgtcctcttaattatctccattttgaaacaaaaggatagtacttgtcctgttggctgcc

SEQ ID NO: 291989 - DNA, 551 bp, Homo sapiens
aagaatatcactacttggggacttaagagctaggccaaaagttcagctcagtctgagcttgagggggaactggacatgaagatctttattgcttcttcatgtcaggaaagctcagctaagcccaagtcaggagaatggatttgattaagtggatgtggatatccacaaatggtgatgccatttaagctgggcaggctgagccttgtaaccatgtaggctgggaagccrcctgtagatggctgtgttctcaaggtcatacctacagcaaagctttgaggttgtactcaaggcaactgactctaaggaccactattgtagatgatttatcacaaggcatagttgtttctgaaacgctagccacaggaaaaataatcagctcctcagatggtagcagggagcctgtcatatgtccagtgttccttacttctaaaaatccatggtctatgagactgcacatgttcatccttcatggttttatagaccgtggccatatgtcctcttaattatctccattttgaaacaaaaggatagtacttgtcctgttggctgcc

SEQ ID NO: 291990 - DNA, 554 bp, Homo sapiens
tttatttatataagtttaggtcagtaggactttggggcaaaagcagttgtaagtggaaacagcatgatgctttgcatttagagttctccatcagtttcttttccctgcccttctaatcagagaaaaatgggcagccctgcccagtgacctctcaacagcaagcagtgttgccccacttcaagacagcaagggagtgctacagtgcttcttatatctacgttttgggggttctgtgaacttatttatgcctaggtagatcctgcctccaagccagcttgttcttgtttcattatgtcaccatccacattaacaccactgcttaattttctttttctcatatggagggtggattcatatggaattacttatggttcttgcctatgcttttgtgactgtgaggattatggtatagtctgtggtcatggaagatagctcttggcctgtgaatgtcaggaacagtcaagagtttcagaaaattagytgaatgatgggatgggagcctgaacctcatgacccttccctgtctcatggtccaatcttcagctatttggatt

SEQ ID NO: 291991 - DNA, 423 bp, Homo sapiens
gtcaagcacccttccgtctaccggtcacagggctccctattcctgcctcctcaccctggcctgtttgttgtgatacaggcacartttctactcccacaactgcacggacatccccaggcatgaaaataacatgagatgtactcagtgctatctgttatgtatttgttgagggctttgctgctgggaggatgtgattattctcttggacttctcctctcagtctttctccatcacaaattttccagaaggaaaggaaagattttggaccattttatgcagcactatgtcagtgtcacactcactaggaatcacagagatgatgcaaaagctcccttaggtgctctagtaacaagtgtcagaaagatcaggaagacatagggaagatgtttctggtgtgtgtgaggcatcctgtcaatgtccact

SEQ ID NO: 291992 - DNA, 423 bp, Homo sapiens
gtcaagcacccttccgtctaccggtcacagggctccctattcctgcctcctcaccctggcctgtttgttgtgatacaggcacaatttctactcccacaactgcacggacatscccaggcatgaaaataacatgagatgtactcagtgctatctgttatgtatttgttgagggctttgctgctgggaggatgtgattattctcttggacttctcctctcagtctttctccatcacaaattttccagaaggaaaggaaagattttggaccattttatgcagcactatgtcagtgtcacactcactaggaatcacagagatgatgcaaaagctcccttaggtgctctagtaacaagtgtcagaaagatcaggaagacatagggaagatgtttctggtgtgtgtgaggcatcctgtcaatgtccact

SEQ ID NO: 291993 - DNA, 501 bp, Homo sapiens
tttgttccttagatagagaagccctagatgcggcagaagagrttaacaggaagattaataagctttggaggccatgaataagaaagtgtaaagaatgtcctttttgtacaggtgagtaacctcctgagccttagtttccttatctacaaaataggaataataagatttgccctgctcacttcaaagactgtgaggactgaactattttcttattattaatgctttagataaatttatggcagtattaataagcctacagcattatgctgattgctatagggaatgcaaattattattcagcatccctcacatttatcagcttgcaagtctggttgtaattagttcagtttatttccttttcaaataaaacaccaaacaagttttccagaccatataagctgggatacatgttgctgtgtgaatatgctaatttcaaatcagcataaaaccaggaagtacaggatattgataatgatagcttaatgtcacttcatattttct

SEQ ID NO: 291994 - DNA, 422 bp, Homo sapiens
gtcctggcctaaaagctgtgtctaaataggggactagaaataagctgggtcaattggggttgtttccctgaggatttaaackgtacagacagggatctgggtgattgcttgcagagtagaagtgaaatcacagaaagcagagaggaagaagaaaaaggaagctgtggtatagaaatggtagaacattatacagattctggtcttccactctcagatgatgaccagatgacgtggctgcttgagacacccttggtcttgggtgacattccagttttcatctccagaggtgacactatgccacatttcttgttcttcccatggggctgagtcactgagctttttctgggtttctgggaggttcagacacatcgcttctatcttctttatttccacacgtggccatacatatcttttctcgttca

SEQ ID NO: 291995 - DNA, 555 bp, Homo sapiens
aagcaaccacagcaactcaaaattccctaacagactactaatcctgtcttgaataaaaagccagaactttgcctatagagtcaagaggaaggagtcaagagttaatgaactcaggatcaaataggacccatacttagtgatgtttaagaggtgatgagtcttgagaggtattaaacagagtatggaaaaaccaaaccacaggagttcttccatgagaccattcaaggatgctcatttctgtcttctaataatccatttttgcctgctatatataggtcctaaaggaaagctcccctcagcaagttagattccccacccagcctctcttatttacaatatctggagagctcaagtcaaagaactgcagtagattaaaatgtgattgaagggactcttccctcatttttcttcttctttttcttttacttttcttaggagagactagcttcccattgtcaagtaaacccatttattcaatacttattgagcacctctrtgtatcagacacagtagtatctctagctacacatctaatgccacgtgtgtactacacat

SEQ ID NO: 291996 - DNA, 548 bp, Homo sapiens
gatagcctcctgtttgaatgaattctctgatggaaaaaaaaaattcattcaagtctctgtttactagcctttatataaaagtctttgtggcaaaggagaaaaaagcatggcctttagagtcagaaagacctggggtcaatttccgtacttactacaacctagctataaaaccatgggcaaattattaatttttctgaactttggttttcccatttgtaaaactggaattttaaaaaaygagaattatcatggctatgaactagatagccagatagcctagcacatggtttgtgctaaataaatttcagttctttctctttcttcacctgccccctgtatcacaccactccttctagtagtatttcacatgaatgtgactttatagctgagttccagtgaggaaacaagtctcaggttcaaacacgaccaagcttagcaagatttgagagatatccgggaaaacaatagtcaataacttcctgactattcctgtctcccacacacccaatcctggcaacactgtgtatttctcagccaagatctgtcct

SEQ ID NO: 291997 - DNA, 548 bp, Homo sapiens
gatagcctcctgtttgaatgaattctctgatggaaaaaaaaaattcattcaagtctctgtttactagcctttatataaaagtctttgtggcaaaggagaaaaaagcatggcctttagagtcagaaagacctggggtcaatttccgtacttactacaacctagctataaaaccatgggcaaattattaatttttctgaactttggttttcccatttgtaaaactggaattttaaaaaacgagaattatcatggctatgaactagatagccagatagcctagcacatggtttgtgctaaataaatttcagttctttctctttcttcacctgccccctgtatcacaccactccttctagtagtatttcacatgaatgtgactttatagctgagttccagtgaggaaacaagtctcaggttcaaacacgaccaagcttagcaagatttgagagatatccrggaaaacaatagtcaataacttcctgactattcctgtctcccacacacccaatcctggcaacactgtgtatttctcagccaagatctgtcct

SEQ ID NO: 291998 - DNA, 510 bp, Homo sapiens
ccaccttctttgtgctgtttgcttttactggtattgaaatgagtctcttatctgtgctcatagctttttgcattagacaaaaaggcccaaaattcacaaggatgcagggagaggctccccaatattgagagttcataggaaaagattcatagagtggatagccacttctgaaatatcagctcaggaatgaggctaagggcctaatttgtcacaccaaaccagaggaacattccttatagtgtcagagggatctccggataggatgtttcccaccttgaccccaacaagarcatctcttaacctgggaagagcatatgttttgtgtggaagtgatgccaaaaaagcctcctgtgtggcaaggagccccgtgtgagagatgaggacgttacaaagaggaacttgagacagatcagattttcattcaaacccaagcatcctcagatcaaatcctggctgtgaaaacagatgaaaatcaggtttccttctattatagcatttcccacaatcttg

SEQ ID NO: 291999 - DNA, 606 bp, Homo sapiens
gcacaagaggttgtgcacacagcactttaacggcacagcctctaaacacttctaaatagtggtcatagggaagctgtgttggaattatgtcttcctgttgtctctgggcccatgttgttttggatgtgatcataagaaaagctaaaagtggtgttaaatgagtgtatatacaaggcatatagcaaagcaagtgggccatggttaggtattcagtccatgctatttccctctctaaattttctgttgtttcaggaatagctgggtacgtggatagatgtcttaagcgttttaaatagtatgttctatgctggaagcaatcaaatttattttattatgtcttcttcctgcttcctgttgcyatattagatattaacaaaatatacaataataaccatatgaatatcacatactcagtatgtggaagacactcatttttataataccccataatgcatgcaccattattatctccattatacagatgagaaaactgaggtttagagaaagcttttgagaaagcgtagggaaggtaactagctcagggttgttcagataggaaagggcagagttcagattcgggccaaatctgacttcagagcctgagtt

SEQ ID NO: 292000 - DNA, 573 bp, Homo sapiens
ctattctcatttactgctgtactcctagcatggagaacagcttctgctgtagagtaggtagggcctctgcacagttcatgaacgaartgggtgggaatatgccaacacaggggctaggcgtcccctggtgcagggagtggttcctctctctggctactgcccttgcatctagtggcctcccagtgtgcaggtgatgaaattgtcagttctgatgaaccaggtaaggctctacaggaggtctgttctcagaaggctcctgcagccaggctgccctgcctcttgttaactggcgtcatgctacggcttattataaagcagcagtgacactgcaggaatcctttgaatttccccttagttggacccttaccatctcctacccaagccttccttcccaattggtaaaacaaaatcttggtcatgacccactacattgatgtgataattcagggtttaaaaaccattgagttatatccgaaaatctcaggggttctccaggtatttccctgttcttctttggcatatcaccattatcagcccacatttcacctcagctcacattagcttgttactgaa

SEQ ID NO: 292001 - DNA, 573 bp, Homo sapiens
ctattctcatttactgctgtactcctagcatggagaacagcttctgctgtagagtaggtagggcctctgcacagttcatgaacgaagtgggtgggaatatgccaacacaggggctaggcgtcccctggtgcagggagtggttcctctctctggctactgcccttgcatctagtggcctcccagtgtgcaggtgatgaaattgtcagttctgatgaaccaggtaaggctctacaggaggtctgttctcagaaggctcctgcagccaggctgccctgcctcttgttaactggcgtcatgctacggcttattataaagcagcagtgacactgcaggaatcctttgaatttccccttagttggacccttrccatctcctacccaagccttccttcccaattggtaaaacaaaatcttggtcatgacccactacattgatgtgataattcagggtttaaaaaccattgagttatatccgaaaatctcaggggttctccaggtatttccctgttcttctttggcatatcaccattatcagcccacatttcacctcagctcacattagcttgttactgaa

SEQ ID NO: 292002 - DNA, 564 bp, Homo sapiens
tgtcacctcattactcagccctgcttggctagaattctataattgtagatttcttctaaagtgtgactgcaaagccccrccatttagtaatgcacatatagtcaaaagactatttacagtggaatgaccttttcagaaaaccatgaacttactcctggacagaatagggaaggtgggctcagaccaccatggaacaaagtgagcacacctgtttgccccttggggaactaccacttttgcattagacaggtgtaaggtagaagctatacagatccatttaagtattgaacaaaagcaaccctggaaaagctactaatgccatttactgaggcacccatattgtgttgtcagtgtttaatgtaggattaagaatattagactgttttctcatcaagagaggatttacagcttaagaaaacagctcagcttctctgctatagagaaaagtggttgcatttctttccctggagatgttaaagaagagtcagacaaggaggtttccaagttacagaccctatgtgagaaatgaggaggggtgttgggcattggtcttctgctcccaat

SEQ ID NO: 292003 - DNA, 1213 bp, Homo sapiens
cttgtagtggggaaggggatgaattctgggaatggcaaagtggtctttggtggaaagaagtaagaagaaacagaggaaattacttctgggtaccagtgatggtttgacccaccacattacaactgctgaaagaacaatatcttcttaggtgccctgaataagggaacaagtaagttccctccattagaacaactttatgtccaaataagaagtgtctaaggagtaccctaaagagatgcaccttaaagttgaagactatgtatataaatcttcagttactaattgggactgatactaaaaataactattgcaggtgycaatacctcccaacacaagtagtttcggtactgagactatctctgaggacttaaacaccaactttatcacatttacatacgtaataatcaccctgtccattctcacacatctctacttgctggagactatttttctttatatctaaaatgctttagcaccttttcctataaaaggcttatttttagaactccacattttttttaaagtaaagttttattttcctacagtccaaccgtgtgtgtttaggaaggtacatgggcctagaaattctgagaaaattatagtagtwcttgtagtggggaaggggatgaattctgggaatggcaaagtggtctttggtggaaagaagtaagaagaaacagaggaaattacttctgggtaccagtgatggtttgacccaccacattacaactgctgaaagaacaatatcttcttaggtgccctgaataagggaacaagtaagttccctccattagaacaactttatgtccaaataagaagtgtctaaggagtaccctaaagagatgcaccttaaagttgaagactatgtatataaatcttcagttactaattgggactgatactaaaaataactattgcaggtgtcaatacctcccaacacaagtagtttcggtactgagactatctctgaggacttaaacaccaactttatcacatttacatacgtaataatcaccctgtccattctcacacatctctacttgctggagactatttttctttatatctaaaatgctttagcaccttttcctataaaaggcwtatttttagaactccacattttttttaaagtaaagttttattttcctacagtccaaccgtgtgtgtttaggaaggtacatgggcctagaaattctgagaaaattatagtagt

SEQ ID NO: 292004 - DNA, 547 bp, Homo sapiens
caatacagtagcactagatatgtgtggctaatgaacacttgaaatgtggctagtgctactgaggaactgaattttcaattttatttaattttaatagattcagatttaaatagaccacaagtagcaagtggctgccatattcgatatctcagctctagaatagccctgtgctaagaatgaccaagaggcaagcaagaattgggtgtaaaatgatcctggsctgtaataggtccagataaggggtggaaagtcactcctctctcttcacctcctggttattaattcctggtatgtcatcagatggcatcagtttaaagagaacataatatatgtagctcccatggcatgcaaaccttgtgagattattgaagcaatacgctctgggggaaaaataactgtttgactttctggaatatgtgatataagttcccagtcttttgtttttttaatcataaattttaacacgatccatttggtttgtctggaaatttccagatgtagaaatatcatgtcctcatgcttatcactgataagagcccaataaaac

SEQ ID NO: 292005 - DNA, 576 bp, Homo sapiens
ttcaaattagggaccaaccaccaaggttrgatgccccttctgcacactccctccctccaggcttggctggaagctattagatttggccttggccaccagccactgccctcccaacctggtgttccctgctccgaaggagcaggaccagagatgtgtgaggttgaactgggagcactgaccaggccagggtcagccaggagcagtgaggggtgagcagcaggggtaaaatcgaggctggggaatttagggaagggcaccccaatgagcgactgaaccacagccacatttcagtcaacttcccagagttcctcccttgggccaaaggtggctagattggagatgaagctggtaccctgtgattgaacccagcctctgccctctgggttctgagaatgacatatctgtctgcaataagggtggaggtgggcacaagtggagcacaaagaaaatagcctcagttggagagtaggaaaggcctcatggagaagggggcatttgagatataatttaaataaggggtgggatttttacaggcagggatggcttccttgatgatggaataaagtttgaacaaag

SEQ ID NO: 292006 - DNA, 546 bp, Homo sapiens
tgtatgcaaatttcacaagactattttgccttcacgaaaagatttgaaaaagtatttgtaaggttttaaacctatgctataaagacaaacatacaagaataactgataataactatcatttattgaaggcacgcttttacaaggaatacctcacttaatctttgaaacagctctatagatttactgttaatattttccagatgaggaatcaggcttagagaggatcattcaagtggaggtggcaagatgtgaacccaggtaggctgacctcagagcctgcacttctagcacacacacaagaggaattaaaaaaactggggttagtcaaccttccttctgatttttttctaaaggaagtttctactttatttatctttttatgtttaattacaaagttacatatttttcaatgtaaarcatacagacaagcaaaaagaaacagaaataatccacccacttggttgtctaactaacagttgctaatactttctgtttattctcccagttattcctctgtttatgtgtatataggtacatttagtaacc

SEQ ID NO: 292007 - DNA, 522 bp, Homo sapiens
tatgaggaccttctgagtccataaaaccggctggggtggggagtagtgatggtggcagcagtgggggtggggagtagtgatggtggcagcagtgggggtggggagtagtgatggtggcagcagcggtggtggggagagcttcagaacagyaacatttgtagcctctttcttcctccttctcctcttcctcttcctccttcatcccttcctgctggtccaggtgtgatttgaggtgggcaatgctttccagcccccctgagacctccatgaggcaagtacttcctggccgtggcattcagggtaatgggggcaaatcaggttgtgggggctgatgggtaagagatttgagaacatgtgggtagctgaggcagctggtgcaggcaatgaggaaaggaaccagcatcaaagagccctgaggaaaagggcttcaggcagtatattaagcaaaccaaaaaataaacacacatcaccaacaagagcaacccaccaggcagatctgtcttttttctctgccaatgagca

SEQ ID NO: 292008 - DNA, 514 bp, Homo sapiens
actcccaggttcaagtgatcctcccagcttagcttcccamatagctgggtcataggtacatgccaccatgcccaggtaatttttgtattttctgtagagacaaggtctccctatgttgcccaggctggtcttgagctcaagtgatcctcccaccttggcctcccaaagtgtaggattataggcatgagccactgtgcctgacctaccttaattcttatattccatttctagaattcctccctttgattactttgcacaagccttcaacagtttatatttataccacttgaagtttttaagagatgctctcaaactttactgtgcataaggatcacctggagagcttgtgaaaacacagattactgcccaccctccaacctccccagatattctgatttagtaggtgtggggtgagtccatgaatgtgcacttctgacaagctcccaggtgctgttgctgctgctggtaaacagaccatgcatggagtagctggatccagagcataggtcaggga

SEQ ID NO: 292009 - DNA, 514 bp, Homo sapiens
actcccaggttcaagtgatcctcccagcttagcttcccacrtagctgggtcataggtacatgccaccatgcccaggtaatttttgtattttctgtagagacaaggtctccctatgttgcccaggctggtcttgagctcaagtgatcctcccaccttggcctcccaaagtgtaggattataggcatgagccactgtgcctgacctaccttaattcttatattccatttctagaattcctccctttgattactttgcacaagccttcaacagtttatatttataccacttgaagtttttaagagatgctctcaaactttactgtgcataaggatcacctggagagcttgtgaaaacacagattactgcccaccctccaacctccccagatattctgatttagtaggtgtggggtgagtccatgaatgtgcacttctgacaagctcccaggtgctgttgctgctgctggtaaacagaccatgcatggagtagctggatccagagcataggtcaggga

SEQ ID NO: 292010 - DNA, 576 bp, Homo sapiens
tcccccattgaggcttccaggggcaataccctctttcttttacctcctggggagctggggagtgtgtcctttcttttgtatttcctcattggagactcagtcatcaccatccccataaaagatatatagtatctggttggtggaggaaagatcatttccaactatcttgagaatcataagaccacttggaatgatttttgcccaaaccagaagaatgttggcttttcatttttcctatcagggtcactgtatcttgctccctttgacactgagaagggaatggttaagcaacagatctgcaaaccatactctctcctygagggggcaggggatgcatgttgagtggaggtgcctttcccagaaataaagaagttcaccagatcaaatcttgtaaacacgttaatgacagacctcttgacaaataacctaatggtacttgctagcaagagaggacttatctaggaaatgcttttaataggataaatctggtctgtctagggcttcttatggtaaacaatcctagaatctgtggctttagaggcatagctctctggaaggtgtcacataagctatgca

SEQ ID NO: 292011 - DNA, 648 bp, Homo sapiens
tcatccttaaacagagatggtcctgtctaattccttttcaacaattgtttgcatacagactgtcttagaatggggaaagttttaaaatacagattcttgggttatcttccaaaattctcaaccagattctccatggtgaaacccacaaatatgcagtattttaaagttccttagtaaattgcaaagtttggttaggtttgcaaatattgtagcatattaagcaggtaaaggaaagtcaggagacaacataaatcaacttagaatagcatatggatttaagagttagttaaagatatagtgtgaaaacaaaactaaacgaaagcaattaactatggctagatctgcctccactcagagtgacaatagagcatcttggacatacgtggaaataaatttttaagattattataatacccttataatttacttaaaatacttcagctagataatgaaatacatctaggcatatctcagagatattgcagatttggttctagaccactgcaataaatgaatattacaataaggcaagtcacacaaattttttggtttctcagtgcatataaaaattatatttacagtatactgtagtctattaagyatccaatagaattatgtctaaaaaataatgtatacaccttaatttaa

SEQ ID NO: 292012 - DNA, 546 bp, Homo sapiens
aaattttagtttcttcacatatttccaattgaaagtgtacttcaatcatgccataatgaaaaccatgttctttagccataaattatccagagaaaatcagtattttattattagtatgaagacttgttcattgtttcttgaaatttccctaaaatcaggtgatatttgcgaatattttagtttaaccaattccttttcatttaaaactcaattataccaactcagctatccagatagaagtatcaacacagtacatgtcatgcctagagcaaaactaaaattcagatcactcctctcccattccagaagcacaaaaagagcttgtaaatattccgtaygtgccattgggcacagatttgtaccttcgaggtttcagctataactcaagtttggctaactttcaacccagcacttcctttattcatcctttgccctcttctcccgtctttttcacttctttagttgtctgtttatagcccatgccatttactagacaacagacctctggcaactcaaaaaccatgatttattaatctgtacatgtct

SEQ ID NO: 292013 - DNA, 546 bp, Homo sapiens
aaattttagtttcttcacatatttccaattgaaagtgtacttcaatcatgccataatgaaaaccatgttctttagccataaattatccagagaaaatcagtattttattattagtatgaagacttgttcattgtttcttgaaatttccctaaaatcaggtgatatttgcgaatattttagtttaaccaattccttttcatttaaaactcaattataccaactcagctatccagatagaagtatcaacacagtacatgtcatgcctagagcaaaactaaaattcagatcactcctctcccattccagaagcacaaaaagagcttgtaaatattccgtatrtgccattgggcacagatttgtaccttcgaggtttcagctataactcaagtttggctaactttcaacccagcacttcctttattcatcctttgccctcttctcccgtctttttcacttctttagttgtctgtttatagcccatgccatttactagacaacagacctctggcaactcaaaaaccatgatttattaatctgtacatgtct

SEQ ID NO: 292014 - DNA, 568 bp, Homo sapiens
tttatttatttttggctctcaggccccagcatttccaatctgtaggaacttttattgcttccccatgttcagatgttttaagtaagactcaccaacatttcctacagtcttttgcatatttcagtctttaggcttgacttcctggataatacttaaacccccaattcacgagaaaaatcctatattcttagaggttagggagattttaccttagttcttagcacagccataacttttcttattatgtaatcccaatgccttgccttcttaatactgatattttggggatgagagagtctctatggcctggaaagatcatttcctagcatttctcagatgtacctttagtgctatatctrgtgtccaactgggagtatccacccttagtaaagctgaaagcttgctttttcgtgtctacttatatgtaccctgcattaaaatatcatgctcacttatttttagacacattcttcatagagtgggaatgacattgtctctgccttacaggaaatgcagaccatctctttgtggaagactggccatataaatgtctattgcaaccatggcc

SEQ ID NO: 292015 - DNA, 571 bp, Homo sapiens
tgaagacttaattctcttatattcctacttccccttccctatattctcagtatattataagttatggctaagcattaatattttcattattgtgacaattcactgctcaaccaagtggtgtataacgagtataattccatttctccataactgtttttctgcgatgacgaccttatcgttttctttgcttgattttcttcaattttatcctaagtcttagagcattcttcaactctataaaaaaaggccactcagtgtaatttttcaaagaacccaaactatcaggaaggctaccttttctattaatttattttcctgaatgtattcctttgtaactcttcgttctcatgttccaattggaattgcttatttttgagaccaactgcataggtgctgccctgggaattccatttaaaatmatcctggtgattccctgttgacttgtgtctgtgttgactagctatttctgaaatcaaataactccctctatcttgactttcttccaatttttatgcaggccaaccttcccttgcttcctgagaacggtgcatgaatgtttgaaaaatattct

SEQ ID NO: 292016 - DNA, 629 bp, Homo sapiens
gccaaaaccacctaatctagtggtagaacttttttcttaactatgaatttagagagcatgagccactaatttttaccatttatcaaaaagaaaaatgttgatgaagccacacacacatttgtaaaagtcaaagcatagttgtgtttaactcagcccaaaagtatgatgctcaaaagtgtttcttgtaacaatttgtaaatgccaagaagttgtcattcccttcttcagagttaagatttttaagtactgtattttggatgtattaaatattatactatttcttgttcctgcaaaaaatatgttaaaatcatggaaattattccctagtattgtttatctatctcccttcatttcttccttcttttctttcttcttctytccttctttagtttcttctagaaaatgaataaagtatgacctttacccttaaaaattccaaagactagtaaaagtagatagttttttttattttttatcagtatttataatacaatgtgaaaggtgctctgtcataaactgtttgagaacactggggagagtataactcaccactcagaaaagtcagagaaagcttaacaagaagtagtaataattttgctaggacttgaagcccaaatagaagataacct

SEQ ID NO: 292017 - DNA, 629 bp, Homo sapiens
gccaaaaccacctaatctagtggtagaacttttttcttaactatgaatttagagagcatgagccactaatttttaccatttatcaaaaagaaaaatgttgatgaagccacacacacatttgtaaaagtcaaagcatagttgtgtttaactcagcccaaaagtatgatgctcaaaagtgtttcttgtaacaatttgtaaatgccaagaagttgtcattcccttcttcagagttaagatttttaagtactgtattttggatgtattaaatattatactatttcttgttcctgcaaaaaatatgttaaaatcatggaaattattccctagtattgtttatctatctcccttcatttcttccttcttttctttcttcttctctccttctttagtttcttctagaaaatgaatraagtatgacctttacccttaaaaattccaaagactagtaaaagtagatagttttttttattttttatcagtatttataatacaatgtgaaaggtgctctgtcataaactgtttgagaacactggggagagtataactcaccactcagaaaagtcagagaaagcttaacaagaagtagtaataattttgctaggacttgaagcccaaatagaagataacct

SEQ ID NO: 292018 - DNA, 579 bp, Homo sapiens
cattttcacagtgtaaacacattcatgtaactgccaccctggtccagaaatagaaaattccaagtattccagaagccctatcctgtgctctttctcagtcattatatactatctccctcaagtgtaaccactatcatgacttttgtccatttatgacccttacataaatggaaaattacagtatgtattcttttctggttggtatatctgtttaacattatatttgtgaaactaatccatgctgttttatatatagttcattcattttcagtgtatgttattccattagatgaatatactacaatttatgtattaattctactgccaataggcatttggattatttctggcttggagtttccagtaattttgtcatgaaaattcttgtacatgtgtgcctacgtgtatatgcattaagtagggcataaaagtaagtaggattactatgtcatattgtgtgtgtacattcacccttggaarctaatgaaaagcaagtttcttaagtaacccaatttactttcctacaagcagtatatttgtgttccaattaactcatatgcttagtaacacgatattatc

SEQ ID NO: 292019 - DNA, 579 bp, Homo sapiens
cattttcacagtgtaaacacattcatgtaactgccaccctggtccagaaatagaaaattccaagtattccagaagccctatcctgtgctctttctcagtcattatatactatctccctcaagtgtaaccactatcatgacttttgtccatttatgacccttacataaatggaaaattacagtatgtattcttttctggttggtatatctgtttaacattatatttgtgaaactaatccatgctgttttatatatagttcattcattttcagtgtatgttattccattagatgaatatactacaatttatgtattaattctactgccaataggcatttggattatttctggcttggagtttccagtaattttgtcatgaaaattcttgtacatgtgtgcctacgtgtatatgcattaagtagggcataaaagtaagtaggattactatgtcatattgtgtgtgtacattcacccttggaagctaatgaaaagcaagtttcttaagtaayccaatttactttcctacaagcagtatatttgtgttccaattaactcatatgcttagtaacacgatattatc

SEQ ID NO: 292020 - DNA, 545 bp, Homo sapiens
atcctagaacacatgatgtctagaaaagactatatctagtatatatgacatgtagtaaacagaaaagaaacggataaataagaaaatcccataaagtgtaaggaatctagtaataggagatgtttggaaaacaacaaagggcattaaaatattaccagttaattccagtttctgcatgagtgsctgtatgtaactggcaaaaggaaaatcatttctactcctgttcacttgtgtccgtaggaatacaatctgcaacattcatgctgtggtaaactctataaaacaaatacagtttctccaacaaattgagaaaaaaaataggaggaaacctatagattaaagaagattttaaaagatcaacaattgcaacatatgcacattatgtagatcctgattgagactgtaagaaaacatttatgagacaaccatacagatttgaatctttacttgataagttttcaggtgtgacactatattgttttaaataatccctacattttagagtagggatttgctgaagaatttgctgattaaatcatgtgaaa

SEQ ID NO: 292021 - DNA, 346 bp, Homo sapiens
gtccttacatttcggccaggcgcggtggctcacacctgtaatcccagcagtttgggaggccaaggcagatggatcacctgaggtcaggagttcaagaccagcctgatcaatatggtgaaatcctgtccctactaaaaatgcgaaaaaataattaaccaggcctggtggcgggcacctgtagtcccagctactcgtgagactgagacaggaaaatcgcttgaatccgggaggtggaggttgcagtgagctgagattgcgccactacattccagtctgggtgacagaaagagactccagctcamcaaaaaaaaaaaaaaaaagaaagaaacaaagaaaaagaaagtcc

SEQ ID NO: 292022 - DNA, 533 bp, Homo sapiens
gcatagaaaaggaatattttctatggctggagaatttgaggccaaattatttaggcaaacaaagcaacatggaaaggccttagtgtggtttagggcagttgaaactgagaaagttctatcttattacaatagcaaagagttacaaggtttttcatatacaactagagttgtcaatttaacttctctaactcctctataactccattgctattgcccacattgtaaattccagactactacctacraccttgacgattattctgcaactccatttcacccctccccttctatgctttgctttgtaattccctgagtaagccctgactttgcttattttcaagtctgtctggctagatggtgtgctcttggaagtctttctacttgataaccttggaaatttccgtttagcccttgagacataagtggtgaattaatcagttaaataactcatgagaggttttctgtctaggacatttctgtacaatttcaaaatgcctggaatatatataaatattcatattgatatgaaccgc

SEQ ID NO: 292023 - DNA, 532 bp, Homo sapiens
aaactccatcccccacctcccccccaacaaaaaaagctattccatgtcttaaaggtgatttaacatactcctactctaatctaagatacccagtaattttaaaaattgtttcatatgccgggtgtggtggctcacgcctgtaatcccaaccatttgggaggccaaggtgggcagatcacctgagaccagccagtagttggagaccagcctggccaccatggtgaaaccccatctctattaaaaatacaaaaatcagcctggtgtggtggtgggcacyggtaatcccagctactagggaggctgaggaacgagaatcgcttgaacctgggaggcgaaggttgcagagagctgagatggtgccactgcactccagcctgggccacagagtgagactccatctcaaaaaaaaaaaaaaggtttcatataatttttcctgcctctaccaatcccttattagtataagattaagtgagatattgcatgtagaagttaaaaatctaaacatctaaatagatgtaaagattacattttt

SEQ ID NO: 292024 - DNA, 269 bp, Homo sapiens
tcctagacattttttgacaaaattgttttattaaaaattttatttttctcggtggtatatgatttttgtgaaagcaagcttatgttcacagaaatatgggcataaagtattatgctttgtagttatgtttatttcagcaagggtaaaatacattaggcctaaagtatctrtataatgtgattattagatttccaagtaaaaagattctgatgttatgttagagagcccaatgtggatttcctagaatttcatgtgaggcattgctctaa

SEQ ID NO: 292025 - DNA, 369 bp, Homo sapiens
tacaacaaccaatgcattcctgcccactaatatcccatcccagttcaccatcagtgaaagttttaacaattacttgccacagcatgttatgtgatatccagatgccacctatcactggttatggagtccccattacatggtgatcagtggataatccactccaaaatttcattttagagttaactacctcaaaccactttgaaaactatytcagatgtaagaagttccctgattaagaaagtcagaggtgaaatttattttggggagttctcagcatcaacacctgtgaaagaatgagcaaagcaggattagactgagggagaagcacagccatgatgcaccgcaattgtaacctctgccaccaccaaa

SEQ ID NO: 292026 - DNA, 1238 bp, Homo sapiens
aagtgacagccagccggctcttagtcttgggagagagcccagacaagatcagtagagctgcctcactacccctcagttgaccacaggcacataaatgagtccagaggaggtcagctaaatcccacggacctgtgagctaaataaaatgttattgctttttgccactaagattttgtgggtggttgttatgcaacattattgcagcaaaagcaactgatgtatctataaggayattcggcacattcacacccagccctttcccagtttgtcactaacctcttaagtatatttacatatttttaaatatataggcttatacattttcatatcaacttgtggtgaaataagaaatatatttggtgtttgtccccagttcctggcacagagctgttaaaaccattggaacttcctaagggataaggttgataggaatgtcttttgttctagtaaaggaactcttggcaggcccctagatagcttcaggatgagggctagttgccagaaagaccaagccttaattagaagcttggaattttcagtcctacccccctccctaccacccacccctccatgccaacctttggggaagagagagagatggagagttagttaataaacaatcaawtatgaactttaattgtttcagatatgaagtttacttccgggggatatagtaataatctctaaaatccaaatgttttataagacacttttataaaaataacagttcaaaagaaacatttgcaaaataattattagttcttatacaaatcttcagattaaaaagaagacaataaatacttttgttgaaatcattgatttgtctcttaatttaaactaactttatagaaaacaaaaatatcagctatgtaggagcactaacattttattcccattaatcagcagagtttctttcaccaagagtacaagggactataattttaagactaggtgttggaatttcattagagagacaaaacaaacataaagagaaaatatwtagggaaagagtaaaatgtgattataaacaaatgcaatatgtgcatataatattttacaactattttttgaaggctacctaatctgtctaattgatatatcaggtgattcatatgagcgttcaacactattctaattcttagtcacctgtatgctggttggagctatggcacagtatactgatatccttagctatttgggtatactgatatccttagctattaagtatgcacaaagcc

SEQ ID NO: 292027 - DNA, 570 bp, Homo sapiens
gtacattggtgaaatgacaccccattcaataaataatgctgggaatactgaatatccatatgcagaagcatgaaactggamccctttcaccataaacatgaatcaattgaaacagaaaaaaaagacctaaacgtaagacctgatattgtaaaattattaaaaaaaaaataggaggaatgcttcagaacattgatctagggaaaagattttatgattaagactttatctccgtctcaaaaaaaaaaagtataagcaacaaaagcaaaagtaaacaaaaatcactattttaaaataaaaatcttctatacatcaaaggaaacaatgaataaaatgaagacacaacctagagaatgggaagaaacgatttacaaattatttatcttgcaataatacacaaggaactcaaacagctcaacagaaaaaaaaatccattgaaagtgggcaaaagaactgtatagacatttctcaaaagaagacacaaatggccaagaaatacgtgaaacaattactcaacatcactaataattagagaaatgcaaatcaaaaccacaatgaaatatcatctcactc

SEQ ID NO: 292028 - DNA, 631 bp, Homo sapiens
aaaagcaaaagtaaacaaaaatcactattttaaaataaaaatcttctatacatcaaaggaaacaatgaataaaatgaagacacaacctagagaatgggaagaaacgatttacaaattatttatcttgcaataatacacaaggaactcaaacagctcaacagaaaaaaaaatccattgaaagtgggcaaaagaactgtatagacatttctcaaaagaagacacaaatggccaagaaatacgtgaaacaattactcaacatcactaataattagagaaatgcaaatcaaaaccacaatgaaatatcatctcactctggttagaatggctattacaaaaaattaaaaacaactaaataacaaatattggtgaggatgtgaagaaaaaggaactcttacacatcattcatggaaatgtaaattagtatagccattatggaaaatagtatgcaggtttctcaaaaaactaaaaaatccaatccagcaatttcactactgggtatttatccaaagtaaagtaatcygtatattaaagagatacctgttcccccacatttattgcagaactgttcacaatagcaaagatttggaatcaacataagcatccatgaatggatgaatgaagaaaatatggc

SEQ ID NO: 292029 - DNA, 552 bp, Homo sapiens
ttccttttaagatgtgatgtacatgatgaagcactcaaaattttctctggaggtgtttgctttgtcagggctgattccagtggcctcattggctctactaagtggtggattcatttatttatattgatataamgccttcattcatagttcaaggatcttagatccttagctcatccttaattgtggtgataattttgcaacctttctaaaaacagacaagatatttttaattatacagtaatggaaacataatgaagtaattttctgtaattttggattttatcacttatttgtcactgcccatgtttctctttctgagatgactgttttaggatgcatttatatacgtatttacttattacagaagggatgtaagacagctaacagagaatgcataaaatatagcaagataatacaaatgcttaatgagaataaaagaacaagagaaatggaggaagtaaggcaaataaataactagcacagagatctacaattaaatctctagggtaagcaagctttgtcatatccatgggttaaaaggaggtcctggta

SEQ ID NO: 292030 - DNA, 546 bp, Homo sapiens
gagagctgccttgtcctttcaactcttctgccatgagaggacacagcattcacccctttcaccatgtgaggatacaacagcaaggtgccatctgggaagcagagagcagcctcattagacactgaatttattggtgccttgatcttggacttcccagcctctagaatggtaagcaatacatttytattgtttataaattgctaagtctaaggtattttattagaacagtgggaatcaactaagttgttatcaggaacagaatatttataaaacagtattccaaatttacaataatattaatgaagagatgacactggaaattcttaaggtggttttaaaactcaagatgtagcaaaactaagcagttctattatagatagaaagattttgaatatcaattttcctaatgtaagaataatcagtgagagtgatcagttagatcaattgcctgcataatttaatatagccaaattgctgataaatggaacttctatcaaatggtttaatctggctgtacaacacttgtgctatttctgtatatgtctg

SEQ ID NO: 292031 - DNA, 603 bp, Homo sapiens
tttttcctgccttaatgcaaaacaatattaaatatttttcttgatcctaaatcagttgtatagtagtataaaaccatgtgattctgtggtaaatctttttattataatttttacttaatatattttaaagcaaactctgctttgtaaaattgtgataattacaatcttgtatgagtcaaattagatgtcctttatattgactaggatattacctaaataaactcaaaaagtacatttcttttaaataaaactttaataaaaataattagtgtattaattaaaatacatctcagtttctatggtttcgtacccaaggattgaattacttcttcttgaaagtaattttaaatgtctgtaaatgtttttaagagcataaagatgtgaaaatatatagatcaaattgttaataatagttactctcarggattaatattgtaagaaggtgtgaactcaatgcagattattaactttatacttctgaattgtttggcttgttaaaataaggaataattacttaatttagaagatcaaatgcagtgaaataagcacatattaatagataaaaataattataagccaaatcattcaatggaatgttgtagt

SEQ ID NO: 292032 - DNA, 452 bp, Homo sapiens
aaacgacaaaggatgccataggtaagttagtcagagcctcaatcaatttctgttattcttccctctaagttaaatatgggaaatatttactctataagaccaataaatgggagagaagtattatcraggatttgtttcaatagaatgaattgtgagtttatattaggtaattctaccactaatcttttgactattaacacttctatcacagccctgtatcctgggtggaatgtgattgcatgattaagcttgtttgtaataggttaacattaataattaaaaaaaaaaaaaaaacaggtgcagtggctcatgactgtaatcccagcactttgggaagccgaggtgggaggatcaccgaagccccatagtttgagaccagcctgggcaacatagtgagacctcattctctacaaaagttaaaaaaaattagctgggtgtggtggcgcatgcct

SEQ ID NO: 292033 - DNA, 494 bp, Homo sapiens
aggttaacattaataattaaaaaaaaaaaaaaaacaggtgcagtggctcatgactgtaatcccagcactttgggaagccgaggtgggaggatcaccgaagccccatagtttgagaccagcctgggcaacatagtgagacctcattctctacaaaagttaaaaaaaattagctgggtgtggtggygcatgcctgtggtccccggtatttgggatgctgaggtgggaagatcactttaagtctgggaggtcaaggctgcagtaagctgtaatcatgccattgcactccagtctgggcaacagagcaagaccttgtctcaaaaaataataaataaataaataaataaataaataaataaataaataaataatttcatgagttcttggggtcctgaaccttcattactgtgactagatctttgaaattgctacttgctacacaatatttctcctaatatttcagttacatcattaacattcactcatacattagatat

SEQ ID NO: 292034 - DNA, 570 bp, Homo sapiens
tcctgcactttcagcataccgtatacacacaagccttgcttttgtgcaaatcatggtgcctgctttaactgtcttacctacttacagttgtaatcttttccagaattgctttctggctctaaaagtattaactgttaaatttcctgtcttagagtaaatgttgtttctaccactttattcttagaacttagaacttaacaaagattacaaaatgttcctgggtgtcacctttcataataatgcatataaagtcattgaytacaaatttttacctgaaggcctgtgaaggcagttctacagagataattataaaataaaaagattaaaaggtgagtaaaaatgatttttgtaaattttatatattgagagatttcctcccttaacatacttcatttattttattttgttttatttatttattttttttgagacggagtcttgctcttgttgcccaggctggagcacagtggcacgatcttggctcactgcaaactccgcctcccaggttcaaatgattctcctgcctcagcctcctgagtagctgggattacaggctcctgccaccacacc

SEQ ID NO: 292035 - DNA, 558 bp, Homo sapiens
tttaaaattaaaagtgtatatatattataatttttgtcctaactcttctttttcacctaaaagttggatatattctgtgtcctacacaccatgacaaggcagtctgtcaaaattttcttgattatataagtgtctgcttggttctactgggctttggattaaaattatattaattttagagataaatctgagccaagttttacctttataatattgactcttctcatccagggcaatggtattcaaagttttttgtacaataatcactcagtaagcatttatcaaaggaatacataaatgtcacccaattattttttgcaatgctcttaaaatgcrtcttaaacatttattttcaaggttattccaagttattttgtacttctggtaaatgagatcattttcctcttaaagaattttgtttagttgtcactggtagaaacggatgctgaacaggacttttttctttgcccaacaattgaaaactggtgaacgacctggaaacacaggaggctttaagtatcttttattctaaagagaatgtgaaagaacagggagcag

SEQ ID NO: 292036 - DNA, 1101 bp, Homo sapiens
tttaaaattaaaagtgtatatatattataatttttgtcctaactcttctttttcacctaaaagttggatatattctgtgtcctacacaccatgacaaggcagtctgtcaaaattttcttgattatataagtgtctgcttggttctactgggctttggattaaaattatattaattttagagataaatctgagccaagttttacctttataatattgactcttctcatccagggcaatggtattcaaagttttttgtacaataatcactcagtaagcatttatcaaaggaatacataaatgtcacccaattattttttgcaatgctcttaaaatgcatcttaaacatttattttcaaggttattccaagttattttgtacttctggtaaatgagatcattttcctcttaaagaattttgtttagttgtcactggtagaaacggatgctgaacaggacttttttctttgcccaacaattgaaaactggtgaaygacctggaaacacaggaggctttaagtatcttttattctaaagagaatgtgaaagaacagggagcagwtatttagtgccttgcacatataawtgttccatatatgtgatactgaactgaactttgggaaaatgtaaataaaataaatctgtgcatgcatgtatgtgtgtatatccagatagtatatatgtgtgtgtgcatatatatatatatataatattttctatgatatagaatttcatatacaatatgtaaaatagacaatgttatttctttataatattcacacacaggtataaaaacttgcataaactagctatgcaatgtttgctttttgagtattaggcaaaaaaattattgtggataagataccactttgcaaagtatgttattgctctatatgagtacatgaccaagactgctttaagtttttgtttcaagttcacaaacagacaatggacctttctgcctatgatagaaaaccggtaaataaaggaaaacctcaagccaaggctttctgtggtagacggtgctaaaatgaaaacctgaccactctttgtcaatccaatgttacttattctctgccttgtatgagagcttctgataattgc

SEQ ID NO: 292037 - DNA, 1165 bp, Homo sapiens
aattgttcattcttctcaggatttcatttgtcagtccttcattgtgtttcttatccttatattctaagatctgataatggaaataaatttctggaatataatccatttgtaatgtggtgttctctataattttatattgaaacacatttyaatataaacaactcaaatgatgtaataataaaaaactgataatgtgtaattcttactgtagactatttttgtttaatgtttacaaagtttaggagcatgtcagaggaaaatacttcctccagttgggaactcagctttgggtgatactgacccagctttcaacatcagcaccattatttttagtgtatgaacatggataagctccttaactctctctgtcttggagtatctgtcaatacaatgtagataatacctactttacagggttggatgctatataaacagcaccttgcctagtacttgacacttacttgtcacagaataagtcagagctcttattacctgatgagaaattcagcagaaaattcaataggaatacagtagatggcttctgcttcatttttactcacctgactatttcctcccattacaacaatwttcatgttttacttttataattaaatgtatatttgtgcatgtatcatagtatcaaataaaaggctttttccaaaaaatctattatctaatttaaggttcatatcaacttttgtgaaacacaaccacacattaatacctcagttttacaaatgagaaaacaagtcaaaagatgctccacagaatgtaactaaaatgcttcggcaccagacaagtgacagctgcccacatttgccaaacacctcccacattagatggtgcattgtgtctctcagtaaacgctcaatggcatgaataaaagacagattgtttctagagaccagtaatcttaacatctaatttgaggcwctttctcctcctacaccttgtacaggtgagcatttcgctagacattgctcaataggtatgtgctaaagtctcttggccagcaatcctagaatagaatgggctacaatgagtctagaataaaatgggctggctcaaccagctatagccactgattttgatgcaagtattttgaaaaagatttttttacccttaagagaatattttataaaattgaatgatacagcttcttcta

SEQ ID NO: 292038 - DNA, 637 bp, Homo sapiens
gtcagtaaacatcatagatttccttaagacataaatggaagaagaaaaaaattaaaattgagacagattcttgatagcgaaatcaacatttttaatattaaaaatctaaatgtaatctagtaaagagtcattctttcaatcaaaattgtttattgaggagcactgatttgtgccaagggatatgtgcattgctgttgaacaatgtatacttgtttgctaaattaaaacagcattcatatagaaaataaaaagaaattatggctgtttaaaaagtagattattcaaaaaggtggaggttcaatccagttattccaagatacatgtaaatgttactaagagaacagttttccttgatgaagattccttaatgtcctgtgtaacatttcccccttagtattacaggtatrtatccctcatttcactgtgagtttcctgatggctagaatgttgtcttattctcatttttatgtctaattaaacagtgcttggcatacactgttgagtattagaaaagaaaattcttctttgttaacacgagtagtaggctttcttttaaggatgttcagtacttcatcagtcactagtatttattgaatacctactatggcctcagcattgtgcacaaacatctcagtat

SEQ ID NO: 292039 - DNA, 637 bp, Homo sapiens
gtcagtaaacatcatagatttccttaagacataaatggaagaagaaaaaaattaaaattgagacagattcttgatagcgaaatcaacatttttaatattaaaaatctaaatgtaatctagtaaagagtcattctttcaatcaaaattgtttattgaggagcactgatttgtgccaagggatatgtgcattgctgttgaacaatgtatacttgtttgctaaattaaaacagcattcatatagaaaataaaaagaaattatggctgtttaaaaagtagattattcaaaaaggtggaggttcaatccagttattccaagatacatgtaaatgttactaagagaacagttttccttgatgaagattccttaatgtcctgtgtaacatttcccccttagtattacaggtatatatccctcatttcactgtgagtttcctgatggctagaatgttgtcttattctcatttttatgtctaattaaacagtgcttggcatacactgttgagtattagaaaagaaaattcttctttgttaacacgagtagtaggctttcttttaaggatgttcagtacttcatcaktcactagtatttattgaatacctactatggcctcagcattgtgcacaaacatctcagtat

SEQ ID NO: 292040 - DNA, 603 bp, Homo sapiens
gagggtacaaattatctttagcatctgctgctctgcttccctagtcatttagtttctagcgtcggattactaaagttatagtttgttctatagatcactgcatcacctgtgatggaaaaataaatattccttggataactttctagttctctgctttacgttgaataatctggtcaatctgtcttgaacactgtgctatttttggacattttctgtcaaaaaatgttctctctgtcgtttatctgtcacgacaaagaagtaagatcatgccccccaatgtcagtggcatttatgaaacatgttggatcatttactttccttttttcctatagggaatgaaactgcctcttaataagacttgatggaacttgatttctgtgaaatcctcaarcattataaattattatacatcatattcctattaaagaactctgataaaattagtgttcattttgtattcctttattttgcctcaaattctctttgttgcaaatccttattctccccattgcaccatttttgaactcttgattatctctagacctatttatgttttaatagctaaagcctttcctaggcaagtatttcaataacaaaatcaca

SEQ ID NO: 292041 - DNA, 551 bp, Homo sapiens
aaaagatactaggtgtaatacttataacattgtgttgccttctaaatctttattgaagagtccttaggtctagctacacaatttgatcatttaaatgataaaggtttcttcagtttttatgaccaaatgcttatttgtagtttcactactgaaactcatattttgaaaaaaaaatttctgaaaaaagtattatgtaataattcattttgttcttttattaaaacaaagacttagcagtcatagcttataatttgtatgtggttgccaagattactgtagtgaattgagatatttaaaggccagtgcaaaacaacagatcaaattrtcccttgaaactctttcaagaataaatgacagacttccatatggtaatttctgtctagtaaaccaaaatccctaagacaggaagtgtgttctacaatatcagtcagggagtgttatttataatgattgaaaacattaagctcctttcaaactcttagcctattacattataatgagatttgtcgtagaattagacagggatagatttcccttaagacaattgagca

SEQ ID NO: 292042 - DNA, 551 bp, Homo sapiens
aaaagatactaggtgtaatacttataacattgtgttgccttctaaatctttattgaagagtccttaggtctagctacacaatttgatcatttaaatgataaaggtttcttcagtttttatgaccaaatgcttatttgtagtttcactactgaaactcatattttgaaaaaaaaatttctgaaaaaagtattatgtaataattcattttgttcttttattaaaacaaagacttagcagtcatagcttataatttgtatgtggttgccaagattactgtagtgaattgagatatttaaaggccagtgcaaaacaacagatcaaattatcccttgaaactctttcaagaataaatgacagacttccatatggtaatttctgtctagtaaaccaaaatccctargacaggaagtgtgttctacaatatcagtcagggagtgttatttataatgattgaaaacattaagctcctttcaaactcttagcctattacattataatgagatttgtcgtagaattagacagggatagatttcccttaagacaattgagca

SEQ ID NO: 292043 - DNA, 529 bp, Homo sapiens
attttcaactcaaacatttttttcatgactttccctctaactggaatgcaacttttttttatctcttccatttgaaaacttgtacatcatttgttagtcatttctagtattccaaatataatttactggtgctgtcaaactaaatgagatctagtaccttttatgacaattatttaaccattgcttatgatatgatccaacatatatttgtgttaattggtaaaaactctttgatgagacagaagagtgtttagaaagacacatagacatctgtccacacccatttattcagtttagaaaattaagaartggaacagctgatatttctataaaatgcatgaaaactgagctgagaagatgtgcttggacagagcatagaaggtaagcaataattaagatacagaaaaggaggccatcagagagagtgagaagaagcagacacatcctacatctaaattctttattgctatataaggtaaataaaatctacataagtatagtctagccaaaatatgcagctggcaaaatg

SEQ ID NO: 292044 - DNA, 565 bp, Homo sapiens
gaagaaaggaaataataaacagaggagagattaatgaagtaaataacagaaaacaacataaaaattaacaaaattagtgttttttaaaaagataaaattgacaaaactttagctagaatagtcaagaaaattaatgagcaggaatcaaatcaagaaaattacaaatgaaagagaagacgtcaaaattgatatcactgaaatacaaaggatcataaaagaatcctatggacaattacgcrccaaaaagtttaagaactcaaaaaataaaataacttctagaaacataaaatgtactatgtttgaaccataaagaaaaagaaaatcagaacagaccttttataagtaaagaaattgaatatgcaatttaaaaaaacctctaaaatacagattatttcaggctaagatgaattaaagataaattatataaatatttaaataagaattaatgccaattctaatcaccttttccccccaaaaaagtgaggaacacttccaaactcattttatgagaccagtccctgatataaaagccagggacattataagaaaataaaattacaggtca

SEQ ID NO: 292045 - DNA, 565 bp, Homo sapiens
gaagaaaggaaataataaacagaggagagattaatgaagtaaataacagaaaacaacataaaaattaacaaaattagtgttttttaaaaagataaaattgacaaaactttagctagaatagtcaagaaaattaatgagcaggaatcaaatcaagaaaattacaaatgaaagagaagacgtcaaaattgatatcactgaaatacaaaggatcataaaagaatcctatggacaattacgcaccaaaaagtttaagaactcaaaaaataaaataacttctagaaacataaaatgtactatgtttgaaccataaagaaaaagaaaatcasaacagaccttttataagtaaagaaattgaatatgcaatttaaaaaaacctctaaaatacagattatttcaggctaagatgaattaaagataaattatataaatatttaaataagaattaatgccaattctaatcaccttttccccccaaaaaagtgaggaacacttccaaactcattttatgagaccagtccctgatataaaagccagggacattataagaaaataaaattacaggtca

SEQ ID NO: 292046 - DNA, 538 bp, Homo sapiens
tgatgggattagtgtccttataagaagtggaaggagaggcaaagagagcagtcgctaagctttgtgaggacacagaaaggaggtggctactgcaggccaagaagagggccctcaccagaaactgaatcagccagcacrttaatcttaaacttcccagccttcagagctgtgagaaagaaatgcccattgttcaaaccatccagtctatggtattttgttatggcagcctgagctgactaagacactgttagtgtctgcagagtccacagttcaaggtaagtatttttcctgttttgcctacagttcctcaaaggtttgagaaaagctttgggttgtatattattttcaataattaaatggcaatgtattttcttaggtagcattttgctagctatctctataagtggtatattattaatgtattgttttattccatatacattttctgagtatttatttgatgtcagtaatacttgtaggaagtggacatatagcagtacaaaaaaaaagggtttcctgttttgatccaatttgcatt

SEQ ID NO: 292047 - DNA, 564 bp, Homo sapiens
atattatagaagcgagaaaaaaagactgttattcaattaagacatgcatcacatcatttcttacttctcaaggaacaacatgttttatgacttgagattatctgtctagtggccttgcagctgcacagctagagaaacagagtcttcacaatgccygagaaagggagagataaggctcactagccacaggaaaacagacttcagctctttctcttcctcgggggaattggtttttcttacatacaactgagtttttgcttacacattctttaacttcttttaattcctgttccaacctcaccacaagtgcctcattcctgtgagtctctgagtctttgggtgcctgggacctcccttcccacattcagggacatcaaggtgtcctggggagcagtaaggggaattccaccacaacaagcacctacccaatgtgtgctctttgtttccccacaggcacagagcaacccaccataataagtgcctggccagggacatgtatatatactatctggtctgacactcacctccctcaccaagagacacctagtggtttcacccagacaa

SEQ ID NO: 292048 - DNA, 524 bp, Homo sapiens
actttgtcaaacaaagcaaatgtaaataactaatatcttctcactgaaataattttctagagaatgaaatgagtatatcaagcattattcatattagtactaatagtaactttttccattttgtgctcttcaataaatagacatctatagatttaagtttgttaggcttccatagatttaagtaccttagaaagagtattatcatcttggtttatttgcagttactattttcaaaaacaaaagtgtaataaatttcaaaattaatattttagctgttactgatatgcatacaacatgtagatgttaacatcaggaagtgttacttgttttaaaaaatcaggtgggtttgggtrtatgtgtgtgtctgagagacagtaagagagagatacactattcaagaattctcacatctcaacaaaaagaagacaagtaaatgaagaaaatggttaacccaggttgaataaaccattcaccaaaaaaaaaagcatggctaataaatactttaaaatattttagtagtttta

SEQ ID NO: 292049 - DNA, 622 bp, Homo sapiens
ataaatgggttaagggatggggccttagtcgataattagattatgaggatagagctcttatgaatgagactgtagtctctataaatgaagccagaggaaccttgtttgccccttccactacaggagaacatagagagaagattcatctatgaactagaaaatgggccttactagacaaggaatgctccagggccttgatcttggacttgtcggctgccagaactgtgagaaataaaatttgttgtttataagctaccctatctacatatagtattttatcctataaatacatattatttaatataaatgaaatatattatagaagcctgagctgactgaagcacttgtcatattccttattttacatctaaattacactagtaggtgtgccgtggtatctcattataattttaattcacatttccctagtgactgatgacattgaaaagtcattgtctttccatctgcttatcataggatagccacttttaaaatattgtgtcayaattctttgcaactagtattttgtattgtatttttcttattgatttgtcaaatgtgttttcatatttttgatataagtccatggttgcatatatatatatatatatatatatatatg

SEQ ID NO: 292050 - DNA, 558 bp, Homo sapiens
agttaaatatataaggctcattcagaagggaaaatcagaaataaattattttagtgtgtaaaaaaggtaaatcattattaaaacttttccttagtaatgtgaacttgatgcagttgttatgcaacagggcccccttttcaagtgcaataagaggacaaagtattatctattgtgattaacacattttaccagagaaccaaatcattaggatcacttaagaaaaaacatcagtgagatatggcaggcaggatgttgacaaataatgttaatatttctcacatgctgttattaactaaaagtagaaagtgatttcaacttgaaaaattttattgaaaataaccttaagctataatatagcttaattcttaattagtacgttgattcttaatattagtacgttgataactgatacaaattacttaaaagatagaagtaaaattatcacatctggattttaaatcaattttctaaaattaaaatrcatgcaaaaatattgtgctaaatattgtaatggaattcttcatatgtgtaaaattttaaaaaaagtagactaaatgt

SEQ ID NO: 292051 - DNA, 437 bp, Homo sapiens
ccaacaaaactttctacctcataaatgatggactgtgcatagcgaattctttccaaagagtacagtatggaaaataagaaaaaaatgataactttatgcttgagacatctcacaaacactagctcaactagctgatcaagtcaatgtacacagtaatagctcatgttgatactatctacccttgataaattgtgatggtaatggcaatttatgtcagtgatcttcctctacaagacccataaactctagtctaataatgagaaaccaccctaaataaaccctaattgaaagrtattcttcaaagtacaacatccgtatccttcaaagcgttaaggttatcaaaacttttaatagaccgaaaaatttttacatttgcaggaagcccaagtaacatttgaattttgtgagtgttataggttggcataacagagaagctt

SEQ ID NO: 292052 - DNA, 667 bp, Homo sapiens
atttgaattttgtgagtgttataggttggcataacagagaagcttggattcagaaagataaaaatatacagtgtagctgagtctatcggcttagataatgtctgcaccaaaacctgcatgcttacagcaaatagatttagaggatttcggataggcaatgtttcttaggcaaaatggaggcttaaattttacttctaataacttgatgcgtggctttcttcttcaatttctcttaaacagtgttgaaaatgactttttctttattcaaaggtcattacataaaccaagtaatgagtaaaataatgcattggaggctttaaactgctacaccaatagtgtatactttttgagctcttattatttattattattatacaatatttattgaaaattttggctgccrtcatcctgatatcttttatattttttccaagatagttctgacttcagcctagctgtttctctagggataaaatacagtatatcggcaggcatctagaagactattgaagaagttatccctcaatggatgcctttcttcactaacttaattatatttctataagtataaagttctggtataaaataaatggcttattaattttattttgaaaactttctgcaattttacaaaatccttaataataaaagtacttttttaaaaatc

SEQ ID NO: 292053 - DNA, 578 bp, Homo sapiens
attttgagttttttgtcaggaaatttacaaatttttctttggcgtcagacactggagcttttttttttgtcttttttttaacttttacttaagttcaggggtacaagtgcaggtttgttacataaaggtaaacgtaccatgggggtttcttgtacaagattatttmatctcccaggtattaagcctagtacccattagttatttttcctaatcctctccgttctcccatcctccacactccagaaggccccatgtgttgttgccctctatgtgttcatgtgttctcatcattcagctcccacttataagtaagaacatgcaataaaccatgcactcactgctgtctttagaactgatgaaacagtcaccatcagtctttactgacaggcacaggtagagattctgaggttctgttagaccttttatatgaatttatccactttactctcatattcttttagcatgaaaatcttgggattgtatcactgtcttcttccaatcccacaaagctgcacctggtgctgaaagccccccattaagttttcctaggttagtgacctgaagtgttaaagattatt

SEQ ID NO: 292054 - DNA, 578 bp, Homo sapiens
attttgagttttttgtcaggaaatttacaaatttttctttggcgtcagacactggagcttttttttttgtcttttttttaacttttacttaagttcaggggtacaagtgcaggtttgttacataaaggtaaacgtaccatgggggtttcttgtacaagattatttaatctcccaggtattaagcctagtacccattagttatttttcctaatcctctccgttctcccatcctccacactccagaaggccccatgtgttgttgccctctatgtgttcatgtgttctcatcattcagctcccacttataagtaagaacatgcaataaaccatgcactcactgctgtctttagaactgatgaaacagtcaccatcagtctttactgacaggcacaggtagagattctgaggttctgttagaccttttatatgratttatccactttactctcatattcttttagcatgaaaatcttgggattgtatcactgtcttcttccaatcccacaaagctgcacctggtgctgaaagccccccattaagttttcctaggttagtgacctgaagtgttaaagattatt

SEQ ID NO: 292055 - DNA, 552 bp, Homo sapiens
attgtcaaagattacaagttattcatccagagtatactacaaatgaaaggttttattacagtcagattaggtaaagggatatactgcaacctgctttcaagaaaccacaatacagtcttggagaaaagaaacctaaacaatcattgtaaaacaatgtagtaaatatggagctataaatagcccaaattacaaggaaaattttagygtaagtcatgtctgagtttagattttaaaattagcagaaattaatgggaatgaaggaataaaaaagacatattccaatcatggggagagcatgagtaaagtgtcaatattatgcacacatgttactataaagaaataaatacccatgatctaaaatgagaagaagaaatcatcaagagataaggataaagagtgtagcatgtccaaagcaaattaatgatggtataatgtaatgtttaagagctcattaacattcaaatttaaagcattattttgccacttgtttctgggaaactttctgccattgaaagctccatgaaaaaaaagggaaaagatgtgaataaaagg

SEQ ID NO: 292056 - DNA, 552 bp, Homo sapiens
attgtcaaagattacaagttattcatccagagtatactacaaatgaaaggttttattacagtcagattaggtaaagggatatactgcaacctgctttcaagaaaccacaatacagtcttggagaaaagaaacctaaacaatcattgtaaaacaatgtagtaaatatggagctataaatagcccaaattacaaggaaaattttagtgtaagtcatgtctgagtttagattttaaaattagcagaaattaatgggaatgaaggaataaaaaagacatattccaatcatggggagagcrtgagtaaagtgtcaatattatgcacacatgttactataaagaaataaatacccatgatctaaaatgagaagaagaaatcatcaagagataaggataaagagtgtagcatgtccaaagcaaattaatgatggtataatgtaatgtttaagagctcattaacattcaaatttaaagcattattttgccacttgtttctgggaaactttctgccattgaaagctccatgaaaaaaaagggaaaagatgtgaataaaagg

SEQ ID NO: 292057 - DNA, 2241 bp, Homo sapiens
attgtcaaagattacaagttattcatccagagtatactacaaatgaaaggttttattacagtcagattaggtaaagggatatactgcaacctgctttcaagaaaccacaatacagtcttggagaaaagaaacctaaacaatcattgtaaaacaatgtagtaaatatggagctataaatagcccaaattacaaggaaaattttagtgtaagtcatgtctgagtttagattttaaaattagcagaaattaatgggaatgaaggaataaaaaagacatattccaatcatggggagagcatgagtaaagtgtcaatattatgcayacatgttactataaagaaataaatacccatgatctaaaatgagaagaagaaatcatcaagagataaggataaagagtgtagcatgtccaaagcaaattaatgatggtataatgtaatgtttaagagctcattaacattcaaatttaaagcattattttgccacttgtttctgggaaactttctgccattgaaagctccatgaaaaaaaagggaaaagatgtgaataaaaggwattgtcaaagattacaagttattcatccagagtatactacaaatgaaaggttttattacagtcagattaggtaaagggatatactgcaacctgctttcaagaaaccacaatacagtcttggagaaaagaaacctaaacaatcattgtaaaacaatgtagtaaatatggagctataaatagcccaaattacaaggaaaattttagtgtaagtcatgtctgagtttagattttaaaattagcagaaattaatgggaatgaaggaataaaaaagacatattccaatcatggggagagcatgagtaaagtgtcaatattatgcacacatgttactataaagaaataaatacccatgatctaaaatgagaagaagaaatcatcaagagataaggataaagagtgtagcatgtccaaagcaaattaatgatggtataatgtaatgtttaagagctcattaacattcaaatwtaaagcattattttgccacttgtttctgggaaactttctgccattgaaagctccatgaaaaaaaagggaaaagatgtgaataaaaggwacagtacgaaaaatttacgattgaaaatgagaagttaatgactaaattgcctgaggacaaagaagaactaatttgacagataagaaatttatcgtgttatcaaaaataaagcccttataacaatcaattatgcttatacaagttccttgaattttgtgawttggaaaatgacattgtattgctgtcataaaatgttaaacagaatataaaacacagaaaactgacatctgagtcaatacggagagaccccatgtcccccaggaaacatcctctaacattgaagacagcttaaattgggagcagaaagatgggatgagaaacaagttatctatcataatataactgattataatatatcttaataaatgtttgaaattattattataaaataaatttaaaataaattattacacttagaaatttttaaaatttccactaaaatggcagagtaagagagtaggagatgccagtcttatttcacacacacacacacacacacacacacacacacatatatatatgtatatatatatatgacataatagcacaggtagggctcaagggcccwacagtacgaaaaatttacgattgaaaatgagaagttaatgactaaattgcctgaggacaaagaagaactaatttgacagataagaaatttatcgtgttatcaaaaataaagcccttataacaatcaattatgcttatacaagttccttgaattttgtgatttggaaaatgacattgtattgctgtcataaaatgttaaacagaatataaaacacagaaaactgacatcwgagtcaatacggagagaccccatgtcccccaggaaacatcctctaacattgaagacagcttaaattgggagcagaaagatgggatgagaaacaagttatctatcataatataactgattataatatatcttaataaatgtttgaaattattattataaaataaatttaaaataaattattacacttagaaatttttaaaatttccactaaaatggcagagtaagagagtaggagatgccagtcttatttcacacacacacacacacacacacacacacacacatatatatatgtatatatatatatgacataatagcacaggtagggctcaagggccc

SEQ ID NO: 292058 - DNA, 567 bp, Homo sapiens
acagtacgaaaaatttacgattgaaaatgagaagttaatgactaaattgcctgaggacaaagaagaactaatttgacagataagaaatttatcgtgttatcaaaaataaagcccttataacaatcaattatgcttatacaagttccttgaattttgtgatttggaaaatgacattgtattgctgtcataaaatgttaaacagaatataaaacacagaaaactgacatctgagtcaatacggagagaccccatgtcccccaggaaacatcctctaacattgaagacagcttaaattgggagcagaaagatgggatgagaaacaagttatctatcataatataactgattataatatatcttaataaatgtttgaaattattattataaaataaatttaaaataaattattacayttagaaatttttaaaatttccactaaaatggcagagtaagagagtaggagatgccagtcttatttcacacacacacacacacacacacacacacacacatatatatatgtatatatatatatgacataatagcacaggtagggctcaagggccc

SEQ ID NO: 292059 - DNA, 555 bp, Homo sapiens
aaaaaaataattaaaagaaacaaagtttatgggatttatggaacaacatcaaaagagcacattttcaagctacagcaatttcagaagrgaagaaaaggaatacaggggtgaaaacttactgaaaaaaactaatatcagtaactttacaaatctggagaaaggtacaaatatccaggtacaactacagcagggtcaaagttcttcaagtagattcaatacaaacaagaatacacaaggacattttataatcaaatagtgaaaaaaaaagaaaaaagaaaaaaatgaaatcaaagacaaagagagaatcctgaaagcagcaaaagaaaagaagcatatcacacatgagagagttctagtaagaatggcaatagacttttcagcaggaaccttacaggccaggagacagtgggatgatatatttaaagtgctgaaagaaaaaaaaatcctgaccactaatatgttctatcacaaagcaatcattcagaaatggagagaaaaagactttcccaaacaagcaaaacctgagggaggttattacaaccacacctgtaataa

SEQ ID NO: 292060 - DNA, 1173 bp, Homo sapiens
aaaaaaataattaaaagaaacaaagtttatgggatttatggaacaacatcaaaagagcacattttcaagctacagcaatttcagaagggaagaaaaggaatacaggggtgaaaacttactgaaaaaaactaatatcagtaactttacaaatctggagaaaggtacaaatatccaggtacaactacagcagggtcaaagttcttcaagtagattcaatacaaacaagaatacacaaggacattttataatcaaatagtgaaaaaaaaagaaaaaagaaaaaaatraaatcaaagacaaagagagaatcctgaaagcagcaaaagaaaagaagcatatcacacatgagagagttctagtaagaatggcaatagacttttcagcaggaaccttacaggccaggagacagtgggatgatatatttaaagtgctgaaagaaaaaaaaatcctgaccactaatatgttctatcacaaagcaatcattcagaaatggagagaaaaagactttcccaaacaagcaaaacctgagggaggttattacaaccacacctgtaataawgatttcccacatataagtttgatttcatcattgatgtaagttttcagggcatcctctcaagcattctatgatttaatcctgaaaatagtccagggtgcaagcatgttactgttcctgtttttcagagatgggttaagtaacttgcccagtgccaaagaggagtaagtgttccctatttggatggaaattcgctctgctgtatcacaagggctctcatggggtttggtgtaagttgtctcttataataggtcagcatgggggtgaagtcattacagccattcttcatattgcccaggggactaatgtagggagaaaacaaggcagagacactgacattcaccagaggctgagcatgtgggctgcagcgacattagttgtaggagtttagttggtgtcttttaccattaccctcgatggtccttccactggctcaactcactgccttgtatttgttaggtttagtagtgcttgttatttctctgtgtcagtactgtgatggatatagagaagccaagctaagaggaatatttttgawataagatatatctaggcttgaaatcagccgtttactagctgtgtgagcttgggcaaatataatattttctaagccttaatat

SEQ ID NO: 292061 - DNA, 508 bp, Homo sapiens
gccctggctctccctgaggctcattttccattatgctgtctcttgtgttttctctgctcagacttactgatcatcttattgaacttcctgctcaccatgtttcaatcataggtgctttgttcatggtcgtatctctgcctggagtggtttttccatcccatcttctacctaaaccgcacctactcctcctgcagatcttagattaagccttccctgacctctacaactagttcaaatccttcttttataggctttcacattatcctgaacctctccttcatggcacatggkagagttgcaattttatatatacatacaatatttttattttatgtcagtctttcctgattagtctttctctgttttgctcgtcactgttttccagcacccagcacagtacctggcacttaatagatggtcaatgaatatttgtccagtgaatgagaatcctcaaggagaattcatgtttctggtctcaacctcctggcttcaagtgattctcctgcct

SEQ ID NO: 292062 - DNA, 508 bp, Homo sapiens
gccctggctctccctgaggctcattttccattatgctgtctcttgtgttttctctgctcagacttactgatcatcttattgaacttcctgctcaccatgtttcaatcataggtgctttgttcatggtcgtatctctgcctggagtggtttttccatcccatcttctacctaaaccgcacctactcctcctgcagatcttagattaagccttccctgacctctacaactagttcaaatccttcttttataggctttcacattatcctgaacctctccttcatggcacatgggagagttgcaattttatatatacatacaatatttttattttatgtcagtctttcctgattagtctttctctgttttgctcgtcactgttttccagcacccagcacagtacctggcacttaatagatggtcaatgaatatttgtccartgaatgagaatcctcaaggagaattcatgtttctggtctcaacctcctggcttcaagtgattctcctgcct

SEQ ID NO: 292063 - DNA, 588 bp, Homo sapiens
actatatgctaggcactgtattgcacactagggtacagcaggagcaagatagtcacagcaccttccctcatggacctatgatccataaggagagacaaacatttaaacaactccattcaccgttgcttgtttcgttaaaatggtagtaagggctacaaagaakggaggggtgctcaaagtgtgttacaggggaaccttactttgtaaggagaatcagggaagtcttctttgggaggaaatggtgaagttgaatcagagataattccttatattcattcccattttctatctagtcctgtgctttttgaatccctaggaaaagcagcctttctttcctctttctacacaaaagctactcattccttagttgtaacttatttcagtgagttgacggaaaaatatgacagttaaaagctcagatgcttaaatcagagaattgaagtcgaaacccagctccaccatctcttggcctggtgtctttatgcaagttatttacattgctaagccataatttgctcaaatgccaggtgaggattgtaatacattcctctcagaatcattctgggtgtgaagtacttagcaccgtgc

SEQ ID NO: 292064 - DNA, 548 bp, Homo sapiens
tcagtagtgccactgccctgagttgtctggattgggctgtagccagaaacctcaagtccaccatgccacggttccttgagtcaagtcctgttggctatagaccttcaggtgagctctgaatgttgaygtttcctcctcacccaggatttactgcatctgcaaagcactctgactgcctgccagggcctgagcctgtcttggaactctctatgcatgactggatacccagctaattcttaccaggcctcttctctgtgggacttgaccctaattcttatctattccttccctctggccttgccattggatgtggaatttccaagaactcatgtcatatttgtatcatcatgactctcatataggcagctccatatgtggcacccttactgtaaacctgatggtgagctcagccctctacatctacatgtgtttatattgaagtgtgtaggaaggggttgagagcacatttcactttttggagccagatacatttggtttcagagtgtgagcttccttatctttttttttttttaaggtaatatgtttct

SEQ ID NO: 292065 - DNA, 630 bp, Homo sapiens
catgatgggtggcatttgagcacagtttcaagcacagtggcatgtggcaaggggttccacatgaaggaatcatcatcatgaagagggtgggcttaggacttactcrggctctttccttgggtactactgtgactggagcttaggtaaatgtaataaaaataggtcaaaatataggtgtggccaaatcatggagaaactgaagagcagactagggagttggggatttgattctgtaagtagcggggagctattgaaagtctttgaggaggagagggccatgaatgataagacagccatccaggaagcatggtcctgcatcctgtgccaatgagatcaatgcagcaagggaggggcaaaagatgccactgaagaagttaccaccacagtcaggggagaaaaagatagatatgttaggggaggcagggcaggaaggagaccaatgatgtggactttcaatcctcagttttgtcatcagtaaaatgggggatctattattgtttctagggtttgagagttggtagacttaggcgatgaaaggaaaggatgcatcagaaatttttactaggtttgcagcctgagcatcatctttcttaatccctttttccttctggcgccccccccccttttttt

SEQ ID NO: 292066 - DNA, 1140 bp, Homo sapiens
catgatgggtggcatttgagcacagtttcaagcacagtggcatgtggcaaggggttccacatgaaggaatcatcatcatgaagagggtgggcttaggacttactcgggctctttccttgggtactactgtgactggagcttaggtaaatgtaataaaaataggtcaaaatataggtgtggccaaatcatggagaaactgaagagcagactagggagttggggatttgattctgtaagtagcggggagctattgaaagtctttgaggaggagagggccatgaatgataagacagccatccaggaagcatggtcctgcatcctgtgccaatgagatcaatgcagcaagggaggggcaaaagatgccactgaagaagttaccaccacagtcaggggagaaaaagatagatatgttaggggaggcaggkcaggaaggagaccaatgatgtggactttcaatcctcagttttgtcatcagtaaaatgggggatctattattgtttctagggtttgagagttggtagacttaggcgatgaaaggaaaggatgcatcagaaatttttactaggtttgcagcctgagcatcatctttcttaatccctttttccttctggcgcccccccccctttttttwttactgaaatctggtcaccctactgaattctattctattagtttgtttcctgattctgttgggttttatagatagataatcatataatctgctaatacgaaagttttgtctctcttctcctaatagtatgcttttatttttcttgtgttactaaattgggcatagctttcagtattattttgaacggtactggtgatatacgaaatcttggcttattcttgatttgaagatttgaagacwatatataggattttcattaagtaggatattatattggatataggttaatggaatatagcctttatcagtggaagctctttcatctctgtttttcaaaaggtttttataattaaatagatattgaattttataaaatgttttaaaaaacgtattgagataacaatgtgattttcctccttgcatccatgattgtggagaattacatggatagttttttctaatgttaaaccatttaacaattgcctttcttgaataaatcctacctaatc

SEQ ID NO: 292067 - DNA, 509 bp, Homo sapiens
ttactgaaatctggtcaccctactgaattctattctattagtttgtttcctgattctgttgggttttatagatagataatcatataatctgctaatacgaaagttttgtctctcttctcctaatagtatgcttttatttttcttgtgttactaaattgggcatagctttcagtattattttgaacggtactggtgatatacgaaatcttggcttattcttgatttgaagatttgaagactatatataggattttcattaagtaggatattatattggatataggttaatggaatatagcctttatcagtggaagctctttcatctctgtttttcaaaaggtttttataattaaatagatattgaattttataaaatgttttaaaaaamgtattgagataacaatgtgattttcctccttgcatccatgattgtggagaattacatggatagttttttctaatgttaaaccatttaacaattgcctttcttgaataaatcctacctaatc

SEQ ID NO: 292068 - DNA, 574 bp, Homo sapiens
cacgcgttcaaaacggcagctccatcttcccttctctgccagcctcgagtatggtaaggagcagacaagatggtgccagccaatgggggagttcatttgcataatattagggtggggtggccagccttccccatgctatgtaaacgtcacacctgatggagccaatctatgagccctacgtaaatcagacaacatcgcctcaagcccgactataaaatgtggtacgtccactgccggcaggccttttcctcttggaagtcccctctctctcactagagagagagctgtttcatttctctttcttttgcccattaaacctccactcctaaactcacrtgtgcccgtgtcctaaattttcttggcgcgagatgacgaacccctggtatttaccccagacaatgtagctgcttcaatgtcaatagcaaaaacatggaatcaaccccaaatttaatttctgtgttgcatctgtcactaactgtgtgaccattggcaagtccttcaaccttggtttgcttatctgcagaggggcaaccatcactcatgcctgtgagaggctgaaaaataactcccaaag

SEQ ID NO: 292069 - DNA, 613 bp, Homo sapiens
tttcaggtaaaggtgctcagtaagtaaaaatgctaatgctgttatgagtttccttccttctctgtcatcctgggaagcagaaatgatgtttacacagccatgcaaaaccatcttcytcagcactctaaccttatgggaggataaaaatatgtgtagtaataaaaatcaagctgcgtttgaagcactgagagggagggcttgtccactggatggttccctggggtaggcaacttgtaaaccctattttaatcttcatcaacagaagacatgatcctataaaggaacattcttaagaagtggaaacgtatttgttcttgcaaattgacaacatcacggatccgattatagtgctaattttgtttgtttcttggtggtacacagttaagcaagggagacatggtcttgtctatttggcccctttgtggccgagctaaagtctatttacttaattactttcaggtggaagctttccagtcatgtgtggagttaggaaatattcattcccaatagggaagactgctaggagacagtcttccatgagatcttgcattactgcctatgttctgagcaagagacatgaacagcctcgtgtgggactatatgttaaggatat

SEQ ID NO: 292070 - DNA, 613 bp, Homo sapiens
tttcaggtaaaggtgctcagtaagtaaaaatgctaatgctgttatgagtttccttccttctctgtcatcctgggaagcagaaatgatgtttacacagccatgcaaaaccatcttcctcagcactctaaccttatgggaggataaaaatatgtgtagtaataaaaatcaagctgcgtttgaagcactgagagggagggcttgtccactggatggttccctggggtaggcaacttgtaaaccctattttaatcttcatcaacagaagacatgatcctataaaggaacattcttaagaagtggaaacgtatttgttcttgcaaattgacaacatcacggatccgattatagtgctaattttgtttgtttcttggtggtacacagttaagcaagggagacatggtcttgtctatttgrcccctttgtggccgagctaaagtctatttacttaattactttcaggtggaagctttccagtcatgtgtggagttaggaaatattcattcccaatagggaagactgctaggagacagtcttccatgagatcttgcattactgcctatgttctgagcaagagacatgaacagcctcgtgtgggactatatgttaaggatat

SEQ ID NO: 292071 - DNA, 501 bp, Homo sapiens
ggtgttgctgttgaaactgaggcagtggagacagagcctcgaatcctcgggtraaaatcacagttctgggtctgaggctcctcatctggcagaaagtgttcataacctcaggaggtggttatgaagattaaaagaagcaaaaagttgaatgtgtttatcatagtagtagcaaattggaaaaaatagtaactcagtgttagaagttattattctagagagactcagaactgaaggtgtcccaggagatcgtactgtccaactggctcatttttgtggtgaaagccataacgtgcttatagtaaaaatctgagtggagaagaaaatacagtaaaatataaaaggatttttctccctatcactaccttcatttcagtctaatttccccagaggcaataactgttaagtttcttgcgtgtcctttcagatattttatttgcatatacattataaataacttgcatcctgtattttgacacaaatgtaatcagactactcatgctg

SEQ ID NO: 292072 - DNA, 372 bp, Homo sapiens
gggacattagataacatctggagacatttttgattgttatgacttggggaggggtatgtttgctactggtatctagtgaatcaaggcctgggagastgttaaacactacaatgcatgggacacacactcaacaagaaaattctgtggcccaaagtgctgaaattgagaaactgatctataacattccagtttgctaacatagcattttatcctagttcatctacattctttataatactctgaatcaatgaaaaaacatgtaaaatccaatttttagcatatagtactaccagaaattattttttttctttcccaggttgaattgctttatatataaactgattatatataaagacatgttccaggatgcaa

SEQ ID NO: 292073 - DNA, 515 bp, Homo sapiens
agatattggctaagattattcagcaagtggcagagctgggcctagaagcacaatagtttagagttggaaaaaagaaatgtaggttcctcagaattaatcttctccttgtatagatgaagatgctgaggtacacagaggttaaggctgccctaggattccccagtgagtctctggcagaactggaatgcaattcaagtctactaattatctgccaatcccctttctgttacttaggcttcctaagtccacgtaagtccagattcagtgagttcattattcactcacctctttaagaractagagggagaaaaacgactgacaaattctttcctctaaggacccatatgagataacactagaagttggcttttaaaaacagatgagttttttggctaataatactagttattatgtggccagaagcctacaaccaactctatcaatgtggaattgcatcagagatgcattgtatagacccagaaacatgcctagcgaaaacaaaacaatagcagcag

SEQ ID NO: 292074 - DNA, 547 bp, Homo sapiens
gccactgcaccccagcctgggcaacatagcaagatccccacctcttaaagaaaaaataaaatktttatatatagcgtgtttgatatctgtacctattgccatccagtgttggcataaaggattatgtttgctattttctactaatgagggattaattggggttttcaaattatttttagtaacttgaatcaggcattcttttcaccttttgctctgactttgggaattaattccatctctgagcatccctgaaaggcttcctctgccacacaaatatctcctagccagaatgctgtagtatctgagattccactatcatgtacttgtttaaggcaattaagactcatgtgaagacaaaccttagtaagtcaataacatgttagcatggactgcttttcaaaagagaaagagcttgaagcttaaaaagatgggatatagtacaagcatatattgattatgggagataaatgaggaaagggaggaggaatatggaagaccagattaatgacagcaagctaaaagaggagatgagaagatacaagaccaa

SEQ ID NO: 292075 - DNA, 491 bp, Homo sapiens
gactaggggcagatgaatagctttgctggtggggcttctcactttccatttttgaatctgagcggcctctgagcacaggaattctgtttggttaacactggaagtctgaagggctcagtgttatctggctggtcattttagctcttcaaggagtgggaaggagtgatcaggcttccctttgtggttaagagactctcagagcccttgaacatacttgaatattcatgtgctttctcttgcccagtgcattgttctrtccccagctgtcctttcttctgagtctgagcccccagctcctttagatcaggctttattactgctgcgtgggacagcttggttttgtttgactctttgagaagaatagtgcctaggttggagacaggaggcgaggagagactgaggaggggtactctagctcagctgtggcccttttgagaggtgaaaggaagatttatgatgccacttgtcaactacaagatggatggaggtgc

SEQ ID NO: 292076 - DNA, 491 bp, Homo sapiens
gactaggggcagatgaatagctttgctggtggggcttctcactttccatttttgaatctgagcggcctctgagcacaggaattctgtttggttaacactggaagtctgaagggctcagtgttatctggctggtcattttagctcttcaaggagtgggaaggagtgatcaggcttccctttgtggttaagagactctcagagcccttgaacatacttgaatattcatgtgctttctcttgcccagtgcattgttctgtccccagctgtcctttcttctgagtctgagcccccagctcctttagatcaggctttattactgctgcgtgggacagcttggttttgtttgactctttgagaagaatagtgcctaggttggagacaggaggcgrggagagactgaggaggggtactctagctcagctgtggcccttttgagaggtgaaaggaagatttatgatgccacttgtcaactacaagatggatggaggtgc

SEQ ID NO: 292077 - DNA, 619 bp, Homo sapiens
atgttttattttttggctattataagtaatggtcttatgaacatttttatacatgtttttgtgtggacatatttttaattctcttgggtatatacctaggagtagagttcctgggtcatatgataactctatgtttaacatagaggaagaaccaaactgttttccaaagttgctgcaccattgtatattcccaccagcgatgttayaaggattataatttgtcaacatttgttattgtctgccttttcttagtgttgtccttctagtgtgtgtaaaagtgagttcctttttgcatgtcctttttaacagagaaggtaggccctcagagctgtcagcagggagactacagggtctaagtagaattttgacttttattttctttaaagaacaaatcacattcctgttacttctccttcattttaaagtgagggcattatattaactttttaaaaacagtttttttttttgcagtacaatttacgtcctacacaattgatttatttaaagtgtatagtcagtggtttttagtatattcacagagttgtgtatcagagttgtgcatccctcatagcaattctcaagtattcttcttacctcaagaggaaaccctataaccctt

SEQ ID NO: 292078 - DNA, 609 bp, Homo sapiens
aagaccataaatgacaaaattgttcatttttgatattaattatgtctagctggagaacagcatgggcttaaatagggcagtactgggaaaataggaaactagaaggtgggaatcatgagctctgattctttcacactgccgggacatattcacaaaagaggaccatcacctccccatcaggttaaacagtagtactatttgctataactgtatcctagctaatccttttataatttttttaggaaaacaatttaagtaaggaaactcctgtagactcgcaagtatttctggactcaccactatatgttcttttcagtcctgcccggagkccttgtggaggatcgttggcaaatttaatggacatctgaaggagtgtaatgggaaactgcttatgagcctcggtggtcatccagaggcggaacgcatcatgtacaagctcagtttctatgattatgtccatcagctcatccatgaaatcaagtcccagatggcagttctgcagaagtgcccatcctccctgtcaatagcagtaaacggaaattaggtagttttgtatttcacccaaattctaaattattacattctttagaaattaagtaattaaaattt

SEQ ID NO: 292079 - DNA, 609 bp, Homo sapiens
aagaccataaatgacaaaattgttcatttttgatattaattatgtctagctggagaacagcatgggcttaaatagggcagtactgggaaaataggaaactagaaggtgggaatcatgagctctgattctttcacactgccgggacatattcacaaaagaggaccatcacctccccatcaggttaaacagtagtactatttgctataactgtatcctagctaatccttttataatttttttaggaaaacaatttaagtaaggaaactcctgtagactcgcaagtatttctggactcaccactatatgttcttttcagtcctgcccggagtccttgtggaggatcgttggcaaatttaatggacatctgaaggagtgtaatgggaaactgcttatgarcctcggtggtcatccagaggcggaacgcatcatgtacaagctcagtttctatgattatgtccatcagctcatccatgaaatcaagtcccagatggcagttctgcagaagtgcccatcctccctgtcaatagcagtaaacggaaattaggtagttttgtatttcacccaaattctaaattattacattctttagaaattaagtaattaaaattt

SEQ ID NO: 292080 - DNA, 509 bp, Homo sapiens
gaccacctgttcctgctaatttcccgcttctgcctatgagctgctaataattataagaaataaaaccatgacaattggcttgactataaatgttcattgtctgtttcaattcagcctttctctaccactcagtagcaattttcatttagttctgctttattcctctttcctacagtggcggatattgcaaaacttttccccctcactccatccttccatctctattcttccctcacaatcatcagattgtctgcatcttgatcttcttacaagattaagactgtcagakttgagtttcctccatttccaccccagattatgaaaatctctcttatcttcaatctctaggtattctcattcctactcttaagagaagcatatctccacccttgacgacagcaaccccttctcgttgagctcattggccctcatcttcctgcattttcttgcttcattctttatacttttcatcagggaaatatgcattatctccttcttcacttatgcat

SEQ ID NO: 292081 - DNA, 509 bp, Homo sapiens
gaccacctgttcctgctaatttcccgcttctgcctatgagctgctaataattataagaaataaaaccatgacaattggcttgactataaatgttcattgtctgtttcaattcagcctttctctaccactcagtagcaattttcatttagttctgctttattcctctttcctacagtggcggatattgcaaaacttttccccctcactccatccttccatctctattcttccctcacaatcatcagattgtctgcatcttgatcttcttacaagattaagactgtcagatttgagtttcctccatttccaccccagattatgaaaatctctcttatcttcaatctctaggtattctcattcctactcttaagagaagcatatctccacccttgackacagcaaccccttctcgttgagctcattggccctcatcttcctgcattttcttgcttcattctttatacttttcatcagggaaatatgcattatctccttcttcacttatgcat

SEQ ID NO: 292082 - DNA, 509 bp, Homo sapiens
gaccacctgttcctgctaatttcccgcttctgcctatgagctgctaataattataagaaataaaaccatgacaattggcttgactataaatgttcattgtctgtttcaattcagcctttctctaccactcagtagcaattttcatttagttctgctttattcctctttcctacagtggcggatattgcaaaacttttccccctcactccatccttccatctctattcttccctcacaatcatcagattgtctgcatcttgatcttcttacaagattaagactgtcagatttgagtttcctccatttccaccccagattatgaaaatctctcttatcttcaatctctaggtattctcattcctactcttaagagaagcatatctccacccttgacgacagcaaccccttctcgttgagctcattggccctcatcttcctgcattttcttgcttcattctttatrcttttcatcagggaaatatgcattatctccttcttcacttatgcat

SEQ ID NO: 292083 - DNA, 545 bp, Homo sapiens
ggaagggtaagaaaagccacacccaaatctagaaaactcccaagtccacattctttcttaaatatctacattttaaacgctgtgatctacattttaaatatctacattttaaacactgtggagttctctcaaggcctggggttgggaggagtaataaaccgaagaaagttggaaaattcttccttccttcatgacgcggttagaagttagctgaatagtcccagaaaatgatggtctactattcaataactgcgataaacaaattcaaacatctccaaatccctatttcttcctgaaaccactacagatccttcaaactctrgtataaatgactcctcaccgagcacccctcccctgacagaacgaatgcccctctcacaatattcaaaacctgtatctattttactacttactttatgtatcacaattatttctatttctggatgtctcccccccaatcttggagcatcttgatggcggatgttgtgtcttagtcagttctgtatcttcagcacctaggacagtgcattttgagcctaaaggat

SEQ ID NO: 292084 - DNA, 667 bp, Homo sapiens
gatgagactttggactgtggacttttgagttagtgctgaaatgatttgaaactttggggggttgttgggaaggcatgattggttttgaaatgtgaggacatgatatttgggaggggccagggatggaatgatatggtttggctctgtgtccccacccaaatctcatcttgaattgtaactcccacaatccccatgtgtcatgggaggaacccagtgggatgtgattgaattatagggcrggtcttccctgtgctgttctcttgataatgaatgagtctcacaagatctgatggttttaaaaaaacaggagttgtgccttcacaagctctctctttgcctgctgccatccatgtaagatgtgacttgttcctccttgtctttcaccatgattgtgaggcttccccagccacttggaactgtacctcccattaagtctgtttcttttataaattgctcagtctcaggtatgtctttatcagcaacgtgaaaatggactaatacacctaccatttgaaaggtactgtgcaggatccaggatagtaaaaggaaataaggttagataagtcaccagaaatgatactaagcccatattcttaaatctaactgcctgggttcaaatcctagctccactactcaacagctatgtgatcttggacaaaatacttca

SEQ ID NO: 292085 - DNA, 552 bp, Homo sapiens
aaatatttacataatgcacgtcgtaggaaggagaacatagtacaaggactacagtctatagcatggtatttcaatgcccaaatgtgtctcacacttagcagtcgctcaacgaaatcctttccaactcaaaccttggggctctatcaagaggcagcatggtytagtgcatagtcagtctactctctcggacccagcaggcctgagttgaataccatacactaccactttctaagagcagtgggtctcaaccagattgttccacttctccaatccccagtttcctgatcacagaagacaggaggaaaataggcctaagggaggggtgactccatggagcaaaaagccttctaagggttgtcaggaaacaaaaaatttgaaccatgagctgtacatcttagcacccaaagattttcagaattcaggaaagcaaaatctaacagagccttgtcaaatagagatttttagaaaccaaggcaggttatatattatatattatgtatatatatgaaatgattttggattaacattgaaattgcacataaactgttgtaa

SEQ ID NO: 292086 - DNA, 552 bp, Homo sapiens
aaatatttacataatgcacgtcgtaggaaggagaacatagtacaaggactacagtctatagcatggtatttcaatgcccaaatgtgtctcacacttagcagtcgctcaacgaaatcctttccaactcaaaccttggggctctatcaagaggcagcatggtctagtgcatagtcagtctactctctcggacccagcaggcctgagttgaataccatacactaccactttctaagagcagtgggtctcaaccagattgttccacttctccaatccccagtttcctgatcacagaagacaggaggaaaataggcctaagggaggggtgactccatggagcaaaaagccttctaagggttgtcaggaaacaaaaaatttgaaccatgagctgtacatcttagcamccaaagattttcagaattcaggaaagcaaaatctaacagagccttgtcaaatagagatttttagaaaccaaggcaggttatatattatatattatgtatatatatgaaatgattttggattaacattgaaattgcacataaactgttgtaa

SEQ ID NO: 292087 - DNA, 552 bp, Homo sapiens
aaatatttacataatgcacgtcgtaggaaggagaacatagtacaaggactacagtctatagcatggtatttcaatgcccaaatgtgtctcacacttagcagtcgctcaacgaaatcctttccaactcaaaccttggggctctatcaagaggcagcatggtctagtgcatagtcagtctactctctcggacccagcaggcctgagttgaataccatacactaccactttctaagagcagtgggtctcaaccagattgttccacttctccaatccccagtttcctgatcacagaagacaggaggaaaataggcctaagggaggggtgactccatggagcaaaaagccttctaagggttgtcaggaaacaaaaaatttgaaccatgagctgtacatcttagcacccmaagattttcagaattcaggaaagcaaaatctaacagagccttgtcaaatagagatttttagaaaccaaggcaggttatatattatatattatgtatatatatgaaatgattttggattaacattgaaattgcacataaactgttgtaa

SEQ ID NO: 292088 - DNA, 1221 bp, Homo sapiens
tggaataatttatttatgaaaattaacttgaataacattgcaatcagtgggagaactgggaaggaggaaagcataaataaaataaataaataatgaagtgaaataagtaagtgaagagagaccatccttcacacttagaaacaagttagggctgtgtgttctctccctacatggaagatgggtacaaataatctctgcaaactgaaatgtgaaatgtgaaatgggccaaactcctaggttttagggaaagactttatgccaaccratgactgccttcaaacatgctctctccagtgtcttgtccctacttttgccaatatttctggagaagttcattgttttcttgtcactttcagactccagttaatttcaggttctatcactttccaatcacatattcactactccttacatatccaagtagaaaatgtcctttggaggaagcccttgtctctcttctacctccctcactacttcttgaacagttgttcaacattgcctgtaagtggatgggcaaatgaattctgggataaggttttagcagtcatgtgcaatacaacagaagcctcattcttcaaccagctttatctgcaaagttaawttacacctgcaacaaccctatttccaagtaaggtcacatgctgttgtattagcggttaggacttcattatataaatctggagggccacagctcaacccataacaggtgtgaaagtagatctgcattgacagaagaaagaatcagcaaacttgaggatagatcaatggagattacaaaatctgaagcaacagatgaagtggaagatagatcagtatagaagatagatcataaagatagaagataaactttgtatgattccattctcatgctgctatgaagaaataatcaagactgggtaatttataaagaaaagaggtttaagtaactcacagttcctcatgtctggggagtcctcaggaaacttaatattacggtggatggtacctcttcattgggcggcagaagagggaatgactgtccagcgaagagggaagccccataaaaaccatcagatctcacgagaactcactcacaatcatgagaacagcatgggggaaaccacccccaagatttaattatctccacctggtcccacccttgacatatggggatwgttacaactcaaggtgagatttaggtggagacacagagccaaaccatatcaaacttgaaggtagatc

SEQ ID NO: 292089 - DNA, 490 bp, Homo sapiens
gacagcttgggacttgtcaagacccataatcttggggatatcttggtgctagaacaatagcctagacatggttatgtggcaytgggacagaaggaccttagaagcttgaatcaaattatcaaagagacatggaagcagtctaatatttttcttgcatgaaagagggacctgtgagccggtgggagagtcttcagtcaggaggaacagcagtgactgataagggccaatgacaagaaggatattttagtgcttgcccgtgtgggtggatgatgaagaccaagagccatgacctcacactgcacacactcatgtttagcactgtacaagtgctagataacacagacgcaactctatggatttggggaagtgagcaaggcccagaatcagcttcaatttagtttctactgttggatacagtggggatttaacatagaaataagattttagggcattacagggaagttctgcaatccttcatgttattttcaga

SEQ ID NO: 292090 - DNA, 416 bp, Homo sapiens
tcctaccaattccattaagcctgttgygtttccagaaatatgccagcagttggcaaatgctcgttggttgataaactgatggactggttcattataaaatgacagacagtatgtgagattgctacacggaaaaacatttctaaccctggctaaacattcctaccctgagtagtgagtagttctccacccttttgcaatatagtgtctgcttctcagtttttgcatctatgtggatgaacaggaggcaggtggcaggagttacactcatgttttggttctaattggcactttttaaattttctgcaaaataaaagtaattttgttagccaaccctcaagcaattgactaactgatccttttagcaagttggcagaatttttctaggatggttgcagtttagaaatgctgtttttaag

SEQ ID NO: 292091 - DNA, 416 bp, Homo sapiens
tcctaccaattccattaagcctgttgcgtttccagaaatatgccagcagttggcaaatgctcgttggttgataaactgatggactggttcattataaaatgacagacagtatgtgagattgctacacggaaaaacatttctaaccctggctaaacattcctaccctgagtagtgagtagttctccacccttttgcaatatagtgtctgcttctcagtttttgcatctatgtggatgaacaggaggcaggtggcaggagttacactcatgttttggttctaattggcactttttaaattttctgcaaaataaaagtmattttgttagccaaccctcaagcaattgactaactgatccttttagcaagttggcagaatttttctaggatggttgcagtttagaaatgctgtttttaag

SEQ ID NO: 292092 - DNA, 526 bp, Homo sapiens
ggtaacattaacgccatagactgaataatggccactcaaaaatatcatgttctaatccctggaacctgtaaatgttactttaccagaaaaaaagaatctttgcagatgtgttcatgaagtttagaattttgagataagatcatcctgtactatctcagtgggccctaaatgccatcacaggtgtctttgtaagagagagaaggaaactagactcatatatggaagatraagtgatgagaagaggcagagaagagttagattacaacaagccaaggaatgccagaagcttccagaagctggaaaagatcagaaagcatcctcccctagaacttccagagggaggacagctctgctgacaccttgattttggacttctggcctccagaactctgagagaatatgtttctattgttctaagctactaagtttgtggaaatttgttacagcatttataggaaaggaatacaatggtttaattatttaataaaacacttatatgtatacaagctaaattactaatatctca

SEQ ID NO: 292093 - DNA, 581 bp, Homo sapiens
gagaatgttcaaagaaagtcttaaagcaaaaatcagatggtagcagatgcaaacttagatctacacaaagtaatgaagagtgaagaaaatgaaaatagtaagataaatataaaaaacatttcccttatttttaatcagtctaaaatgtaatttactatcacaaaaagtagttttactgtattatggggtttataatgcatgtaagagtgaaatgtatgacaaaaatagcacaaaggatgagagaggggaaattgtaagattcttatacatgaagggatacaatttgaatgtagactgtgataaggaaagatgtatattgtaaacctttgtaaaagaaaaactgcactggacacttattaaaaatggcaaggaagactttattcaagactactgaaatgcsggggggagggggggagattgaacttaactccattgaaggatttttaaatgctggtgtgagttaatggcctctactggatgacagtggaaaagaggttagtcaatgtgattagggcacttgtgtttgctaattgtcacttatcaaagggaggctccctaccctcccgtagatactgggagat

SEQ ID NO: 292094 - DNA, 474 bp, Homo sapiens
agttgttttattggtgggtgtttttgtttttaatggtaccaactagttccaacattattcctgccttatccttgggggatacattccaagactatcagtggatgcctgaaaccatagatagtgtcaaaccctatatatactctgttttttcctatacacacacacctgggataaagtttagtttataaattacatacaactgtgataaagtttagtttataaatacacacacacctgtgataaagtataatttataaattaggcacagtaagagagaataataactaataagatggaacaattaaaactatatactgtaatggargttatgtgaatgtggtctctcactctctgaaaatattttattatactgtactcacctatttttggaccttggttgactacaagtaattgaaactttggaaagcaaaacagtggataagagaggactactgtattcaaaacagtggttct

SEQ ID NO: 292095 - DNA, 522 bp, Homo sapiens
agggataaacatacagtataagaaactattgattgacaacatttcattttcctcaaattttcacaatttaaaaagttatactacttttccaatattgtgtttggtatgcatggtgctttggtatgctgagtgctttgaataagaggaaactgaaaggcctcagaaataaacctcgggaccaagctccctctctgagcttctccactccctgtctctcttgtcccctttctttccagaagtaccaggaggggctttctctgaagttcccttatctgattaaaggaagttcttgcagaagaattgcagttgtcttaaaacccctccctaggaatctcattaaataactcaccaggaatggttgatggaaagagactaaaagtcgtcacctcacccagatagacttttcatatattcttctcagggaaactctgggagattgccagggagactttcrggagactttatctgcataataagacaaactttgtttacagtgaagttccacccctcaccttcccacca

SEQ ID NO: 292096 - DNA, 571 bp, Homo sapiens
gaggacactggaccctggctaggctttttccactgatggtgacatggcctcactaatgctgaggtggttcaatgtttgccagcattccgttaaagatgctcagagaagccaaggtatgcttctatggaatggtgaaataagccccatacataaaaagacagttctttatgagacaagactttcctttyagactcagtcaattctggaaggaccttacctgcccagagagggtcaccagaagctgtgagttgcacaagggaacaagggagccagaaaaccagagaaaagccaggcaaggatgtgcagcagctgctctggctccggggagtgcctccctgctattgcatgtatgtcctccgtaaaaataaatgtcatctaggaagaagagaagtctttgaatgttctcaccacaaagaaatgataaatgcatgagatgctggatatacacattactctaattggatcattacacaacacaaatatgtatcaaaacatcaaattttactccataaatatgtacaattacaatgtgtcaattaaaaacatcaatttaaatttaaaaagtaataaa

SEQ ID NO: 292097 - DNA, 615 bp, Homo sapiens
ttcagcaaaacttaagagggaacataagagaagttttccttctgcccctacagtaaatgtaacaggaataattgacaaaaaaatttttaattaaactttccaactgcttttatttcatattttaaaatattactttctctcattaaaaaatgtgatctcattacagaatatgaagatcaacaacaacaaaaaagaacacttataaccgcagccactcagaggcatttaacagtgtcttaaaatcctaaggtttctaccaaaaatatatatatttttaccagatcacctggatctctagccatttgtgtttaataatgtcagcaacaatttggtcaattacatggacatattattttctgacttcctcaatttataatttcatgtcatttctggaagcactcacaagttctgatatctatccagagagcctgttttcctaggatgcacagcygccagtggagctaaccagtgctaggctggcaggcacgagttcatgaaccacactctatctagggttgctactatagttgctttacctctagcaagttttaaactttcactttactagttatctgtgctctttatgcagttaaaggtggtttctaatagcaaaga

SEQ ID NO: 292098 - DNA, 579 bp, Homo sapiens
aagcctttggtgccttacatctgaatctcctgataattacaaaaattacaacttgagaagtatttgactacttggattttaatcccaacagaaaaatggagggaaaaaatagcattctcttcaataagcaggtaaaaataattttctgaaatatttatccaattctatttatttttaattgcttcagagctgaaggtgctcatgccaagtcacagcgtgcagcaaatttctgcggcaggattagaagccactgaagatataatttcatagtgaaaacgttgatagatgctaaacaactacataagcagatgattcgaaaccatccccctgcttagacaaataactttgaagacaaaaataggcatgctaggtaggtagaacaaatcamctaagtatgtttaaagccttagggttccagaaggaggaggagagagaagaggttgtgcaaattggcaagccataccctttaggatcttaaaggttttaacaaaacaccttgggggaatttcattttctgactatttaacttccctatcttgcatttttcatctacatgtgagtatacattccatatattcc

SEQ ID NO: 292099 - DNA, 579 bp, Homo sapiens
aagcctttggtgccttacatctgaatctcctgataattacaaaaattacaacttgagaagtatttgactacttggattttaatcccaacagaaaaatggagggaaaaaatagcattctcttcaataagcaggtaaaaataattttctgaaatatttatccaattctatttatttttaattgcttcagagctgaaggtgctcatgccaagtcacagcgtgcagcaaatttctgcggcaggattagaagccactgaagatataatttcatagtgaaaacgttgatagatgctaaacaactacataagcagatgattcgaaaccatccccctgcttagacaaataactttgaagacaaaaataggcatgctaggtaggtagaacaaatcacctaagtatgtttaaagccttagggttccagaaggaggaggagagagaagaggttgtgcaaattggcaagccataccctttaggatcttaaaggttttaacaaaacaccttgggggaatttcattytctgactatttaacttccctatcttgcatttttcatctacatgtgagtatacattccatatattcc

SEQ ID NO: 292100 - DNA, 535 bp, Homo sapiens
ccttggacttcccagcctccagaaccaggagcaaaataaacttctattgtctatcacatgcccagtctgtagtattttgttatagcaacagaaaatggactaagacaccatgcatgtgttttttgcagagaaacaagaagtatctgaaatcagtatgttcatttctagtcaactctcattatacacagtagttatgtcctataaagtcaccatgaatattgaattaacaaacgccaagccatttctcctaggggaaatacagggttagtttcctgcaagcctccggtcacaacatttccatcaagcagtcaatacataatcttgctttatgtgtgtttctgtttaaggatatctttttaatatatatggttgattaccattgcactgaaggccmacagcactataactaatgcctgaagtcagtttgtccaacacatgtgttttctccataaggcacagccttcttgtgctcagaaacagcagacttaaacactacacttgggggccattttaaataggaaaaagtaccccccaa

SEQ ID NO: 292101 - DNA, 578 bp, Homo sapiens
acaggaaaataaaaagaacactcatttattggccatttccaagtagttcgggatgccagtggtctggaatgcatgggctgtccaccaactagccccagggarctgttccagttcacaaatgatcatttggcattctaggtgagagatatctaaaagcaaacactgaagggcagcaacaggtcaggaactgactgggagcagccaccaaagggacataagctgcccagcagaggacaggactcccagcccaactccacagacgcaggttttgataccactcctttcagttaaataacagaagaagcacaattcagagaagagggctcaaagataataaactattagaatatgtgtattataatgctttggggatttaacaaatgtagttaaggattactcttgggcattgtgtaaaatttttcaaaaaatattcgggtaatccgcaactgacctcaaaagaagggtgttgtaaggagtgccaactcctgattggtcatattgaggactggagtcaacgtccaaagccctgcatagggaagagacctggacacatgtttctagccagagctttgattact

SEQ ID NO: 292102 - DNA, 556 bp, Homo sapiens
cccaaacacctcagggctgtcataggcaggcaaactctgaacaacaracaccccagataagcacagactgccaacataagcaccgtctaaattacactattttaggaaacaaaaatgcttctatgagggtatgcatttacttaagtcttattggtgtcaagctacaaactcaataatttctccagaaaagaatcaaatttcctttaaaaaaacaattaacattgagaaacagacagtaggctcatggctctttacagtctgcacctcaaacaaaatttaatcaagagagactgtcttgttataaaatatgtgagatagaaagggagctgtggattggtgttttgctttatgacagtctaatagacttcaaaccagttgtccaaatcaatgttgtataactaatggttattatgtttagaagataccaggaaatgacagctttagtaatcgtggtccaaataaaggcagcacgtgggagtcatacccacccagggaaaaatacagagactaggaaaagagagaaactgagaaagcaacagagtcagagagaaaaaca

SEQ ID NO: 292103 - DNA, 538 bp, Homo sapiens
agaagtatctggttgactaaagaaagatctgtatgaggaatggaaatctgaatgtattatgagaataggagaaatttcaaatagtataaaaataaaagttctaagaaataaggcttaaagttggataaggagaatcaaattaaaagatgatttttatgaatttgtttaaccmaaagcaacaaccaaagataaaataaaacgtagcccatttttaatgtgctatcaggagtgtgtacgttccaccagggcatgaaattttgtctgttttattccctgacatattacatagaatagtgccttgaacatagtagtgactcagaaaaaaattgttgagtgaaggaataaatgaaatgcttctttgctttatttttcacctttattatgcagcgaaatgaacacatgcttgtagccacttacatgaaatgtaatacaagtatgtgtgacttatggaatccattgatactaagaaacaaaacaaatttcatggaactcctcctggaaaggtttgactaaagcctaagatcatttttttttcttt

SEQ ID NO: 292104 - DNA, 638 bp, Homo sapiens
accaaaatataattgcatgcttcatacattttatcaaacaaatcacaaaatagaaacctaaatgtaactagatgtaacatattgagcaaagttttccacttaaaaagataatgaatcatttaattatttgatttagcaatactaggtttgcagcaactgggcttatgatcatttttgccccttacgatgtatccagcttgtatttatttaacagtattatttagtgttgtgtgatagagtgtgctcagttttcagctttgagtttttacaaaacattatttgaggatactagtgttagtgaaaatgtaagtcaatcaaaaagatctgctaatatgaatcaaagaaaaccggaattttttttgaaaattgacatcacatatttcaatgttttaccattattcataggctgtttttatttaagtgactgcattgtacttattgcagmaaaatacatgctttgcaaagataagtttagcagaagagaattaatttcttcccacatcttttaatgtggcatggcagtttcactctaagatcaaaacacataactgaaggttatgtttaacttctaaatcaaagtgttgtgggaagatgattgaaatctgatgatgactcagatacgcttgatatgtggtttt

SEQ ID NO: 292105 - DNA, 602 bp, Homo sapiens
cagcgttatttttaaagctctcaagctttctctaacatgaagccaaggttgagagctactactctgctggagagcttacagaatgccagaacttgaagagaatgaattccttgctttatagatgaggtcactgatactcagagggacaaagtgacttactcaaaatcacacatcttattaacccatttatagcagggtggtcactagaacccatcccaacccagtgttttttctttttctttttttgagacagagtctcattctgttgctcaggctggagagcagtggtgcaatcacagcctactgcagcctcaacctcccaggcccaagtgatcctcctacttcagtctcctgagtagctgggaccacaggcatgcaccaccacacccagctaatcttttattttggtagaggtgsgatctccctatgttgcctatgctggttttgaactcctagactcaaaccatcttcctgcttcgtctcccaaaatatgttttttctataataccctaccacacaggctttgattgatgggtggcagggaaattagagacttgaaagtgcttgggagagttgtcaaaatattatgtaagtagctgcta

SEQ ID NO: 292106 - DNA, 567 bp, Homo sapiens
ctctctgtctctttgtcttttctccctgacctccatgtgtgtgtggcctccacatatgctgtatattctccagggtctgtaagtactaaaaactttacaactggccaggcayggtggctcactcctgtaatcccagcactttgacgccgaggcaggtggatcacttgaggtcaggagactagcctggccatcatggtgaaaccccatctctactaaaaatacaaaaattagcctggagggaacctgggaggcagaggttgcagtgagccaagattccaccactgcactccagcctggactatgaagcgagactctgtctcaaaaatcaatcaatcaatcaaataaaacttacacatgattgttttgtcattgaagctgtgcctacaatcaaacccctgatggcaaggctgcctgaaagggacccatgcaagtagattccctcctggtgctcttttgtctggacctctcagttgctggggacagtaaatagcaactaacttggtagagtttcattccaaacagattagtctgccttaataaaagtctcccgagtataaatgttaacca

SEQ ID NO: 292107 - DNA, 1115 bp, Homo sapiens
ctctctgtctctttgtcttttctccctgacctccatgtgtgtgtggcctccacatatgctgtatattctccagggtctgtaagtactaaaaactttacaactggccaggcacggtggctcactcctgtaatcccagcactttgasgccgaggcaggtggatcacttgaggtcaggagactagcctggccatcatggtgaaaccccatctctactaaaaatacaaaaattagcctggagggaacctgggaggcagaggttgcagtgagccaagattccaccactgcactccagcctggactatgaagcgagactctgtctcaaaaatcaatcaatcaatcaaataaaacttacacatgattgttttgtcattgaagctgtgcctacaatcaaacccctgatggcaaggctgcctgaaagggacccatgcaagtagattccctcctggtgctcttttgtctggacctctcagttgctggggacagtaaatagcaactaacttggtagagtttcattccaaacagattagtctgccttaataaaagtctcccgagtataaatgttaaccawagctttattgagagctgactatctactgggctctgttccaaccactttatatgtaatacagcattgatcctcactagaatgawgaagtggggactattattgtcctcattttacaaaggatctaagatagttactattcttgagctcagattaacttttaccacttttcaaatgtcagagtggtgtatggtaataagaagcgtaggccagtgcagtggctcatgcctgtaatcccagcactttgggaggccaaggctggcagatcacttgaagtcaggagtttgagatcagcccagccaacaggatgaaacctcgtcttactaaaaatataaaaattagcccagctacccaggaggttgtggtaggagaattgtttgaacctgggaagtggaggttgcagtgagccaagattgcactaatgcactccagcctgagcaatagtgtgagaatccatctcaaaaaaaaaaaaaaaaaaaagtgtaaaactgtaccaaaggcctggggtgcccagggacagagttttctagctagctcaggaagcacactg

SEQ ID NO: 292108 - DNA, 547 bp, Homo sapiens
agctttattgagagctgactatctactgggctctgttccaaccactttatatgtaatacagcattgatcctcactagaatgatgaagtggggactattattgtcctcattttacaaaggatctaagatagttactattcttgagctcagattaacttttaccacttttcaaatgtcagagtggtgtatggtaataagaagcgtaggccagtgcagtggctcaygcctgtaatcccagcactttgggaggccaaggctggcagatcacttgaagtcaggagtttgagatcagcccagccaacaggatgaaacctcgtcttactaaaaatataaaaattagcccagctacccaggaggttgtggtaggagaattgtttgaacctgggaagtggaggttgcagtgagccaagattgcactaatgcactccagcctgagcaatagtgtgagaatccatctcaaaaaaaaaaaaaaaaaaaagtgtaaaactgtaccaaaggcctggggtgcccagggacagagttttctagctagctcaggaagcacactg

SEQ ID NO: 292109 - DNA, 624 bp, Homo sapiens
aggaagggtgagactgaggagggagagagattcccaaagtagggaagaatttcattctgcaataaaagattttaaaattaaaggtaaacacctggctgagtaacctagttaagggacttccaggagacagcagagcaacacatttttgtgtaaataaactatttgcagagcctcccttggtttggagagtgtggaaagctgaagacaaaatgagaaacaccctcatgaaaaggaataatgtctacaaatggtgggggaagagycctttagggctctttttttccccagcttactcaggacaaaatgtaataacgacagcagaggagggtgtatcatataactaacgaggcctaagtttcaggtttcctgaattgcaccagctcctttcaaggctctctagctaattttatatttctatatgttttctttttcttaaggaaggcctcccagattaaataaatttcagtgggcaaaatatggtttggcccctgagtgtgccaggtagagattctgtagcagagttacacaggtaggccactctgatgtgagtcatggatgaaatgcttaaatgtgcttcttttactttgatgtgcaagaaggaccatatgtattttttataaatca

SEQ ID NO: 292110 - DNA, 449 bp, Homo sapiens
attttatatttctatatgttttctttttcttaaggaaggcctcccagattaaataaatttcagtgggcaaaatatggtttggcccctgagtgtgccaggtagagattctgtagcagagttacacaggtaggccactctgatgtgagtcatggatgaaatgcttaaatgtgcttcttttactttgatgtgcaagaaggaccatatgtattttttataaatcaacctgatttccatttggaagccccactctgctaggtggtacacacacacacatgcacatgcacacacacacacyactcccaggatggctgctctgcccatgcttgagactcagcaattgctgctggcactgagaactccagagcatgtgtcctcgtctcttccagcacagcatgcaaccatctcctttgagcattagctgcttccttgagctcttagaatgaaaggca

SEQ ID NO: 292111 - DNA, 553 bp, Homo sapiens
taggaaagaaagtgtgagctagactaacacaggatgagtatatgaattccagtaaactcagaaggattccttcatttgtgatttttactttgtaggtaaatttcattagtagcataatattgactatccttacagcactgccaaacaccagcctttaataaaaattaacattatctacgtgaaagtcttcctttatggccacctactttggtttaaccgatctgaaatgatgttgcttagtcaatgagtcatcttttgttgtatatccctaaaataccattgatttgatagtccagaaagctcagaatgtaatatgttcatttctctatcagtttccccagcgatttaaataaaagacagtgactgaktaactaaaataaatggaaccaggttgttaattttggttttatagagaatgtgggctggcagggaggaaatctttattttgcaactggaaaaaaaatctgactttgtataaaaaagaacaaattcagagtattttagatttacctttgcttttcatttgtttcatgtattctttaaatggattata

SEQ ID NO: 292112 - DNA, 609 bp, Homo sapiens
tgtaattaacgcttatggaagccagttggtaaggaaaagaaacgaattaagtgctaaaaattcacacaatctcttaaatcctcccatcaacatgtgttatgggtgatgaaggaaaaggtaatggaactggaaggagaacatcaaaagacctggggtgggtgtggctaagattcacatgccttgtagagcaaattcctactacctactacctatgtttcaaattctggtggtctttgcactggtagtagatttttttgtgtgtaaataaaatgtcagagaaactatggaaacacacctgaaaagtatgtaaaggaaatagtatcaaagtcagaatgtgggttaggaaagaaagtgytaatagtttctctccctatactggaagatggcacgttaaagaaagaaagatggcttggtcagattaattatccatatgctttcattatatcttttgatcttatcattactctttttgaaactctttgactacttttaagatttttctctttgtctttggttttcagatccttggtatagttttgtttccatttatcttgactgagttttctagagcttcataaatatacgaaaaaaacttttattagttttgga

SEQ ID NO: 292113 - DNA, 609 bp, Homo sapiens
tgtaattaacgcttatggaagccagttggtaaggaaaagaaacgaattaagtgctaaaaattcacacaatctcttaaatcctcccatcaacatgtgttatgggtgatgaaggaaaaggtaatggaactggaaggagaacatcaaaagacctggggtgggtgtggctaagattcacatgccttgtagagcaaattcctactacctactacctatgtttcaaattctggtggtctttgcactggtagtagatttttttgtgtgtaaataaaatgtcagagaaactatggaaacacacctgaaaagtatgtaaaggaaatagtatcaaagtcagaatgtgggttaggaaagaaagtgctaatagtttctctccctatactggaagatggcacgttaaagaaagaaagatggcttggtcagattaattatccatatgctttcattatatcttttgatmttatcattactctttttgaaactctttgactacttttaagatttttctctttgtctttggttttcagatccttggtatagttttgtttccatttatcttgactgagttttctagagcttcataaatatacgaaaaaaacttttattagttttgga

SEQ ID NO: 292114 - DNA, 546 bp, Homo sapiens
aacttttattgagtgctcaaaatgcatgaggacccgtgctagttaccaggagtacagagctgatgaagtcactcccttaattagcatttactttcacctactcaggattccattgactcctaacttaacatgcaattttagagtggagatatttgaagggaagtactttccaagttggcatatattttgttttaaaccttttaagtctacagtagaatcatgtattacttgcttacaacagaaatgtaaaattgcctgggaatgactacttctctggcacatttatgctttacacttatttatttcaatgtgaaaataaaattgacttgaaacttaccacttttctatattcgttgtggtgatttaatttcttttcctagacaagttacctcatcaaattaaatgyttttccgtgcccaatgtttcaatgtcataataaactaagttattacatggaagttactattacataaatcttgacttgttgggttcctggcctactactccatagatactttaggcatattttatgcacagatacctggt

SEQ ID NO: 292115 - DNA, 620 bp, Homo sapiens
tcacaccactgcactccagcctgtgacaagagtaagcccctgtctccaaaaaataaataatcaaatcaaatgaagccaaatcaaataaagatgtagctaagaggaagagctttaagaaaacataacttcaatataaaaccaagaagacacgcagatatatttagtattatatcaaaacactagaaagtaaaataaaaagttcttcacaaagaaatatgtataaacacatacctacaaagccactagatattacatttacataacttattaaatgtctatgatttaccstaaactaaactagaataacttattttagaaaatcaattagattccaataaattttttaaagctaccatttgtaacttcaaaaaatgcaaatctcttgattattttgtatttatttattatgaatataaatgtgttaaatggacagaacatctgaaatactgtaacatcaaaattatttaccagaaaagtggttcctggatacttttctgagactatcttctgagaagatattttaatcagtcatgaaactgagcagtgtttcaatttgtaatggagtttgactattttaatgatactttctatcaatatttaattgtaaacattataattag

SEQ ID NO: 292116 - DNA, 626 bp, Homo sapiens
tttggcccatattgtatctgctctacctccagagggtctggaggctaaaggtcagccacagagtcagtcaactatatctgtgtaattgagcctcaataggcctctgtgcaccaaggcttggataagcttctttggctgcaagtacttcatgcatattgtcacactttactatcaggaatgttaggattgtccctgaccccactggaaaaagacaactaaaagcaaaactttcatagacactgttccatgcatctctatccttggttgattttaatctgtatgtttccactgtgataaactgtaaccatgaataaaatagccttcactgagttctattagtccttcttgtgaattattgcaactaaaggtggtctcaggaatcgttaaacttgcaggtagtatcagaagtgaragtgatcttctggactgctcactaactttacagtgtaataagatgaagattgtgtacacatcatccaatgaaataatagtgtgatttattttaatctacaaagaaagaactaatttatcaattctggaaatttttatctctgcggttttgttttttgtgctatataggcacacttgaaatcatatgatatggtaaataccttctaaatacatat

SEQ ID NO: 292117 - DNA, 609 bp, Homo sapiens
ccttggatttcccagcctccagagctgtaaagaactaagctttttttctttataaattgcccagtcttagatattctgttatagcaacagaaaaccaaccaagayagaaaattgagagtgaaaagttgggctattgctaataacaaatacctaaaaaatgtaagagtgtctttggagctggataatgagtagaggctagatgaatatggaggagcaggctataaaatgcctatgttgccctgaatggagtgttaacagtgattctcatgagggcttggaagaagagaagactaaggaaagtctggaacttattaaagattatttaagtgactgtgaccataatactggtagaaatatggacagtgaagaccattctggtatgatctcagatggaactgaggaacaaagtattgaaacctggactgaagaccatccttattataaagacaaaaaacttgacttgattgtgtcatgcctgagagctttatggaatccaaaacttaagaacaataaatttggatatatgacagaagaaatatctaagcagcaaagcaatcaggctgccacatggcttcttttagctgcttacattaagctgttagaggcaaa

SEQ ID NO: 292118 - DNA, 609 bp, Homo sapiens
ccttggatttcccagcctccagagctgtaaagaactaagctttttttctttataaattgcccagtcttagatattctgttatagcaacagaaaaccaaccaagatagaaaattgagagtgaaaagttgggctattgctaataacaaatacctaaaaaatgtaagagtgtctttggagctggataatgagtagaggctagatgaatatggaggagcaggctataaaatgcctatgttgccctgaatggagtgttaacagtgattctcatgagggcttggaagaagagaagactaaggaaagtctggaacttattaaagattatttaagtgactgtgaccataatactggtagaaatatggacagtgaagaccattctggtatgatctcagatggaactgaggaacaaartattgaaacctggactgaagaccatccttattataaagacaaaaaacttgacttgattgtgtcatgcctgagagctttatggaatccaaaacttaagaacaataaatttggatatatgacagaagaaatatctaagcagcaaagcaatcaggctgccacatggcttcttttagctgcttacattaagctgttagaggcaaa

SEQ ID NO: 292119 - DNA, 551 bp, Homo sapiens
aaaacgttgtggctttgtggatgaagtgaatgcctttttcatgygagaaggacttggattttgggaaccagggctgtaatgctataatctaaatgtgtctctcaagttccatgtgttgaaaacttaactcccaaatttatgtaatgatggtatttagaggtggggcctttgggagctaattaggatcaaataaggtcatcaaggaggtgccttcatgatgggactggtggctttataagaagaagaaagacctgagcgacaggcacttaccttcttgtcatgtgatgctctcttccatgttatgacatacccaaaaggccctcccaggcccctcaaacttggacttctcagtttacaaaactgtaagaaatatttcttttctttataaattacccagtttcaggtattctgttattgcaagggtaaacagactaagacaatgaacaacccaaatcctagcataaatgtttatccatctcactatccaatatattattaaagtatatcagcaataagcacacttataacatatataattatcattattatta

SEQ ID NO: 292120 - DNA, 1070 bp, Homo sapiens
ttgcgtcttagggaaaaaaaaaaaaaaaaaaaaaaaaccaactttgtagacaaagcaagcaaagaagagcctaaagcagcctcctcaacatgagrtaatattttataaaaatgttgtcaatacagatgtggtttacaaatatatttttgaggggtttactttctagctatctcaccatgcaagagcagcatggtttccttaactttggaacttgctttatgtatccaccaataggtatcacctactggcctatgagtggcatgagctagggcctgtggtagaacatactctggctaatgttttatatcatatgagaacaaaagtcaatgtgaggtagattcctctatggaaaccctgaccaggttcctctttcttttcaaacagagtctctctgggaattaatcatgagtatattttgtttaattgtttctaatattctccgtaagatgctgcagaacacagcctttaatttaactttagcaagtttaaaggctgggwtctgaacaataactgttcttttcattttctcatgatttgctacctctattagatgggagtagaaaacacagctagttcagattgaagcaagaatggtgtttcctaacatccattttcttcctgctcttcatctctctctccccacctttggctaaccagggaaatttactataacttatataccacaaaagaatttcaggctgtattctactgaattgtgaaaacatacatgaaagacatgacccaggataggcaagagtagtaataaaccttgggcttctgcctcccctgtgattctatttgaaatcacctaatgcctctatttatatgaggaaggaaaaatgtgatctatatcactaagtgaaatatcccagccaggttctgttgcctaagaaaatcttagatgagaccaaggaaagcacttatatctgcttagaacaawacattgttagtgaacatccaggcacaaaataatgattatagtaataacaatattataataaatgataagtaaggatgactctaggacaacatctgattaaaaaatgtaaaaaatcaagaggactcgaaaa

SEQ ID NO: 292121 - DNA, 636 bp, Homo sapiens
gatacttctaggtcttagctccttttatctttctacttgctgaaataataatgcaacagcaatttttttattgttgttatggttagaaccatcgagactctaatttttcccccttaatttcttcacttcagattgtcagttatttgttttttgttggccttgtgcatgtaacagatcatcagtgtgtgatggaccttagggctctagattctctgatgatattaaataattctttgctaaatccaaaagaaaattagaaagtcttttgcacagcaaggtttgatgattttttaaaactgaacagcagtatctgagtgctttaaatttcaacgcaatttttttcataaattaataacatgcagttataatgacatttagttgcagggtactttattttatagtattcacatttttttacatgtgatattgttctggattaaatgtggacagcattttattatcttcctaagttaacaaattacagtgtcttggtagttgtrgcatgtagttatcttccttttatatcagtatttatcagcagaattataattttctatttctattttaattttataattatcatgtatttagaacagccagatcaataattctggcagcatttattaaatgggtctt

SEQ ID NO: 292122 - DNA, 659 bp, Homo sapiens
agattgaaattctgtcacaggctagcaaaagtagagacctttatatatgacatctgaacaaataagagcctcagggcccagctgcagatattcagtgttatataaaatatggatctaagtcctagctctgtttccaacatgaattccctcatggagcctggtgtaktcttctggctgcttctgcccctgctgactccacaacaaggacatcaggactccaaggacaccatgcctcctggattcgacaaaggaccctgcagagcctggcttccccatggtgttcacatcagtcattgtcctcttctctcattccaccccacccccttttccagctgtcatgtatgaatacttgccagctccttgttattattgctttttggagtcttttcggtttaaggattgggcaagtttgcaatttaaaccttatgggtttgaattttcaagtgtgaactttggtgattactcttgtccaaatgcagcttcctgccctcgtggaaaaaaaaagtctccagagacatttggacatctattgcaaaagatatttggacacctattgcaaaagaacatatgctgatgatctaagtataatggaaccagaagtatatggattatatttcctcttaaatgagcatgattttcaaaatgaaggaagtgagtga

SEQ ID NO: 292123 - DNA, 659 bp, Homo sapiens
agattgaaattctgtcacaggctagcaaaagtagagacctttatatatgacatctgaacaaataagagcctcagggcccagctgcagatattcagtgttatataaaatatggatctaagtcctagctctgtttccaacatgaattccctcatggagcctggtgtagtcttctggctgcttctgcccctgctgactccacaacaaggacatcaggactccaaggacaccatgcctcctggattcgacaaaggaccctgcagagcctggcttccccatggtgttcacatcagtcattgtcctcttctctcattccaccccacccccttttccagctgtcatgtatgaatacttgccagctccttgttattattgctttttggagtcttttcggtttaaggattgggcaagtttgcaatttaaaccttatgggtttgaattttcaagtgtgaactttggtgattactcttgtccaaatgcagcttcctgccctcgyggaaaaaaaaagtctccagagacatttggacatctattgcaaaagatatttggacacctattgcaaaagaacatatgctgatgatctaagtataatggaaccagaagtatatggattatatttcctcttaaatgagcatgattttcaaaatgaaggaagtgagtga

SEQ ID NO: 292124 - DNA, 565 bp, Homo sapiens
cagcatttggaatgacctggatgagattggaggctattattctagtgaaggaactcaggaatggaaaaccaaacatcrtatgttcccactgatacgtgggagctaagctatgaggatgcaaaggcataagaacgatataatggactctgggaacttggggggaagagtgggagggagtgaggcataaaagagtggaagggagcaaggaataaaacaaatatggtgcagtgtataccacttgggtgataggtgcaccaggatctcacaaatcaccaccaaagaactatccatgtaaccaaataccacctgtacccccaataatttatggaaaaataataattaaaaagtaaaaaaaaaaattcatattgttttgatttttgaaacaaattacccactcaaaaaattaaaatttcagggtaaacaaaaaagaaaagaaaaatcaagttatgtggtctaagagatataataaaatattatagggttttatactaagtaccaagaaattaagatggaaaaataatagacatgccaaagtataaacataaacaacaaaaataaatagcag

SEQ ID NO: 292125 - DNA, 565 bp, Homo sapiens
cagcatttggaatgacctggatgagattggaggctattattctagtgaaggaactcaggaatggaaaaccaaacatcgtatgttcccactgatacgtgggagctaagctatgaggatgcaaaggcataagaacgatataatggactctgggaacttggggggaagagtgggagggagtgaggcataaaagagtggaagggagcaaggaataaaacaaatatggtgcagtgtataccacttgggtgataggtgcaccaggatctcacaaatcaccaccaaagaactayccatgtaaccaaataccacctgtacccccaataatttatggaaaaataataattaaaaagtaaaaaaaaaaattcatattgttttgatttttgaaacaaattacccactcaaaaaattaaaatttcagggtaaacaaaaaagaaaagaaaaatcaagttatgtggtctaagagatataataaaatattatagggttttatactaagtaccaagaaattaagatggaaaaataatagacatgccaaagtataaacataaacaacaaaaataaatagcag

SEQ ID NO: 292126 - DNA, 573 bp, Homo sapiens
cggggacccctttccccgggcactgggaacgccacagtgggccgcgtgcccgtggacgacgtgtggttcgcgctggacacggaatacatggtgctggagctcagtgagcccctgaaacctggtagcagctacgagctgcagcttagcttctcgggcctggtgaaggaagacctcagggagggactcttyctcaacgtctacaccgaccagggcgagcgcaggtaagggctgtacagcccggggcccctctcggcccccgcccctgcgtcccggtgcaggctgcgggtccagctgactaccgtgtccaggtgcgcgtctgctgccctttccaaagaatccccttgcgacgttttcttttttctttttatttatttattttattatactttaagttctagggtacatgtgcacaacgtgcaggtttgttacatatgtatacgtgtgccatattggtgtgctgcacccattaagaaatatacccattaggtatatctcccaatgcaaactatcgcaaggacaaaaaaccaaacagcgcatgttctcacccataggtaggaattgaacaatgagaac

SEQ ID NO: 292127 - DNA, 573 bp, Homo sapiens
cggggacccctttccccgggcactgggaacgccacagtgggccgcgtgcccgtggacgacgtgtggttcgcgctggacacggaatacatggtgctggagctcagtgagcccctgaaacctggtagcagctacgagctgcagcttagcttctcgggcctggtgaaggaagacctcagggagggactcttcctcaacgtctacaccgaccagggcgagcgcaggtaagggctgtacagcccggggcccctctcggcccccgcccctgcgtcccggtgcaggctgcgggtccagctgactaccgtgtccaggtgcgcgtctgctgccctttccaaagaatccccttgcgacgttttcttttttctttttatttatttattttattatactttaagttctagggtacatgtgcacaacgtgcaggtttgttacatatgtatacgtgtgccatattggtgtgctgcacccattaagaaatatacccattaggtatatctcccaatgcaaactatcgcaaggacaaaaaaccaaacagcgcatgttctcacccataggtrggaattgaacaatgagaac

SEQ ID NO: 292128 - DNA, 408 bp, Homo sapiens
gttattattttaaacatctataaaatctgtagtgacatcaccttttattcctgatattggaaatttgtgtcttctctctttgggagctggagcccttatctagtaccactctaccacttactagttgtctaaccagtttcttcagctttcataggtttcttctacttctaatattcaataagtttatttrgtctgccttgagatttatctttttttgaggctggtaaatatggactttttattatggaaaattctttaaacatttacagaatataataagcccccattcataacccagctttgggaacacctttttcaaaaatattttatctagcatttctgttgagtttgaagtaggaggtaaggtttcctgttttagctcagtccaccatcatagtagaaagttct

SEQ ID NO: 292129 - DNA, 401 bp, Homo sapiens
gcttgggacctggagccctgattctggtaccactgtgcacttgctggtcgtctaatcagttgcataaactcctggggagtcagttttcacatctgtmaattaagatggtgggactctttaaggtctcttcacttttgtaatttaatgagagaactcatacactcccacttttgttcaaagattcccagaatacttcttgcatttttgattctagcattcccttgattaaagaaaagaaggaactgaaagatatttaaagaaatgaaaatagaaagatcaagatcaaataaggaaagtgtgaaatagttggtgaaaattaggatattttggggggccaaataaaggtgaaagcagcatgattaaaatcaatgaatttgtgcaggtttagacagagtgaacag

SEQ ID NO: 292130 - DNA, 520 bp, Homo sapiens
tgctggtgtcacagaggaaaatgtcatttcattatcctataaaggtgtcaaacccatatatttcatgtggctgagcagtcctctctgggagatggttttgcacagcaaagattcagatcctgtgtcttttgaaaatacgtatagctagcatattgaaaaagcatagcttacagattagtaaaaacacaacttygtttttccattgtccttttacagtgggaaatttagtctgtggggtaacttttctgctctgcatgaggaccccagcagcctataagttcctgcttattcttaagtgacaggtgatctacagtaactaagtcacaagtaagttagatgagaaaattagaaaatccagtcctgtgtaatattcaaacctttgaacttaatttactgttaaacctctttctctcccacctccatttttctcccatcttccactccctactcttgggctagtttttaggatggaagcctgcattaaggtacagggtggtagtccttcttcttttctttacct

SEQ ID NO: 292131 - DNA, 520 bp, Homo sapiens
tgctggtgtcacagaggaaaatgtcatttcattatcctataaaggtgtcaaacccatatatttcatgtggctgagcagtcctctctgggagatggttttgcacagcaaagattcagatcctgtgtcttttgaaaatacgtatagctagcatattgaaaaagcatagcttacagattagtaaaaacacaacttcgtttttccattgtccttttacagtgggaaatttagtctgtggggtaacttttctgctctgcatgaggaccccagcagcctataagttcctgcttattcttaagtgacaggtgatctacagtaactaagtcacaagtaagttagatgagaaaattagaaaatccagtcctgtgtaatattcaaacctttgaacttaatttactgttaaacctctttctctcccacctccatttttctcccatcttccactccctactcttgggctagtttttaggatggaarcctgcattaaggtacagggtggtagtccttcttcttttctttacct

SEQ ID NO: 292132 - DNA, 443 bp, Homo sapiens
tcagaaaataatagcactgcacaaatgcttctgtggacatttcatctggagatggcaaactttacaaccacggctttccttctttccttgacttctagtttgacttctagctcataggttctgaaccttggcagttctcctaggctgcactcctgcaggtgtaccccaacttggtgatggggtctcccacagccaccacttaagtttaggcaagtgacactttgtgcttgagctatcatgatagtcctcaaaccatttgctttgtctccagtttctctctactttaatataaacttcccacaagtgacagattaatcttccccatagtggctttcattgtatcactatcttgctcaaaatcctttaattgcttcrcatttcatagaagaagagatttaaaatctcacattaataaattgcagtccatcataagggcttaccat

SEQ ID NO: 292133 - DNA, 500 bp, Homo sapiens
gcgcatttatctttccccaaagtcactagttttctgataagtgcccctttccctcatcctcacttctcatccttttcacccattaagatggtatctaagcctcaaattctaacyaccactttaagtcacatgtttctgtgaagttcccatatgtatgcatatgattaaaatctgtttttttttttctcttactcatctgtgaatgtgagtttaatcgacaaggcccccaatatcagaacatagaaggatggaagaaaaggtttttttcctagacagtttctttttgtctttgtgtcaaatgggccagactcagagatgagttcactaagaaaaaaaggaagtcctgatttctcccttgctctgcattttactgtagcgatccagctctcctattagaacttttatagatctgcttttatttcattttaaaggtgtgggtctctacgtggtcattttttgtttgttctatttttgtttgcatttttttggtcttatctctt

SEQ ID NO: 292134 - DNA, 593 bp, Homo sapiens
tttccagttctatttctatgacttattttaaattgccatctcgctcttccgacctccccatctctttccagcacacatttggaaacttattattactaccactctgtatgttgtaattcatatgcacaaatcaatttgggaaaatacaagtttatgtgatgggataggcattaactggtcgtgtgtcaaataacattttctgtcaagcctggaaggggtataattttcaagrgaaaccaggttcattttaggaaatacttcaagaaacatggtgttttgaagtatttttcccctccacgttgatcagcttttcttttttttaaatacgggctgaaacctcaaaacagcctgtgagtatttcaggttggcataagcatatgtaaatgattatctgcttttgagcataaagatatacatagacacaccgagagacaagatttttccttttgcaaatggcagtgctttatggcagattgccagaactcacagaggcatgttatcacactgtcaagaggcattgtaccactgaggaaagataccggttttaggtattgtatagagtaattgtggtataggtacttcaattgataaaa

SEQ ID NO: 292135 - DNA, 593 bp, Homo sapiens
tttccagttctatttctatgacttattttaaattgccatctcgctcttccgacctccccatctctttccagcacacatttggaaacttattattactaccactctgtatgttgtaattcatatgcacaaatcaatttgggaaaatacaagtttatgtgatgggataggcattaactggtcgtgtgtcaaataacattttctgtcaagcctggaaggggtataattttcaagagaaaccaggttcattttaggaaatacttcaagaaacatggtgttttgaagtatttttcccctccacgttgatcagcttttcttttttttaaatacgggctgaaacctcaaaacagcctgtgagtrtttcaggttggcataagcatatgtaaatgattatctgcttttgagcataaagatatacatagacacaccgagagacaagatttttccttttgcaaatggcagtgctttatggcagattgccagaactcacagaggcatgttatcacactgtcaagaggcattgtaccactgaggaaagataccggttttaggtattgtatagagtaattgtggtataggtacttcaattgataaaa

SEQ ID NO: 292136 - DNA, 608 bp, Homo sapiens
cttataacactctataacatataggcttctttccactgttgaaaatgcccagcaaaaggacaaatcaacctaattaccttgctctgctcctagaaaaatgacctctttactccctcagacactgtgctctttttaaaaagagagaatcaatgtaaaccttatgtgcaaagaaaatgtcacccaattatatttcattattttaagtgttatggatataggaaagaaaacaaaagccatgaaaattctatcaaaatgttaaccctaaatattctcccattatgartcaattgaataaaattacaacgttaatttttttcagccacaccagttacatcttggcaaggatcaaattacagttgatatatctgtttgacatcttacctctttctgatgactaaagaatattttgttttagagatgacatatattcctgaaatgatttacttcattttctcacagaatatcacatctcaggcaaatatagctacagatatatacatatgtatatacatatgtacgtgtgtgtttgtgggtgtgtatatatataaacataaatatacacacatgcacattttatgatcattttgatataaataagagccctattt

SEQ ID NO: 292137 - DNA, 608 bp, Homo sapiens
cttataacactctataacatataggcttctttccactgttgaaaatgcccagcaaaaggacaaatcaacctaattaccttgctctgctcctagaaaaatgacctctttactccctcagacactgtgctctttttaaaaagagagaatcaatgtaaaccttatgtgcaaagaaaatgtcacccaattatatttcattattttaagtgttatggatataggaaagaaaacaaaagccatgaaaattctatcaaaatgttaaccctaaatattctcccattatgagtcaattgaataaaattacaacgttaatttttttcagccacaccagttacatcttggcaaggatcaaattacagttgatatatctgtttgacatcttacctctttctgatgactaaagaatattttgttttagagatgacatatattcctgaaatgatttacttcattttctcacagaatatcacatctcaggcaaatatagctacagatatatacatatgtatatacatatgtacgtgtgtgtttgtgkgtgtgtatatatataaacataaatatacacacatgcacattttatgatcattttgatataaataagagccctattt

SEQ ID NO: 292138 - DNA, 608 bp, Homo sapiens
cttataacactctataacatataggcttctttccactgttgaaaatgcccagcaaaaggacaaatcaacctaattaccttgctctgctcctagaaaaatgacctctttactccctcagacactgtgctctttttaaaaagagagaatcaatgtaaaccttatgtgcaaagaaaatgtcacccaattatatttcattattttaagtgttatggatataggaaagaaaacaaaagccatgaaaattctatcaaaatgttaaccctaaatattctcccattatgagtcaattgaataaaattacaacgttaatttttttcagccacaccagttacatcttggcaaggatcaaattacagttgatatatctgtttgacatcttacctctttctgatgactaaagaatattttgttttagagatgacatatattcctgaaatgatttacttcattttctcacagaatatcacatctcaggcaaatatagctacagatatatacatatgtatatacatatgtacgtgtgtgtttgtgggtgtgtatrtatataaacataaatatacacacatgcacattttatgatcattttgatataaataagagccctattt

SEQ ID NO: 292139 - DNA, 567 bp, Homo sapiens
aatatggttttcaaaagtttgtgataatgttagcatgccaaatatcactcaagattcatgggcattattcagtcatataaaaaatccttaaaagcaccactttcatcatctgacagttatactgaccaaaaaactgatctctactgaagcaatgagaagtacattaatcaccctgacatgtctattaactagtccccacgtaccagacccaccaagatgctgtcagcagctattccactggtggtaattctggcaggctctgagatattacaaaatgcttgcataaatatcacttcactctcttggactcccaagattcaggcattctgactttggaagagcatggaggatgttattgcatcattattttaaatttcaaagttaacttcattattttctaatgcttaaagcatagactctgaaaaaaascaagttaatcaaaggatgattttgaaactattcaatagtggcttttcattgaataaaacagcatcacattgaaagataaaaattcacatatattgtatatttctcaatcacgtgtatattatgttttagaactttttt

SEQ ID NO: 292140 - DNA, 429 bp, Homo sapiens
ctcatttttatcaactctaactctcttggtgacttaacaatgcctcatgcctttcctaagtattatatgtgattgactcacaaatatttatctccagctctattatatctcctgatttctaggcttatatatccaataaagttcttaatatctccctttggatttctaatagacatctcaaacacacattgctcaaatttaagcacttgatttcccccacctgaatggcaatttcgtttttctaattgctcagaccaagaacataggttatatttgactttatctttttctcatgcctcacaggtaatctgtcagcaaatcctgtaagaccaacctccaagatatattcagaatttggccacctcttaccacttttgctattacatattrccactgcagtccaagacatcggttttccagttggactat

SEQ ID NO: 292141 - DNA, 1211 bp, Homo sapiens
aacacatgacacatggaggggaacatcacatactggggcctgtcagggagtgggggacaagaggagggagagcattaggacaaatacctaatgcatgcagggcttaaaacctagatgacgggttgacagatacagcaaaccaccatggtacatgtttacctatattacaaacctgcacattctgcacatgtatctagaaacttaaagtaaaatyaaaataaaacaaaaaacaaatgcatttcacaatgaaattattaagtaggatacattaagtttgattaaatttggtatatttttaagaggaataccaatggagttttgttggctttttaattgttaaaaaaattttcattgagatataactgatgaaagttgtatatgcccaagttattaataaatatatgcactgtaaagtgatttccacaatcaagctaattaacatatccatgtacttaagatctactgtcttagcaaatttcaagtatgcagtacatcgttattagctacagtcactatgctacacattaggtctctagaacttacttagcttataacwttttggttacagatcctatgtttaaatttttaatcaattgtgagtgatttttaattatgctctgaaataaggattcaatttcatttcttttgcatgtgtatattcaggttttcawacatattttatttaacagactaccatttccccattgtgtattgttagcacctttgttgaagatcacttagtcatatacacataggtttatttttgggctttctattctgcttaattgctctgtatgtctgtttttaacagtatcatactgttttgattactggagctttgtaatataatctgatatcataaaacatgatacctccagctttgttctttttcctcaataatactttagctacttatttgaaggatttttttgtttcatattcatttaaatttgtttttgtatttctttgaaaaaatgacattggaattttgatagggattgcattgagtctgtagattgctttgagtaatacaaaaattctatgaaagcataacactcaatggtaaaataagcaaatagtgaaaattagaatgtcctaatactataatgctgtatataaattgcttacatcccaagtataaaggtcaaaagacaaaacttttaaaaataactaagttacaataatttgataataactaaacaatataaaaa

SEQ ID NO: 292142 - DNA, 655 bp, Homo sapiens
ttttggttacagatcctatgtttaaatttttaatcaattgtgagtgatttttaattatgctctgaaataaggattcaatttcatttcttttgcatgtgtatattcaggttttcatacatattttatttaacagactaccatttccccattgtgtattgttagcacctttgttgaagatcacttagtcatatacacataggtttatttttgggctttctattctgcttaattgctctgtatgtctgtttttaacagtatcatactgttttgattactggagctttgtaatataatctgatatcataaaacatgatacctccagctttgttctttttcctcaataatactttagctacttatttgaaggatttttttgtttcatattcatttaaatttgtttttgtatttctttgaaaaaatgacattggaattttgatagggattgcattgagtctgtagattrctttgagtaatacaaaaattctatgaaagcataacactcaatggtaaaataagcaaatagtgaaaattagaatgtcctaatactataatgctgtatataaattgcttacatcccaagtataaaggtcaaaagacaaaacttttaaaaataactaagttacaataatttgataataactaaacaatataaaaa

SEQ ID NO: 292143 - DNA, 550 bp, Homo sapiens
ccttcaggaagaaaaaagtctacatgtatacaacataaaataatgaataaatatcctcatactagaaagtagagaggattaacttcttaaggaaggacaggagtgctatgggggtcatgtcagtcctataaattctttgctgctgtatcctttttcttccattaattgactctgaccctctattaattcagtcctacttccagtcttcagaaacaaatatgatttcaaataaaaattattgaaccaacttttacccaatactctgaagcttagcaaaaatcacctttaccacccacatctaataatagcaaacatcccttgagcatatgctagatggcaggcatatttctaatcatttcataagcctcgtctcatccaatctttccaaaagcactacctggtaagttctgttaccatttcctgaggctgagagatataaaagaagatgcccaaggctaccgaatttatrttccttgctcctagtcaacacatacactgcatatgacataatttgaaaatcagcctctgacctggagtcaaaagccctcac

SEQ ID NO: 292144 - DNA, 579 bp, Homo sapiens
gatagatagatttctatctatctataaaggggagtttattamgcattaatttatatgatcacgaggtcccacaataggctgtctgcaaggagagccagcctgagtctcaaaactgaagaacgtggagtctgatgttctagagcaggaagcatccagcataggagaaagatgtaggctgggagggtgggccaatctcaccttttcatggttttctgcctgttttatattcactagcagctgatttgattgtgcccaccagatcaagggtgtgtctgccttccccagcccactgactcaaatgttaatctcgtttggcaacaccctcacagacacacccaggattaatactttgcatccttcaatgcaatcaagttgacactcagtattaaccatcacaataagcaaggaaaaaatattggaggaaagatcttctcaaaattataagacatatgaagacatatatgactgcttatttataaagccatatcacagtaaaatttcccaattttagtcaatagctatctacttactgaccacaatgaatagaatattgtgtatagacaggcaccaaagtgcaga

SEQ ID NO: 292145 - DNA, 576 bp, Homo sapiens
tcatgtcctttgcaggcacatggatgaagctggaagccatcatcctcagcaaactaacacaggaacaaaaaaccaaacaccacatgttctcacttttaagtgagagctgagcattgagaacacatggacacagaaaggggaacaacayacaccaggtcctgttggggggtgagcggtgaggggaggaaacttagagaatgggtcaataggtgcagcaaaccaccatgtcacatgtattcctatgtaacaaacctgcacattttccatatgtatcccttttttttggaagaaataaaaaaaaccaacatatatattaattatacttatatttaaaccaacatatatattaattataaacatacactataaatatgtttatatataatatgtattgtttcattgtaaacactatatatatatatatatatatatatatatatatacacacacacactcttttctgatgtaaaaatattggaaaacataattcaaatgagtaagtttaaaagcaacaaagaaacgtgagttgaactgagtctactattacttttgtcttccgaccaagtatacccatat

SEQ ID NO: 292146 - DNA, 1331 bp, Homo sapiens
tcgaatgaatttgtttatcgctctgtgctttagtttcctgtatttaaaatgcattttcttaaaaataaattaaaaatgcatcttatgacagttattattcagttattttaaggctcataagaatgaatacatacaacactaaaacttagtaagcattaaaccaaaggcaacagtagcacactgagtcttaatttttctctgatgacatacaatgtaagataatagaagtgyacatttaaataaaacacacatttgaattagaatattcagaatcaatcattgggctcctacagaaagagatgaatagttaaaatttctctaatactttagccttgtcatcaatttcatatttttttcttttcgctctgttcctatggctcttctgatgacattaaaccatcttcccctctctgccccgatatcattcttccccttttctcaggaccctggaggattagcttgagcttgtcaaggaaggtttccaaaacatatagttttaaaatatgctaaatatagatgtttaagataatccagtagtctttttttctctacatttcattgttcttagcttagagctatcttttagcttaagctctctgttagggaatgaggagagtcaaagaactactacttgtctgcatctgagatctgaagcatcttgaatawtcgaatgaatttgtttatcgctctgtgctttagtttcctgtatttaaaatgcattttcttaaaaataaattaaaaatgcatcttatgacagttattattcagttattttaaggctcataagaatgaatacatacaacactaaaacttagtaagcattaaaccaaaggcaacagtagcacactgagtcttaatttttctctgatgacatacaatgtaagataatagaagtgcacatttaaataaaacacacatttgaattagaatattcagaatcaatcattgggctcctacagaaagagatgaatagttaaaatttctctaatactttagccttgtcatcaatttcatatttttttcttttcgctctgttcctatggctcttctgatgacattaaaccatcttcccctctctgccccgatatcattcttccccttttctcaggaccctggaggattagcttgagcttgtcaaggaaggtttccaaaacatatagttttaaaatatgctaaatatagatgtttaagataatccagtagtctttttttctctacatttcattgttcttagcttagagctatcttttagcttaagctctctgttagggaatgaggagagtcaaagaacwactacttgtctgcatctgagatctgaagcatcttgaata

SEQ ID NO: 292147 - DNA, 665 bp, Homo sapiens
tcgaatgaatttgtttatcgctctgtgctttagtttcctgtatttaaaatgcattttcttaaaaataaattaaaaatgcatcttatgacagttattattcagttattttaaggctcataagaatgaatacatacaacactaaaacttagtaagcattaaaccaaaggcaacagtagcacactgagtcttaatttttctctgatgacatacaatgtaagataatagaagtgcacatttaaataaaacacacatttgaattagaatattcagaatcaatcattgggctcctacagaaagagatgaatagttaaaatttctctaatactttagccttgtcatcaatttcatatttttttcttttcgctctgttcctatggctcttctgatgacattaaaccatcttcccctctctgccccgatatcattcttccccttttctcaggaccctggaggattagcttgagcttgtcaaggaaggtttccaaaacatatagttttaaaatatgctaaatatagatgtttaagataatccagtagtctttttttctctacatttcattgttcttagcttagagctatcttttagcttaagctctctgttagggaatgaggagagtcaaagaactactacttgtctrcatctgagatctgaagcatcttgaata

SEQ ID NO: 292148 - DNA, 1149 bp, Homo sapiens
ttacatagttaactgttctcaatttatgtctaagattacagcattttaaacaactagcagagaatgtaaaactcataatagcaatattttccttaggtacaggtacagagagacctctcctttcaaatattgaacataaaagtattaatcatgagttacatataagtaaaattaataagactgtacattaattatgaataataggctatatggcaacaaatgcaaatataaccctatagattaccatcaacatatcaaactatataatccacaatatgttaaaagtccatgttgcggcataatatttcattgtacatatrtatcacattttctttatccattacaatcacctgctgatgggtaattaggttatttccatatgttaactgttgtgaatgctgctgcaatataaatgggagtgcagaatctctttaggatccttgtttcaattcatttggatatatacccagaagtggaattgctgaatcatatactagttctatttttattttttacagggcccccatattgtttcccaaaacaagtgtaccattttacatttcactaatwcccatttaaatgatgaaagggtatatattaatctatgaaatagattttacccaggggggaaaattgttctatttatgaaagttaaaaacattcagtgcacagagaagcacttatcagatgagcatccacggtatgcagatgcattttactaatgcttcctgctaagataaatagtctgtggtcatggaagatgctactataatttgctagaaataaaagaactaaaaagaacaacatgtaggcagctttttgtaaagcatggggagtaaatattctaaattactggacctctgtgttttatacagttaattcaaaaatcattgataaaacatgacaataaatatatacgtgtgtatatatattatacacgcaaaaataactgagtgattttttwaatatttactattccctaaaggtaagtgaatatatcttttggtaataactgtatgcttgattcacacccaccttcattttcaggatcctcagaccccattacaatttttagtttgtggacattgtttacatatgtgaatagttccctattctttgtatctgcaatgagataaaggatttttagtt

SEQ ID NO: 292149 - DNA, 607 bp, Homo sapiens
ttctgccttaattcttcttaagccttttgggactaatggaggcctattaacttcaaggtcttaacttcagaccttaaaagttggtggggacttcagtgttaagaggaagccattaaaatggagacagttccctgaaaacaatattttgctaatggataggacttaatctgtggcttacatatgataatacacagccactcaggttgctataatctatacattattgaaaagaatttaaaggctgatgaattacaatttttttctgcgtaatagcagtgcttgaattaaagcagaaatatttacttattaattatagccatttgggccataattctaagggtgagaaaatattaataaaagtgataattttgaagacagttttaagaaaggtcataaaaaagaggccttttgttccttgggaagcaattttcttagagtcagtctatcccaaacccaatcctttctactcaaaatagtgtcttcctgcacaaagaccttccaagaaagctaaactgatgaaatgagttacagsagaatgaataattgcataatggatgtgaggaaactgatcagtgaggttcctggccagctaaggggatgagaaagc

SEQ ID NO: 292150 - DNA, 437 bp, Homo sapiens
tagtcagcacccagcaggataaaccaagggtcccaggaagctgagggcactgtcaccatcttaagagatgtgtgtttcattaccagagaagtctcttacaacccttccagagaagaaagtctaactcagataatcatctctatacagtgagaaattgtattagcacttctaggagcacatcttctgaagaaggcctctgctttttccaatcagtgatgtctcttctttctcatagtagctgggactacagcaatamcatactcattagtgcaacacacattggacaatatatggaatgcatagaaattgtactaggcaaaaacatacaataaaacaaatgagttggagattatcaggaaagcaaagagaaatgtgtgttaggcccaggattggtggaggtttctgctaaggtcagtgaagggctgggtcaagtgtcc

SEQ ID NO: 292151 - DNA, 437 bp, Homo sapiens
tagtcagcacccagcaggataaaccaagggtcccaggaagctgagggcactgtcaccatcttaagagatgtgtgtttcattaccagagaagtctcttacaacccttccagagaagaaagtctaactcagataatcatctctatacagtgagaaattgtattagcacttctaggagcacatcttctgaagaaggcctctgctttttccaatcagtgatgtctcttctttctcatagtagctgggactacagcaataacatactcattagtgcaacacacaytggacaatatatggaatgcatagaaattgtactaggcaaaaacatacaataaaacaaatgagttggagattatcaggaaagcaaagagaaatgtgtgttaggcccaggattggtggaggtttctgctaaggtcagtgaagggctgggtcaagtgtcc

SEQ ID NO: 292152 - DNA, 558 bp, Homo sapiens
attctcatactgtacactctattacattgtaacaaaagaagagatttttcctaactttctagtctcataatatctttagtgatatagctctcctaattttgtttgaatccccttattcctagaaccgaactacaagccatggatgttagaccaacatagtgtaagttcatcatatggtactcaaagtcacctctccttaccacaatataagtaactaaatgacatatcttattttttatataccctatataggctatttatattctttattatgttctgtgttgacacttaacagttctttattttgcagcatttgtttatgaaattcctttcagatacactctatgttccacttacattttacagtggccacattcatctgattccattcttttgttcattgaacattctttatttaaaaaaaattcaacattagtatcatgagctggtattctgaacatgtactggcataaatttaacaactttgagarttgcttttcaaatttgatttgttgaaacacataatggatatctttcataatggaacttcctttattt

SEQ ID NO: 292153 - DNA, 504 bp, Homo sapiens
agagatcatcttacatgtctacattgcttgctaagaattgtcataaggcataracagtgctccaaaaatatctattgaatgaattaattttcaaacatatttgatgattaaatgaatttataatgtcttaaaaattcctacaacagtagtttttttaatcttttacttttgcatttataataataataaatttacttaaattctaaataaatgcaaaaggaaaaaataaaaagcggtgaagaaattagtcttacagaaattaatgttttgccaactaagaaagttacatgtatttaaagaagattctttacaaaaatatcaaatgctcgattcatagatataagacaatggaagaaggaaaaaaagaaatattcaagagaaacttaaattctagtattagaaaatacaacgtatacagcaaattgtgcttctacattgaaaaatataaactgcttctcaggctaaattatgtaatgttaataataacaaggaaaaatgtatttg

SEQ ID NO: 292154 - DNA, 541 bp, Homo sapiens
gtgctaagaatgatccctggtattcagtaattattcktattcttatcacaatatagcaagtccccaagactaatgaaacaatcacaaaaggccacccagaggaagtgctttatgaaatggaatttaacttcccaacaaatgttatgcacacatttactgaagcacatattgcttaactggttcgacattagacttgaataaagcaaggtctgtgttttactcacttttgtattatttatgcaaaattccaagcttaaggaatatttgctggattcaaattgccatatgactttaactattggcacaaattacttccaaacattatagaaaggctatgttctttaagataacagaataggaagtgattataatttagatgtggactgtaagagaccttagacatcaagaaacccaggattttcattggagagatgagaaaacttgacctcaagaagccaaattgcatatcaatatatagagcaagtgaacacctgcagtgagattataacacaagttcttgcatcagcactggtcacaccaa

SEQ ID NO: 292155 - DNA, 587 bp, Homo sapiens
tattttcctttttatctgtggtctttcctctccatttctattatttattgccaatctttctcttataagtaaaattcattagaagtgctcactcattactactcttatttccagcaaatgcacacatcccttttattatctgatgtgttaattcaatgaacaactaaacatattctgcatctatcaagtgttatacactagggatacaaggttgagaagggcatggtccttacagacaggacggaaagctcacaaaagagaaggcacagagaagtcagcataagattacratttcatacatttggtagaatcacatatgtaatgaggaactcaaggatcagagcatacatgttttgagggtcagaaaaatgttgcctgggagaagtacattcaacactgagataagaaaaaaatgaattggaattatctgagtgaagcgaaggaggatcttttctcaagcatttggaagagtaggtgcaaaattccaaaggtgagtaagaattgttatattccaagactcatcatactatggttttgttgcccagaaatctttatccacactatcttcactcctgttaaaaatacac

SEQ ID NO: 292156 - DNA, 418 bp, Homo sapiens
atattctgcatctatcaagtgttatacactagggatacaaggttgagaagggcatggtccttacagacaggacggaaagctcacaaaagagaaggcacagagaagtcagcataagattacaatttcatacatttggtagaatcacatatgtaatgaggaactcaaggatcagagcatacatgttttgagggtcagaaaaatgttgcctgggagaagtacattcaacactgagataagaaaaaaatgaattggaattatctgagtgaagcgaaggaggatcttttctcaagcatttggaagagtaggtgcaraattccaaaggtgagtaagaattgttatattccaagactcatcatactatggttttgttgcccagaaatctttatccacactatcttcactcctgttaaaaatacac

SEQ ID NO: 292157 - DNA, 541 bp, Homo sapiens
gtgctaagaatgatccctggtattcagtaattattcttattcttatcacaatatagcaagtccccaagactaatgaaacaatcacaaaaggccacccagaggaagtgctttatgaaatggaatttaacttcccaacaaatgttatgcacacatttactgaagcacatattgcttaactggttcgacattagacttgaataaagcaaggtctgtgttttactcacttttgtattatttatgcaaaattccaagcttaaggaatatttgctggattcaaattgccatatgactttaactattggcacaaattacttccaaacattatagaaaggctatgttctttaagataacagaataggaagtgattataatttagatgtggactgtaagagaccttagacatcaagaaacccaggattttcattggagagatgagaaaacttgacctcaagaagccaaattgcatatcaatatatagagcaagtgaacacctgcagtgrgattataacacaagttcttgcatcagcactggtcacaccaa

SEQ ID NO: 292158 - DNA, 382 bp, Homo sapiens
aggatgcaacccctgcttttttctgttttctacatgcttggtagattttcctccattcctttattttgagcckatgggtgtcatcacatgtgagataggtctcaaagacagcataccattgagtcttgcttttttattcagcttgcccccctttaccttttaagtggggcatttagcccacttacattcaaggttagtatttgatatgtgtagatttgatgccctccctcatgactcctattcaacataggaaatcccagccagagtaatcaggcaagagaaagaaataaagggcatccaaataggaagagaggaagtaaaattatccctatttgaagctgacatgattctatatctagaaaaccccatagtctcagccgca

SEQ ID NO: 292159 - DNA, 541 bp, Homo sapiens
agaggaagtaaaattatccctatttgaagctgacatgattctatatctagaaaaccccatagtctcagccscaaagctccttctgctaataaaaaaaacttcagcaaagttttagaaagaaaatcaatgtacaaaaatcactagcatttctataaaccaacagtaaccaagctggcagtcaaatcaggaaggcaatcccattcacaattttcacaaaaagaataaaatatctagggtaaaatacaactaaccagggaggtgaaaaatctctacaatgagaattacaaaacactgcacaaagaaatcagagaggatacaaacaaaatggaaaacatatcatgctcatggataggaagaagcaatatcattaaaaggccatactgcacaaagcaatttacagattaaatgctatttctatcaaactaccaatgacattcttcacaaaactagaaacaactgttttaaaattcatgtggaaccaaaaaagaggccaaatagccaaggcaatcttaagaaaaagaacaaagctggaagcatcagg

SEQ ID NO: 292160 - DNA, 541 bp, Homo sapiens
agaggaagtaaaattatccctatttgaagctgacatgattctatatctagaaaaccccatagtctcagccgcaaagctccttctgctaataaaaaaaacttcagcaaagttttagaaagaaaatcaatgtacaaaaatcactagcatttctataaaccaacagtaaccaagctggcagtcaaatcaggaaggcaatcccattcacaattttcacaaaaagaataaaatatctagggtaaaatacaactaaccagggaggtgaaaaatctctacaatgagaattacaaaacactgcacaaagaaatcagagaggatacaaacaaaatggaaaacatatcatgctcatggataggaagaakcaatatcattaaaaggccatactgcacaaagcaatttacagattaaatgctatttctatcaaactaccaatgacattcttcacaaaactagaaacaactgttttaaaattcatgtggaaccaaaaaagaggccaaatagccaaggcaatcttaagaaaaagaacaaagctggaagcatcagg

SEQ ID NO: 292161 - DNA, 541 bp, Homo sapiens
agaggaagtaaaattatccctatttgaagctgacatgattctatatctagaaaaccccatagtctcagccgcaaagctccttctgctaataaaaaaaacttcagcaaagttttagaaagaaaatcaatgtacaaaaatcactagcatttctataaaccaacagtaaccaagctggcagtcaaatcaggaaggcaatcccattcacaattttcacaaaaagaataaaatatctagggtaaaatacaactaaccagggaggtgaaaaatctctacaatgagaattacaaaacactgcacaaagaaatcagagaggatacaaacaaaatggaaaacatatcatgctcatggataggaagaagcaatatcattaaaaggccatactgcacaaakcaatttacagattaaatgctatttctatcaaactaccaatgacattcttcacaaaactagaaacaactgttttaaaattcatgtggaaccaaaaaagaggccaaatagccaaggcaatcttaagaaaaagaacaaagctggaagcatcagg

SEQ ID NO: 292162 - DNA, 585 bp, Homo sapiens
atttgcaaactatgcgtctgacaaatgtctaaaatccagcacctataaggaatttaaacaaatttacaagagaaaaacaaccccactaaaatgtgggcaaagtacatgaacagacacttttcaaaagaagaygtacatgtagccaacaagcatgtgaaaaaaaaaaaaactcaatatcactgatcattagagaaatgcaaattaaaaccacaatgaaatataatttcataccagttaaaatggctactattaaaatgtcaaaaaataacagatgctggcaggttgtggagaaaaggaaacacacactgttagtgggagtgtaagttagttcaactattgtggaaagcagcatggcaattcctcaaagagataaaagcagaactaccattccaaccagcaatcgcattactgcatatatacccagaagaaaatatatcattctaccataaagacacatgcacacaaatgttcattgcagcaatatgcacaatggcaaagacatagaatcaacctcaatgctcatcaataagagtttagataaagaaaatgtggtatatagacaccatggagctataaaaaagaatg

SEQ ID NO: 292163 - DNA, 604 bp, Homo sapiens
tctgtctcaataaatgaataaataaataaatacagtaaagaaagaaagaaaaaagaaaatatggtacatataccagccataaaaagaataaaatcgtgtgttttgcagcaacacatatagagctggaggccattatcktgggtgaaataactcgaaaaatcaagtactgcatattctcacttataagcggaagctaaacaatgagtacacatggacataaagaggaaaataataggcattggggactctaaaagtggggaggataggagagagatgagggttgaaaaataacctattgggtacaatgtttactttatgggtgatgggtacattagaagcacaaacctcaccattacccaatacatccatgtaacaaacctgcacatgtacccccgtacttataatacaaaataaagtgggattgacaacaatactcaatttggttgatatttcagcaacaatgtggactgaaagaagtgagaattagccatgcggatatctagggaatagcactctaggtatgggaacagcagtgcaaactccctgaggtggcagggcagcgtgcatgaacagcgagaagagagtaataggaaatgaggttaag

SEQ ID NO: 292164 - DNA, 586 bp, Homo sapiens
ttctctacagtattctccaaatttatgatataaatattatagtctacattttacatatgaagactctgaggtatgaagaaattcagtaatttacacaataacacaaatgtaataagtgatcagtttcggattctaacccacaaatatctgatgttcaggatcatggattttaactctttttatgttgtatacaccctatatgccaaacaaaaattcaaacgacaacaacaacaaaatttaaagatgggcttgctatatgtgcatgcattcgttcctttataaattcattagttcatyaaaccattgctgagcatggaccatgtgatctgtgtttgatctggtgaaaacacagaaatcactaaatatggtatgattgtgtctaatttcatatccctgtgaaaagaaaacttcgacctctaaagttagaccaactctgataaaaatccacagcaatgacagaaagaaggatacaaattaaatatgaggtggtggaaaagtgtacacagccagagaaagaataagattacacaaagggatttgatataagtgtatcatattgctccattctcaaatattgtgaattgaa

SEQ ID NO: 292165 - DNA, 586 bp, Homo sapiens
ttctctacagtattctccaaatttatgatataaatattatagtctacattttacatatgaagactctgaggtatgaagaaattcagtaatttacacaataacacaaatgtaataagtgatcagtttcggattctaacccacaaatatctgatgttcaggatcatggattttaactctttttatgttgtatacaccctatatgccaaacaaaaattcaaacgacaacaacaacaaaatttaaagatgggcttgctatatgtgcatgcattcgttcctttataaattcattagttcattaaaccattgctgagcatggaccatgtgatctgtgtttgatctggtgaaaacacagaaatcactaaatatggtatgattgtgtctaatttcatatccctgtgaaaagaaaacttcgacctctaaagttagaccaactctgataaaaatccacagcaatgacagaaagaaggatacaaattaaatatgaggtgrtggaaaagtgtacacagccagagaaagaataagattacacaaagggatttgatataagtgtatcatattgctccattctcaaatattgtgaattgaa

SEQ ID NO: 292166 - DNA, 482 bp, Homo sapiens
caaaattaaataaaacctataaggcatttaacatagtatataatattcgataagagctaataatggaaataatgaagaaatgctaacaataaattaagaaatgatatctaactatagtaatgtattgttattaayaactgattattattggcatttatttttaaatctagactaaatcacatacatttatgtagtattctgaaaaataactacattgtttgaaatgatacatcaaatttactgttattcaaaatagagattccattactgaaaatttgatatgaatggtttattgtctggaaattttttccctaaaaccgagcttgtgaaatatgttttacaatgttggaaaagtaagaaagaagttattttaaccttctctcatatttttcttcccaaatcctgggtccaagccagtgacctctccaacttttatagaagttcttattcacatattgtgacactttgaaatgagagattat

SEQ ID NO: 292167 - DNA, 520 bp, Homo sapiens
taactacattgtttgaaatgatacatcaaatttactgttattcaaaatagagattccattactgaaaatttgatatgaatggtttattgtctggaaattttttccctaaaaccgagcttgtgaaatatgttttacaatgttggaaaagtaagaaagaagttattttaaccttctctcatatttttcttcccaaatcctgggtccaagccagtgacctctccaacttttatagaagttcttattcacatattgtgacactttgaaatgagagattataattggagtgagctaaagttgtaaaatatgacaatctgagaaaatargatggcttttatatgtagccatgaaggcaatattcgagcaagtaagaaagataaaagacagcattgggggaatagcatatttttttttctataacaggatgtataatatatcctagcacataagcttttttgctcttgagcattgcaaatattcttttttcttctgtgagcttctttggcatacactggggatgctt

SEQ ID NO: 292168 - DNA, 565 bp, Homo sapiens
tctgtaactgcttttataaagatgtccrtattaagtaggacagacctttatgtgattgcttttgtccatatatgttttgagactgaagaagagcgatagtaaaacagatagagcaataaagatttagaccacatgtctggaagtttctcattccagcagaaaaattcaaaatggggacctagttccatgacaaaagataatgacaaataaattgttaatatttaaatatgtgatccgtctatattaaggaaagtaaagacactaatccaaatgcatgcttgaaacttatggggcttcgtgttcagaaaacaaagaaagaaaatgctacaaagatatttggagagagaagtgggggtattgaatatgacccattattaagtgataacaggcattttaattaattttcttaactgaaactgtgacaatgtggttatgcaggaaaaggtcttattttcagaaaactggtgctgaaatattgtgtagtgagttggtatgatgtttgtaaattattttcaaatcatccatatatgaaagtaaagcaaatacaacaaaatgttgagaatgg

SEQ ID NO: 292169 - DNA, 565 bp, Homo sapiens
tctgtaactgcttttataaagatgtccatattaagtaggacagacctttatgtgattgcttttgtccatatatgttttgagactgaagaagagcgatagtaaaacagatagarcaataaagatttagaccacatgtctggaagtttctcattccagcagaaaaattcaaaatggggacctagttccatgacaaaagataatgacaaataaattgttaatatttaaatatgtgatccgtctatattaaggaaagtaaagacactaatccaaatgcatgcttgaaacttatggggcttcgtgttcagaaaacaaagaaagaaaatgctacaaagatatttggagagagaagtgggggtattgaatatgacccattattaagtgataacaggcattttaattaattttcttaactgaaactgtgacaatgtggttatgcaggaaaaggtcttattttcagaaaactggtgctgaaatattgtgtagtgagttggtatgatgtttgtaaattattttcaaatcatccatatatgaaagtaaagcaaatacaacaaaatgttgagaatgg

SEQ ID NO: 292170 - DNA, 565 bp, Homo sapiens
tctgtaactgcttttataaagatgtccatattaagtaggacagacctttatgtgattgcttttgtccatatatgttttgagactgaagaagagcgatagtaaaacagatagagcaataaagatttagaccacatgtctggaagtttctcattccagcagaaaaattcaaaatggggacctagttccatgacaaaagataatgacaaataaattgttaatatttaaatatgtgatccrtctatattaaggaaagtaaagacactaatccaaatgcatgcttgaaacttatggggcttcgtgttcagaaaacaaagaaagaaaatgctacaaagatatttggagagagaagtgggggtattgaatatgacccattattaagtgataacaggcattttaattaattttcttaactgaaactgtgacaatgtggttatgcaggaaaaggtcttattttcagaaaactggtgctgaaatattgtgtagtgagttggtatgatgtttgtaaattattttcaaatcatccatatatgaaagtaaagcaaatacaacaaaatgttgagaatgg

SEQ ID NO: 292171 - DNA, 1125 bp, Homo sapiens
tcctttaaggtattatcatgtaataaactgctacaaaaagtctaattctctcamgagttttatagtcatccacttcattttcaggtcaacattttaacatattttcccatatttttttctgaagctttaatctctgcaaagcccatctttaaatttgaaggaaaaggtagaagagtgaggagcagcagtaattaacttgaatttggaacttggatataactaaagacacattttgcttcttcatttttatgtcagtttgcaaaggaaacagttatgattttagctaaatacagaaatttttttcttttttctttttaaaattctacttgtatcacatttcaaaacctactctgaattttcactcagttcccacaatattaccataattctttgagctgttggcaaaatggatccattttataaagtcatgccttttgcattgagcttttgcctgtctcatatatttagataaatttgaaagcaaaaggaatatccactgtgttgaatatctttaatagcatggttgaaatttataatttgaaattcataagttcaaagaacawtcctttaaggtattatcatgtaataaactgctacaaaaagtctaattctctcaagagttttatagtcatccacttcatttwcaggtcaacattttaacatattttcccatatttttttctgaagctttaatctctgcaaagcccatctttaaatttgaaggaaaaggtagaagagtgaggagcagcagtaattaacttgaatttggaacttggatataactaaagacacattttgcttcttcatttttatgtcagtttgcaaaggaaacagttatgattttagctaaatacagaaatttttttcttttttctttttaaaattctacttgtatcacatttcaaaacctactctgaattttcactcagttcccacaatattaccataattctttgagctgttggcaaaatggatccattttataaagtcatgccttttgcattgagcttttgcctgtctcatatatttagataaatttgaaagcaaaaggaatatccactgtgttgaatatctttaatagcatggttgaaatttataatttgaaattcataagttcaaagaaca

SEQ ID NO: 292172 - DNA, 562 bp, Homo sapiens
tcctttaaggtattatcatgtaataaactgctacaaaaagtctaattctctcaagagttttatagtcatccacttcattttcaggtcaacmttttaacatattttcccatatttttttctgaagctttaatctctgcaaagcccatctttaaatttgaaggaaaaggtagaagagtgaggagcagcagtaattaacttgaatttggaacttggatataactaaagacacattttgcttcttcatttttatgtcagtttgcaaaggaaacagttatgattttagctaaatacagaaatttttttcttttttctttttaaaattctacttgtatcacatttcaaaacctactctgaattttcactcagttcccacaatattaccataattctttgagctgttggcaaaatggatccattttataaagtcatgccttttgcattgagcttttgcctgtctcatatatttagataaatttgaaagcaaaaggaatatccactgtgttgaatatctttaatagcatggttgaaatttataatttgaaattcataagttcaaagaaca

SEQ ID NO: 292173 - DNA, 562 bp, Homo sapiens
tcctttaaggtattatcatgtaataaactgctacaaaaagtctaattctctcaagagttttatagtcatccacttcattttcaggtcaacattttaacrtattttcccatatttttttctgaagctttaatctctgcaaagcccatctttaaatttgaaggaaaaggtagaagagtgaggagcagcagtaattaacttgaatttggaacttggatataactaaagacacattttgcttcttcatttttatgtcagtttgcaaaggaaacagttatgattttagctaaatacagaaatttttttcttttttctttttaaaattctacttgtatcacatttcaaaacctactctgaattttcactcagttcccacaatattaccataattctttgagctgttggcaaaatggatccattttataaagtcatgccttttgcattgagcttttgcctgtctcatatatttagataaatttgaaagcaaaaggaatatccactgtgttgaatatctttaatagcatggttgaaatttataatttgaaattcataagttcaaagaaca

SEQ ID NO: 292174 - DNA, 586 bp, Homo sapiens
gtgaggagcagcagtaattaacttgaatttggaacttggatataactaaagacacattttgcttcttcatttttatgtcagtttgcaaaggaaacagttatgattttagctaaatacagaaatttttttcttttttctttttaaaattctacttgtatcacatttcaaaacctactctgaattttcactcagttcccacaatattaccataattctttgagctgttggcaaaatggatccattttataaagtcatgccttttgcattgagcttttgcctgtctcatatatttagataaatttgaaagcaaaaggaatayccactgtgttgaatatctttaatagcatggttgaaatttataatttgaaattcataagttcaaagaacatttatctactgcttgattttatgcttgaaacttcctatgcttcacagcagtttttttttaataggtggacaaaaatccttcctcctatcattcataacaattttctttatacttaagtaaaatatacagaaacttttaaaggaacgtcaaaatcttgttccctcttattgttgccacattatttttattatattaccc

SEQ ID NO: 292175 - DNA, 586 bp, Homo sapiens
gtgaggagcagcagtaattaacttgaatttggaacttggatataactaaagacacattttgcttcttcatttttatgtcagtttgcaaaggaaacagttatgattttagctaaatacagaaatttttttcttttttctttttaaaattctacttgtatcacatttcaaaacctactctgaattttcactcagttcccacaatattaccataattctttgagctgttggcaaaatggatccattttataaagtcatgccttttgcattgagcttttgcctgtctcatatatttagataaatttgaaagcaaaaggaatatccactgtgttgaatatctttaatagcatggttgaaatttataatttgaaattcataagttcaaagaacatttatctactgcttgattttatgcttgaaacttcctatgcttcacagcagtttttttttaataggtggacaaaaatccttcctcctatcattcataacaattttctttatacttaagtaaaatatacagaaacttttaaagraacgtcaaaatcttgttccctcttattgttgccacattatttttattatattaccc

SEQ ID NO: 292176 - DNA, 529 bp, Homo sapiens
cagggagaaaaataaagttaatattttgaggaaaaaataaggcttttaagatgacatgctatatagtagacaaatagtttaactcggtgcctacttcatgtacactggatgtgttaacatgaatttatgaccctcagtgactttttattaccaaaacagcttccttaaagcaaacacacacacatgcctctacagtattggaaaattccgtctccttagataaaacaattaggatttttcttgggccaactagaataattagggctgcagagttggagcctttatataaggagtttgcagctcatatccgaagagagaaatgtatttcgaaagtcaaaagtgtagktaagtgagaaagcagagtagtttcagcttttgcatttggagtgggtataatttactgtgttgtcataagatactggaaagatctttggaagaataggttcttaaagtgttttctcatgtgcccttactgacatttcccattgggccttcaagacaactccagtaaatacttaaattgattttc

SEQ ID NO: 292177 - DNA, 393 bp, Homo sapiens
aattgttgtgacgaatcttactgcctgttgtagatatcagtgtttgaagtattccctatgaaataacttttctgtcccaataattgagagkgctgtttcatttccaaaaaaagggaagaattaatcaattaaacatacatatagtgaaataacctgttttgtaacataaaacataagatgaagaaatatcggaacattgatatgaagtttaacagtaatggattatatatccagaaatatgaacaaataaacctgcaatgaaaatttactaatgttactaattttcacttgtgtaacatgaacattacaaagaacatagtgtacaaagggagaatgttggtgggtaggatgagtcaagatttcagaggaaaatcaatatttaagacttacagc

SEQ ID NO: 292178 - DNA, 393 bp, Homo sapiens
aattgttgtgacgaatcttactgcctgttgtagatatcagtgtttgaagtattccctatgaaataacttttctgtcccaataattgagagtgctgtttcatttccaaaaaaagggaagaattaatcaattaaamatacatatagtgaaataacctgttttgtaacataaaacataagatgaagaaatatcggaacattgatatgaagtttaacagtaatggattatatatccagaaatatgaacaaataaacctgcaatgaaaatttactaatgttactaattttcacttgtgtaacatgaacattacaaagaacatagtgtacaaagggagaatgttggtgggtaggatgagtcaagatttcagaggaaaatcaatatttaagacttacagc

SEQ ID NO: 292179 - DNA, 393 bp, Homo sapiens
aattgttgtgacgaatcttactgcctgttgtagatatcagtgtttgaagtattccctatgaaataacttttctgtcccaataattgagagtgctgtttcatttccaaaaaaagggaagaattaatcaattaaacatacatatagtgaaataacctgttttgtaacataaaacataagatgaagaaatatcggaacattgataygaagtttaacagtaatggattatatatccagaaatatgaacaaataaacctgcaatgaaaatttactaatgttactaattttcacttgtgtaacatgaacattacaaagaacatagtgtacaaagggagaatgttggtgggtaggatgagtcaagatttcagaggaaaatcaatatttaagacttacagc

SEQ ID NO: 292180 - DNA, 393 bp, Homo sapiens
aattgttgtgacgaatcttactgcctgttgtagatatcagtgtttgaagtattccctatgaaataacttttctgtcccaataattgagagtgctgtttcatttccaaaaaaagggaagaattaatcaattaaacatacatatagtgaaataacctgttttgtaacataaaacataagatgaagaaatatcggaacattgatatgaagtttaacagtaatggattatatatccagaaatatgaacaaataaacctgcaatgaaaatttactaatgttactaattttcacttgtgtaacrtgaacattacaaagaacatagtgtacaaagggagaatgttggtgggtaggatgagtcaagatttcagaggaaaatcaatatttaagacttacagc

SEQ ID NO: 292181 - DNA, 339 bp, Homo sapiens
actaataaaaactccatactttaagtttgtcctatcactttttaactttctgttgtttctatctatatcttattgtattatctatgtcttgaaaagttggtgtagtcattattttgattggttcctcttttaatctttgtactaaacatatgagtagtttatacaccacaattgttgttataagattctgtgtttttctgtgtatttactattaccggtgagttcygtaccttcagaagatttattattgccaattaatgtccttttttttcagattgaaaacctccccttagcatttcttgtaggacagatctagtattgatgaaatccttcagcttt

SEQ ID NO: 292182 - DNA, 609 bp, Homo sapiens
gtgatgactgaaaaactacctatcaggtactatgctcattacctaggtgatgaaataatttgtaccccagaccactgtgacatgcaatttacctatatarcaaacctgcacacatatccctgaacctaaaataaaagttaaataaataagtaaaatggtcctgtttaagaaccatttttaatttcttttttgagaactgtctgtacatattttttcttttttaaattaggcaattgatcttttactaattaatttataatctctataatatccaataagtaaattagctctttttggtgagttctacttttccccagtttatctttttacattgtttatattatagtttcttcatgcagaaattttattttatttttttcaacttgttttgatcttcttttatcatttaggagactgctgtctctttttgaaagtctttattcttgacatcataagaaaaattgtgtcttctagtagtgataataacagtgacaataaaaacaaatagtactaacataactctgtaccaggcacaatttctaatcacagcttgatgaagtagatggaatttctaactcaattttatagaaggggaactagacttgcaga

SEQ ID NO: 292183 - DNA, 512 bp, Homo sapiens
tttgcagcttctccctctaggatgaagtgtccctcctcaccccactcccaytgggctgggcgtgcatctctcctggccagtggaacacaggtggaagtgatggtgtgctggatttgagcctgggccttaagcatgaggtctttatgctcatctttctcgaagattctgacctcctccatgagatgggcttccccaggagctgctgtcccagcactttgggctccacatgagctgacatggagctgagctgccccagctacagcctggaccggcggagctgtgaccgcaggatggctcttgttccctggggtaggtggcaaggtagttctcctgtgcctatagctgattgatacaggtgagaagggatctgagatggataggcagccccttctgagcccctggtcccactgccctgctggagtgcaagccctgtgttgtcaggacattttgttttatcagttttattttctcagccaagaatctagatttctaatctgaaagcacctagtttt

SEQ ID NO: 292184 - DNA, 635 bp, Homo sapiens
gaggtctttcggagacatttgtttccctgctgccatgtgtcaggtgggtggaattatctgctaacttctgatgagtcttgaagcaagctgcctctcactccctgttgatcccagggcttaggctcttcctctgcagtgatggcttgtctgggaccacctggctctgcagttctcaggtccagccactgtctctcttgtgcccaggaggatgcaggagaggaggggcttggtcattcagaccagggttgggtcattcctggagccacctggccsggggactctgctctttctcagctatgcacctcatcatcgcacagattcaaaccaataaagggaaaccagtgatagctccaatcagttcaaaacctccattgtcaatgtccactttcggtgtgagagacgtgctttactatgtttatgaggaagatctgagggtctcaggtgacctccaggataacagtgcggctgatcatgcaatttgtctgctctatcattgaagacaatattatggccaacagcatccttctgtctaggctgtgtctgaaatgccgtggagaataaggggtctgggggaacttccaatcagagggtctgtggagtggctcaggatgggaagagcctcaggaggagaacac

SEQ ID NO: 292185 - DNA, 601 bp, Homo sapiens
tatttatatatttttttctttagcggttatgtgcttggctgtcagttatcagttagtttyaaaatctatcatttttactctcatttgaagtgaattgatgagtcaaaactctaacatcactatcatttcattctcccctccccagttagttgatgctctgaggggtataggttttagaatcccagattcttagtctgaggcctcaatctgtcactggtagatattgattgagaaatattatataatctttctgaccttcagtatttaaaaaaaaactgtaaaagagaatgataatgacgaagacctaagttatagtaaagaataaatgagatgatttatgtgaaaagagtttataaattgtaaggcactatcaaatgttaattaatttgtgaggagggaggaagtggaaacagagagaggagaaggagagataggttctgcagcatgattttcattttgtagcaatgaaagaaaatggttcaaattgttctataactagtcattggtcattcaccttctttcctgtctcaaatattggcaatgtaccacctcgaaggcaggtgttagataatttaattgatatgtgcttcacagcacaaaa

SEQ ID NO: 292186 - DNA, 509 bp, Homo sapiens
acattttttctatacctgatataatattgggcacgtggtaggtcctcaacatgctgatttgtgttgcaagaatgaaaatgagaagatcagaaatcagagtttttagctattaccatataatgtggtagtttgaggaagtatttactcatctgattctgtagaagcccaaataatttttgagtctcttacttcatgccaggtttgatgctggaaaaacaaaaaaaaattctctctatgtatgttcaagttcatctgctatatttagttacagatgacgtratttggaggaatgaatgaaatatacagtgaaacacaagagaggaatagacagtctgtaatgttatgctttcattcttttccatatgttgtttgaaatgctctactcttccatctactgttggttcatacataaactcttactcatccttaaaatcttgcttagacatttgcctttttgtctgtttgcgtctaactttccatttataaaatagagacaacagactagacta

SEQ ID NO: 292187 - DNA, 1101 bp, Homo sapiens
tctgcatcaaccatccatcctccatttgcctagtgggacaacaaggtgggggctgcagcctccaggctggaaaaagacttagaaaccagcatatcattaatgcaatggaaaataggtaccccctccattccataaccatctattgttgttataggccctttgaactgatgaatgttaccatatatgagagtgtattccactctagtatccactagggcaagcacagcctattcttatttgtccaatatatagttagttctacatatggcctctgtcctcagacaccctggccaccattgctcccatcagaattttgaagccttggccttcatccaggtctaaaagtgcctgcccttgccatctctctgcaggagaggcagtgaactgagcctgaggctctttaatgaaactttgttctggcttgagcttctgccatagcctgaccaagacagcatcaggttgtctccaccctcacagtaggcattcctgctagcrtgccatgccatgtcttcagcaggccaccctwgaattgtgatttgcatgtagtaggtactcaaaatatattgggtaaatgaatttwtaaataagtgagtgataagagcacagtaaacacttgtttatggtttgactaccaaagcagaacgctagagaacaccacggtgaattgcaacagagatcattgcaattatcttgtcttttgaacttgaccagttggggttatttaccactacttggcagggatatatggctattttacatacggatatttctcttatatctttcaagggtgcctgtcacatggtagctgtactataaatatttattgaatgaattagtgctggcatattttaccagtatatttttaaatatattttatttaaattcaaggaagcacatatttataatttctgaagtatgaagatacccatgtcatcaagtaatgagaactataaaagctattttatctacatagacaaacttaatgttcaaatccagtaagtatcctagtctacgttcctattcttcccaatcatttaggatacctatttttatttttatatctacgtctcttcatatgtagggattttactgcaaaccgtt

SEQ ID NO: 292188 - DNA, 575 bp, Homo sapiens
gaattgtgatttgcatgtagtaggtactcaaaatatattgggtaaatgaatttttaaataagtgagtgataagagcacastaaacacttgtttatggtttgactaccaaagcagaacgctagagaacaccacggtgaattgcaacagagatcattgcaattatcttgtcttttgaacttgaccagttggggttatttaccactacttggcagggatatatggctattttacatacggatatttctcttatatctttcaagggtgcctgtcacatggtagctgtactataaatatttattgaatgaattagtgctggcatattttaccagtatatttttaaatatattttatttaaattcaaggaagcacatatttataatttctgaagtatgaagatacccatgtcatcaagtaatgagaactataaaagctattttatctacatagacaaacttaatgttcaaatccagtaagtatcctagtctacgttcctattcttcccaatcatttaggatacctatttttatttttatatctacgtctcttcatatgtagggattttactgcaaaccgtt

SEQ ID NO: 292189 - DNA, 389 bp, Homo sapiens
acatagtctttctctttcctcttcagagcaaccaaattgargaaaaatttattgccagctatctttctgccatagtttatggcctgcaattctcaaatggtttagagagtatatttaaaatgaacttcctggtcattttctgtttttcagggactttaaacatgatttgggtttgtcatctaaaagtagagtcactctttgaggttcaaatttcttgcccaacttttatttttaaagctttctcaaatacaaagctcaagagtcttggtcgatttaaaagcccactgtctgttttccctaaatatttacttttaaaaatatgattgatattaagtatgttattactgaaaaaggaagaaaaggactgtgggaaggtcagaaagaaataa

SEQ ID NO: 292190 - DNA, 599 bp, Homo sapiens
gccccttctccatatctgtcctcccatgtgtcactgtgtcactagtgggcacacacctgggatcagtgacatgccatggaatatctgattactgcttgggaaagacagtgatcaggtgcttgggcttggatatctgtagagaagagtgggttgaaagctgtttctcttatggtcctcaattctaaattctaaattccaacctagttctaaatttagagttctaaattccaacctagtcttccacattgttagaaagataggtgacaaaygttttaaataatttattagccttatgataacttttaatgatttagacccataagagagtttccattgtgacccagactgtgaattttaggtgaggtcccacttctccactgcaattttcccaggtaggcctaagctgggaatgaggagttccaacttggatatcactatgaatttttagatgctacaaaactagacttattttagtaaggaaggtacaggcgattgtctagtagctaaaagtaagcttagggcatttttattacctagaaataatcagaaaaacaatggcagcttcctcaagatttgattcaggatcaggtagaaacaaa

SEQ ID NO: 292191 - DNA, 571 bp, Homo sapiens
atctaccctctgctgagtactttagagagcacggcagtgttcaggactgcagatctctgtggtgaactgtctctgtgtagttctctcctgttgggtatattctgttytacaaacactagcctccgtcgactctccagactcccagctccctctctttcactagagttcaccaggctctgcctggattctccctccctatgccatggcccaagagggagagtcctttgtgtcttaatgttcagtatgttcaacactgttgtctcacgtattttgtctgaggtttttttttttttttttttgtcgtttttgttgttttttaaaacaagagggtctgcctgaaaattctggtcccttttactatgtctaggccagaagcagagttctcatgaatcccaaaattatcacttttaatgaagaaaatatgctgatttggcatacttaccaataaatatgggataaaaatatataaaaagtaatggcttggagacagcatttttagcactgagtagtgagtttgttgcttgaagcagattcttccatggtggccttgagtgtaacagatgttttgttg

SEQ ID NO: 292192 - DNA, 567 bp, Homo sapiens
acagtctctggggtcctttttgtctctgaaattttatgagtatatcttatactaaactaaagggttattttgcgagactggcagtaacatatacatttrtgagcatacactaaaagaattaaattgctataaaatgcaatgaattctttattattacctctctgattactactgtgctctgaaggtctttctctctttgtgtgtgtgtgtgtctgtgtgtgtctgtatgtgtatgtgtgtctgtgtgtgtctgtgtgtgtgtgtatgtgtgtagttatcactgtttttggtgtttccaaaaatcagtcatttgttctgatagccagaattttttctatgtccatttaccaccattttaagtaaaaactaacattaaaaaaattattccacattttactaaaatgaaattagcaataatatccttaaaatagatttcatatgctggttttattttttctgatgaatagtgaaagaaatacataaagcattttttcaactacttaaaatcatctcaatatttgtgaaaattggtctagaatgttactgggaaatagtgaccatagagag

SEQ ID NO: 292193 - DNA, 610 bp, Homo sapiens
tttatgaagcaagaccttataaatgatattattattataaataaactataaatctgaccaaatatggaaatttctatttcatatgggggctactttatcagttttttcttcattaattaaatggtataacctagtagtatatttggaatggatgtggacttttttctggcaatgataatgtcttgatctgtgacgaagataggtgtatgttatttattgcaaatatgtttaagtttcatttcattgcactatattctgtgaacgtttttatctagtctttaattaaacatgatttatacaaattgaggtcagtttccatttagattgcttgcagtgttaattacagtgcaaatagccttcactgctgaaagaactcctgcattatacaaatacgtaaatgcttctgtgtaatttgcaactgtcttctaagsttgtgtattactgggtatgtacctatgcagaaatgttttactaacttagctactgtattaaaaaatatggataacttaagataacatgtatatttttatgaatttagatttaagtagtttttgagttttaaaaacattgaaaaatgcacatttaaacaatgaaaaggtcattctatcac

SEQ ID NO: 292194 - DNA, 606 bp, Homo sapiens
tttcttttttatactgaaaacaaagatagctttccagcagtttgctgcagggtctatttccaagtatgatctttggtctttgaattcctcagatcttttgtttttactgcatcacttttaattatgaggttaggacaaaaggatttacagatttttggaaattaacattatcattatttcaagcagaaacattacttagtcaaaagcaacaaaaacagaaaagtaatcatgtaaccctaccactagtttccttggaaatatcaatatcatgagattgattataaccaattattgcagccgagattttttggacagygatgatggcctgtgtagcatgctaggtgctggtgataaagtcaggaagaatgggcctttgtccttaacaatttcatggtctggaggcacaggggaccagtaaataggacaagtgcatgggtatagtagccatgccgtaggagaaatgtcatggggcttctgggaggcattgctgcaccactcatgagtgccaaagaagacaactgggacttggaaaggtcacttcacaatgaagagataaagactaaaaggagctaaaagtagaataaacatatacatacagaatattta

SEQ ID NO: 292195 - DNA, 606 bp, Homo sapiens
tttcttttttatactgaaaacaaagatagctttccagcagtttgctgcagggtctatttccaagtatgatctttggtctttgaattcctcagatcttttgtttttactgcatcacttttaattatgaggttaggacaaaaggatttacagatttttggaaattaacattatcattatttcaagcagaaacattacttagtcaaaagcaacaaaaacagaaaagtaatcatgtaaccctaccactagtttccttggaaatatcaatatcatgagattgattataaccaattattgcagccgagattttttggacagtgatgatggcctgtgtagcatgctaggtgctggtrataaagtcaggaagaatgggcctttgtccttaacaatttcatggtctggaggcacaggggaccagtaaataggacaagtgcatgggtatagtagccatgccgtaggagaaatgtcatggggcttctgggaggcattgctgcaccactcatgagtgccaaagaagacaactgggacttggaaaggtcacttcacaatgaagagataaagactaaaaggagctaaaagtagaataaacatatacatacagaatattta

SEQ ID NO: 292196 - DNA, 618 bp, Homo sapiens
gtccagcttgggaaacaaagctggaaaatattatgtaccattctgtttagaactggctttcggttatagtttaaaaggtagtggggttagaagggaatatctggagactgaaataaatactaaggagttgaaggtggtgaaacttgaattcagtcgacaaggatggtttgggtttggatagggaggaagggcacatttaataaacaaaggatatttaaggacaattgaatagatacaccaaaatattgaattgtaagtccccttattatatcaaatcacctaacttaaagatatttactacttcctttaagtaagagaatttgtcctaattatgttctcaaagactaataacagctgggatatgaatgtaggctatttgagtcatattactttccagcttcccagtactctggcttacttttataaaatacgtgtttttgttcagtttagttttagttttcttactcagtggcaaaaattgaacccaaagcttgcattcttttttgttatttttctcatttatacctctttctaaaatgagagaatcacaaatgcactggtaatygctgttaaaatgattcactgtataaatacattgtaaaacccatgtaaactata

SEQ ID NO: 292197 - DNA, 536 bp, Homo sapiens
caaagtcagcttgtctaatgtgtactctgcgcagatgtaaccttaacggaaaagagtggagaccactccctggctacacagtgataccttgattaacgaatccgctgggaacaaagttcctttataagcaattcagctgagtaaatttttattttaaaacttcatgaatcaagtgaaataggactggcttgtgtcatataattcaacggtaatattctgggtaaactgcagttctgtacagagcagaaatacttcttcacagagtgtgtgttgaagtataaaagtgaatagatggattctaggcaaaattgtgaagctgcttcagacaaacttctttttcactcttgtaattgctgtgctccatcctccacatacacagggcagtaggttattgcccttggaatcttgctgctctcaaaccttcctacctcttaaaacaggaatcaacaagattcacacttgtatgagttacagttaatgttatcttacrttgatattgcctagtaatacctcaatcctggctacaagttaatacc

SEQ ID NO: 292198 - DNA, 965 bp, Homo sapiens
ggcacaggtttgtttatttatttacttttatatttgctgagctcactatgctgtgccagactaaatgatgttggttaagagttttgaataaaaggagaaaagtcttgaaacgaactaatacagaggaaaatacaatacaaaatagcacattgacattaaagaataaggaaaattggaaaatgagaacattgagaaaaatacagaaaaataatacagtgaggagaatgaatgataaaattaagattaaaaaggaggaaaatggtaaaataaactttcagaaatacctttcatgagagcatacagcactatcacatgtataactagcatcaaacatcatattcactaggcttaagggtactgtgtctgcctcactcattttattttaaaaatgtaatttttacaattataatttaataatcctgcaacttggcatcatgacttagttccttatccagctaattagtatttatcaaacacaggctgtggcctgaaccatgtgcaatgaagaatgcaaatgttagagatggcatggtattttccacatggttccaggacagtgagasaggtcagagaaatgccagagagactaaagaccagacwatagggtcagttcaattcataggcctgacttacttcaactagcctggcttcatggcttctatctctgtgcaaaactggacaaggattttacctgtaggagtaaattcaaaagatcaaagtttcagtggaagaaaacaaaataaatatcttacatttctttgataaattccaaggatatataaatgtcatgttgcatgatactcattataactataaactgcctttgaaatggaatcagacattcagacaaaccctcaattgatgtttcattttcataatattgttagatagtctatagcctgattwggataggaactcctatcatatttctcccactctaggcagtattgtgtagcctgttttag

SEQ ID NO: 292199 - DNA, 509 bp, Homo sapiens
cagctttcacatatccccatataatatctttaccaggttcatactcttccagattggacagtgtcttcttcaaatatatatgttaatttctttaaattaaatatttatttttctaattggagataagccacttctcaaagtaaagtaatagaataaataatacaataaatagcgttttttactgccaaaaatcacagcatcctgattaatagttgttaatgtatgaattttgaattttaaaagcataattttttgaacaaatctatacatgacttatctaaaaatgtaagttcctagtggatattaccactcatactatttagtaaacatttttaatgtattgatattrtatgacaaatctaggttgttttaattctataggcacacagagttgggtcgattataattcaatagttatgatctattctcattgtttagaactatttttaaagtaaataatagatgtttatcttcaataacatatagaatgaaaaaaatcaggaagacaa

SEQ ID NO: 292200 - DNA, 1218 bp, Homo sapiens
aatagaatctatccccagtaattccatcaagtagctaatcctacacttctagtttatatgtattcaatagccatttcttgcttaaatgtcttaaatgacctccccttacccttatcataaagtgtaactycttaatctgcctagtgaggcttgttataatcaggctatgcaaatctttctggctttctcgcctgccacttcccctcttgcacttcatgatgcaattatattgcatttctttcagttctacaaatttagctatgcttaactttttttttgtttgtttgcttttttttttttgagatgtagtttcgctctgtcaccagactggagttcagtggcatgatctcagctcactgtaaactctgcctcttgggttcaagcaatcctcctgcctaagcctcccaagtaactgggaatacaggcgcgtgccaccacgcactgctaatttttgtattttagtagagacggggtttcactatgttggccagatggtctccatctcctgactgctttacttaactttgagtcgtcatacatgttatttccctcttctgtctgaaaacctctaactcaccttcctaaacagccawggaatgcttattttagtacagaattcctgggtgtctggagagaatgtgcagcagtaaaatgwtcaaacaattttggaatggaagctgggaaagggaaagtgtcagcagagagggcggaagaaatatcttatcgaagcttctgccctatgatttcactctgagaagtgggtcacggtagtaaggagaggacaaggaagagtgatagcaaagggcaaagctcttttttagaccaaggcatccatccaaattagaacctgagaggcaaggtaacaaacagcaaagtattattattcaaagtaaataatagctttgtctacaaattaaaatggaatagttttaagatatgtacatcatagcataatctgttcataaagcttcagctattttgggtttagcaaatacagtgattacaatcttggtaagtactattgtgtacaaaccaaaaatgtatatgtagaatgcagattacagtatttatgctaatctagatggcaggactcccataagtaaatataagtaaacagtttttagcatgtcactgggatgttgagaaaacttctctaggagagtacaggatttatttttattgattgggcttactaatagttaagacactactttgatg

SEQ ID NO: 292201 - DNA, 576 bp, Homo sapiens
aaattaaatgcattacttagctggtgagcacctattatttgcaaggctctgtgtctgggggatggagagaagaccaacaagattccatctccttcctcactagggtttataatctaaagaaacaaacatgctcacacatagagaacaatgaacaatataattggaaaccgccagacagggaatcaccaaccactgtgggtgaagagagactgcaggggtcacacgacttgaaaaaggcaaagcaaagtcagatgtctcagttccagcataagtgttttaatatacctgttttagacccaaatgtaataaatatattctaagatcttgacgaatagaaagttcaaaaactgagttccccttccaccaacagattgactacaagtaagcaaaatagtggttgctggatttttttcaagtaactgcactctttaatacgttgtggctgattttcaacttaataaatgtacagctgcactgggttctactgtacggatattcttttayccacttaaccaatcacctttccatggacatataggttactcctaatcgcttgcccctataaccattggttca

SEQ ID NO: 292202 - DNA, 606 bp, Homo sapiens
acctgagcattcaggcagcactgacaatagttatgcctgtactaaggagcatgattttaagakgctttggcccaatgcctataaaatgcccatttcgaagatatacaaaaacatacttcaaaaatgttaaacccttaccaacagcttttcccaggagaccatttgtattaccattacttgtataaatacacttcctgcttaaacttgacccaggtggctagcaaattagaaacaccattcatctctaacatatgatactgatgccatgtaaaggcctttaataagtcattgaaatttactgtgagactgtatgttttaattgcatttaaaaatatatagcttgaaagcagttaaactgattagtattcaggcactgagaatgatagtaataggatacaatgtataagctactcacttatctgatacttatttacctataaaatgagatttttgttttccactgtgctattacaaattttcttttgaaagtaggaactcttaagcaatggtaattgtgaataaaaattgatgagagtgttagctcctgtttcatatgaaattgaagtaattgttaactaaaaacaattccttagtaactgaactgtc

SEQ ID NO: 292203 - DNA, 606 bp, Homo sapiens
acctgagcattcaggcagcactgacaatagttatgcctgtactaaggagcatgattttaagaggctttggcccaatgcctataaaatgcccatttcgaagatatacaaaaacatacttcaaaaatgttaaacccttaccaacagcttttcccaggagaccrtttgtattaccattacttgtataaatacacttcctgcttaaacttgacccaggtggctagcaaattagaaacaccattcatctctaacatatgatactgatgccatgtaaaggcctttaataagtcattgaaatttactgtgagactgtatgttttaattgcatttaaaaatatatagcttgaaagcagttaaactgattagtattcaggcactgagaatgatagtaataggatacaatgtataagctactcacttatctgatacttatttacctataaaatgagatttttgttttccactgtgctattacaaattttcttttgaaagtaggaactcttaagcaatggtaattgtgaataaaaattgatgagagtgttagctcctgtttcatatgaaattgaagtaattgttaactaaaaacaattccttagtaactgaactgtc

SEQ ID NO: 292204 - DNA, 606 bp, Homo sapiens
acctgagcattcaggcagcactgacaatagttatgcctgtactaaggagcatgattttaagaggctttggcccaatgcctataaaatgcccatttcgaagatatacaaaaacatacttcaaaaatgttaaacccttaccaacagcttttcccaggagaccatttgtattaccattacttgtataaatacacttcctgcttaaacttgacccaggtggctagcaaattagaaacaccattcatctctaacatatgatactgatgccatgtaaaggcctttaataagtcattgaaatttactgtgagactgtatsttttaattgcatttaaaaatatatagcttgaaagcagttaaactgattagtattcaggcactgagaatgatagtaataggatacaatgtataagctactcacttatctgatacttatttacctataaaatgagatttttgttttccactgtgctattacaaattttcttttgaaagtaggaactcttaagcaatggtaattgtgaataaaaattgatgagagtgttagctcctgtttcatatgaaattgaagtaattgttaactaaaaacaattccttagtaactgaactgtc

SEQ ID NO: 292205 - DNA, 571 bp, Homo sapiens
ttcctttctcccacatggaaacagattacagatcactgcttcttcagctgagcaccagaggaagtcactgacatgtgtttgggggctacatcctatgaatatagtgaataattaagcaccataatcacccttggccaagaagtgctcctggtatgagaggcccagaaaactggggtaacagcagactcccacctcccctctcactgcccggagcacaaatgcaaggagtagaaggatgagcagatcacccatactattaactgtgactttttcttttctctctcctgagtragtttctttcctgtgagttaactgtgtgtgtgatgtcactttcctgccaagtagagggcacaagctctggagtcctctgatgccaatactgtatttgtgatttccctaagacttggtctccctatctctaatacagagagaatagcataagcttcttcacacagttggcaggaggattcagtgaactaagccatgcagattgcacagaaacactgtgaggcacagggaaagtggtccatgagtatctactattactgctattattatgactccagtcaga

SEQ ID NO: 292206 - DNA, 385 bp, Homo sapiens
atcgagcagttcattataagtgaacttgccttcttaaagctaacgttctctctaaaatcattgagttccaagaaggtggtacaaaaggattgtattttgtgagcttgctgcatcaaaagtccccaaatttcatgtgccctttcccaaattatgctgttcacttaaatgcattttaactctccagatatttattgagctgagcactgtgttagaaaaagacctggatgctgccctcaggaaattcacagaccaaaagatgagatagatgaataaacagatcatgtcagtccagcatggtaaatgmgatgttagaattacatacaaggtggaacttttcttttttgagacagagtctcgctctgttgccaggctagagtgcagtggc

SEQ ID NO: 292207 - DNA, 538 bp, Homo sapiens
tggagcaagtcagaggaaacactcaaataactagtgcgaggcctccggggtgaagtctgagggagaagaaggaatatcctgggggtcgtagcaggtggaggtggtggcattgttggcaaagagagrtccatgccaacggaaaagcaagttcaaaggctcaaggtgagagtaagcatggcacatgtgagaactaaaaggagttcactcttgtttgaggccactgatggttcaaagctggggaactctcaggccatctgtctttactcagtacaaagaccaggagagcttgggggcagagtgggtcaccagctgtcctcaggaaatgactggaatgaaagctctgccggctttgttcactgccatgctttgttcgctgtctgaggatgcagccagaacatagtagattcttaatgaccatttgctgagtaggtgaatgaagcccccacagatggtctcagctttctcctctagcatcaccaagccccacagagtcataagaccagaaggcaacttgagagccagctggtccaccctttcc

SEQ ID NO: 292208 - DNA, 574 bp, Homo sapiens
tcacacatgacagcatgagagcagagaacatgttttatctttgaatctcccatggtatagattcttacatgcagaaggcactcaaccaacgccagcaaagcatatgaagaaattaggaaaaaaaccccacaaaaacctgacagcagtagatgctaccacttccaatcatttatttggaaattacgatgtgcctcacagttatttggacttcaggggttttgccctgcaattaatgtctcggcccgatgttgggttgccttacaatcacatgtgttatctgtgatctctagggccatttcggttttgagagcacactattgcacatacactaagatgtttctgagtatttcccatagttagacaaaaatggaaaaacttggcccagccktcagaagcgctttatcacatgtgctgcctatgacagtggtttagggaaatctctacacaattccaccaggatcataaacacatttcctgagctatgaattaagaggaaaaagtttctcaacatgcaacacaaactcaaaaagcagctgttcatttaaccatctatcatcttcttttgaccctttga

SEQ ID NO: 292209 - DNA, 535 bp, Homo sapiens
tgtcctggtgccttgtttgttctctttggagaagacatcttatcacaatccctgttgacttggtttatttctttgttggcctactttttcgtgtgttatgctctatctgtcacccactcctctgccccatcagaatgtcagtggctcaagagcatggatcgtatctgctcttgtgttgttctacctctggggagggcccacctggggtaggtgctccctaaatatgaaaggaagggaggcagggagggagaaagtccctggagaggrggacacctttccaaggcagccccatttcctgtgaatgtaggtggtatccctgctcaaccctagtgttactgtgcaagttaaaaataaaacccttgggtagagtgagaagcctttaaagaggctgggggagagataatgagaaacatgagccagccaacgcaggtccagcaggatgtgggaccggccaggaagcaatgggatcttggctccggaaaaacactgactttggggctgcaatagtctgaccaatgcacgactcccgattagt

SEQ ID NO: 292210 - DNA, 535 bp, Homo sapiens
tgtcctggtgccttgtttgttctctttggagaagacatcttatcacaatccctgttgacttggtttatttctttgttggcctactttttcgtgtgttatgctctatctgtcacccactcctctgccccatcagaatgtcagtggctcaagagcatggatcgtatctgctcttgtgttgttctacctctggggagggcccacctggggtaggtgctccctaaatatgaaaggaagggaggcagggagggagaaagtccctggagaggaggacacctttccaaggcagccccatttcctgtgaatgtaggtggtatccctgctcaaccctagtgttactgtgcaagttaaaaataaaacccttgggtrgagtgagaagcctttaaagaggctgggggagagataatgagaaacatgagccagccaacgcaggtccagcaggatgtgggaccggccaggaagcaatgggatcttggctccggaaaaacactgactttggggctgcaatagtctgaccaatgcacgactcccgattagt

SEQ ID NO: 292211 - DNA, 569 bp, Homo sapiens
gggtaacatctcaaaagcacaggcaccaaagcaaaaatgagcaaatagattatgtcaagctaaaaaacttctactcagtaaatgaaataatccacaaastgaagagacagcccacagaaaggaaaaaaatattttgtaaactatccatctgacaatggatttaataaccaaaatatttaaggaattcaaacaacttcaacagccaaaaaaaaaaaaaacccaaattaaatggatttttaaattaggcaaaagatctgaattaggcattttcttcttttcagaagaaacaggttattataccaacaggtatattgagaaaatgctcaacattactaattcattcagagaaatgtgaatcaaaaccacaatgtgatatcacctgaacccagttaaaatggcttttataaaaaagataggaaataatgaatgctggtgaggatttgaagataaaggaactcttgtacactgttggtgagactgtaaattagtacagccactatggagacaggctccagtgtgttatgttcccctccctgtgtccatatgttctcatcgttcaatttccactg

SEQ ID NO: 292212 - DNA, 624 bp, Homo sapiens
ctgtgtagctaaataactaaggtttttgtctttttgacaatggcagcctgggttcaattcttgacttagggagtgagccctttctggtttgttgtctgtgtaattttttttgccattgattaattcttttcccccatggaccgcttctgatttcctgtctttatttttcctttctctgaattaactttgggtagattctaattcttgtaacaaggaaaccgcttaccattgctttgagacagcttatccatccatggttaagtcataaccttagttaaaacttactaatttcaggtgggaagtagcctgtggtagaattcaaaagccagaaacattgtctgtcctagctggagtctcataataagagattttagaagatttttttttttaaaaaaagagctctatggttaaaacccacttaattaaaaayggatatccaagctatgtgtatttaaaaggtctttatctttttcctcttcttgaactgtgcttttctaaaaaaaaatttcttttcagttgactgaattgtttttctccattttatcttcttgccactgctgatgcccatgtgagagaacctaagataattactaataacccgggactcctggggaaaaacagagg

SEQ ID NO: 292213 - DNA, 668 bp, Homo sapiens
tagatgctgtgacaaggttactgattatttaaaaaatgtggaatgttgcatcatgtaacatcctaacaacaaacttcttataatgccattttcactgaaaatacaagtgatcttaatcttccacatggataattaagttagtttatggaaaaatttcctaagagtgaaatttgtaaagctttcgtattgtttacttaggaagtttctggaattcctttctttggagatctttaaaaatagaacatcttggctttggcatgagcctgtctgaaagccagagtagaaatagtagtttttcagttggaatattctgtaaagagaaaatggtagctaacataaaatcacatcttctaaaaaggaataggttagatataatcacatgattaagatggaagtaaatgtggagaaaggattggagaaataattaggaaattttggcaatgtagtgtataactgtagttttgaacatagtattgagtcataaaggtgatattttatggaaaatattaaaatacgtayttttttctcttaaattgctgtaggccgtctcagatcagatcgaatacgtccagcggggaatttcactttgcatgatcttttggctattcttcccatagtggatacaggtttagttgtcagagtgacaaggtgcttagctgcttgaaaca

SEQ ID NO: 292214 - DNA, 590 bp, Homo sapiens
aagaaggatggcataaatgacagaattctatgtaaccatttcattctttacctacttggctttgccatcctacctactcttaaaacagacattccctaatatatgtgtgaaatatttcaacatctttttgtttcctagatcagcctctccaaactcccagttttgttctaataacaaaaaaaaaccaatctgaacatctaataggttaaataatgaaacatcacccattgaatggaatgctatgcatttataaatattttttaaattatttcatatacaacaatgtgaagctacgtaataccagtaaatcttatacataaaaatggttaacatggtaaattttatgttatgtatattttaccataataaaaaatgattattccataatatggaaccaagtgaaaacattatattgcgatgaaccaatgggaacaattaagtaaacattgggaatcagtggtttaytgtataaaatacagaaaatctcacagaaaaaaaaacctgttatactattcagatacaaccaccattaatcactatatatccctataatgggatggtggttagatacagagatcgatccctattaa

SEQ ID NO: 292215 - DNA, 590 bp, Homo sapiens
aagaaggatggcataaatgacagaattctatgtaaccatttcattctttacctacttggctttgccatcctacctactcttaaaacagacattccctaatatatgtgtgaaatatttcaacatctttttgtttcctagatcagcctctccaaactcccagttttgttctaataacaaaaaaaaaccaatctgaacatctaataggttaaataatgaaacatcacccattgaatggaatgctatgcatttataaatattttttaaattatttcatatacaacaatgtgaagctacgtaataccagtaaatcttatacataaaaatggttaacatggtaaattttatgttatgtatattttaccataataaaaaatgattattccataatatggaaccaagtgaaaacattatattgcgatgaaccaatgggaacaattaagtaaacattgggaatcagtggtttactgtataaaatacagaaaatctcacagaaaaaaaaacctgttatactattcagatacaaccacyattaatcactatatatccctataatgggatggtggttagatacagagatcgatccctattaa

SEQ ID NO: 292216 - DNA, 542 bp, Homo sapiens
aaacttgctcccaatttattactaaataagatggctacaaagataaggaagctacatacctccctcaccatttgcccttagggaatttccttgtgggcaaaggatgaacagaacacaatgccatctctccgcycacctgagacaaatgcacatctcattgcttcttctgccctatcatttcactaagccagactaagacataagtgaagattcttttaccctcctctcacatgtaaattgtgtattcagaaaaaggctaatcagagactcaaaataatgcaaccatttgtcttatctacttatgacctggaagccccctcccatgctttgagttgtcccagctttctggacaaaaccaatgtacatcttaaacatattgtctgaggtctcacaactcccaacaatgtataaaagcaagctgtaccccaactatcttgggaacatgtcctcaggacctccataggctgtgtcacatccataaccttggcaaaataaactttccaaattcattgaaaaaaaagaaaagcagaggtaaactaaaa

SEQ ID NO: 292217 - DNA, 588 bp, Homo sapiens
atacttttgcaatagagactatacggcttgccgagactaaaatattatctgggcttttatagaaaaagtttattgttctctgatataatatctctatcactggtaattcactttgctctgtagtatactttggctggtataagtatatccagtctagctttcttttgactagtgtttctatggtatatmttttttatcctttaacttttaactgaaccatgtcatatatatttgaagttagttacttatagactgtgtatagttggttcatgtgtttaaaaaagatccattccacaatttctgtcttgccttttgtaggttgaatttgcctctaattatttcaatgtttggagtatttctaaaattttagtatttttttgtttattctctttgttttccattcctttgttttacttttcctgccttctttggggttatttcaatatttttagtgtccagctttaatgtatagtgtttttatatttttttaagtagttgctccagggcttcctatatgtgtatttaacttttcacagactatttagaatcaatattcttgttacttaaagtggaatacagaaactttcc

SEQ ID NO: 292218 - DNA, 478 bp, Homo sapiens
tctttaaagaaaagtttgaaataattctaagtagacccagagaaagaactgagtaggmgcacacacaaaatattgccaggcagtgtttaaatcctagttaatattgtagcttatgaatgcattgtgatgccagtatgcccaggaatgtgacttttctgcagcagcaattggtagtccatgtatttacatggacaagctaggtggggtgttttttttttttttccatttcttctattaaaagaatttcttactcagtacggtttacactcgtctcttagcatctttaagaggaaaaaacaaaagctctctttgagtgccatgcacgtggtttccttggaacgttatttaatgccatcatgtttttaatctttctcctgaaagcatgccatactagaagtcctatggtgagtggaaccgcacttggtcagttgtggttgtgggtttcccctgtttgtctcacatatgtagggcaggaaca

SEQ ID NO: 292219 - DNA, 566 bp, Homo sapiens
cactcagcctcccaaagtgctgggattacaggcatgaggcaccatacccggcctgtcctgggccaatttttaaatccttctaaggtagcacaatccctatgcctttattctctgtaagccttgggcctcttaaaaycctctaaggagagagacccaggatggaactggtggaggagcttgagcaacagcaggagctgggagttgggcagggagccttgtacgatactgactctagggttcctgtgtctaagcctcagaagtcgggtggactctggcagtagaaccgagtagtgccaactttttttctgtagtaatctttcccaaagaaattctcctgaggctgaaattcaagaggtctaacctcaaggtagtcatgttgaccaagaaacatagcctgtacctaaaaggtaatttcagaataattgattgagttctttatttgcctttctcaaacaccatgctgtcagcacacagtccacagcctccttttctacccctcttgacttcctatagcttttcaagaactctcttctctaaatcttgaaaaccttttttcctagacatat

SEQ ID NO: 292220 - DNA, 593 bp, Homo sapiens
tcccagggaattacaccagatatcatagtagcagagtttctgtggtcccagaagcccctgtgacactcgttgttttcaactgcttattatgtcaaactcccccggcgacaaacataaactccactaattcaatgaggcatttacagtatgatcagagatccataaggcactagaaagtatgtctttaatatgtaattccagcttcatcatttcatcaaagtcctctaaatttttaggagtgacccacaggctgaatattacatagattgcttggagctgatttctccaagagccaaactctacgtcaagaaagtgcaaagtacaaaatctaaccaactagaattttggaacccagagaacatctaattcaactttcctattttacacatgacagaatggtgactcagagagactgtgacttgcacaaagtccccaggtcatttgaggcacgactggagaaaatacccagctttcttgattcctagactcaggctggtttcactatcccaggtgatcgcttgcctgttagtttcattactttgtaaaccaccgtccarttagtccccgtactacagaaggtcgcctccctgtaa

SEQ ID NO: 292221 - DNA, 551 bp, Homo sapiens
tattctgtgcctgagctggcacccgaatcataagacaaagtccttctcagtcttccctcccctttccttgagcagaggaatctccctgtggctcctattaccccaggcctgcagtgaatactgcctggctactgytcccttcaggacagtgggcttccttctgggccaggacaggtccagaaatgccatccaagagccaaggcctggacccagggccaagcaggtaccctactgtggccaagctggtacctaagctgcaagacaaagtacccttttgtcttccttctcgttttctcaatcagaaggagttcctccttgtagcaactacagctgggaatgtgctgggtcgcacctgaagccagcacatctctgagtcttacccaagacccatagcaagtactgcctggctaccactgctgattattcaggccccaagggctctttagtcagaaggtaatgaatcctgccaagactgggttcttcccttcaagacagtgggttccctacaggcccaggatgtgtctagaaatgtcttctgggagctagggcct

SEQ ID NO: 292222 - DNA, 551 bp, Homo sapiens
tattctgtgcctgagctggcacccgaatcataagacaaagtccttctcagtcttccctcccctttccttgagcagaggaatctccctgtggctcctattaccccaggcctgcagtgaatactgcctggctactgctcccttcaggacagtgggcttccttctgggccaggacaggtccagaaatgccatccaagagccaaggcctggacccagggccaagcaggtaccctactgtggccaagctggtacctaagctgcaagacaaagtaccctttygtcttccttctcgttttctcaatcagaaggagttcctccttgtagcaactacagctgggaatgtgctgggtcgcacctgaagccagcacatctctgagtcttacccaagacccatagcaagtactgcctggctaccactgctgattattcaggccccaagggctctttagtcagaaggtaatgaatcctgccaagactgggttcttcccttcaagacagtgggttccctacaggcccaggatgtgtctagaaatgtcttctgggagctagggcct

SEQ ID NO: 292223 - DNA, 551 bp, Homo sapiens
tattctgtgcctgagctggcacccgaatcataagacaaagtccttctcagtcttccctcccctttccttgagcagaggaatctccctgtggctcctattaccccaggcctgcagtgaatactgcctggctactgctcccttcaggacagtgggcttccttctgggccaggacaggtccagaaatgccatccaagagccaaggcctggacccagggccaagcaggtaccctactgtggccaagctggtacctaagctgcaagacaaagtacccttttgtcttccttctcgttttctcaatcagaaggagttcctccttgtagcaactacagctgggaatgtgctgggtcgcacctgaagccagcacatctctgagtcttacccaagacccatagcaagtactgcctggctaccactgctgattattcargccccaagggctctttagtcagaaggtaatgaatcctgccaagactgggttcttcccttcaagacagtgggttccctacaggcccaggatgtgtctagaaatgtcttctgggagctagggcct

SEQ ID NO: 292224 - DNA, 452 bp, Homo sapiens
ttgtgcagacacctcaaggacagccagaaagaaggaatcctatgaatagtcataatgggagtaatagtaacactgctagtcatggagcactgcagatagttgtcctcatcatgattggaagctaccacttgttgcatgcttactgcatgtcaggcattctatctagcattttgcatgcatgatctcatttcatttctcaaagtaactgtattacatgyattttactattgtcttccctttaaaccattttaaagatgaaaatacagtcagtcagtgaagctgggttacctacccaaggcactcggccaggtgtcagttgtaacctaggaccctttccccaagttgagactgcacaataatgctttttattaaagatgccctgaagagtgtgaattgtcttggacaagctcaaaagacagtttttcttctctcctctctagggtggacggcga

SEQ ID NO: 292225 - DNA, 572 bp, Homo sapiens
gttacattgaattctcctgcacagctggaagaaagcctttagcttcccaagcccccagagaaagtagtcctaggtcagctctttgacaacaaggcaaacatgaaggaaacagagaccgcagggtcagtgagctcttcgggctacccacctatcaccagcactcccttcaaagcaggcacagggctggggcaggcccttaggccttgggatttccccatcactgtctttcagccttagccacaccctcttccacaggcctgctgtactgcctccrggtgcggctgtgggcacctgcctggaaggatgtgggaacctccattattcccccatccccgactgcaagccccaccccaggcttgcccacctcaacttacctcagtagcattttctcccaggaggacagctgaagcaagccagcctgaacccatggctttttgttgaaaagccccaggggtgtttgtgggtagtgaccacgtcttagcaccaactggctaagtaactttggcaggtaggctagcctcagatgccacatccataatgtgatgtgaataaaaccctcccctgctgttatc

SEQ ID NO: 292226 - DNA, 645 bp, Homo sapiens
tgttacctgatcattgtaaatgaatatcaatgaagtagctatctagtgatgtaggggtggagagaacgcaggtggttaagaagggtagaaactgttctgaggtggaaggctacaaagtaggggctctgaggatcaaagggaatttttttgttgtagaaggtatcaggaaacatttcaaaagactgaaaggggcaaaaacaatgactggagtctgggatcgcaggctgggttatctgtttttcaaggaaaccacagctctgtaaattgtagagtactgatgatagtaatgcaaactattactattttgttcataaaaatgtgaattgtgtgatgtactcagttagtgtcccacattgaccaatgtacatctgtctccaaattctgtcagcattcctgaaagtctttagatgtgtgggaattttcaattttcctttgaaacagttgtatcattttaactgttccttaatgasttaaactaaatctgtgatatgtttattttatatttatatgcaggtcgtggctttagcactaaaacaaagcccttaacaaagagcatgaagttcattgggtagttgtagcaggctgcataatgatcccccaaaaaagatgtccacggtcataatccctagaacctctgaatatggt

SEQ ID NO: 292227 - DNA, 601 bp, Homo sapiens
tttaacatgactcacttaatttcacagccctacaaggtaggtactattattattctgattttataggtaaggaaattgatggttagagggttaaacaacttakccagatcacacagctagtaagatgaagagctggaagtgactgagttataaagagctgcaggacgttttggcaatgatcaaggagtggaggaaggcaccagatccaagcagaaatgcctcatcaacttctgcaggcagtcggcttcctgaccaccacacaggtgttccctggcaaaacaggtggccaggactgggggcaacgcaggaagtgctagtagcagtggctgatagaaatgctgaaacaatacacgtagatcaaatctgggacaattatgatggtgtgagacacccattactgaatctgcactgagtgcctctgagctccctttcagtgggagtgtaaggatcccagcagttgaagctacctaaacataaggctatcagtttcaaaagggtggtggaaatggcaacaaaaacaaaagaaatgacaggtcagagtctagtcatgggacagtaataatgcttccagcaaagccaatcttttgagaaataaaatagc

SEQ ID NO: 292228 - DNA, 1159 bp, Homo sapiens
attgcttttttttttttttttttttgtccaaaataaaacctctgctagctctggaaaaaaaaaaaacaaaaagaagtttggtgttttgtttgtttgttttttttttttgtttgtttkttttgttttttttttttgccaagtagtattccactgtatgggaataccataatttgtttattctttcacctgttaatggacatttcggttatttacagtttggggctactaaaaataaaactcccatgaatatatatccacaaaatttttgtatggacacatgtttttatttttcttgggcaaatacacagaagtggaatcactggatcttacagtggatgtatgctcaacttttaaataaatggccaaactgttttcttcattacatcattttacattaccatcaccagagttacagagttgcacctgttccatatccttggcaacacttggtattatcaacctttataattttagccattctaatggatatgtggtcatatctcactgtgttttcttttttaattcagaaagtatttattwctgctggccaacagtttggccattactgattgaaccatggtgtttgggtacttaatgtgagtattttattgcagaggttttcaatcagtgtttccagaagccttagagtaatagttctgaaaccatagggcatgcatcagatcacttggagagcttattaaaatacagattgctaggctccaccctcagcattcctgattcagtgaggacaatttgaatttccaacaaattctcaggagatccagatgtttctagtccaaggatccagaggttctagacagaaggaagggaggtggtgcaatgggcctcttggtcttgttacatgacttcttatcttatagttgtatttggggattctagactagattttattaaataaaaagattatttttwaaaaagcttgaatactgctgttttgttgcctttgcttttgtttcatagaaatcaattgaaggtgaaaataaataaaaatgctaatactagtgatatggggagatatcatcagtttaaaacaaatgaaatactgaatttatttagtatatgaaaagagagccttattttcttcccttgggacactctttatgatgaaaaaacgtaaaggaaatacaatgtatgctgg

SEQ ID NO: 292229 - DNA, 543 bp, Homo sapiens
agcttctactactatgttactatggtaatgacttagcttcccataaagctgcatttaaataggtgtttatagtcaccaattaccaggtatttcaagtactctttgaaaggggmctgcttgtggtggggtggggggcgttaacatagatactttctcagtcacgtagccatttgaagtttttcaggtagaagacagttgatagactatttggtgagcaaatgaataactggatgaatacccatctgggaacccctaaagaactgaagatagttccctggccatcactgttcacagtcatctattatgtgcttactctatgccaagtgttgggctggattctggggtcaccaaagggaagagaaaattttcactgccttgagggtagctaaaaacttaatggagggaagctgagagcatgagcgagcgtgccaccccagctgggtgagcggcacaccttgggaacagctgggagacccccagtggtgtgtgtcttccttcgcccttagcacttgctcctctccagctcactgtgtttcttttctc

SEQ ID NO: 292230 - DNA, 543 bp, Homo sapiens
agcttctactactatgttactatggtaatgacttagcttcccataaagctgcatttaaataggtgtttatagtcaccaattaccaggtatttcaagtactctttgaaaggggcctgcttgtggtggggtggggggcgttaacatagatacttyctcagtcacgtagccatttgaagtttttcaggtagaagacagttgatagactatttggtgagcaaatgaataactggatgaatacccatctgggaacccctaaagaactgaagatagttccctggccatcactgttcacagtcatctattatgtgcttactctatgccaagtgttgggctggattctggggtcaccaaagggaagagaaaattttcactgccttgagggtagctaaaaacttaatggagggaagctgagagcatgagcgagcgtgccaccccagctgggtgagcggcacaccttgggaacagctgggagacccccagtggtgtgtgtcttccttcgcccttagcacttgctcctctccagctcactgtgtttcttttctc

SEQ ID NO: 292231 - DNA, 543 bp, Homo sapiens
agcttctactactatgttactatggtaatgacttagcttcccataaagctgcatttaaataggtgtttatagtcaccaattaccaggtatttcaagtactctttgaaaggggcctgcttgtggtggggtggggggcgttaacatagatactttctcagtcacgtagccatttgaagtttttcaggtagaagacagttgatagactatttggtgagcaaatgaataactggatgaatacccatctgggaacccctaaagaactgaagatagttccctggccaycactgttcacagtcatctattatgtgcttactctatgccaagtgttgggctggattctggggtcaccaaagggaagagaaaattttcactgccttgagggtagctaaaaacttaatggagggaagctgagagcatgagcgagcgtgccaccccagctgggtgagcggcacaccttgggaacagctgggagacccccagtggtgtgtgtcttccttcgcccttagcacttgctcctctccagctcactgtgtttcttttctc

SEQ ID NO: 292232 - DNA, 554 bp, Homo sapiens
ttcactgccttgagggtagctaaaaacttaatggagggaagctgagagcatgagcgagcgtgccaccccagctgggtgagcggcacaccttgggaacagctgggagacccccagtggtgtgtgtcttccttcgcccttagcacttgctcctctccagctcactrtgtttcttttctctctggggtctaaggagcttaggcttcactgcctgctcctcagattgtgggagcaggagcagagagtgggtgcctgccacgggacagggggtcctagagacaggccccagcatgggaaggcagtggaaacccatgcattgctctctggcattgccacacgtcttctgctgcctgccttccagccctttgcttttccccagctccgtcagctccttgcctctgacatcagtgatgaaagtcaggcgtggggggattagattatttccattggccttgatagacttagacatataatagaagctatgataagtgagttagttttccatgtttgtttactgaagtttatattaccctttatgtcaccaaaacatgcccgtt

SEQ ID NO: 292233 - DNA, 1074 bp, Homo sapiens
gtttgccccttcctttcaccagttagctgtagtctatattgacataactttctccctgctgactctttaagcattattagaattcactcattactcaatatcacctctctgtatctgttggcttatttctgagaatcctttttgagaacatgaccaggcttctttctataatttttatatatatatatatatacacacacgcacacacacacatacactacataatatgtatgtagatacatatatatatctatatatgtacatatatatctatatgtatacatatatctatatatgtatacatatagatacatagctatatagatacatatctaagtctacagtattcacagtacctacagtatacacatgtatctgcagtatacacatgtatacacatgtagatgcatgtatacacatgtatacacatgtatctgcagtatacacatgtagatacatgtatctgcatgtatacacatgtagatgcatgtagatrcatgtatacatatatacatwttttgtatattgaccttgtatcccacaacttgcaaaactgacgtcaattagttctagggcttttttttttttttttttttttggtagattcctttgggttttctatagacaacaatgtcatctgtgaacagaaactatttaatttcttcctttccaatctgtaccccttttctttttcttgccttcttgctttggttaagatttccagtatgatattgtatagaagtggtgagaaaagatttccttgccttgcwcttcatcttagggggaaagtattcagttttttataattaagaatattggccaggtatggtggctcacacctgtaatcccagaactttggaaggctgagatagcagattgctttagcccaggagttggagactatcatgggcaacatagcaaaactccatctctacaagaaatacaaaaattagccgggcatggtggcacatctgtagtcctagctactcaggaggctgaggtgggagggttgcttcagtccaggaggcagaggttgcagtgagctgcaatcacaccactgcactgcccagcttg

SEQ ID NO: 292234 - DNA, 527 bp, Homo sapiens
agatagatgttgaggatgtgaggaagaacctcaaagggtgattgagaagtatccagaaacataggaataaagccagataccatttcttgttctgggtgtcaagtgaagaaagtgctttgaggaaaagacatggccaatgctatcaaatgcttcagatagtaggcagaatttaacattgtatttatcaatgttgaaagtcagttggtgaccttggccagatagttttcacagagtagagtaaaagacagtataaaatgtctggtggtccctacttcaagaaagtgtagaagagaaagaatttttggtagcaagtttagtaaactttttcaaagagtgtaactttaaatagatggacagaatatagacatgggtagcgtgtagaagcagttatgttctgggggcttgtggaattttcttctggttttatctrttttctcagggaattattcagcaaggctgtaaagtgactgtgaggatgaagggaaggtattggagagttgaactgaaaagagaaaaagaagaatatg

SEQ ID NO: 292235 - DNA, 545 bp, Homo sapiens
gtaatttttcagttccatccagtttattagtggatttttcaggtgaccttgtcaggcaatcaggggtagggaacataatttataacatagagggaataagaatctcagcttagcctagtatttgggatgaggatctttctgacatgtatttgagtctaagagcaatagcctatgaaatcttgttttaaaatagaagaaaagaagtgttaaactatattctgtattaataatataaccaaatgttaagttagttttagcctagaggttttgtttctgaagtaggtgcttcagtgcttctgcttgcagaatatgttctggttaatgaagatactgtcyagtatgcaacataacttacatgtgcatggtatatatccatacaatatggagaatgaaccttatctattaagaataaatgcagaaattctaaaatgtttaaaagattttatttaaatgtatgcacattttctatttgtcagcatatacgaggttcaaaactacaaacttgaatgtggcaacaaagtacgtttatcatattttctaaacag

SEQ ID NO: 292236 - DNA, 612 bp, Homo sapiens
gaacatttatccatcaatttatgtcatttattgtaatacgtcaaaaacgtagcttgtgataattcagttgaactacaaaaaagctcagtgataaaaatttccatttatttaaagctatttattatagctgtaaaagtgaaagtatagatagttgtcctaataaaatggaaatgcaaatgtataaaaaatagaaattaattgctagactctttagtctatgttgttcttcacagtatccttatgtacttctatttttttatttaaaaagtcaagtacaatatctttattyagttaaaagtaagtaaaaaaaataaaatttttcatcatttgttgatatgtttaaaatatataaaaatactatttaaatatattcctttttttgtttctgtgagaaattaaccactagtttcccacatctacaatcattatctttttcttttgtaatgtttattattgttaaactatagtataaatcattttatgttaatatctgtattcttcatattcattagtgactattaacataataaagagaaaataaaatgctgaagtcaatttatatgatgaaaaaatagatttaatattgagtaataaaaaatataatcctccttc

SEQ ID NO: 292237 - DNA, 567 bp, Homo sapiens
tcttcttttattctaagtaacctgtagtctagagttacaattttcactaatacattagtcttttctgtgacactttctaagttttcttagctataaaattaagaaatgttttacacaaattccctgtcttcacagagatagtatggaatgtgtagtttttagtccaatacacatggcttagaattttagtctcattcactgcattggtgcagggcctggcataagctagcttcacattactttcagttcttttcatccattttatccactattcgttatgtgcagggttaagacacagtcttataaaggtccacatattaaaaataasccattatggcaatgtgatttcagcactaacagaatgaaacactcaaaggatagcacgtgcaagtttatttttcattgtaatattaatacaagcaagaaatatcatttttcaattcttattttgattgtcaccataaaaatttggctaattgtagaaagtagaaaagttcctcttcaaagctcatcttggtttaaaaataaaataatagacactagaaataatagcttcttactctaaag

SEQ ID NO: 292238 - DNA, 476 bp, Homo sapiens
ttttgtgaactagcctcacataaaccraccttgaattttaaatagggtattaagcatttaagcttgcccaagatctactatcctgtacacaaatgtacaactatttttgtcactcttctatagagctagcattctggacaaatttaacaggaatgtttttgaaaaaaaagtggataaatgtcattcaaagtgcaagaaagctgaggaaaattttactaattcaaaaaagagtgtaaacttgttacttttaacacaaaattttaaaatatttttggtgattaagaaaatcattgatcaatataaataggggcaaatatgaagtagaaagagttttaaaatatcactctttatactcaatttccttctttcaaatgcttatctattattcttgatctgttataatagtctcttgaccagcagctacttaagcccagtgtttgattttccccattaaccctaaaatatttattgattgt

SEQ ID NO: 292239 - DNA, 476 bp, Homo sapiens
ttttgtgaactagcctcacataaaccaaccttgaattttaaatagggtattaagcatttaagcttgcccaagatctactatcctgtacacaaatgyacaactatttttgtcactcttctatagagctagcattctggacaaatttaacaggaatgtttttgaaaaaaaagtggataaatgtcattcaaagtgcaagaaagctgaggaaaattttactaattcaaaaaagagtgtaaacttgttacttttaacacaaaattttaaaatatttttggtgattaagaaaatcattgatcaatataaataggggcaaatatgaagtagaaagagttttaaaatatcactctttatactcaatttccttctttcaaatgcttatctattattcttgatctgttataatagtctcttgaccagcagctacttaagcccagtgtttgattttccccattaaccctaaaatatttattgattgt

SEQ ID NO: 292240 - DNA, 476 bp, Homo sapiens
ttttgtgaactagcctcacataaaccaaccttgaattttaaatagggtattaagcatttaagcttgcccaagatctactatcctgtacacaaatgtacaactatttttgtcactcttctatagagctagcattctggacaaatttaacaggaatgtttttgaaaaaaaagtggataaatgtcattcaaagtgcaagaaagctgargaaaattttactaattcaaaaaagagtgtaaacttgttacttttaacacaaaattttaaaatatttttggtgattaagaaaatcattgatcaatataaataggggcaaatatgaagtagaaagagttttaaaatatcactctttatactcaatttccttctttcaaatgcttatctattattcttgatctgttataatagtctcttgaccagcagctacttaagcccagtgtttgattttccccattaaccctaaaatatttattgattgt

SEQ ID NO: 292241 - DNA, 552 bp, Homo sapiens
ggataaatgtcattcaaagtgcaagaaagctgaggaaaattttactaattcaaaaaagagtgtaaacttgttacttttaacacaaaattttaaaatatttttggtgattaagaaaatcattgatcaatataaataggggcaaatatgaagtagaaagagttttaaaatatcactctttatactcaatttccttctttcaaatgcttatctattattcttgatctgttataatagtctcttgaccagcagctacttaagcccagtgtttgattttccccattaaccctaaaatatttattgattgtctagctaacaatggttttccagggcatacatgctataaacacaagtttaggaaccaaaactctttctgatatgctagcaattaacattttaacatttccataatacacagtgtatcagttagggctaggttttatsaaagaaaagaggcccaaaataacagtggctgaaagaagacaaatgcatctgtctttcatttacaattcttaaggcaagtaatcaggtgctggcctagcagctttgctacat

SEQ ID NO: 292242 - DNA, 559 bp, Homo sapiens
actgtccttcaattttcctaggtgactactcacataggctttgggggtgagtgtgttggtgtctgcacagtgaattgggtcacctcttaacaaaccctgcaaggggtgtctttctttccttcctctttcaaatgtgagaatatacttagcagctattgttttcaacttagaagascagagctgaatttctgagatgtcagaaaatgtcccttcagtattttgttgctatttctgaaggaatttcaggcaagaacatacattagaacagagaaatgtgtgctaatacctcatgaagtcttctggaacaagtgacaactctgccaatgggtgagggtgaccctggctgtgacttacacatgcaaataattattatattactaacaataaagaagaagatgataatgcctcacatttacaggtctcattatttttcaataacttttttaagagctttgaagctgctaacacatttaatccccacagtaactctctaagaaagtactatttaacttatttgacagttgaaggaactgaaacacagagaagttaaataacttcc

SEQ ID NO: 292243 - DNA, 513 bp, Homo sapiens
accagtctttgaacctgggaaatcttgtttcaaagcctcccatattagctaatacctcttactaaataaaataatgatatattatatcaactaatatgatcacctttaaatgaaataataactattaytaatcatggataaaagtatattttttccaggtatttattttggctaaaatatttagataacatttgttagttttctttaaaactctatatatcatgacctcacaaaattaaatcttaataatgtaagatggtcaatgaaatattgcagcattttaggcaaacttcaatgatggttattaaaaatattaatttcagtatgaatattttaaaattataagattaaatgtacagatttcatcctcttttgacatttggcatctatatttatttaactgtcttactaatgttggtcctgtaccctgctaatacaatttttttttatttccgttcaatcattttaagtctcatattattttcagtgtattttcagatgacaaatccttaa

SEQ ID NO: 292244 - DNA, 619 bp, Homo sapiens
gtcccaatttagcacagattcaaggggaggagaaaaaaaatagacccctacctctttgtgacaataaaatcaagtgatttgtggctatctttaattttaatatgtatttgttaaaaggacactcttgaaatattcttttacttcctagttttgcttgctctatttcaaaccagtgctgcattagttaacatgtggctcaccatacactttytaatgagaaagcttcaaaaagctcaatccccaaatgccagtacaaacactagcctggcaaaaagtcacctgaattcctccctctaatatacagaacccaagctgcatggacttgttctccgaacacagaaaacattatagtaaacaagggatttgagtttagatatttacccagcttctctgcaccctgagctctttttttttttttttttttttttttttgcctcaatcctctgccaggagatccggctgcttttctcacactttggctcctcacctcccctaagctaatatgcactccctagcaaattataagcattcagaactggagcagagactgtggcttgagggtaaaattaactctaccagctgaatagtttcccctcttcatcaaaatgtgcagttggag

SEQ ID NO: 292245 - DNA, 947 bp, Homo sapiens
agcactcttttaatcataatgtgtttgagggtatgatagtctgattttcccattattatcatcaatctgagatagaggaaagattgaagtaacactagcatgtccttgcataatcaaagctcagttgctagaaaaaggtttttaagttcaaattgtgtccccttagcagttgaggaatgaaaaaatcaaaatatcaaaagaggaagactggagtaattgtggctgacatttctcatgctcatctttcatttcttgaatgaagtgggtgtatatgggagatgagtgatggtggtggtgagtggggggaagtgggagggagaaacagagaaactgaaaaatgtgagtctttctrtattttcccataaaaagggctgtgttcactagagtaaaatactttatttatctatctaactatcttccaaagtgaatwttgaccaatcagaaccaaacaagtttgaatctttgatttgcataaacggacttgattgagaacctgagtaagaactttccccttttaagccagatcttcacttttttttctacagagaatgtactttcaccttactgaattctgtgcctccccaatcagcagacttttttcttagaaaatcgttatatttttgcccccactgaactcattaatctttgattaacaaagtttgcagagagaacagaaaacataaaggcttgaatgtgagaggatatagagaaaataatcatgactaggtgaagaatgaagagatgaagttggagttttagatagaggccaggttctcaaatatttttgagtccctgaaaccaactgaaattwaaaaaaaaagatttacataattaaatcatcaaattgaatttcagaaaaatcactcaggcaactctgtagagaatagcttgtaggggccaaatctggtagaagagagaatttaagactgtaaaggtcatccagctgg

SEQ ID NO: 292246 - DNA, 469 bp, Homo sapiens
ccttgtttatcttttatgtccaaatagcaaaatagggaagtggattcctaaacatattaagccaaaactkttaaaaaccaccaaaggaggtgagaaatgaaagatgcctagtatcttttcgtggactatttggacacctaggccgatcattttgagaccaagtagagggctgcttgaatgcagaaattgttctttcaaggcagataaaaagtcatgcgtgttctcttatccatgatccatagtcgtcataaatatttccttttttgttataattctgggccaaaaagaaaattaaaaattgtttgactttcatagcttgatcaaccacagacttatttttatttagacaataataaattctagtagattacctgttcaagagaaaaatcaattttgtgattcataagtttaagaaagttaccattgatataataaggaattaaaaatatatatcctgcaatgaacttaa

SEQ ID NO: 292247 - DNA, 469 bp, Homo sapiens
ccttgtttatcttttatgtccaaatagcaaaatagggaagtggattcctaaacatattaagccaaaactgttaaaaaccaccaaaggaggtgagaaatgaaagatgcctagtatcttttcgtggactatttggacacctaggccgatcattttgakaccaagtagagggctgcttgaatgcagaaattgttctttcaaggcagataaaaagtcatgcgtgttctcttatccatgatccatagtcgtcataaatatttccttttttgttataattctgggccaaaaagaaaattaaaaattgtttgactttcatagcttgatcaaccacagacttatttttatttagacaataataaattctagtagattacctgttcaagagaaaaatcaattttgtgattcataagtttaagaaagttaccattgatataataaggaattaaaaatatatatcctgcaatgaacttaa

SEQ ID NO: 292248 - DNA, 672 bp, Homo sapiens
ttgggtatgtctttattagcagcctgagaacagactaacacagctgacaacatcaaatgctggtgcaaatgtggagcaacaagaaatctcattcattgctggtgggaatgtgaaatagtacaaccactttggaggagacttccagaatttagtttaaaattcaatgtattcttactatataatccagcagttgcattcctcggtatttacccaaatgaactgaaaaattatgttcacactaaaacctaaacacagatgttattagccactttagttataactgccaaaatttggaagaaaccaagatgtttttagtaggtgaatggataaatcaactataatacatctcaacagtggaatgttatttagctctaaaagaaaatgagctgtcatccaatgaaaagacatggaagaaacttaaatatttatcactaagtggargatgttaatctgaaaagactacatgccctatgattccaacaatttaacattctggaaaaagcaaaactatggagacaataaaaaattagtggtttctaggtgttaggggagagagaggaatttacagctgaggcacagagaatttttaagatagtgaaatgattctgtatgatactataatgttggatacatgtcattatatatttatccagacctataaaatgtacatga

SEQ ID NO: 292249 - DNA, 590 bp, Homo sapiens
ttgaaggttttttggcagaagtttgtatatagaaggggaagattgtgtgtcctccttgctamttttacaaatttctaaattgaaaactatttatacaatgaagtagtaaataattcagtaaataattatttagtttgatttgattattgaatgcattagctaaccttgagtgtaggaatttcccccaaatgcaaatattagagtagactgtatttccaaagctgaaaaacaatatccactatctctgctttagcaatgtgacttgctttctccttgtcaaaaaatgctacttattatcactatccttgaatttggtctgtctaggatgaccaaagttcctgatttgcccaggaatgtacttttttggtagtgaaaatcctgtatccaagaaaacaccttagccccaggcaaacagggatcattagtgaacctgtccatcttccctcccacccaccccccttccccagctgtgagtaacagcatgtggtgaaagtaagctttataatttgtgaggctgggcttcaggttacttttgcctttactgtttagaatactctttcttagatctagtttctatgctgtgaagaaac

SEQ ID NO: 292250 - DNA, 544 bp, Homo sapiens
ctttctccagctaccattttgaagcagattcctctctcccaccgcttccacctccaaaattgaataaagtattgttcaatggacccatgtattttgaatatgaatttaaatgagtctaattatgacattgaatgcaacaaaccgctttatatacagctgtctttacaaatagaacatcatatattgaaattaaatgggaatattaacatatactttgtatgtatatgcacataaagtaaactgtggaactaagtgattatctgaccaattatagaattgaagttaacttctactattgaaaataccctagctttcccctaaaagagcatcaaaattaccccaactgacaaattatcctgytttattgatgtttgcctcaccattatttcaatattattttaaaaatggaaattcagaaagttactatttcatttttagtttgtttatgaaaacagacatgcaataaatagcattaggaatccttatatattttggatattaacttcttatcagatatataatttgaaaatattttatcccattc

SEQ ID NO: 292251 - DNA, 622 bp, Homo sapiens
tgaaaataccctagctttcccctaaaagagcatcaaaattaccccaactgacaaattatcctgttttattgatgtttgcctcaccattatttcaatattattttaaaaatggaaattcagaaagttactatttcatttttagtttgtttatgaaaacagacatgcaataaatagcattaggaatccttatatattttggatattaacttcttatcagatatataatttgaaaatattttatcccattctgcaggttgtctctttactctgttggttgtttcttttggtgtgcaaaaagcttattttattttttttttgaggaagaatcttgctctgtcactcaggctgaagtacagtagctcaattttggctcactgcaaactccgcctcctgggttcaagcaattttcctgcttcagcctcccaagtaactgggactacatgtgtgtaccatcacacccagctaattattgtatttttagtagagacagcatttcgcgcatgttggccagkctggtctcaaacttctggcctcaagtgatcctcccaccttgacctctcaaagtgctaggattacagatgtgagccaccgtgcccggccaaaaagctctttgtttaatgca

SEQ ID NO: 292252 - DNA, 578 bp, Homo sapiens
tttgttaaactcaaagacacaaacatacacattagcctaggcctacgcaggtttgggatcatgaatattactgtcttccctctccacatcttgtcccaaaggaacaaaggacaataacaggcatggagttgtaatctcctctggtagcagttctttcttctggcatacctcatgaaggtcctgcctgagtctcctcttgaggaggtgtcattgttttcagaaatgtgtcaacagggatttgtttggcttgtacttttgttattattttttccactatagatttcttgtaagcaaataatacagcattaacattttactctattaataaacctttcagtgttgggggtccacgttttcaaactgtttaaggagcgcattgatgtctgcaacagcttctgctaagccattcactgtgaattttcttaggggttcttttccttctcttgcggttccttttctctcatctcttcttcagctgtgtattcctgttccagttccaactacccacttgtcaattcctaaggaacaacctctaggaggtcctcartgtcattctcatccacaccccggttaaagtt

SEQ ID NO: 292253 - DNA, 619 bp, Homo sapiens
ctgttcaagcagaacatgaacagctttttatttccctgtataatttgagtataaacaatttaatgatttaatgtgctacttattctcacttattagggcatgcrtatttgtgcatggaatctatttttaaaatatttatttaacactcacctgaaaacatgtattataaatagatttatgaatgtatgcacactttataacaattataaccttttttcccagaagtacaggcttaagcaattatttcaatttcttaaccaacaacccatcattttaaagatatacattaggagctaataatgaatggcaataatattaaatatttcaaagacttctatttgtggaacatcaaaatgaaaaggctcattcatattgttgttttcccttttttaagactctgcacctccaatgacatttcagaaaattaccagtatatcagtgaaattgcaataaattattgagatgtgaacctattttatgatattatcctgatattttaaaaggaaatatctatttgaaaaacctcactgttatatgtaattattttactggttgagaatgaattattgaacatcaattttcttaaacataaaagatagtattttgaaaaattggaggt

SEQ ID NO: 292254 - DNA, 619 bp, Homo sapiens
ctgttcaagcagaacatgaacagctttttatttccctgtataatttgagtataaacaatttaatgatttaatgtgctacttattctcacttattagggcatgcatatttgtgcatggaatctatttttaaaatatttatttaacactcacctgaaaacatgtattataaatagatttatgaatgtatgcacactttataacaattataaccttttttcccagaagtacaggcttaagcaattatttcaatttcttaaccaacaacccatcattttaaagatatacattaggagctaataatgaatggcaataatattaaatatttcaaagacttctatttgtggaacatcaaaatgaaaaggctcattcatattgttgtttycccttttttaagactctgcacctccaatgacatttcagaaaattaccagtatatcagtgaaattgcaataaattattgagatgtgaacctattttatgatattatcctgatattttaaaaggaaatatctatttgaaaaacctcactgttatatgtaattattttactggttgagaatgaattattgaacatcaattttcttaaacataaaagatagtattttgaaaaattggaggt

SEQ ID NO: 292255 - DNA, 603 bp, Homo sapiens
aaaatgaatgtagttaccttgttgtgattaccccttggaagggagggttctattagtaaataaaagatgaggaaattattcaggcagccaacagttcctgtaacaaataggaaactcttaacttcaattaaagaatattaacttgcttttattctgtcctaacaacttatggtgaactaaaatacactacacatgggtagtttgtttccattggtccagctrttcctgtctgaaagctcagtggatcagagataaggtcgaaagcagttgagcagtgacaccctttaattatggcactccaacttctcctggtactcaatattcttactaatagagagaatctatttcaatttctacttaaatcaaactgaacttgcagcttattctctaaaggttagtattcttccctaacattcctatgactgtattctggcttacaaaggagcggaagtatcagatatcatgaatagatgaaacctttgtacacataccccaattttctcagtttgaaccataataataagttaatctacaaatccaaattttccaacttttcagaacactctcttaagtaagacagataaatgtttagttgtggttggt

SEQ ID NO: 292256 - DNA, 503 bp, Homo sapiens
gttaatctacaaatccaaattttccaacttttcagaacactctcttaagtaagacagataaatgtttagttgtggttggtaatttagaagagaagacatttggaaagtaaaatagctatcaattaatatagggatatcaatggtaataattgtagcagtaacagagatttttttatgtgccacacacttttgaaataatacatatatacactaaattaaccctcatactaaccctatatgacatgacacagcgaatctaggaaaactggccatggtctcaagatagtagatagatatattatgaaaatagaaactattacacttggaatgtagctgtgtttctttattaagagttacccgtccaaactttgtctctctggaagtgcagatctgatgcaagagaacaaatagattgtttrctaagtagtcttgggaacattctccccaatttcacaaggaccccttgcccttaagtttgccctactttattctatattttctaa

SEQ ID NO: 292257 - DNA, 1217 bp, Homo sapiens
gattatgtgagaagtgggcaattgaaaagacaactgcagggaggtcagaaccccaaaatcagtaatggcccaatctgactgtcattagtgatgaaaaagcaccaatgaaaaatcctttactaatagtcatgctgtctttttacaatctattcttaaattagtcattattttggaagcaaagtagttaccggggtgattttgaagaggagtctcagtatgcttaatggaaagtttgcccttataagatgacttgggacaatagatttgttcaaattgctatgaaatctagagaactcttgaacatggacctttgaatcttcatgttgaaatctatttgtcaaattgttcaaatactattacaagattatggtttcctgatattttctttcccccccaaaaaatttcaagactataygaacatctaacttaaacaagtttgtatgtatttattattggggaaacgtgtattttaaaatacattttattacagagtactgggtaatactattattttttatcttcgaacctaaaacaacatgccaataggcacgctaagagccaatttatgaccagcaaaaaaaaaaaaaaaaaaaaagcgaaatagggaawgattatgtgagaagtgggcaattgaaaagacaactgcagggaggtcagaaccccaaaatcagtaatggcccaatctgactgtcattagtgatgaaaaagcaccaatgaaaaatcctttactaatagtcatgctgtctttttacaatctattcttaaattagtcattattttggaagcaaagtagttaccggggtgattttgaagaggagtctcagtatgcttaatggaaagtttgcccttataagatgacttgggacaatagatttgttcaaattgctatgaaatctagagaactcttgaacatggacctttgaatcttcatgttgaaatctatttgtcaaattgttcaaatactattacaagattatggtttcctgatattttctttcccccccaaaaaatttcaagactatatgaacatctaacttaaacaagtttgtatgtatttattattggggaaacgtgtattttaaaatacattttattacagagtactgggtaatactattattttttatcttcgaacctaaaacaacatgccaataggcacgctaagagccaatwtatgaccagcaaaaaaaaaaaaaaaaaaaaagcgaaatagggaa

SEQ ID NO: 292258 - DNA, 641 bp, Homo sapiens
agaaaaaaggggacaaccagacaccaagaaagaaactgaagatgcttagggagggggactctctgaggaaaaggaaggcaggagctatacacttttgttgttgggaaagcctgaggtccagaggagagggacaggtgggaaatcctgcaaggacagtagatgtcaaaccaaggaaggaactttttaaaaggaatgttgaaatgccacagtaatttctacttaaaaactcaaccctgggaaaaatgtttgacttttctaaagcataatgacatcacaaacaacagacaatagyggcaaaggcttcaatctgagagacagaatatcatagcccaaaactgctggtgatcctgtagctgtcattttaaccccttgagccccagtctcctaggtcttcctcatatttattcttgttcatcttgagaatcccttcttgctttaatggtctaaggttcaaatgatggagacaggaggatatgaccctccagtatatttgctttacaaatctgcttctctctttcatctaagttgctttaaattgatcaactcattatccaacctgagttagaatggagacatatgaacttattaatgacttcttattaaaagaggggacatttacatttgcctctggttttggtttg

SEQ ID NO: 292259 - DNA, 659 bp, Homo sapiens
cttccctttttattatctatgtatggattccaactttttcaycctggtaaaagaggcagacttttcaagcttataacaactgcttatctaattgtattttaatggagtacacattattgtgttttttgctgcagcagcattttttttatttttatagactaaggggtacatttacaggtttgttacatggatatgttttgtaatggtgaggtttgggctcctagtatgcccttcacctgaatagtgaacataatacctcattggcaatttatcaacccttacccctctctacccttcccccttttaaaattcccaatgtctgttatttccctttctatgtacatgtgtgcccgttgtttagcgtctagacagtatttaattttctgtttctgagttattttacttaggataatggcctctgactccatccatgttgcggcaaaagaaatgatttcatgctttttatggctatgtagtattctatggtatacataaactacattttctttatccagtcatccattgatggacgcttaggttgttttcacgactgtgctattgtgaatattgctgtgataaacatataagtgcaggtgtttttattcttcttttcctttggtgtaaggaaaggtatgtattaaacatgttagaataggtat

SEQ ID NO: 292260 - DNA, 1214 bp, Homo sapiens
cttccctttttattatctatgtatggattccaactttttcatcctggtaaaagaggcagacttttcaagcttataacaactgcttatctaattgtattttaatrgagtacacattattgtgttttttgctgcagcagcattttttttatttttatagactaaggggtacatttacaggtttgttacatggatatgttttgtaatggtgaggtttgggctcctagtatgcccttcacctgaatagtgaacataatacctcattggcaatttatcaacccttacccctctctacccttcccccttttaaaattcccaatgtctgttatttccctttctatgtacatgtgtgcccgttgtttagcgtctagacagtatttaattttctgtttctgagttattttacttaggataatggcctctgactccatccatgttgcggcaaaagaaatgatttcatgctttttatggctatgtagtattctatggtatacataaactacattttctttatccagtcatccattgatggacgcttaggttgttttcacgactgtgctattgtgaatattgctgtgataaacatataagtgcaggtgtttttattcttcttttcctttggtgtaaggaaaggtatgtattaaacatgttagaataggtatwgagtaaaactccctgaggtctcaccagaagccaagcagatgacagcaccatacttcctgtatagcctgcagaaccatgagcaattaaacctcttttatttgtaaattacccagttgcagctatttctttatagtgatgcaaaaaaaaaaaactgactaacacatatccatwtgaatatggcactgaacaaggagattatatttctgtaccatcttgttcaaaatcaggctgttaccttctcattcaagtaaaaactgcatttttattataataaatgtgggttaggttaaatgacatgccaggtcaggcttagttatatctccttatgtcacttttgcaacaacaagcagtactcctgttgggaaagggaaattgtgatttacgtgagcctctttcaatgaacataatgacttgatatgaagtttctagatggaatttgcagtcatatctgtctcaacatccaacttatagttgaattttgcttgatttttcagtaccaggataatactgacttagacaagtagttgcaaaaggatagcagcttattgtgcaat

SEQ ID NO: 292261 - DNA, 554 bp, Homo sapiens
gagtaaaactccctgaggtctcaccagaagccaagcagatgacagcaccatacttcctgtatagcctgcagaaccatgagcaattaaacctcttttatttgtaaattacccagttgcagctatttctttatagtgatgcaaaaaaaaaaaactgactaacacatatccatatgaatatggcactgaacaaggagattatatttctgtacmatcttgttcaaaatcaggctgttaccttctcattcaagtaaaaactgcatttttattataataaatgtgggttaggttaaatgacatgccaggtcaggcttagttatatctccttatgtcacttttgcaacaacaagcagtactcctgttgggaaagggaaattgtgatttacgtgagcctctttcaatgaacataatgacttgatatgaagtttctagatggaatttgcagtcatatctgtctcaacatccaacttatagttgaattttgcttgatttttcagtaccaggataatactgacttagacaagtagttgcaaaaggatagcagcttattgtgcaat

SEQ ID NO: 292262 - DNA, 623 bp, Homo sapiens
tatccatactcatcataattaattaactgctaatacatataaaagtatggataaatctcaaaatcattatgttgaatgaaagaagccagactctttcattcaagtattgttccatttatatttgtaaaaatttgtataacattatagaaaatgcaaaccaatctatagtgacagacagcagatccgtgattgtcttgggccagggacagaagaaagagggactacagagggacacgggacaattttacaggtgatggaattgttctccgtattgttatggttgcrgattcacaaaaatatatccctctaaagactcatcgaatatgggcaatttactgcacttaaattacatcgattaaaatttatctttaaaaataaatgaacaagccaggataaaaccagaataaatagtacttacctcatggagttctttgagtaatatatgagattatacgtttaatgtacttatgatagtgactcacatattataaatatttaatatttgctgtttttatcattattattgatatgactaagattattaataagtcatttgtatgtgatgaaaagttgattaggtttcatctttccttcatgatgatctgtatattaattgggcctcc

SEQ ID NO: 292263 - DNA, 419 bp, Homo sapiens
  misc_feature (1)...(419): n = A,T,C or G
nnnnatgctgtgtagtagcacctctgtcgacaattcagctataccaggatttcacayttcctgaatgagctacaatctaatatgaggaaaagagagggactattgctcctccccactccaaaaaaaaaaaaaaaaaattctgcccagagactcttgagcctgccagagcaaacaggacacattgaggaaggctataacacaaccccttgggagaagatgtatattttttccgtaatgaaagctattaatttcttcagtgtatctcacacacataaaaggtaatgtagttatgcaattaatcagttttgtgctgagtgtagttcatggagggacgaattgaatattcataactgttttctgtcatatttaaactaatgttcactcttaagcattaaagctgttcttggaagttttcccta

SEQ ID NO: 292264 - DNA, 576 bp, Homo sapiens
tctgtttacacgtctgcctccttcctttgtctagactttcaaaaacctggaagccaaaagtgatgtcttcattttaatatccccagtgcctagcagcgtgcctggcacaaagtgttcaataaatgggtgaacacacatacatacactttaggacttgtgttcttctaaccacagttggtaactttgtgtataacctcaaggcctcatgttcttgcatttagtccaaattttaagttcttgaaataaataagattattgatacagagaataataaaagtgaaataatacattggtttgccatcatcaaaaacccctaacttaatatttgctgattgtaggaaatcgtgaaagttactggtatcttgtatgataggttaggacaataacagaaaaacttaaaccaagagagaaatgattttcagaaatggcagtatttggtataaaattcctctacgaaaacactagtgtttgtttkattatatacttttgttcttcttttactcaaatgccacaagtcttgcaacataaaattattgttaaatacacatagcctttggtaataaattgttgcaaatg

SEQ ID NO: 292265 - DNA, 585 bp, Homo sapiens
atgatgacattaagcaaaagtagccagtcctatgttgctaactatttatatgacacaatagaaaaaaatagccaaaactaaataaaacattgtttttaatcttttccactagactctttggtgtgtttatcacagcactattaaagtcctgatctgatrtattttatacttgaccgtctctgcatctgattctgttgaccagttttcctcttgactatgggtcaaattttcttaccacttggcatgacttaaatttttgtattgtgtactcaacattgtgtgtaagccaacagtgaagcctaagtaatatttacccgccgaataaggcacatcctacttctgtcatgccaccaatatgaggggctgagtcaatctaatctatagattagttgtgtctgggcttcattaaagctttagttattcagttcaccactggattcaaataatttgatgttggaatcaggacctttcctccagcaggacttgagatctgaccactcataaaactccaaagatctctttgtgctctatagccaggaggtcacctggctttctgaatgtgggagacacctttacagcctgtga

SEQ ID NO: 292266 - DNA, 585 bp, Homo sapiens
atgatgacattaagcaaaagtagccagtcctatgttgctaactatttatatgacacaatagaaaaaaatagccaaaactaaataaaacattgtttttaatcttttccactagactctttggtgtgtttatcacagcactattaaagtcctgatctgatgtattttatacttgaccgtctctgcatctgattctgttgaccagttttcctcttgactatgggtcaaattttcttaccacttggcatgacttaaatttttgtattgtgtactcaacattgtgtgtaagccaacagtgaagcctaagtaatatttacccgccraataaggcacatcctacttctgtcatgccaccaatatgaggggctgagtcaatctaatctatagattagttgtgtctgggcttcattaaagctttagttattcagttcaccactggattcaaataatttgatgttggaatcaggacctttcctccagcaggacttgagatctgaccactcataaaactccaaagatctctttgtgctctatagccaggaggtcacctggctttctgaatgtgggagacacctttacagcctgtga

SEQ ID NO: 292267 - DNA, 544 bp, Homo sapiens
gaaatggaatggaagctaaattaatatctttcatacaaattccagaaacacacagatatacatatgtaggtatatacaatattatgatttaactggaaagaaacttgagaaatgtaaatattagctatgccagaacagatatttgtatttcaacttacacagaattaaagaatattacacacataatgattttggtgttttcccacaagataaaataagcaggaaaaagtgatagagtataacatatataagctagtaatagtctactccatgaatagaaatggctccaactgaaatggtgtagagttcttcatgcattcctacgtctgcctgccctgaatcatctaagtcaaagtgccagagtaatagcactcgccactggatgtcaaagattggagttcaaatgggaatttttcaacaagtagcagtgtgacttcaggaaatatctaacttaaaatatgtggataatgatatgcctgtccctgaacttgtcrtgaacatacctattaacaataagtataaaagacatcacattgtgatagac

SEQ ID NO: 292268 - DNA, 610 bp, Homo sapiens
tagaactattctataatagccatgcgtttctcctttctaacacaactctggttccattctagtgcctaccctcagtcacatactttggagaatcctgggtcaaaccccagcccaagggatgatcytgatatcctaagtcaattatagaggtaccattcccttttccaatgattggatttggaacagtatataatatagttttggccagtgagatgtgaggggatctcttcctccagtgaagggtccctgggaaagatagattcatcctgagaagagaacaaaggaagaggtggtcagttttcttccctggacattatcatgctggaatctttctgctggaactgttgtagggattttgcatccatgagtaagtgagatacctctggaaatgaagctgagaaagaatcagcaaaggcaaggcgtaagtccttaaggattagacctagagtggaccatgcctttgaacttcattttatatgagattataaatgtcattattgtttaaacccaataaaatcgtgactttttgttccttacagttgaaagcatcctaactggtatatatttttcagctgggaccctgaaaaacttcattggaaaagaaattcta

SEQ ID NO: 292269 - DNA, 562 bp, Homo sapiens
cccttcccccaattccgttagtcattttaccccccaccccaccctgggtttcttttgtctgaatctttttcaacaccaaggtccctctgtatgcctctccccaaaagccyttatgaaagttacctgcattttttaagtgcctacattttcttaacttcgccttacagctctttgccttaattaaagccttctaccaattgcttcttttttctaagctcgcgggtttttttctataagttttttgtttttgttttttaaggggggaacaaaagaaacgtgattaccttggaaggcggcttattgcagtttggggggaaaattcactgcagcgctgcgcgactgggttcggcgttgcccaggcgggtcacataggaagcgtggtggcccggggaaggatgcggagggtgcgggacggtgctggaagatgcgggaggatgcggggctggccgaagatcttggtcccagctcctgtccacaacacctaatgttctcggctgttgcgtccgcacgcctggagttcttccccagaaaggctcggggcagctcgcctgcaagttcaaat

SEQ ID NO: 292270 - DNA, 559 bp, Homo sapiens
tgtttcttattttatgttctatgctttcacaatttacatttacttacttgtaaattgtgttatctgaagaattttttccatatctgatgtctgcataactccggaatattgttagacatttaataggaacctaattataaaacaaatttatttactatgtatgccattaaaaacattacaattagcctgtttaagcctcartgtatctcagcgctgaactctatcaaatgctatgaactcacaattttccatgactttatatgcaattaaagacctcaatgaaattatttatgtttttatcccccaattatatagtacctactctgtgccaggcaatatgctgtggactgaaggtaccaacatgaataagataactttccctcactgggtgtgataggctgaataaccactccctccatctcccccaaccgccgcatgcgcatgtcctaatttgtggaacatgcgaatgttatcatatggcaaagactttgtgggtgtgatcaagttaatgattttgattatcctaggattatcctggattaccaaagtaagcccaaat

SEQ ID NO: 292271 - DNA, 559 bp, Homo sapiens
tgtttcttattttatgttctatgctttcacaatttacatttacttacttgtaaattgtgttatctgaagaattttttccatatctgatgtctgcataactccggaatattgttagacatttaataggaacctaattataaaacaaatttatttactatgtatgccattaaaaacattacaattagcctgtttaagcctcaatgtatctcagcgctgaactctatcaaatgctatgaactcacaattttccatgactttatatgcaattaaagacctcaatgaaattatttatgtttttatcccccaattatatagtacctactctgtgccaggcaatatgctgtggactgaaggtaccaacatgaataagataactttccctcmctgggtgtgataggctgaataaccactccctccatctcccccaaccgccgcatgcgcatgtcctaatttgtggaacatgcgaatgttatcatatggcaaagactttgtgggtgtgatcaagttaatgattttgattatcctaggattatcctggattaccaaagtaagcccaaat

SEQ ID NO: 292272 - DNA, 522 bp, Homo sapiens
caggccggtgagagtgatccacattggctgccattagaacacaagaagccggaggatgaagagaggttgattgatgggtacaagcacacagttaggtagaagaaataagacgtagtgatcaaaagatcaccagsggactataatcaacaataatctattgtaatttcaaaatagctagaagagaattaatttgaatattcctagcattaagaaaagacaaatatttatggtgatggatatctaaattaccctaatttgatctttatacattatatgaatgtatcaaattatcacatgtatacccaaaatatatacatctattacgtatcaattaaaaaatagaaaaaaatccttagaacctttggccacaggaaatgaaatattttaatttcaatttataaatatattttgtggcagagaagtataataatgtcagcaataaaagactttcaaccataaaaaaattaccaacaaaatttatatctagtcattttggtagagtttctcatggagcaaacatca

SEQ ID NO: 292273 - DNA, 522 bp, Homo sapiens
caggccggtgagagtgatccacattggctgccattagaacacaagaagccggaggatgaagagaggttgattgatgggtacaagcacacagttaggtagaagaaataagacgtagtgatcaaaagatcaccaggrgactataatcaacaataatctattgtaatttcaaaatagctagaagagaattaatttgaatattcctagcattaagaaaagacaaatatttatggtgatggatatctaaattaccctaatttgatctttatacattatatgaatgtatcaaattatcacatgtatacccaaaatatatacatctattacgtatcaattaaaaaatagaaaaaaatccttagaacctttggccacaggaaatgaaatattttaatttcaatttataaatatattttgtggcagagaagtataataatgtcagcaataaaagactttcaaccataaaaaaattaccaacaaaatttatatctagtcattttggtagagtttctcatggagcaaacatca

SEQ ID NO: 292274 - DNA, 586 bp, Homo sapiens
tcttgcatggccagtcttgcattaattaaactgtttctttactgcaataccatggtctcagtgaattggttttgcctgtgcagcaaacaggaagaacccatcagatgagtacactttagttcagcatatcagagcaccatatttcggggtatcattttctgagccccaacaagggtgaactggagactgtagacctaagctaaggggcagctgctacttaatttcagccatttcatgacaaaagaaaaggcaggcccacaagattttctgatttgttgaaaggaaccaaaaatactagattttctttttatttttaagtgtgaaatcttcccatattaaagtttttgaacaaaattgactttttaaaccacttgatgcaggccaaaaggaaacgcatctgtggacaacatttagcttgcctgctgctaatatgtgayctttaatttagattatatgacagagactggatgaatacttatcaaacctatatcctgttctttctgagcacacagctaaattatatttcccagtctctcttgcagttaggccagaagaatattggtgggaacaatggacactgctgcca

SEQ ID NO: 292275 - DNA, 595 bp, Homo sapiens
cccagataattcagactaagctcctcctcttaagatatttaacttaataacatctttcaccatacaaggtgatattcacagattttaggcattagacatgaacatatctttgaggccatcattcagttcactacagggacatacacaaggatatttattttttaaattctattaacagcaaaaaactagaaacagcacaaatgccccacccacaagataatgcataatgtataatgtaataagaatattatatagcagtatagagtcaatttcatcttcatctatatcagcacacatagttatcaaacacttgtcataaagcaagttgcagaatgacatatacaatattatatcatttatttaatttttaaacaggaatacatatatttattaraagtacgcaacatgagctaaatagatatatacaaatatatgacagtgttggaaactggggagcacccatggcatagaagatgggaagtagagcaaagatggttccattaaaagagaagcttcttttataataatacacaaaagagaaattccaaaatgtgaacagtccttaatcttgggttataggcactgaagtgtttgt

SEQ ID NO: 292276 - DNA, 595 bp, Homo sapiens
cccagataattcagactaagctcctcctcttaagatatttaacttaataacatctttcaccatacaaggtgatattcacagattttaggcattagacatgaacatatctttgaggccatcattcagttcactacagggacatacacaaggatatttattttttaaattctattaacagcaaaaaactagaaacagcacaaatgccccacccacaagataatgcataatgtataatgtaataagaatattatatagcagtatagagtcaatttcatcttcatctatatcagcacacatagttatcaaacacttgtcataaagcaagttgcagaatgacatatacaatattatatcatttatttaatttttaaacaggaatacatatatttattaaaagtacgcaacatgagctaaatagatatatacaaatatatgacagtgttggaaactggggagcacccatggcatagaagatgggaagtagagcaaagatggttccattaaaagagaagcttcttttataataatacacaaaagasaaattccaaaatgtgaacagtccttaatcttgggttataggcactgaagtgtttgt

SEQ ID NO: 292277 - DNA, 556 bp, Homo sapiens
tggattgaaaggtcagcaggaaaatgaacttctactcacaccttcacgggtggtccctggcttctgatcatgcagaggacaagggctaatagggaacagacctttccgcctttctgctcttagaccaaatgtttcttgagaagtcagccttgggaccccaagcctcagctcatgagatgacygaacccatggcaaagcacagtcttgttaaacttccctccctgtcctgtctcccagtggccttgggctctccacacccagccctcaccctcagcctcacaccatgctggtgaaggaggtggcagaagcatgcccacactccctctaggtgtgtttatggtgcccatatcctcttccaggcagtgagggagctgtcacccaaggataggtaaagagagctcagcatcaaatacaacttgtcagtatagcaagtccatgagcgtgtctttccatttaatcttcacagtactttggtgggggacacagtgcgagcatcattatctgcctcattttacagatgaaaagatagaggccagagaggttgacaacttgcaca

SEQ ID NO: 292278 - DNA, 654 bp, Homo sapiens
agctatagacaatgtacaaataaatgagtgtcactgtgatccaagaaaagtgtgtttacaaaaaaagcagtgggccagatttagcccacaggccatagttttccaacctatgcgctagcttgatggccatgtgtctatcttaaactctgggggtttctgtcattaaaaggaagaagaagagaatggctatggggcagggggcaagggatatcagcctctgatacaaatactttttgttcccaggcaaattttgaaaacagataatcccattcttgatttatttgttggtatatygcatgctgactctagttgcagaaggcgtatgtgttggaaaaagttatccatttaccatttttaagaaatgatctccactgggcctgagttcaactccatactaaagaaacctgaagcctctccattcagtgttcccagcggtcttcactgattccttctgttttactaattaaaatccatgtaacccacggtataactttgctgggtatggttgattgacactctccattcactccacctctttctatgtacttttctgtactgcagtctggaaagctaaaatctgcatttcccagactctcttggatctagggttctggatgcacttaggcaagacctaaaccacagcagtaagacagc

SEQ ID NO: 292279 - DNA, 1077 bp, Homo sapiens
tttatagctaggatagaagaacatggcctgggctcaaccaatcagactctcaagctctggactatgaagagagagctggtgtcaagaaatgaaggaaaccattcttgttatgggtggcaacagctggggtggtaagaaccaatttctggagccaagagaggcttgcttccaggcaacttgtggcagccagtagcctgcaactgatgcagagytgctgggaagcatgatcgtggctatgtgtctagctactgcctcgtcccttgttcttgcttgttgtgattctgtttctccattgctcttttcaattttgtgagttttccaattacctttctgacataagcatttaatgctacatattttcttctaattacagctttagctgtactacaaattttgaccttttgaatctttatttttatccaattcaagatgttttccaatttctcttgtgaattcctatttgacccatgggttacttagaatatgttgtttaatatccaaatattaggggattttaaaaatctttttctgtwaatacagcaggaataatagaaaaaagagttacacttttgaggctctgttgcctaactatgctttacagaaactgggctggtgacatattctctagacatcacccataacactggattgcctctccatgaatagtcatttgcaaagattgggcttccctagaattaaccaaaatgttcctggagcttctatgtggcttatttattttttaattgagataaaattcacataacataagatttaccattttaaatatttttcagtgtacwattcagtggttttcagtacattcacaagattatgcaaacatcaccactatctagttccagaacatttttcatcaccatataaggaagccccaggctccttaagcagtcactcctcattgcccctttattctagcccctggaaaccactaatatgctttccatctctatagatttgcctattatggacatttcataaaactagaatcatacaatacatggccttttgtgtcttgcttctttcacttatcatgttttggaaggacattcatgttgtagc

SEQ ID NO: 292280 - DNA, 616 bp, Homo sapiens
tctttgggcactgccacggtggcaggcagatgcctggtttatttccattcctccgcttctctgatttgtttgggtggctaaatatctctttcccaggagaacatctgctcttttaaaaatggaaaaaagcaggaagacctccaagctgttggrcaggaactcaccctcgagtgagaccgaccagaatctcataaaacgtttcttctggggtccccgccacatctcaagagagggcccaagcagctcctttaggggtcctggaaccctacccgcttgcatgtccttcaaggcagtttgaattctgtgctatgacgcctgaggcttaataactgctttggccaagtttaggtcatttttcttgatgtctcatttatagatgtcttcttaccatcactaacacccatggtttggttggaaatgaatccacagcaatgcagaggtgcaacaaaaatatggtggaaaaacttctaacttggtagttaaagggaacttaaatacttctgaatgaaaagactctttggggagaaataatctttttttttttttttttttctgtagagatgggaatctcactatgttgcctaggctgatcttgagctcctagccttaagtgatt

SEQ ID NO: 292281 - DNA, 603 bp, Homo sapiens
ccttcaacataaggaatttagggggacacarttcagcccatagcactcatgaaaggggcttttcagtgctgctccagacttctcagccttcccctctcctgcttggtaacccctctccttgttcctgaatcccagatcgacaccacactgcatggtgttttggtagaagcagctacagggttttcatcagagtcctaggactctggacaacatgaacagtatgaaaagtccttctgaatatcggtgggtgtggagatgaagaggtgtgggtggggttattttgggactgtttgtcttttgtctgcacatattaaaggctggcctagtttaaaatgtggcctttcttattttttttttaaattggagttttgaagtaagtgaatgatgacagtgtgtgcataggagtctgtcttgggataaaagaagtcagtggacagtcacagaactgggtatggatggtctcagaatgctgaataaaaggcatagcaagattcttggccttctatttcctaatgctctcagaatatttttagttgatctgtcatctttagcttagggccataggatagactttatgtcatttagtttcatcaccaggagaac

SEQ ID NO: 292282 - DNA, 603 bp, Homo sapiens
ccttcaacataaggaatttagggggacacagttcagcccatagcactcatgaaaggggcttttcagtgctgctccagacttctcrgccttcccctctcctgcttggtaacccctctccttgttcctgaatcccagatcgacaccacactgcatggtgttttggtagaagcagctacagggttttcatcagagtcctaggactctggacaacatgaacagtatgaaaagtccttctgaatatcggtgggtgtggagatgaagaggtgtgggtggggttattttgggactgtttgtcttttgtctgcacatattaaaggctggcctagtttaaaatgtggcctttcttattttttttttaaattggagttttgaagtaagtgaatgatgacagtgtgtgcataggagtctgtcttgggataaaagaagtcagtggacagtcacagaactgggtatggatggtctcagaatgctgaataaaaggcatagcaagattcttggccttctatttcctaatgctctcagaatatttttagttgatctgtcatctttagcttagggccataggatagactttatgtcatttagtttcatcaccaggagaac

SEQ ID NO: 292283 - DNA, 603 bp, Homo sapiens
ccttcaacataaggaatttagggggacacagttcagcccatagcactcatgaaaggggcttttcagtgctgctccagacttctcagccttcccctctcctgcttggtaacccctctccttgttcctgaatcccagatcgacaccacactgcatggtgttttggtagaagcagctacagggttttcatcagagtcctaggactctggacaacatgaacagtatgaaaagtccttctgaatatcggtgggtgtggagatgaagaggtgtgggtggggttattttgggactgtttgtcttttgtctgcacatattaaaggctggcctagtttaaaatgtggcctttcttattttttttttaaattggagttttgaagtaagtgaatgatgacagtgtgtgcataggagtctgtcttgggataaaagaagtcagtggacagtcacagaactgggtatggayggtctcagaatgctgaataaaaggcatagcaagattcttggccttctatttcctaatgctctcagaatatttttagttgatctgtcatctttagcttagggccataggatagactttatgtcatttagtttcatcaccaggagaac

SEQ ID NO: 292284 - DNA, 564 bp, Homo sapiens
actgtaagaaataccggcacagcttgttttattgcactttgctttgttgtgctttgagttactggtttttttttttttaaatatgttgaagatttgtggcacctttgcattgagcaagcatactagcaccatttttccaacagcatgtactcatttcatgtgtctgtatcacattttggtaattctcacaatacttcaaactttttcatgatctatgatggtgatctgtgatcattgatgttactattgtaattgttttggggcaccccaaacggcacccatataagatggcaaacttaatcaacacaggttgtatgtgttctgactattccactgactagccattcccccatctcccttctccttgggcctccttattccctgagatacaacaatattgaagttaggcaaattaataaccctrcaatggcctctatgtgttaaagtgaaaggaagagttgcatgtctctcactttaaatcaaaagctggaaatgattaagcttagtgaggatggcaggtcaaaagctgaaagctaggcctcttgccaccagttaaccaagttg

SEQ ID NO: 292285 - DNA, 549 bp, Homo sapiens
gcttcttatggatgagcaaagaaagtggtttcttgagatcaaaactattcctggtgaagatgctgcgaacgttgttgaagtgacaacaatggatgtrgagtatgacataaacttagttgataaagcagtggcagggtttgagaggattgccttcagttttgaaaggagttatactgtgggtaaaatgctatcagacagcatcatatgctaccgaaaaatcttccatgaaaggaagagttcatcaatgcggcaaacttccctgttgtcttattttaagaaactgtcagagccacctcacctctcagcaagcaccaccctgatcagtcagcagccatcaacatcaaggcaagaccccccaccagcaaaaagatcacaagttgctgaaggttcagatgattgctggcgttttttagcaattaactatatttaaattaagatatgtacattgctcttgtaggcataatgccattgcacactaaacacactacagtatagtgtaagcataactttttttttttttttgagacggagtttcactcctgttgccca

SEQ ID NO: 292286 - DNA, 549 bp, Homo sapiens
gcttcttatggatgagcaaagaaagtggtttcttgagatcaaaactattcctggtgaagatgctgcgaacgttgttgaagtgacaacaatggatgtagartatgacataaacttagttgataaagcagtggcagggtttgagaggattgccttcagttttgaaaggagttatactgtgggtaaaatgctatcagacagcatcatatgctaccgaaaaatcttccatgaaaggaagagttcatcaatgcggcaaacttccctgttgtcttattttaagaaactgtcagagccacctcacctctcagcaagcaccaccctgatcagtcagcagccatcaacatcaaggcaagaccccccaccagcaaaaagatcacaagttgctgaaggttcagatgattgctggcgttttttagcaattaactatatttaaattaagatatgtacattgctcttgtaggcataatgccattgcacactaaacacactacagtatagtgtaagcataactttttttttttttttgagacggagtttcactcctgttgccca

SEQ ID NO: 292287 - DNA, 460 bp, Homo sapiens
cattgctgttgtttccagcacggggttcagggctggcttctgggagattgtttatttcttctgaggaattttgctggcaattaggccaggttgcttatgggaaaacacaagtatgttggtgatggtctgaacagtcatgcttcttatgggtgtggccactcattgtacttgcacagccatgcacacccacgcacacacacacgtggacacatacacatgcaaccataccccctgcatgcaggtactcatgtgcacacacgtgtgtacctacatgcaagctgcacacatgcacaaatgctctcatgcacaarcgcgagtgcacactcacacaaacatgcacatatgtggacacacactcaccatgcccctctttaattaagcagaggaatacaaacatcaaacaacagcttatttatagaaacaagaaacctagcagaaatacataaataaatgccaacat

SEQ ID NO: 292288 - DNA, 459 bp, Homo sapiens
ctgctcccagctcccttttaaaaattatttttatttttttgagacagggtctcactctgttgcccagcctagggtgcagtggcatgatcagggcttactgcagccttgacctcccagactcaagtgatccttccacctcagcctcctgagtagctggggctacaggcatatgccacctcgcccagctaatttttgtattttttgtagagatggggtctcactatgttgtccaggctggtcacttacctggcctcaagtgatcctcctgcttcagcctcccaaagtgctgggattacargtgtgagcccttctttaacatgcaacacactgtcaattctgggcttttccattccctgttgcatctgtggtgcctagcacagtatctgacacagagcagatgctgaagaaatgtttgttgaatgaatgtctccttgttttgaagcatttaagaaagcatca

SEQ ID NO: 292289 - DNA, 459 bp, Homo sapiens
ctgctcccagctcccttttaaaaattatttttatttttttgagacagggtctcactctgttgcccagcctagggtgcagtggcatgatcagggcttactgcagccttgacctcccagactcaagtgatccttccacctcagcctcctgagtagctggggctacaggcatatgccacctcgcccagctaatttttgtattttttgtagagatggggtctcactatgttgtccaggctggtcacttacctggcctcaagtgatcctcctgcttcagcctcccaaagtgctgggattacaggtgtgagcccttctttaacatgcaacacactgtcaattctgggcttttccattccctrttgcatctgtggtgcctagcacagtatctgacacagagcagatgctgaagaaatgtttgttgaatgaatgtctccttgttttgaagcatttaagaaagcatca

SEQ ID NO: 292290 - DNA, 575 bp, Homo sapiens
aggcggctcaaagactgggtcagcctcagggactggatggggatggagctttcagaggagtggcycattggaggcagtctggatgggcatttgggtctggcccagtttggtccaaggcgggccagggaaggcagctactctagccgggacccctagcagtcctgacctctagacccatctgcaggccatcttccctcagtgacagctctgttccttgtcataggccagccggaaaaggtggctgggcactggttggaggccagagggatggacttcctcttgtaccacaccgcgacatggggcttgaggctttctttcccacggcaggcaggggaggggggcaccaggaagtagggtgacctctgtgctattccccagcctccttgccgcctgaatgtcctgcattaggaatgttattcctttgagtaaaagtgtgcatgctgccctgggatctcctttaaaaatgctctctgagagaagaacattacgaaagggctgtcatagttgccttcgtggatgcattgatcacaccgcctgtttcccctgggccttttgcttgaattggaggccagaga

SEQ ID NO: 292291 - DNA, 575 bp, Homo sapiens
aggcggctcaaagactgggtcagcctcagggactggatggggatggagctttcagaggagtggcccattggaggcagtctggatgggcatttgggtctgkcccagtttggtccaaggcgggccagggaaggcagctactctagccgggacccctagcagtcctgacctctagacccatctgcaggccatcttccctcagtgacagctctgttccttgtcataggccagccggaaaaggtggctgggcactggttggaggccagagggatggacttcctcttgtaccacaccgcgacatggggcttgaggctttctttcccacggcaggcaggggaggggggcaccaggaagtagggtgacctctgtgctattccccagcctccttgccgcctgaatgtcctgcattaggaatgttattcctttgagtaaaagtgtgcatgctgccctgggatctcctttaaaaatgctctctgagagaagaacattacgaaagggctgtcatagttgccttcgtggatgcattgatcacaccgcctgtttcccctgggccttttgcttgaattggaggccagaga

SEQ ID NO: 292292 - DNA, 575 bp, Homo sapiens
aggcggctcaaagactgggtcagcctcagggactggatggggatggagctttcagaggagtggcccattggaggcagtctggatgggcatttgggtctggcccagtttggtccaaggcgggccagggaaggcagctactctagcygggacccctagcagtcctgacctctagacccatctgcaggccatcttccctcagtgacagctctgttccttgtcataggccagccggaaaaggtggctgggcactggttggaggccagagggatggacttcctcttgtaccacaccgcgacatggggcttgaggctttctttcccacggcaggcaggggaggggggcaccaggaagtagggtgacctctgtgctattccccagcctccttgccgcctgaatgtcctgcattaggaatgttattcctttgagtaaaagtgtgcatgctgccctgggatctcctttaaaaatgctctctgagagaagaacattacgaaagggctgtcatagttgccttcgtggatgcattgatcacaccgcctgtttcccctgggccttttgcttgaattggaggccagaga

SEQ ID NO: 292293 - DNA, 575 bp, Homo sapiens
aggcggctcaaagactgggtcagcctcagggactggatggggatggagctttcagaggagtggcccattggaggcagtctggatgggcatttgggtctggcccagtttggtccaaggcgggccagggaaggcagctactctagccgggacccctagcagtcctgacctctagacccatctgcaggccatcttccctcagtgacagctctgttccttgtcataggccagccggaaaaggtggctgggcactggttggaggccagagggatggacttcctcttgtaccacaccgcgacatggggcttgaggctttctttcccrcggcaggcaggggaggggggcaccaggaagtagggtgacctctgtgctattccccagcctccttgccgcctgaatgtcctgcattaggaatgttattcctttgagtaaaagtgtgcatgctgccctgggatctcctttaaaaatgctctctgagagaagaacattacgaaagggctgtcatagttgccttcgtggatgcattgatcacaccgcctgtttcccctgggccttttgcttgaattggaggccagaga

SEQ ID NO: 292294 - DNA, 538 bp, Homo sapiens
cccattgtgtggtcctggcacatgcactatggggccgatccaagatgggtctggagagctgcctattagagctctgggtcagtgaaccacgggagttgagttggtgactgttggagattccagaggcagtgtggtgagacaaaggcaagcttgatgaggggaggagtccacgagcatggtgtaggcaggcctaggggccaggttcagagccgggatgaggaattgcatgcctgaatgacccatggcatgtggctgtttttcccctgggcagggagccagcttggccccggtggccactctgggtggtggtggatatcccggagacagctcattccccgctttggggctgccgggagaggagggaagaagagcccgygtggttgtatgttgtcttcggagtgagatggaaagcacgggttgggaaaggtgacctgcaggcacaccagccccgggctgtgggggggatgctcagagcccacctggcttcgcctgtttgcagctcctttcttaagacatgttctgcagagagatgaggatt

SEQ ID NO: 292295 - DNA, 621 bp, Homo sapiens
tacagtgttaaattatttgtgtgatgcttgcatgatattaaattgaaagagctattgttttatcaaaaagtgctttagcatatactatgaaggctagatattaaataccagggcttctgtatataaagaaaagtcaagccagatttcttatcttaaattactttagtaagtaagcttagcagtggttcctaagaaacctaaagctctctttctcatcaaagccccaacgttggtcttgggggcmtttttcttgacattatgctccagactcaatcagaattctgggtaagctagtatcttagcattctcgggtctccaaaccttagatcaccgtgctttaaaataaaatctgtattacactttctcctaagcaagattgtcttttttgggtaaatgaaatacagaagagaagcagaaacttttctttagtataaattcttagaaacaatgcatattctaaaggccataggagtagactgcccttacttcgttccaaggttcctctgctccctggtcctccatacttttatcaacagctgtttgggagatttctgaatgttttggatactagcaaaaataatgaaatatttttatcagcgcaatagagaaagatgcataaca

SEQ ID NO: 292296 - DNA, 621 bp, Homo sapiens
tacagtgttaaattatttgtgtgatgcttgcatgatattaaattgaaagagctattgttttatcaaaaagtgctttagcatatactatgaaggctagatattaaataccagggcttctgtatataaagaaaagtcaagccagatttcttatcttaaattactttagtaagtaagcttagcagtggttcctaagaaacctaaagctctctttctcatcaaagccccaacgttggtcttgggggcctttttcttgacattatgctccagactcaatcagaattctgggtaagctagtatcttagcattctcgggtctccaaaccttagatcaccgtgctttaaaataaaatctgtattacactttctcctaagcaagattgtcttttttgggtaaatgaaatacagaagagaagcagaaacttttctttagtataaattcttagaaacaatgcatattctaaaggccataggagtagactgcccttacttcgttccaaggttcctctgctccctggtcctccatacttttatcaacagctgtttkggagatttctgaatgttttggatactagcaaaaataatgaaatatttttatcagcgcaatagagaaagatgcataaca

SEQ ID NO: 292297 - DNA, 422 bp, Homo sapiens
gaacatgtgtggatcactatattttttttcctattagctatttggtaaaagtccacaatttgccaaratggttaataggacacaaatatagacatttcatatgatgtaccatgtaaatgtaaacctttgtagttacatgtttttgtagcaagagaattgttttaaaaggcatgtaatttattagctatcggtagcttctttattgccttgccgcactgcagtaataaataaaagaaagtgaactgattttacaaatggcacacaaggtgcacattttgtgggaaaaaaagtctttttttaaagaattggcattaaatcctttttttgtgatgacaaagaggctaagagtgcaaactgtattttctgtttatcgaaaacagtctttttttctccggggcatttttccctatgatcatcaaggg

SEQ ID NO: 292298 - DNA, 570 bp, Homo sapiens
taaatgcatgtttttgaaaggttttaattagctgtatactatgaagcatttagtcggaatcactgttgaatttatatggacatatagattcctaagtagttacagttatatttatactcacccaggctaataaatggttatataagaaagtccacatgtattttagttcatgcttttttgtaattgtcagaaattcgtgtcctaaaagaaagtatgtaacttaattttaaggaggtcraaatgttctaaaaatattaccttataaaaactgcattcctgtgagtaaatatatctctaatattcttcagttgaaaagaacatcattttcattagttgaaaggcacaatggagtaatacaaagaaaataagttttttgaccatttctttgattattgcccccaccaaatcaacatctaatctaatctaaaataagattccccattatacattaaatgtttagatttctctgtctagcagatttttaaaattctaaaaccaagaatcttcttactaaagtctagttgacagtattgtcatatttctaacaactagagagaatcatgtagattt

SEQ ID NO: 292299 - DNA, 502 bp, Homo sapiens
tgtaaatgcatgtttttgaaaggttttaattagctgtatactatgaagcatttagtcggaatcactgttgaatttatatggacatatagattcctaagtagttacagttatatttatactcacccaggctaataaatggttatataagaaagtccacatgtattttagttcatgcttttttgtaattgtcagaaattcgtgtcctaaaagaaagtatgtaacttaattttaaggaggtcaaaatgttctaaaaatattaccttataaaaactgcattcctgtgagtaaatatatctctaatattcttcagttgaaaagaacatcattttcattagttgaaaggcacaatggagtaatacaaagaaaataagttttttgaccatttctttgattattgcccccaccaaatcaayatctaatctaatctaaaataagattccccattatacattaaatgtttagatttctctgtctagcagatttttaaaattctaaaaccaag

SEQ ID NO: 292300 - DNA, 534 bp, Homo sapiens
tttatttctaacatatgaagtggtttataagtacttcctagtattgcaaactctggccttttcacaatgaattactttgaaagcatattatctgcaaagaagcctcagttattttatagcatatatctattgtttagatttaccctatttttttaggttgaaattgatatttagtataaaattaatttgatttgtattcttttagtataatttgcataatgcctaatttatttgtatctgctatttaagatctttttctatcctattaagcctattatatattctttaattcaaatattatagccttttattttacatgctgtttattgcttttgagtacttctcaaagtgaattaaaaaatcatattttcagaaaacttactagataaaagtttaaaagctataatattttaagccaggggataggaatgatttcaacatgggtacaytgatttatattttttagcaattatttcaggtttgcatatttagaaatatatattagttcaatttgatttcagtgctcagttattt

SEQ ID NO: 292301 - DNA, 522 bp, Homo sapiens
ttcatgatgttggcagaatgatgccaatagaattgttcgactcaggtttgccacaaatctttaatttgtttaaaaaaaaaaaaagtgtggtatctgtgaagcacaataaaacaaggtatgcctgtctatatacttcaaaacatgttgtatacaataaataacataaaattttatctgtaaatttaaaaaataattaaaaatgctaaatgtcgactttgggttgtagcatgtaggtaattttttctatttctgatcatttgaatttttttagtgtattacttttataatggtaaaaattaacttatttttaaaatttgttactaaaaagctaaagttagtgagaagtatttacagataggcagtaccttargatgggtacttaagcttctttgtagtgaccatgttactctagactcccatttctcatatttgaatactgcaggttagaccagttatacatgagagggttcagtcagtggcaatatcatccttagacaataccaataatacttttttctttgt

SEQ ID NO: 292302 - DNA, 589 bp, Homo sapiens
tttttgtaatctttaatgaaataatgatcattggcaatgtagagacaaccagccattatatggctcctaaaaaaggtgtacaacatgccgggcgcattgactcacccctgtaatcccagcactttgggaggccgaggcaggtggatcatgaggtcagaagatagagaccatcctggcaaacacggtgaaaccccatctctactaaaactacaaaaaaattagccgggtgtggtggcgggcgcctgtagtcccagctactcgggaagctgaggcaggagaatggcgtgaacccggtaggccgagcttgaagtgagccgagatcacgccactgcactccagcctgagcaacagagcgagactccatctcaaaaaaaaaaagaagtgtacaaggtaagttatgaagtaatcttgccataaaacaaaaaggcaagcctgaagtctctgtcttactaataaaatacaggaaatacagtgccaaaggaacgtgtttaaatttacagaacaagacaggttgttcaatatatacaaatttaaaatygccctaaaagagaagacaccataagctaagttagagacaacatgaacatgc

SEQ ID NO: 292303 - DNA, 597 bp, Homo sapiens
taggggaatagaatgagaatactgggtgttagagaagaatgagatttttctagatgtaacttttttgcactatatagcccaccagttagagggtctgttttgtgaagaaactagtcagttcagaggaggaaaatgatggaagtagtattcattaaactaaatattttattctgttgacttggtcaatcaagtcagacttggagcctgataatccatttgggcatcgatttgtctttattgttaactttgtaacttggaaaaattttttcaaaatcttcacatggttctcaatactggttttacaatataatcacacgmggaagttttgtaaaaataacactgtggatttgctgtaaaatgtcccaatggaaattttttttaatgtttgggggtggggaaatagatgatgtaagatttgcaaaatattgctaatcactgacacttggtaatatatttccattatgtttgtatatgtttgagcatttacataactaaaagtttaaaaagtaaaattagaattttttctgaacagccatcaaaagatactcatacttgggccccatcctaaaccaattaggtcaaaatttcttggggttt

SEQ ID NO: 292304 - DNA, 437 bp, Homo sapiens
ctttctttgtcatggaataaaaagaccttctaggatataaactgtgagaatgacagttaaattgatatggtgaaggttaatgcgtgcttgctgcattgatgttggaggtcccaatcatttaccactatgctcctataatacatgccgtacatcttcattaggaaggcacagagcaatcagtttcaggtttytggatgagcctgtggccaggccataattaaccttttgaacttggaattgtagcagaatgttctattggcttaggttatcaattatggttagagtcgattgatattcaaagaaggcttattggtgatagatattataatttactcatctgcctgttgtgtgcttgacaaatagaaatgtcataacaaataattttgttttttgcttttggaaagagattatttgccaaacagttctataagcaacag

SEQ ID NO: 292305 - DNA, 600 bp, Homo sapiens
gtgtgtttttaaacaaatctctccttatcttcctattctccctagcctttcccagactttaatattctctattctactttttacttctatgagaccaactctttcttagcctccacatgtgagtgagaacatgcagtgtttcactttctgtttgggcttattccacttaacataatgcctgcagttgcatccatgattctgtgaatgataggatttccttctgttttatggatgaatagtgttcccttgtgtatgtgtaccacattttctttatccatttatccacgaatggacatataggctgattccatatcttggctattatgaatagtgctgcaacaaacatggcagcgggggtggtggtrcagatgtccctttgatatactgatatctttcctttggataaagtaccagtaataggactgtcaaatcataaggtagttctatttgtagtattttgaggaacctccgtattttctccatagtggctatactgtcacattcccaccaacagtatataaacagtattttgtccacattcccaccagcattttttttgctctttttgataatagccatcctaatgggatgaaatgatga

SEQ ID NO: 292306 - DNA, 597 bp, Homo sapiens
gggctgctattcaggcctggaacgcaagtgcgaggctgctctgccagacagggttgtatcttccaagagcgcctgcggagctgtttctcaggacctgttgcaggcacagggccgtcgcgcaggtcaggaacttatctgcagagcttggggtgctacagggctgcttctcaggttctgagttggctgattcgctgttctgctggcccagtagcatgttggctgttcagaggcttgagatctcccactcagggcagaacatgcagcagtttgttaggctgaagggcgggttcacaccgggtgagactgccagactgttgttctgggtagaagtgaggacagtgggaggtggttttcytactgcgcaggaccagagtcactgccactcctgggaccaggctccatgcaactaggtttgtggtgttcagccaccggtgtgggcttgctgaaatgaagatgggagctgcagtgctggataagtgcaatagttactcacccccaccacacccccacccctgccaagaagggcacactccagaggtgcctctgatctcaagatggcactgtgctacagcagcgtggggtgagtagagggtggga

SEQ ID NO: 292307 - DNA, 591 bp, Homo sapiens
ctccagtaggctaacagaaactttataggccaagagagaatgtgataatatattcaaaagtgctgaaagaaaaaaatttccagccaagaatagctgttcttcagaaatgaaggaaaaatagtctttcccagacaagcaaaacctgaggaaattcatcatcactaggccagccttacaagaaatgctcaagggagtcctatatctagaaatgaatgacaataataactatcaagaaaatgcacaaaagtagaatgctcactaatagagcagatacacaaaggagaaagacaaaaaaatcaaactttatcacaaaagaaaaccaacaaactgcaatgataaacaaaagagaggaagaagaaaacacaggatacacaaagcaactaacaaaaccacagaagtaagtacacacatatcaataataatcttgaatataagtgaattcaattccccacttaaaaatcatagactggctgaatggattaaaaaaaacataacccaacatatactgcctaaaagaaactcayttcacctgcaaggacacacacaaagtgaagggatggaaaaagatattccatactaacaaaaaacaag

SEQ ID NO: 292308 - DNA, 548 bp, Homo sapiens
acctgaaatcctgttgttttaagccacccagggtttggtaacttgttgtggaagccctaggaaacgaatttacactgaaattaagaatcttggcaggtgcagttgctcacgcctgtaatcccagcattttaggaggcagaggtgggtggttcatttgagcttaggtgagaccagcctgggcaacagggcaaaaccccatctctaccaaaaatacaaaaattagcatgtgcctgtggtcccagctacttgggagggtgaggtgggagggccacttaagcccagtaggcagaggtttcagtgagccaagatcacaccactgcactccagcccaggcaacagagggagactctgcttcaaaaaaatttaaaaaaaatattttgttttataacyatcatctagaaatatgtattggcaccaatggcctataaaacctattctcaatccatttggctttggattaggaaacccagatttgaaaatctatgttcggattattgagacattttaagaacatacagtcagaaactaaaatataaagtagggcagtt

SEQ ID NO: 292309 - DNA, 548 bp, Homo sapiens
acctgaaatcctgttgttttaagccacccagggtttggtaacttgttgtggaagccctaggaaacgaatttacactgaaattaagaatcttggcaggtgcagttgctcacgcctgtaatcccagcattttaggaggcagaggtgggtggttcatttgagcttaggtgagaccagcctgggcaacagggcaaaaccccatctctaccaaaaatacaaaaattagcatgtgcctgtggtcccagctacttgggagggtgaggtgggagggccacttaagcccagtaggcagaggtttcagtgagccaagatcacaccactgcactccagcccaggcaacagagggagactctgcttcaaaaaaatttaaaaaaaatattttgttttataaccatcatctagaaatatgtattggcaccaatggcctataaaacctattctcaatccatttggctttggattaggaaacccagatttgaaaatctatgttcrgattattgagacattttaagaacatacagtcagaaactaaaatataaagtagggcagtt

SEQ ID NO: 292310 - DNA, 524 bp, Homo sapiens
aagatgcctctctaatcttagtgtttgtccagactgctgtctctattttttgtcccccctaccctggagattcagatatgatatgtcctgtcagtacccctaagactggtaaggtaggagctagattctctagatgtagctggaaatgttggagtgttgaatgcatgctccaattttttctgtcttcacagtgaagctgagcacaggcatttatcttcagttctctgcattaagccagagagaggatctgtggcaaatgcctgccatcatgttcaggctgcatcctctgattctggcgagataactgatggaagttggcccattgtacatccamctcgttgttttccatggtctctggctactcaaaagtgcaaagacccactgactcccagagctagctagatcattaaagagacagtcctttgggtaggagctatagaagttatggcacttggtgcgtgtcgtagctccttccagaaagaatggctaggcctaggcttatcactaggggagccagagggaac

SEQ ID NO: 292311 - DNA, 598 bp, Homo sapiens
acccattcccgtgcaaaccaagaactattataagaatgtttctgaaaacaaagagattgtaaaattagtttctgtgcttagcacaattatcaactccaccaaaaaggtatgtcaagagggtctggcagccggaccttttgctttgcaacatgcacttgtgtgaaagtgaacatcacaaagttgtcctttatgtagcctgggtctcacacactgtgctttcagggagcatcttgtrtgtgctcagcaaatgtttgtctaactgaagatctttcattctagattgcaaggtgaaaaaaaattattcctactctcatattgtgttttgtttaatgcttttaatatattcttttaatacaaatgaatctaacttaaaaaatctaatatgttccaaactacaagtcagactgttgttataattcaccttcaaagaaccagtgatactaacatatttgaaatagaataaggtttgtagtcattttttcatatttgagtagtcgggcaaatgttataaaatatcagataaaaatttatttatattgccacatagaaattagatgaaactgagaataaagaagatattagtactatcaatacaaac

SEQ ID NO: 292312 - DNA, 598 bp, Homo sapiens
acccattcccgtgcaaaccaagaactattataagaatgtttctgaaaacaaagagattgtaaaattagtttctgtgcttagcacaattatcaactccaccaaaaaggtatgtcaagagggtctggcagccggaccttttgctttgcaacatgcacttgtgtgaaagtgaacatcacaaagttgtcctttatgtagcctgggtctcacacactgtgctttcagggagcatcttgtatgtgctcagcaaatgtttgtctaactgaagatctttcattctagattgcaaggtgaaaraaaattattcctactctcatattgtgttttgtttaatgcttttaatatattcttttaatacaaatgaatctaacttaaaaaatctaatatgttccaaactacaagtcagactgttgttataattcaccttcaaagaaccagtgatactaacatatttgaaatagaataaggtttgtagtcattttttcatatttgagtagtcgggcaaatgttataaaatatcagataaaaatttatttatattgccacatagaaattagatgaaactgagaataaagaagatattagtactatcaatacaaac

SEQ ID NO: 292313 - DNA, 543 bp, Homo sapiens
gggtaataaataaaacaataataatcatagtaaaatagtaacagtaacaatcttagtgaaatattcacatatttaataacactatagtaattacagaactttactataaaagatgaaagaagcttggtagaagtgggaaaaggaagagattgtggaggcatagaagcaaagataaactctacaaaaatcaggccaaactctacaaagaacattctttctttgttgttctttctgctttgattggtatttatttatttatctatttttatttgtacaaatttatrggatacatgtgcaattgtgctgtatgtatagattgcatagtggccaagtcagggattttagggtatccatcacccaaataatgtacattgtatctgttagtgaatttctcatagccctcccttctgaagttgatgagaaatctgactcttctgagtctctattatctatcattctgctctgtatgtccatgcaaacacttttttttttagcactaacttatgagtgagaaccatatgcaaagatattcttaagacaggt

SEQ ID NO: 292314 - DNA, 580 bp, Homo sapiens
atgctgagcctgaatatgtctgtgtgggttccattgctctgtacacaggttggttcattttctttcatatagttatataaattagccattattgttctgcctctttacctagatttgtattccagagagttctacctgtcttaaagattgactttatgggcctcaagctttaaraccaatttgtggatttttaaaaaattttcttctgcataattattgattctggactattttgcacactttgctgctaaaccttgaaaaaaagactaagtcagagaaaggagatgtctgttatattttgaattaaaatttaccctttgtttaataaataacaataacaaacctttgaggcttatcccagagagttctgatatgtgcttttttaaaaaaacattttgaaatgtgtgttgagttgttgtaaaaacaaactttaaaaaatgaatgaatatataatgagtaggaaaaattatgattttttccagttcaattttttgtgggttagagggcaataagctataaaatatttactactggagaacagcgacagtttgacttttcgtactgattcgagtttttaaaa

SEQ ID NO: 292315 - DNA, 580 bp, Homo sapiens
atgctgagcctgaatatgtctgtgtgggttccattgctctgtacacaggttggttcattttctttcatatagttatataaattagccattattgttctgcctctttacctagatttgtattccagagagttctacctgtcttaaagattgactttatgggcctcaagctttaaaaccaatttgtggatttttaaaaaattttcttctgcataattattgattctggactattttgcacactttgctgctaaaccttgaaaaaaagactaagtcagagaaaggagatgtctgttatattttgaattaaaatttaccctttgtttaataaataacaataacaaacctttgaggcttatcccagagagttctgatatgtgcttttttaaaaaarcattttgaaatgtgtgttgagttgttgtaaaaacaaactttaaaaaatgaatgaatatataatgagtaggaaaaattatgattttttccagttcaattttttgtgggttagagggcaataagctataaaatatttactactggagaacagcgacagtttgacttttcgtactgattcgagtttttaaaa

SEQ ID NO: 292316 - DNA, 580 bp, Homo sapiens
atgctgagcctgaatatgtctgtgtgggttccattgctctgtacacaggttggttcattttctttcatatagttatataaattagccattattgttctgcctctttacctagatttgtattccagagagttctacctgtcttaaagattgactttatgggcctcaagctttaaaaccaatttgtggatttttaaaaaattttcttctgcataattattgattctggactattttgcacactttgctgctaaaccttgaaaaaaagactaagtcagagaaaggagatgtctgttatattttgaattaaaatttaccctttgtttaataaataacaataacaaacctttgaggcttatcccagagagttctgatatgtgcttttttaaaaaaacattttgaaatgtgtrttgagttgttgtaaaaacaaactttaaaaaatgaatgaatatataatgagtaggaaaaattatgattttttccagttcaattttttgtgggttagagggcaataagctataaaatatttactactggagaacagcgacagtttgacttttcgtactgattcgagtttttaaaa

SEQ ID NO: 292317 - DNA, 587 bp, Homo sapiens
cctaaggtccttcaaagcagagcctgagataaagatttctgtgcaaatgatttattggtgagtgctcaccaaagaagaggggcgagggaatcaggaaaggaagycaatcagctatggactaacttcagcctgatcccatgggcactctacaacatcaattgagttgggccctccttcatgcaaaggagactaccctttctactcctaagtcagtaggaaatgggctataacctccccatgagaaggctcacattcagctgagaaaaatcttccagggaagggacagctgcagtccttatagccagcactctcagtagtcggggatgggaataccagctggtaatcgggacctggatggggcgttaacagtgtccatatatgcagtaactcatttcatccttactatggctcctactcctcacataaggaaactgagggtcgaagaaattatgtaatttgatcagtgttgcacatcacttttatttgtataccatatcatactatcttttccagatgaaaatgtcttttttttgcagtgaagtctgcttttatttacttattagttataatattatcaacatacatag

SEQ ID NO: 292318 - DNA, 601 bp, Homo sapiens
tggaggtattcctccaagattgtcaccagttttatctggactatgatttggtatgtctctggctttctctgtgtgcgttttcggggatgagtgaatacaacatgcaaaatgtarttgtctaaaaattatgggtaaatttctgtgaaacttcctaggaattcccagggaatgggaattttattttcatgagagaaaaacattttttttcacaattctttccccttagagtttctattagtctgttttcacactgctataaagaactgctcgagactgggtaatttagaaaggagagaggtttaattgactcacagttcagcatggcttgggaggcctcacgaaacttacaatcatggtggaaggcaaaggggaagcaaggcaccttcttcacaaggcaacaggaaggagaatgctgagcgaagagggaagagctccttttaaaaccatcggatctcatgagaactcactactgagagaacagcatggggaaaaccgctcccatgattcagttacctccacctagtctctcccttgagacgtggggattatggagattatggggattacaattcaagatgagatttgggtggggatggaaagc

SEQ ID NO: 292319 - DNA, 601 bp, Homo sapiens
tggaggtattcctccaagattgtcaccagttttatctggactatgatttggtatgtctctggctttctctgtgtgcgttttcggggatgagtgaatacaacatgcaaaatgtagttgtctaaaaattatgggtaaatttctgtgaaacttcctaggaattcccagggaatgggaattttattttcatgagagaaaaacattttttttcacaattctttccccttagagtttctattagtctgttttcacactgctataaagaactgctcgagactgggtaatttagaaaggagagaggtttaattgactcacagttcagcatggcttgggaggcctcacgaaacttacaatcatggtggaaggcaaaggggaagcaaggcaccttcttcacaaggcaacaggaaggagaatgctgagcgaagagggaagagctccttttaaaaccatcggatctcatgagaactcactacygagagaacagcatggggaaaaccgctcccatgattcagttacctccacctagtctctcccttgagacgtggggattatggagattatggggattacaattcaagatgagatttgggtggggatggaaagc

SEQ ID NO: 292320 - DNA, 523 bp, Homo sapiens
tattcgcatgcagttataattgtcctcctttccacagcgttccttggttacacaaataacacagagctcagcaattgccgggcgctgtccttggtgctgactacacagtagtggataagacagatcaagccttgcccccacggagtccatattttaattatccatataggtttaagtactgaatcttctaatgtaaatatgttgtgtaatgagacccatctccaggcaattataatrtgctggagaagggaaatatatagagtttagggtaaaatttgtacccattaactagtagcacaataaaccacaaaattaatcaagttagaagattggacccatgtaccaacgccatggatgaagaagcacagaaatccacatatttaagattttctaatgttggaaaatctgattggaatgttaagattataggccactttacaagtgggtattagaatgataaaaatctatgagttatatgatattagcatttagctgaaaagcagactttatatgtgcttcttat

SEQ ID NO: 292321 - DNA, 484 bp, Homo sapiens
gcctggctaatttttgtatttttagtagagacagggtttcaccatgttggccaggctggtctcaaactcctggtctcaggtgatctgcccgccttggcctcccaaaatgctggcattacaggcatgagccactgtgcctgtccacatgtgaactttcattacatgtatataatgcatagtggccacccctcacattttggacatacaaaccacacagtcatgaatttacatttccttgtttcattgcttccatttgctctttctgaaataatgtttttgttccccagaatcttctcaaatatatggtaattgtgcagaaagtggataccattgagatatgaatttgttgttctattctagctttaaaatatcacccaattctccatatatatgtgtatcaatacttttaatkttggaaatactgtgtacttcatactatttcaaaaaaatttctcttatttcagtttacttgttacactaaagt

SEQ ID NO: 292322 - DNA, 628 bp, Homo sapiens
tgagttttaatgaacttggttactattcataccaaaccagaataaaggatagacaggcaataatataccctagggagatagaaaagacactcatgtaaattaagtaaaaattatctggttggggtggggaaacttttcttttcaatggcatctaatctacagatagagttattgggaggagtattttttcaatatatatttattgaamctttactatgtgtgtgatgtactcttctaggcgctgtgggtagaacaacaaataagggaaagatctctgtttctatggacctatatttctagtgaagagcatacaaatattcagaaagatgcatggaatattaaaacaatttggttaacaattaagaatatggaaattaaacttttatgcaataatacgacttcaagtccatattatgtagggctagagagaaccatgaagggataagaaagagaagaagagacacaaaggtaggctgtataatcatttaggattaagtttgtctgtaaataacagaaacaccacatacaaaatggctaatataacactgatgtttatattgctcacgcataaaagaattcctaatgtaggtggttcaggttggaatgggggctttaccacatcatcagg

SEQ ID NO: 292323 - DNA, 1105 bp, Homo sapiens
aggttgagtccactttattatccaacataattccctcttctcaaggtccttaacattaatgacatctgcaaagtcccattagctgtggaaggtaagatgtttacagattgcaggttgcagagattagaacgtattttggggggaccattattttgtcatactttccrcatcactctgataaaacagctctcctgaaagtcacccagacctcttgctaaatccagtgttttttcctggatctcgtctttcttgagcaatcagctgcatgggagcagttgatcattctctcctttttgatacactttcatcacatggcttccaggacaccacactcacctggttcctcccagtggtctggatgtccctttgtacctgctcctactcgttcctcttcatgtttctgacctttaaacatagaactgccaggctcttctcttctccacctctactcattctttaggtgatcccacatggcttcaaaaaccccaaactctgcctcaaaccagggcttctctcccaaactccagacacacatacctatttgcctatgtgwaggttgagtccactttattatccaacataattccctcttctcaaggtccttaacattaatgacatctgcaaagtcccattagctgtggaaggtaagatgtttacagattgcaggttgcagagattagaacgtattttggggggaccattattttgtcatactttccgcatcactctgataaaacagctctcctgaaagtcacccagacctcttgctaaatccagtgttttttcctggatctcgtctttcttgagcaatcagctgcatgggagcagttgatcattctctcctttttgatacactttcatcacatggcttccaggacaccacactcacctggttcctcccagtggtctggwtgtccctttgtacctgctcctactcgttcctcttcatgtttctgacctttaaacatagaactgccaggctcttctcttctccacctctactcattctttaggtgatcccacatggcttcaaaaaccccaaactctgcctcaaaccagggcttctctcccaaactccagacacacatacctatttgcctatgtg

SEQ ID NO: 292324 - DNA, 552 bp, Homo sapiens
aggttgagtccactttattatccaacataattccctcttctcaaggtccttaacattaatgacatctgcaaagtcccattagctgtggaaggtaagatgtttacagattgcaggttgcagagattagaacgtattttggggggaccattattttgtcatactttccgcatcactctgataaaacagctctcctgaaagtcacccagacctcttgctaaatccagtgttttttcctggatctcgtctttcttgagcaatcagctgcatgggagcagttgatcattctctcctttttgatacactttcatcacatggcttccaggacaccacactcacctggttcctcccagtggtctggatgtccctttgtacctgctcctactcgttcctcttcatgtttctgacctttaaacatagaactgccaggctcttctcttctccacctctactcattctttaggtgatcccacatggcttcaaaaaccccaaactctgcctcaaaccagggcttctctcccraactccagacacacatacctatttgcctatgtg

SEQ ID NO: 292325 - DNA, 638 bp, Homo sapiens
atggatattaacattggctgtttataccacttatagattcattgttatatgtgttatgtattttcatgatttgtaggaacctcccaatgatttattcttcttcattctaagctcacttgagtatttgaccaaggtttactaactgtcttgtttatatgttgcagccttcttgctagtttcctcgattgtttagggtaccaggttcaggcatcatgaggtttcatagttaaaagtcatggaattaaacatatasttctgcattagttatctattgctgcataatagtcatctaacaatcataccacaaactttgtgtcttgtaacaacgtacatttattactacatggtgtctgtgggtcaggagttagctgaaatgagtcctgtggtttgtgtctaacaaggctacaatcaaagtattggctggggctgtggtttcatctgatgctcgaatggggacaatctacttctgagctcactcaggttgttagcagaattctgttagttgagggtgtaagactgagggcttcgatttcttgctggctattttctggaggccacctttagttcctacaggctgtgcatagttccttgctatatgggtttccccaacatgaccacttactttctcaaagtcagca

SEQ ID NO: 292326 - DNA, 638 bp, Homo sapiens
atggatattaacattggctgtttataccacttatagattcattgttatatgtgttatgtattttcatgatttgtaggaacctcccaatgatttattcttcttcattctaagctcacttgagtatttgaccaaggtttactaactgtcttgtttatatgttgcagccttcttgctagtttcctcgattgtttagggtaccaggttcaggcatcatgaggtttcatagttaaaagtcatggaattaaacatatagttctgcattagttatctattgctgcataayagtcatctaacaatcataccacaaactttgtgtcttgtaacaacgtacatttattactacatggtgtctgtgggtcaggagttagctgaaatgagtcctgtggtttgtgtctaacaaggctacaatcaaagtattggctggggctgtggtttcatctgatgctcgaatggggacaatctacttctgagctcactcaggttgttagcagaattctgttagttgagggtgtaagactgagggcttcgatttcttgctggctattttctggaggccacctttagttcctacaggctgtgcatagttccttgctatatgggtttccccaacatgaccacttactttctcaaagtcagca

SEQ ID NO: 292327 - DNA, 638 bp, Homo sapiens
atggatattaacattggctgtttataccacttatagattcattgttatatgtgttatgtattttcatgatttgtaggaacctcccaatgatttattcttcttcattctaagctcacttgagtatttgaccaaggtttactaactgtcttgtttatatgttgcagccttcttgctagtttcctcgattgtttagggtaccaggttcaggcatcatgaggtttcatagttaaaagtcatggaattaaacatatagttctgcattagttatctattgctgcataatagtcatctaacaatcataccacaaactttgtgtcttgtaacaaygtacatttattactacatggtgtctgtgggtcaggagttagctgaaatgagtcctgtggtttgtgtctaacaaggctacaatcaaagtattggctggggctgtggtttcatctgatgctcgaatggggacaatctacttctgagctcactcaggttgttagcagaattctgttagttgagggtgtaagactgagggcttcgatttcttgctggctattttctggaggccacctttagttcctacaggctgtgcatagttccttgctatatgggtttccccaacatgaccacttactttctcaaagtcagca

SEQ ID NO: 292328 - DNA, 564 bp, Homo sapiens
tttagttcctacaggctgtgcatagttccttgctatatgggtttccccaacatgaccacttactttctcaaagtcagcaaggaaagtggtttcagcaaaacgagtgctacagtctaatctaatgtgaccacataatcacacacacataatcacatacaacctgttgtctctgctgtattctattagttagaagaagcaaatcacaggtcctgcctactctcaaggtgatatcatataaggacatgaccaccaggagrtgggcatcatgccacaattttttagtacatatcagtaaaaattactagaaatatatgctaaataatgacacagtgcaataaacatgagactataacatgaataacacttcctaacatatataatctttgttccatcttatcacttaggctttaatttcaaacttctttgaatctttattactttttatacccacaggttcaacctaattacattcctactaaaaagttcttttcctatgagtgttcagacacacacagactcttctggctctggccattgagcctttctggttagtctgaccctaac

SEQ ID NO: 292329 - DNA, 564 bp, Homo sapiens
tttagttcctacaggctgtgcatagttccttgctatatgggtttccccaacatgaccacttactttctcaaagtcagcaaggaaagtggtttcagcaaaacgagtgctacagtctaatctaatgtgaccacataatcacacacacataatcacatacaacctgttgtctctgctgtattctattagttagaagaagcaaatcacaggtcctgcctactctcaaggtgatatcatataaggacatgaccaccaggaggtgggcatcatgccacaattttttagtacatatcagtaaaaattactagaaatatatgctaaataatgacacagtgcaataaacatgagactataacrtgaataacacttcctaacatatataatctttgttccatcttatcacttaggctttaatttcaaacttctttgaatctttattactttttatacccacaggttcaacctaattacattcctactaaaaagttcttttcctatgagtgttcagacacacacagactcttctggctctggccattgagcctttctggttagtctgaccctaac

SEQ ID NO: 292330 - DNA, 564 bp, Homo sapiens
tttagttcctacaggctgtgcatagttccttgctatatgggtttccccaacatgaccacttactttctcaaagtcagcaaggaaagtggtttcagcaaaacgagtgctacagtctaatctaatgtgaccacataatcacacacacataatcacatacaacctgttgtctctgctgtattctattagttagaagaagcaaatcacaggtcctgcctactctcaaggtgatatcatataaggacatgaccaccaggaggtgggcatcatgccacaattttttagtacatatcagtaaaaattactagaaatatatgctaaataatgacacagtgcaataaacatgagactataacatgaataacacttcctaacatatataatctttgttccatcttatcacttaggctttaatttcaarcttctttgaatctttattactttttatacccacaggttcaacctaattacattcctactaaaaagttcttttcctatgagtgttcagacacacacagactcttctggctctggccattgagcctttctggttagtctgaccctaac

SEQ ID NO: 292331 - DNA, 559 bp, Homo sapiens
ttcctgggtttaccctttgggcaacagtgtccttctgaaaaatgtttaaagtagtaccattgacgctcgcatttaataacgctaatataaattgtcgaaagagaaatgaaaatgcttcatttaaaaaagtgctcatattagaaattgtttttgttctactggaaataaatcgaattttattcctgatttgttccactaacccactgtaaacacagacccagtgacaaaatgtgacttaaaagaacaagagcgcagaggtttttttkttttttttttcccctttccacattaaaaaaaggcaacatatgctttttctttcaaagtgactctggtgattagatcaccattttacttgaattgctagttgaatgaacttgattaggattttcaaagcattttattttaaatagactatcccacggttgttgcatagcaaagaaaatttagaaccacaagacaggtcatggtgttggtgagtaagagaaggtagtagttgagaaattaagaggaatgctattattaaatcaaatacctaaatttacaatgacattcttgttga

SEQ ID NO: 292332 - DNA, 572 bp, Homo sapiens
ttgttctttgtcatgaaataaaacatcttttggataagagaaggagaatttattttatctttacatacctccactttcttctgtatttatacaacatctttaacatgatttaaaatcatgcattagtggattcctacagttatakaaatgaaatgagcttttgagttttgaagcttctggagtttgagaacttcaaagccctttctgtttgctttgcagtgccagactctggttactcatgcatacattttgaaagacaattgattcccaagccacattgcactaccatggacgtgagaacaccagtcaagagcctggagtcctctcctcagatcctcttcctaccccttccagtgtcccttctttcagttatttatttatttattttattatactttaagttgttctaggatacatgtgcacagtgtgcaggtttgatacataggtatacatgtgccatgttggtttgctgcacccatcaactcatcatttacattaggtatttctcctaatgctatccctcccccagccccccacccccagacaggccccagtgtgtgatgttcctcgcc

SEQ ID NO: 292333 - DNA, 552 bp, Homo sapiens
atggaacctgacagccctgcttgctttctcaacagggaggcttgtagcctgaggcaagttctcagcctgctcaccggctgcctggaaataaacttgctgctgttgggggcccacggtaggagtgagactagctttygagctgcatgggagctgggtgaggcctgtcactgctggcttttccccacttccttggccacctgtatgacacaggagaagcagccataatcctcctgggaatgtaactccgttggcctgggaaccacacccccatcctccacagcagccacagcaagcccctgcccaaggagagtctgagctcagacacgcctaacactgccccccacctgatggtctttttctacccaccttggtagctgaagacaaaagacataatctcttgggagctctatggccctgcccaccacctgagaaatcctaatacatatccaggtgaccctagagtaagcttgtatcctccctatactaccacaactgatgctgtcttgaaagcatcacctcccagctggaggccaaccaacacaaaaccagcac

SEQ ID NO: 292334 - DNA, 552 bp, Homo sapiens
atggaacctgacagccctgcttgctttctcaacagggaggcttgtagcctgaggcaagttctcagcctgctcaccggctgcctggaaataaacttgctgctgttgggggcccacggtaggagtgagactagctttcgagctgcatgggagctgggtgaggcctgtcactgctggcttttccccacttccttggccacctgtatgacacaggagaagcagccataatccycctgggaatgtaactccgttggcctgggaaccacacccccatcctccacagcagccacagcaagcccctgcccaaggagagtctgagctcagacacgcctaacactgccccccacctgatggtctttttctacccaccttggtagctgaagacaaaagacataatctcttgggagctctatggccctgcccaccacctgagaaatcctaatacatatccaggtgaccctagagtaagcttgtatcctccctatactaccacaactgatgctgtcttgaaagcatcacctcccagctggaggccaaccaacacaaaaccagcac

SEQ ID NO: 292335 - DNA, 559 bp, Homo sapiens
aaaagccatctacgacaaacccacagccaacattatactgaacagggaaaagttgaaagcattcccccctgagaactagaacaagacaaggatgcccactttcaccacttctattcaacatagtactggaaatcctagccagagcagtcagacaagagaaagaaagaaagggcatccaaatcagtaaaaaggaagtcaaactgtcactgttctctgatgatatgatagtatattcagaaaactctaaagactcagtcccaaaagctcctagcactgataaatgagttcagcagaacttcaaaacacaaatcagtagtactgctatacaccaacagtgaccaagcygagaatcaaatcaagaactcaaccccttttacaatagctgcaacaacaacaaaaaatgaaataaaatacttaggagtaaacctaaccaaggaggtgaaggacctttacaaggaaaactacagaacactactgaaagaaatcatagacaacacaaacaaatggaaacccatcccatgctgatggatgggtagaatcagtattgtgaaaatgaccg

SEQ ID NO: 292336 - DNA, 570 bp, Homo sapiens
cagggtatatcagggaagcttaataaatatgttttgattgcctttggtgagatgaatgagtacactaaagtattttcttaaaatatgtaacatttcctcttaaatcacacctaaaatatggacttacttttcttaccatgtagaaaaaatattttaccaccaggtttgacctttagggtctttactgtcttttgtttctattaaaacaggaactggccgggcgtggcagctcatacctgtaatcccagcactttgggaggccgaggtgggtggatcacatgaggtcaggagttcaagaccagcctgaccaacatggtgaaacctcgtctctaccaaaaatacaaaaattagctggacgtggtggcaggcgcctgtaatcctagctgcttgggaggctgaggcaggagaatcacttgaacctgggaggcagaggttgcatcaagccgagatcgcgccattgcactctagcctgggtgacagagcaagaccccatctcaaaacaaaaccaaaaataaaacaaaacargaagcatcccacattttgaatgatataatatttgaaagttaaaac

SEQ ID NO: 292337 - DNA, 594 bp, Homo sapiens
actttcaggagtagaagatggggtgagggtgttatcattttctgagagacacaggagtgcagtgagaactgaatacattmatcccagctggaagcacctgggtaccagtccacactggcactaaaataccactgatataactcaggaaatcggtgctagttaactggtctccatctacaactcctcgtataacccttgtatggggtctcctgctagagcacactagataactgttaagcgcatattttttaaaaagtgcttatggaatatcagtttgaagttatgcaaaattcttagttgcccttgggcatcctatgtcttggtctggtcctgtggacagcaagggcttgattcccaaccctgccactttcttagttgtgtgcttttgggaaagcagttaatggtccatagtcttgatttcctggtgtggagataataacgtcttcttcatagggattttgtgacaattaaaccaaaacatagtgagcaaatgatgactaacagaaccaagctggcaatgcaaccagggcaaacaatgcaaaatatacacttcaggagggtctgggaaaagatgtccttgcttaggcacaaaag

SEQ ID NO: 292338 - DNA, 594 bp, Homo sapiens
actttcaggagtagaagatggggtgagggtgttatcattttctgagagacacaggagtgcagtgagaactgaatacattaatcccagctggaagcacctgggtaccagtccacactggcactaaaataccactgatataactcaggaaatcggtgctagttaactggtctccatctacaactcctcgtataacccttgtatggggtctcctgctagagcayactagataactgttaagcgcatattttttaaaaagtgcttatggaatatcagtttgaagttatgcaaaattcttagttgcccttgggcatcctatgtcttggtctggtcctgtggacagcaagggcttgattcccaaccctgccactttcttagttgtgtgcttttgggaaagcagttaatggtccatagtcttgatttcctggtgtggagataataacgtcttcttcatagggattttgtgacaattaaaccaaaacatagtgagcaaatgatgactaacagaaccaagctggcaatgcaaccagggcaaacaatgcaaaatatacacttcaggagggtctgggaaaagatgtccttgcttaggcacaaaag

SEQ ID NO: 292339 - DNA, 539 bp, Homo sapiens
ctgggctctgctgggtggttcttctgcaggtgccattggctggcttgctgtcatctgtaggggaaacttaggttggaacatccaagacagcttactcaaatggctgaaagttggtgctggggtcagctagaaggtcagatggtaccgctgaccagaaggttttgttctcctccatgtggtctccctacatggctgagttctgaggcaacattctaagtgcaaaggcagaaggtgaagatctcttaagaactagcttaggaagtcccatctcatttaccctcagattttttttttggtgaaaactggccatagggctagccaaattcaaggggaggggaaatacagtctrtttcttgacaggttagtggcacagtcacactgcaaaagagctgtgagaagctgcaaccatcctgtaaacacaatccctaaagatatcctaattaacccaaccaatcctgtgtagcattgttgctattggtcactctccatgatttattgctactacggtttcttggtctcctttctatctctttgcacat

SEQ ID NO: 292340 - DNA, 546 bp, Homo sapiens
acggctccaccatttacattcccaccagtagtgctcaagggttccagtttctccacatcctcgccagcacttgctrttttctgttttttggtggtagccatcctaatgcctaatgggtgtgtggattttatctttttattttcatatgaattccaaacagtgctattgactatttaaaagaagtgtttctgttggtagcaggccatttgttagacttgtagacttacagtgagcctcagggatgggactcttagtcccagcttagtgccaggttgcttactggaaggtgtgttcatagtcagatatgttctcatggcagttttggtgattattgcaatttaatattaattatctctagagtgttagactaagttttgaaaggtttgttcttgcttatctgcagttgactgaagcactcatctctatttaaatctcccttcaacagctcaacactttagggaatttgcaaatatagatggacaatgcttttcaaatgtgcataagtagcaaatatttctatgattcatgaaattacttttttgaaca

SEQ ID NO: 292341 - DNA, 412 bp, Homo sapiens
acagtgggtcaatgtttcttccactgaaataaaatttgattaaccatatrtgactaataaaattaatattaaatatattattttcatgtaaagcattaaatagtatttttaaatctttaatagaaagctcttaaactttattttaatgcagatggaatggttagtctattagaattttgctgaatttgatgattttttctgaaaactttggtgatatctttcagctatccatgatggatgctattcctacacttataaatgcaattaaaatgatctatagtatctctcattactataatacctctgagaagatcacatctctgtttgtaaaggtaagtgcatgatgtagagtccatgttcatttgtatttctttgccagtgatcaattttttgataattaaaaattaccaca

SEQ ID NO: 292342 - DNA, 613 bp, Homo sapiens
tggctatctcctgtttcatatttcatatgccactgttccaaatttatttgatgccacagttgtttacttggtgttattagaacagtaatcatggtaataaaagccacttgcaatgttctagtaatctataaagcaattataatgattctgccaaaaaacataacgatgcttaaaccttatgtcctaactcgtaagtgtttatggtaagcactgttgctattctcattttgaacagtctctaagaagtaaatgactttttcattatcaaagcaaaaatcttaagtgttatattaaaatagaagaatttttgaygaatcaagactcgtgttctgaatactaacgcagtaggaagcacaattcttcctgggaataaagacatccagccttaagagctcaataggaaacgttttccttctgtcatgtaggtagttcaggtagacaggagggatggctgcaagattccctcccaacttccttatacgttaaaattatatgttagggttgcgagagtattccctgggtaaatgacacccacaagtaaatgtgtgttattaattaagattttatgcatattatttgcaaaacttgatttagcataaaataatgaaaccac

SEQ ID NO: 292343 - DNA, 613 bp, Homo sapiens
tggctatctcctgtttcatatttcatatgccactgttccaaatttatttgatgccacagttgtttacttggtgttattagaacagtaatcatggtaataaaagccacttgcaatgttctagtaatctataaagcaattataatgattctgccaaaaaacataacgatgcttaaaccttatgtcctaactcgtaagtgtttatggtaagcactgttgctattctcattttgaacagtctctaagaagtaaatgactttttcattatcaaagcaaaaatcttaagtgttatattaaaatagaagaatttttgatgaatcaagactcgtgttctgaatactaacgcagtaggaagcacaattcttcctgggaataaagacatccagccttaagagctcaataggaaacgttttccttctgtcatgtaggtagttcaggtagacaggagggrtggctgcaagattccctcccaacttccttatacgttaaaattatatgttagggttgcgagagtattccctgggtaaatgacacccacaagtaaatgtgtgttattaattaagattttatgcatattatttgcaaaacttgatttagcataaaataatgaaaccac

SEQ ID NO: 292344 - DNA, 978 bp, Homo sapiens
ttcccacagattgaagaaattcatgtaggtcttgaggcttcattattggtgaaggctccaggcacaggggaattgtttgtaaactttgaccctcagatattaatcttatttagagaaacagagtgcatggcccagatgggtctggaagtctctccactggcaacttccctcttccagaaacgagayagatacaaaaggaacttcagtaacatgaaggtatactacttttattttttccccccattcttggctagctctggaatgtattataaaaaaatatggtgatgtgtcatattcaaggagcagaaagtggccaggatgaatggagtgactgaggggacagtgccatggggtgcagctgcagagttggctggggccaggccgttacaggtcttgcaggccaagatgagaagcttgggttttattttgagtgtaccaggaaaccattggaggatttcgagccactgaaaaaggcacgatctctttttataataaaagttattcttactgctgggtggaaaatggatgttaagagggacgaggggtatcagcgggaagcctgtttgtgaagtgttgcactggcccaggatgaagatgagagcttgaactgggatggcagcagagttgtttggagwtcatcttttttagcagttctcatctgagcatggctttgataaaagcagaggttctcaaatagwagaatgaatagaaaaccaaagattctcaaatatttgaacaaaatcaaaaccataaaacagaggcaaaaagatctgaaaatggaaagattaatatctcaaagttatgttaattatagtaagtataactgacagagtcagagggacttaagagtcagagggactttaaatcttaaaaaagagaaaaaaaatagtatctcattggtaagcacatagtctcaaagtaggcgtcacaacaagtaaaggagacattaaattttgatctctttggcctttcctgttc

SEQ ID NO: 292345 - DNA, 653 bp, Homo sapiens
attctcttctgacaaaatacaaaatgtaaacatacacaacaaaaaaaccaaacatgttcacatgttcttaatttcaatgggtttttcaagggagggttgagctgctattgcttttgttaaaagcatttactgaaaaaaaataaaattaaaaaaaatttgagattcgaaggaaagattcttctagatgtatctacttttaaaaatgggttcctaatatattagggacaaaaaaattgtcttgctgacaattacatgtctttgcctttccttccaaggaaataaccacattgttaacctagaataccatgtaacacatcatgtttcttttcacatggatggaaaaatatattcaaatgtgactgcatattatcatttagccttcgctattktttttaacatgtcctcagaaaaaagattctgactatgaatccttaaaaaaatgttccatcctttcaggctctccagtttgaccataattttggctataaaaagactaaaaatgcccatctgtaataacattattaatgtcatagaatttctacattactttccctgctattcatgaatctagtcaattgtttatagtttcatcactaccttccctgatcacctctgtttgttttgatatttgttcaatccctgctgcatatatt

SEQ ID NO: 292346 - DNA, 563 bp, Homo sapiens
gaataataagttcttggtatctatagtaaatcctatattaactaacactttgaaatagactgctaagtagtatacaaagattatgattctttactacaatgtcaagaagcaagcaaatggtttatggaaaggaaagatgatctttccaggggtataaaagggagatcaatgaagatatttaaactgttagtaaatataatatttattaatcatatttagtaataatatttattttgagacagggtcacccaggctggagtatagtggctcaatcacagctcactgaagttttaatctcctgggcttaagcaatattcccaccttggtctcccaggtagctgggactacaggcatggaccaccacacgtggttaatttttttttctttttttgtaaagatggggtctcactatgttgccaggtttgtsttaaactcctgggcttaagcaatcctcccgcctcagcctcccaaagtgctgggattacagatgtgagccatcatgcccagttgctctatttaataataagggttgtgtggcaggcagcttatggtatggcctgcag

SEQ ID NO: 292347 - DNA, 582 bp, Homo sapiens
aataatttcatcttttgtactttaaaaaatttttacaatatataactacatttattaaaatgtagcatttagaatayaacaccaggctattcctttttaaacatttaggtcttttctttcagttgctatgaatgacaattttaataaagcaagaatatataacaattataaatatctacacatttagtaacagaccataaaaatataagaaacaaaaataaacagcattaaaaaaaatagacagttctacaataatagttgcagactccaatactctattatcaacaatggatagaacacacaaataagtaaggaaatagagaacttgacacaataaaccaaccaaatgtaacagacatatatacaacactctacccataacttcggcatgtacattcttctcaaatgcacacaggacattttccaggatatacgtatgataaactacaaatttagtctaaatcaattttaaaagatagatataatacaaagtacctttcccaaccacaacagaatgtaactaaaatcttaaaaccagaaattctgaaaaattcacaaatttgtggaaattaaacaaccatg

SEQ ID NO: 292348 - DNA, 582 bp, Homo sapiens
aataatttcatcttttgtactttaaaaaatttttacaatatataactacatttattaaaatgtagcatttagaatataacaccaggctattcctttttaaacatttaggtcttttctttcagttgctatgaatgacaattttaataaagcaagaatatataacaattataaatatctacacatttagtaacagaccataaaaatataagaaacaaaaataaacagcattaaaaaaaatagacagttctacaataatagttgcagactccaatactctattatcaacaatggatagaacacacaaataagtaaggaaatagagaacttgacacaataaaccaaccaaatgtaacagacatatatacaacactctacccataacttcggcatgtacattcttctcaaatgcacacaggacattttccaggatatacstatgataaactacaaatttagtctaaatcaattttaaaagatagatataatacaaagtacctttcccaaccacaacagaatgtaactaaaatcttaaaaccagaaattctgaaaaattcacaaatttgtggaaattaaacaaccatg

SEQ ID NO: 292349 - DNA, 1059 bp, Homo sapiens
tttacctgttttacatattgcaatcttcctatttctctcttattatttctaacactttagcttctgttttccattgttaacaatcgtatcgtttgcagataaaaaggcactggtttcttccttcccaacctattattttctttccttatcttattctgttggcagggcattgcaagaaaatgttgcagagaatcaagaataagggcattaatgataataagcatctctgtcttgctcccgatattaacagcaaaactgctaaaatttcaccagtgggagtaagttagctctaggttttgggtagatacactttatcacaaaaggaagtttccttgttttcctagttaagaattaaatgggtgctaaatttatatggttgattacattttatcctttaatcagttattatgattataactatagattttctaataatattgtcacctttatatttttgtgataaactcagtcagccatttaatattatccttgaaatacattgccaaatcagttcgttaatttatagaagacttttttgatgttgtttcatttttattcaggtcagactggcctgycaatgttcttattttttccwctcatgtacagggcttaaaattaggcttgggacaaagtcaacattatataaacatttgccatgatgattattgatgatgatgatgatgattgggatagcatatgataaaaaacaagcttttctttgaatttatgtggttaaatatgagttttataagcagtatataggtgaattttttgttgttgttcacttttaaccctcatcttccaacaggtacatttgatccattatgtttattttgaatgttgatgtatttttgcttgtttttataatctttctgctttctatttgtcccattttttwaaaaaaaaaacatttccccccaccccaaacccctgcttttgtggactgactgtgctcttaatcattttattttactgatttgtaacccatatattctacttctattttttagtaattaattggaatttcacttgtatacttaccttaaaatattcctcaat

SEQ ID NO: 292350 - DNA, 567 bp, Homo sapiens
aaagctgtaagctgtttcctgacagataggaagcccattttagggaatggaaaataaaatctaatggattggtctctatccacattcctaccttgaacgaaatagcacagtttgagtgtgctgtataggttggacatctttgttgtaatatttcgttaacagaaaaagtcctcatgccaaaagaaagcaaataagcagatatctagcaaaagagcaaaaataacaaatctagttgaaaaactacttcactacacaaagtgatagagccagccatcagatgacaatgacttttttttcccattgctactaacaagctctgatgtgtcatttacctttctgagtgtcarttttttcgtctttcaaatatgaacaataaataaagaaagtctctttcttgattcctgtaaggatgaatttgcagatcaaattaggagactgctttgaaaaattaagaggtggtaagcagtagtaaaggctttttaatggagatctcaggaagcttcttattggcttagtcacagaatctagcatttcccgtagatggtacagaaaataaagattatttta

SEQ ID NO: 292351 - DNA, 560 bp, Homo sapiens
atacaggtttgttattagctaagatttatcttggcatcttgtataaactggttttttttcaaagggtcccataaagtacccgctgctgggtatggcagcaaagtcatataatttggtcagggccaataagccgataaaacaacaaatctgatcacataactgaattatatctttgaactttcagactaccagtctcatgttgatcaatgatactgttgtgcataagttgggaaaagtatgaagcttgtagcctaraaacatttgagtttccagagtgtttttctttcctatggctgcagtaacaaattatcacaaacttagtagcttaaaacaacacaaattcattatcctataggtatggatgtcagaagtcccaaaagggtcctactgggccaaaacgaaagtgtcagtaaggctgcattcctttctggaggttctaaggaggaatgtcttttcttgttattttcagcttctaggggccacccatgttggcttggaactcctttccttcatcttcaaagccagcgatggccagttgagtctttttcacatcacatcac

SEQ ID NO: 292352 - DNA, 598 bp, Homo sapiens
cagcagctgggagatggatgcactggcccaggaaaggagatctgggtaggataccaacagcatctgctacaggctacatccagacactatccatatgcttgagaaccatccataagctggagggacaaaactggaggcagtgttactcggtggtaagtgtttaaaacaacaaaaatagtgtgcatgtgtatctgtacactagcttgttataaatttcactaacatgaaggatgtgcagtgcacagttttcattgtaagactcaatgcagcatgctttattgtaaattccacatagccaactaatgcccacagaatgctttcattgagtttctatccacagccaactaatggctgcaattgacaaactagtgtagttctgacatgaatggtggctgctcaaagtgttttacgtatattaaatcacttacccatgacagtctaatgactatcatgaggtaaatactgttatcaatctcattttatcaacaaggaaaccaaaacacaaaamgattatgtaacttgcccaaggttacacacctaataaatatatttaggtctaatgtgattgaaatagagatcatggactaaaaaggcaatg

SEQ ID NO: 292353 - DNA, 478 bp, Homo sapiens
cttgagtcaacgaagaaggaaagacagaagaagatataagaggaagtgaagataacagagaaaaaagttcagaagggaacgggaagagtagaggtaaccaattaaccttgggaataaggaaggagagagataggtaacaatatacagaaacacttgaaggagagtaaaagtgcaagaattcccatctctagtttctaagtgaaggagttcatgaggtcatatctgagagtaagaaaggagaagtgtggttgtggttaagagcaaaaaaaaaaaaaaaaaaaactttaacagctgtaggagaaaagaaggaaatcaatccctagttgtctgaggaatacacagaattcctaaggcacgacagaggagccaggagagcttgtaagtmattaatcagtatcaaagccagccaacagggctatagcagtttctgtcacacagcaattggcagcctgccaggagaaaaaccgagttagagtgg

SEQ ID NO: 292354 - DNA, 1207 bp, Homo sapiens
tgcaaaaatgcatttctgttttcattccttgcaagtgacagtttaacaaaaaattttcctccaaatttggctagccagcagcctttatggaattttagagtatggactgtcaaaataatttctctttgcttttgacaagcaacagtgatggcctctgtattagtctgttttcacgctgttgataaagacatacctgaacctgggcaatttagaaaagaaagaggtttaatggacttacagttccacatggctggggatgcctcaygatcatggcagaaggtgaagcaggagcaaagacatgtcttacatggcggcaggcaagagagaatgagagcttgtgcagggaaattcctcctaataaaaccatcagatctcatgagacttaccactatcatgaggacagcatgggaaagactcgcccccttgactcaacttcctcccaccgggtccctcccacaacacgtgggaattcaagatgagatctgggtggggtcacagccaaaccgtatcagcctctttcctcaaaacctatgcactaatgcaattgcctcatgagtttacatgtttcttccgcatctggaagagggtcattcttttcactgacagcawatctgttctcttttctcatctgaggaccacttattgaagttcagggtggatgagttttctaaagtaacttattgaatggttcaaacccaggtttgtctaacctcaaagcttacctttcttttccctccacagttagaaaaacaagaagaaaagttgagattgtctaattaataggcaaatagaaatttttttgaacctttaagtggttgttagaccacgttctcctgtagtcagccttttcctggcagtacaataatttttgtaagttaatatagaagtactgattcagtaaaaggggttggccatttgaatattttgaggactttaaatatagatttgacagtgtaggtatcatgcccaaagaagtggcttaaaaagataaattcaaggaaagaacccctaaacaatgatttctaaggttttagtagaaggacwgtgctgaaaagttgtgttcatttaattatattaaaaacgaatgggacgtagggaatggaagatgaattcatactctggataattgaataaatataattttccttatgattctaattaattttgcttccaagtgcctaatggacaatgcatggcaaagtagatg

SEQ ID NO: 292355 - DNA, 452 bp, Homo sapiens
tgtttactcctttggggaatctcagagttaccattctgggttacagtatttgcagtaagaagtcacaggagttagtcctggtaatgcaggtgacagcaggcggagacaccaagagtacagacaaggcctgaatgcaaggcatctgtagaagctgatggcagactgcagcccctggggcttcctggtgtgtggggccccattatgcaaatgcttagaggaagttgtgtgcctggaacatagcagatattcaattaaaatatacattatatgtcaattacaaaatatataaaacaaaatacaaatctgaagctcactgtatttccttttataactcattgaatcctcttagtacccaatgaaataggtactactatgatcctcattttacaaatgacaaattaagatgcacagaggttaagcaacttgcycaagctcctacaaatagtaagttg

SEQ ID NO: 292356 - DNA, 527 bp, Homo sapiens
tgaggatgttttgtatattcatatgaatgcattttaattagtatgtagattgtcagttaatagttatcaataattgatatcggactgagaagcaattatttgcaaagactaggaaggtgtctagggcatgcattagcagccctcagatgcttgcgcattatgggatgtttcttgctttcacttttatctggaatgccgttttcttctgtgctcctttgaacttggatacctctcaatcttttgagactcaaaattcaggagatgcttccaagtctttcctgacatgcctataagaatgactttgatgcctctactctgtttccctaaagcccattgtgcatacccctgattgtgctgaacacatttacattgcacttgtctggcacaggtatgtttaattacygctttctcctgaactggaagatcactgatggtagggtttggtcttctttatgtttgtatacttaacacttacctagaagtgcttgccacattaaggatgctctgggccaggtacagtggctcat

SEQ ID NO: 292357 - DNA, 487 bp, Homo sapiens
aaacaaactaggtttgctatacaccaatcaagggcttaggggagaaatcagaacttagagtgggtggaagcaatgaatatggagtaccatttcctagtctcctcatgaaaaatgggccaccagtgtttgatgccaagaagctrattgttacttaaactctatcttcctggagaacttacaaaagtagtatgttttaattgcagacaatttggaggatgctaacaagcttaaaatttttttaaattaaggatcacacccaaatataaccatcatgtttatgttgtcggctggaagtaccagtcccttttaaaggtttttcacagaaaactgtgcaatacagatggagactaacttagcagatctaaggagaatggagattgggcaggaaggtttcagggtccatgaactgtatgatagtgactctcctacaatccatagactctttagagcaggtcctgatagtgacccaatggtggggccatctcac

SEQ ID NO: 292358 - DNA, 566 bp, Homo sapiens
cgacagcattgtgtttcgcattgtacaacagtgaaaggggcttactcttaacaatgcaagagctgctgtaggagacacacacaatgaactttggtacagtatagtctagaggccaaaatgagtaattttaagtaaattgactataggatccaaagcttcattaagttttaaaacaaaaaacaaatgaaaactctttacagtttttaggaactgactcagaaaacatgaccattccttcyccattggaagtagcatactgttgaaagttttatcgtgttgactcaaaatctgacactattcctgttacccataggatgatttattcagtcatttcaaatacatgttgatttctaagagtctgtgatttatgtcaaagattttgccttgtaataactatcaatctagccattaagttccaaagaaccttatttccacagcctgtggttttgtggggaggcttttgttttattcagttttggtttgggttcttatagaacagctggaactatagagcctggacttagagaaagagcttggggagacggagggggagatgtcatgttgga

SEQ ID NO: 292359 - DNA, 566 bp, Homo sapiens
cgacagcattgtgtttcgcattgtacaacagtgaaaggggcttactcttaacaatgcaagagctgctgtaggagacacacacaatgaactttggtacagtatagtctagaggccaaaatgagtaattttaagtaaattgactataggatccaaagcttcattaagttttaaaacaaaaaacaaatgaaaactctttacagtttttaggaactgactcagaaaacatgaccattccttccccattggaagtagcatactgttgaaagttttatcktgttgactcaaaatctgacactattcctgttacccataggatgatttattcagtcatttcaaatacatgttgatttctaagagtctgtgatttatgtcaaagattttgccttgtaataactatcaatctagccattaagttccaaagaaccttatttccacagcctgtggttttgtggggaggcttttgttttattcagttttggtttgggttcttatagaacagctggaactatagagcctggacttagagaaagagcttggggagacggagggggagatgtcatgttgga

SEQ ID NO: 292360 - DNA, 541 bp, Homo sapiens
gagatttgagagacaactcagtcatagattggatgagctgtccagggtaatgggtagaaagcgggaagaaaggtgctaagcaccaattatattttgttaattcattccacattcattgaatgtctgttatgtgactgccactgatttaaggactgaggatatatcagttaacaaaatatacaaacaaccctgctctttggagcttacattacagcatctgcttttgataaggaatataggtcagacagttctatataatatcctttaagtcaaatatgggcaagaaatcaaaagaaccagtcaaataaggtaaacgtaagtctaaagtctgagaaaggccattggatgtggtgacaaygtggtaattaataactaatggtagaaacagtttcagtagagtattgaggtggaaaccaacctgagaattgaggggatgaagagcaagcaaaggaattgaggggtagaccatcgttttcactccttaactctttggaatatagacagttctttcaagaaggtggacagaaaaagagaaaatagt

SEQ ID NO: 292361 - DNA, 479 bp, Homo sapiens
tttcttactttcatgacacttrcgttttctgttttttctctcaacagactgactggtttctcctcttgtgtcttcttgtaaagattagaaaactttaaaactctgtctagacccgccccccaccccaactctttgtcattagcatgaccttagtgttataattctagaggaagacaaaacacaggaggagtcacataaaagtataagatttgccaaatttaataggatgtgatttaaaaggatgcatgttccttccattcaagaaaaatgcggctagaatatagaattccatcaacctctgtccaatgataaaaggttaggaaataattcaataaaacaattgtaaaaaatcttgccgtcatgggacttatgttctagtgaggggagactggcaataaacaaataaatagtaaattactgagtaagtaagaagacagtaagttctgtgggaaaacatgtaaggtagttagaacatgttg

SEQ ID NO: 292362 - DNA, 619 bp, Homo sapiens
ccttaattttttaatataataagcaccttcacactcatcctatgtttcatggtactaagagaccttcggacgccgcatgctagttccactttcctacaagtttgtttactagtgaaattaaacagtcaatcccatttatctctgaaatcagcagtgtcccctagcaagagataagagacaatgtgtgttgtataatttactgggaactaattcatggtgaccaataaattgtgcagtcctcctaaagcaccccctttgccgtggtgagatccgcagtgccgactctcgtcctggcactaagatagataagtcctaagagtgaaatcagtagacatgtgtcttttttttttccctttaattctgaataaaattccagaatttagggagtgaaaaacacttccccaacccccgccaaaaaaatctgacattttctttctgccgaaagtctaatttctctttccccaaattgcttcaccatatggaaggaaagaatctccaccttttatcttcaatctgtatcacagtttgggcatatacgagaattttgtgttcacttttaattttcttgctagttaagaacaactaacaactttcttgtatkttaggactcaaaatacgt

SEQ ID NO: 292363 - DNA, 565 bp, Homo sapiens
ccattaatgactcttctaagtaatacagcagttagtgagtgacagaatgaagactcagatgaggtcctctgactctacaatcaaaggtgtttgactccatccctctagcaccctccatggtggaaacgacatttaggtcaatttataacatccgaaaaagacagactagctgtacaactattaatagataggaaattgacttatctttgggcaatggcaagggaaaaggcttttatgaatgccattttttttttttttggaaaagtaactaaccctattatcctaggcattggattttaaaaatgccatctgaaatatacagttcaggtatctcttctgaagtaaaatattggtatgtatcagttggaaaagactcttttccaccccccaattgttagtgtagctaagatgatacacttaagacttacaygagtaaagaatcacctcaaagaaatgctcagtaagtctttggtttctctggattggcataagggagtctgtgtccctgtagaagaggctgccaggggttccccaatatatattctcctctcttttgtagtgagag

SEQ ID NO: 292364 - DNA, 618 bp, Homo sapiens
gcagacttaaactctactttcattcatttgagaaggatcctgggccccctctatggataggattgtaagctgagaatrcgggttcacgccattctcctgcctcagcctcctgagtagctgggactacaggcctccgccaccacgcctggctaattgtttttgtatttttagtacagacggagtttcaccatgttagccaggatctcccgaccttgtaatccacccacctcggcctcccaaagtgctgggattacaggcgtgagccaccgtgcccggccaagaatcctctgtgcatacacacactctgatgtgtatgcaatcacccaggatggtgttcaaaatgcagatacccaggcctcaggccccaaaccagaatctccagcaatgtggaacagagctgctgtattttaacaagttccccaggccagtctgttgatcacataaagctaagaaccgccactcaggaaagtctagcaaagtggttctcaaatatctgattcatacaaatcatttctggagaattatttatttatttttatattttattttatttttgagacagagtctcactctgttcctcaggctggagtgcaatggcacgatcttggctcactgcaa

SEQ ID NO: 292365 - DNA, 622 bp, Homo sapiens
tgcatgcccagaaaaggatgcaggcttcaagaagatctgagaagactttaagcttacatctccrggtaatccatgacacagggagcctacaatgatcaaaaaacaaaaaaattcacaaacaccaaaaaaggaagaacctgatttccagagttactatattattggagtcaaatatctagctttcaacaacaacaacaatcacaaggcacacaaataaataagaaaggctcattcaaagtacaaaaaccatcaagcagaccagcatatgctctgtagaaatttcagtaggaaaagagaaaggaccagagagattatttcaaaaattaatgcctaaaattaatgcctaaaacttcccaaatttgatgaaagatatgaatgtaaacatccaagatgcttaatgaactccaattaagatgaactcaaagacatccattccaagacacatcaaactgttgaaagccaaggcagagagattcctgaaagcagcaagagagaagaaaccaactcatcacattcaagggatgctcaataagatgatcagtagatttctcataaaaaaactttgggccacacagcattggtggagacatggctggtttggagcaggagcagcttggcaggc

SEQ ID NO: 292366 - DNA, 622 bp, Homo sapiens
tgcatgcccagaaaaggatgcaggcttcaagaagatctgagaagactttaagcttacatctccgggtaatccatgacacagggagcctacaatgatcaaaaaacaaaaaaattcacaaacaccaaaaaaggaagaacctgatttccagagttactatattattggagtcaaatatctagctttcaacaacaacaacaatcacaaggcacacaaataaataagaaaggctcattcaaagtacaaaaaccatcaagcagaccagcatatgctctgtagaaatttcagtaggaaaagagaaaggaccagagagattatttcaaaaattaatgcctaaaattaatgcctaaaacttcccaaatttgatgaaagatatgaatgtaaacatccaagatgcttaatgaactccaattaagatgaactcaaagacatccattccaagacacatcaaactgttgaaagccaaggcagagagattcctgaaagcagcaagagagaagaaaccaactcatcacattcaagggatgctcaataagatgatmagtagatttctcataaaaaaactttgggccacacagcattggtggagacatggctggtttggagcaggagcagcttggcaggc

SEQ ID NO: 292367 - DNA, 570 bp, Homo sapiens
cacagtaagatggcattaggataaaaacatgttactaacttgcttgaaatgcataaaactctaaaaagtagccactgcaaaatcaacacacagaaaacttggacaattctatragcattatgtaatttgcataagtttttaaaaagcacaatggaaactgaagtttcagatttttttttctggagtgtttcttcagacattctaagagggggtaaaagggtacattccctcaacacatgtatgaagctaatgaaacacatccaacattatttttttttaattttttttttttttgagatggagtctccctttgttgcccaggctggggtgcagtggcacgatctcggctcaccacaacctccgcctcctgggttcaagcaattctcctgcctcaatctcctgagtagctgaggctacaggcctgcgccaccatgcctcactaatttttctacttttagtagagacagggtttcaccatgttagccagactgggtcacaaactcctgaccgcaagtgatctgccggcctaggcctcccaaagtgctgggattacaggcatgagccactgcg

SEQ ID NO: 292368 - DNA, 450 bp, Homo sapiens
ttttcctgatttatatagtcttttataggttctgtttccttccaaaaaaagatctgaggtgacttattacaaaggacatttattattagcatggaagttttctctgctttttcttgataatgttcygcttatgtaactacagttgatgaattagagcttatttatctaggtattaatatttcactttattccataaaggaggggtccccaacccccaggccatggaccattgaggatccatggcctgctaggaacccggctgcacagcaggaggtgagtggtgggtgagtgagcattactggctgagctctgcctcctgtctggtcagtggcattagattctcatgggaccgtgaaccctattgtgaactgcacatgtgagggatccgggttgcatgctccttataagaatctaatgcctgatgatctgttactatctcttatcaccccc

SEQ ID NO: 292369 - DNA, 548 bp, Homo sapiens
aaattcacatgaccattgtaggaactatgtgaccttgccatgctggccacagctaattggcctggaggcaaagaacctgaccccagctggcccaatcagtcttttcctgggatttttccacctggaaccgagagtgcttgacattagtcctctctggcagcagaagtyataggatgtaagcctcataagcagtcagtggccatatattatcccaagcagggaagatgaatctgtgagaaggatgaagccagacaaagacagtcttagcttcattccaatctctagttcattctttaatttaacattatttattgaaggcttagtatgttccaggtactggttcagtcactccgtgaagtccgttgcatcccgtgctttccttgcaacatagttgttcctaccctttcatgattccaccaccaataaagcccgcttttgcctaagtcaaatggggtggatttctgtgcttataaccaaagtataccccacaatcccctacatcctcctttcccctctagttactctggattgctgccagcttcttgaac

SEQ ID NO: 292370 - DNA, 558 bp, Homo sapiens
aatattgttgcttgaagtcctcaaatatttttatatgtaattccaaatctttccagttccaccaaggaaaccactctataaccccacacaatatttacagctaaccttttcagctttcttcttcttgcattagatcaaacaagggtctgggaggcttggcaaggaccagaagaccgtggtggttgtatgcagtggacaacagagctttaaggagatgacctctgccckctaagttcaagttataaatgtcctaattctattgtctgctcaaagagattgagacttgtatcgggattagtgttgattaaagtctcttgaaaaagatattgatgtattttaagaagtaaagaaatgcaaaatcgaaagagaaacttgcattctttcagatctgtcagtcctttggccctaagaatagtaacacgctctgtggtggaactgtgcacagccctcatggcttctccaatcagtgagtcattcagctgacacacactgagatgaattttacctccatgtatgctggcctctactgacgaccaccatggaccaaacagctctgcc

SEQ ID NO: 292371 - DNA, 558 bp, Homo sapiens
aatattgttgcttgaagtcctcaaatatttttatatgtaattccaaatctttccagttccaccaaggaaaccactctataaccccacacaatatttacagctaaccttttcagctttcttcttcttgcattagatcaaacaagggtctgggaggcttggcaaggaccagaagaccgtggtggttgtatgcagtggacaacagagctttaaggagatgacctctgccctctaagttcaagttataaatgtcctaattctattgtctgctcaaagagattgagacttgtatcrggattagtgttgattaaagtctcttgaaaaagatattgatgtattttaagaagtaaagaaatgcaaaatcgaaagagaaacttgcattctttcagatctgtcagtcctttggccctaagaatagtaacacgctctgtggtggaactgtgcacagccctcatggcttctccaatcagtgagtcattcagctgacacacactgagatgaattttacctccatgtatgctggcctctactgacgaccaccatggaccaaacagctctgcc

SEQ ID NO: 292372 - DNA, 1061 bp, Homo sapiens
aatattgttgcttgaagtcctcaaatatttttatatgtaattccaaatctttccagttccaccaaggaaaccactctataaccccacacaatatttacagctaaccttttcagctttcttcttcttgcattagatcaaacaagggtctgggaggcttggcaaggaccagaagaccgtggtggttgtatgcagtggacaacagagctttaaggagatgacctctgccctctaagttcaagttataaatgtcctaattctattgtctgctcaaagagattgagacttgtatcgggattagtgttgattaaagtctcttgaaaaagatattgatgtattttaagaagtaaagaaatgcaaaatcraaagagaaacttgcattctttcagatctgtcagtcctttggccctaagaatagtaacacgctctgtggtggaactgtgcacagccctcatggcttctccaatcagtgagtcattcagctgacacacactgagatgaattttacctccatgtatgctggcctctactgacgaccaccatggaccaaacagctctgccwtgggttggagctagataaatactgtcctattgccattagtgagattgtgatggtctaggcatttttgaagggagaaatatgtaaagaaagacaagcctcttactgaacaggtggactctcattgccttcactcttcagcaggctcattagatgcatcactcttccctatggcttcagcatgtagaactttctccaactttgaggtatagaaacagaatagaattcacttaacctcagttacgagtaagcatatcttttaaagtgtgctcagttcattataaataaatgtagttattaacaatctcaaggtttatggaaggattacagctatccagtagcgcattgagcagctatttatctgaaagcacatactgactgaatccatcaacgtcccattcagcatcttawgagatcaaactgcctggaaaaataacttaatcaatcaattgcatactatatagtatcaatcatataccacactatgcagtaactgcacaaaata

SEQ ID NO: 292373 - DNA, 447 bp, Homo sapiens
ccaggctggtcttgaactcttgacctcaggtgatccacccgccttgcgcctcccaaagtgttgggattacaggcgtgagccaccacagccaggctggaaagtgtttttaaaaaaatagttatagaacctacctcttactgagtgaaaatgaagaatctttccrgcaccttggcaccttttcacttaaagaagcttcaggatttaaaactcagatgagcacaacagatatcccccactgctgctgacagcagcatcttttggccagaccagcacttcctgggctcatggctttcatcagcatcacagatttcaacgggagccggcaggcaatggctatttgaggacctaaataaatctaaagaacactcagtcacaatttggaatttgtgaagcacattggtattattcttgctttcaaagcagattatagaatcaaagattaagaaa

SEQ ID NO: 292374 - DNA, 575 bp, Homo sapiens
ttaaaaagttagttaaaaagaaaacttcaggacaaccatccacactagactacatagatagacaaatgatgagtttgctgagagtgaagatttaaatacacttcagacatatttattgcaatgttaaataaatatatctgaagtgtatttaagtgtatttaaatgtatttatgttttaggtgtagaaaaatgcttaatatataaataaataaattgattaaaaaggtaatattttattgttgcctggcttactaattttaaaaattactttttactatttttatacttttgagaggagaacatataaaaaagaagttgggcttattaatttcatatcaaacagaggagcaaatccctatgtaatatttcattttagttaaatttaaaacaaaataataatagcatagtttttgtgattatttccatcataaatcaaaagctttttagagacattatctcattcctttcaacatcattttttagattaaggctgaaaaaakgtcaggcacatcttttttatgtaaaggatagtactttaatagttcaggctatgactaacttgttcaagtttagtc

SEQ ID NO: 292375 - DNA, 517 bp, Homo sapiens
tgattttggtaattaagcaatagcttacaactaaatrtctgtgagttgctttgcattctcttttttgtaaaatggtatttttttcttcctttctcctcttattcttcctcttgttagttctccttcttccttttcttgagctactgctttccacgacccttcactttctccccctcccttttctttttcttctttgttgaatatcaatggaaacatgtgtatgagggagattatatacacagtgcctatggtaaatttgaaacaccaatgttagttagagagtctattcgttttctagggctgctgtgacaaattaccacacacttgatggcttaaaacaacattcatttattaactcatagtttctgcatgtcatgggtttctgcaggcatagatatatcacaatttcagaagtcaagtgtgctgggataattcctctgatcagtctcacaagacaaaaatctaggtgtcagcaagccaggctcccttctggagactctagtgagcatccattttc

SEQ ID NO: 292376 - DNA, 1138 bp, Homo sapiens
tgattttggtaattaagcaatagcttacaactaaatatctgtgagttgctttgcattctcttttttgtaaaatggtatttttttcttcctttctcctcttattcytcctcttgttagttctccttcttccttttcttgagctactgctttccacgacccttcactttctccccctcccttttctttttcttctttgttgaatatcaatggaaacatgtgtatgagggagattatatacacagtgcctatggtaaatttgaaacaccaatgttagttagagagtctattcgttttctagggctgctgtgacaaattaccacacacttgatggcttaaaacaacattcatttattaactcatagtttctgcatgtcatgggtttctgcaggcatagatatatcacaatttcagaagtcaagtgtgctgggataattcctctgatcagtctcacaagacaaaaatctaggtgtcagcaagccaggctcccttctggagactctagtgagcatccattttcwcagtgtatgtcataagcttagaactaccacagtgttttggaaaatggtcaataaataacattaagcttcaacttcagtgcaggagaatgcaaggttgaaagwcactcaccctctattttgacgtaaaccattaatgaatcttaatcagacagagaacttcatcatacactttggtgtaataagattttacttgtcataatacttgttaagaaagaaaaggctagagacatcacacaatatacctattacgatatacccatttttccttaattttaattcaggaggtacatgtgcagatgtaacagacctgcacatgtacccgctgaatcttacattaagaaaaaaaaggaaggctagaaaaataggatgtgaggatggagggaggatgaacagagaaatatttctgagaggaattttgtattttagtttttttatagaattatcattccacatggaaattttatttttatctttattgagattcttaaaaattcactatgtttagagagaaaaataatcgactagaaagaagaagaagaaaaggaaaggaattctgagattttagtaaaactgtatcgtcttctttacattcttttttttttttttttttttgagacaga

SEQ ID NO: 292377 - DNA, 580 bp, Homo sapiens
tggaagtctattctgatgctgtccctatccactcttaactctccacatttcctcctcatacatgtaattttttccaggtgtacaacaaaagcccctttccttcaacaaacagcttgtagataattgtgtttttcctcatgtacagaggaaaaagggcatacatacaacacagcacaaaatagatccaaatacatagcctcatagaaaaactagaaaaataatacctgtggaagtttactcaagcaccaacctttctctctttttgctttctaagaaggatcatccactgtcaatggtaactctgagactcttaggatgaasctgggctagctaagtttctaccaccatccctacccaaccaatgtgagtgaagaatttattaacctgaataacgatggtccactatactagtgtacactcaaaactgtttatgatgactccagtgaaactaaaattttaacataggcaggtagatacaacatgcatttgctctccagcctgggagaggtggggtggaatgttttatatggatgctatatgtctatttcatgttattttttaaggttcactcataaatcat

SEQ ID NO: 292378 - DNA, 580 bp, Homo sapiens
tggaagtctattctgatgctgtccctatccactcttaactctccacatttcctcctcatacatgtaattttttccaggtgtacaacaaaagcccctttccttcaacaaacagcttgtagataattgtgtttttcctcatgtacagaggaaaaagggcatacatacaacacagcacaaaatagatccaaatacatagcctcatagaaaaactagaaaaataatacctgtggaagtttactcaagcaccaacctttctctctttttgctttctaagaaggatcatccactgtcaatggtaactctgagactcttaggatgaacctkggctagctaagtttctaccaccatccctacccaaccaatgtgagtgaagaatttattaacctgaataacgatggtccactatactagtgtacactcaaaactgtttatgatgactccagtgaaactaaaattttaacataggcaggtagatacaacatgcatttgctctccagcctgggagaggtggggtggaatgttttatatggatgctatatgtctatttcatgttattttttaaggttcactcataaatcat

SEQ ID NO: 292379 - DNA, 712 bp, Homo sapiens
cgcattattaacattatttcaaaatcatgtaatttgatgccatgtaatttgtatatttgtgagttaagaggtgcagggcatccatttctcctttactagattaaaaaagtgggagaggattacaccaataactgtttgatttgttcaatcatagggtaagaagtaagatcagaatgaagtgatgaagatcarcagtacacagatgggataatttcagtaattctaagtgcagatatcttttatcaaaggtagtcttttcttttatttggcagaatgtaaggataaatattgtctgctttgcaatgagatgcgagtgatagcatagagttgcaagagggtcgagcgtgttctgtcctcatcgacatgaatgggtcttgcctgaatgtctagaggaagagataagatgcaagcaacgttttccccctggtacccttgacttacaactacagctattccaaaagtatagttgatcctttaggctatgagaagtttaagtctctgtttgaaatatattacaaataggaaacagaacactttataacaaaaaatgtggaggagagtagtagaggtgaaaaaataaaaaaaggtttcctacagttcttggttgccctattaatatgcttattgatcacattgagggtcttctaagaatggacagatttgaaaatagctatagacaactgtacaagtcactccatctatcaatatttga

SEQ ID NO: 292380 - DNA, 712 bp, Homo sapiens
cgcattattaacattatttcaaaatcatgtaatttgatgccatgtaatttgtatatttgtgagttaagaggtgcagggcatccatttctcctttactagattaaaaaagtgggagaggattacaccaataactgtttgatttgttcaatcatagggtaagaagtaagatcagaatgaagtgatgaagatcaacagtacacagatgggataatttcagtaattctaagtgcagatatcttttatcaaaggtagtcttttcttttatttggcagaatgtaaggataaatattgtctgctttgcaatgagatgcgagtgatagcatagagttgcaagagggtcgagcgtgttctgtcctcatcgacatgaatgggtcttgcctgaatgtctagaggaagagataagatgcaagcaacgttttccccctggtacccttgacttacaactacagctattccaaaagtatagttgatcctttaggctatgagaagtttaagtctctgtttgaaatatattacaaataggaaacagaacactttataacaaaaaatgtggaggagagtagtagaggtgaaaaaataaaaaaaggtttcctacagttcttggttgccctattaatatgcttattgatcacattgagggtcttctaagaatggacagmtttgaaaatagctatagacaactgtacaagtcactccatctatcaatatttga

SEQ ID NO: 292381 - DNA, 596 bp, Homo sapiens
tatctctagttcaatatgaggaatttaagagacagcctatgattcttcataaaggtcactggagttggaaattgccaatctcattagtcttaatcagctgatataaaagttacctatctgcctttatgcttaatgcagattactcatttcttcattaaatgaatcttgtaaaactccatgcttcctgaaatgtgttttgttctaggaagataactttttaaaaactattgcattgtatgtttaatttaaagttaaaaatatttctgttctgccagcttaaacactgtcttatttgagctactttctccatacatttgattataactagaaggttaaaagtttgtatgaataaatgtatgcaaagaacatagcacgtctcaagtttttacaaggaattcattttttttttaaattcatgaacttaaacagaaagttgaacatttgtgcatatggtcacactgcagagggtaattgggaccagctgttacrctttgtagtttctgaaagcctgtgtattgccttctagctacactgactttgtgcaggccttaataaaagaaattaaagaatgtgcaagcctgaatgacttccacgtc

SEQ ID NO: 292382 - DNA, 1129 bp, Homo sapiens
ccaaccctcagcacctaccctgaatcaacaaacacacccagcatccacctcggagcacacgctagttcagaaagtccaagcaccatcaamcttaccatggcttcagtagtaaaacctggctcttacacacctctcaccttcccctcaatagagacccacattcatgtatcaacagccagaatggcttactcttctgggtcttcacctgagatgacagctcctggagagactaacactggtagtacctgggaccccaccacctacatcaccactacggatcctaaggatacaagttcagctcaggtctctacaccccactcagtgaggacactcagaaccacagaaaaccatccaaagacagagtccgccaccccagctgcttactctggaagtcctaaaatctcaagttcacccaatctcaccagtccggccacaaaagcatggaccatcacagacacaactgaacactccactcaattacattacacaaaattggcagaaaaatcatctggatttgagacacagtcagctccaggacctgtctctgtagtaatccctacctccwccaaccctcagcacctaccctgaatcaacaaacacacccagcatccacctcggagcacacgctagttcagaaagtccaagcaccatcaaacttaccatggcttcagtagtaaaacctggctcttacacacctctcaccttcccctcaatagagacccacattcatgtatcaacagccagaatggcttactcttctgggtcttcacctgagatgacagctcctggagagactaacactggtagtacctgggaccccaccacctacatcaccactacggatcctaaggatacaagttcagctcaggtctctacaccccactcagtgaggacactcagaaccacagaaaaccatccaaagacagagtccgccaccccagctgcttactctggaagtcctaaaatctcaagttcacccaatctcaccagtccggccacaaaagcatggaccatcacagacacaactgaacactccactcaattacattacacaaawttggcagaaaaatcatctggatttgagacacagtcagctccaggacctgtctctgtagtaatccctacctcc

SEQ ID NO: 292383 - DNA, 606 bp, Homo sapiens
tttttaaaagaaaattcacatattgaagcttactcttttaaagggaatatggtcttatgagagaaacaaaatgtatattcaactatttttcatgatttttaaaaagaccttttacattttttctatgaattaaatactcataggtttttagataccttagaatttatggttcttttaaaayttaacaagtcagtgctcttcatagtctcactgatcaattttatcatgacttagtggcaactaacatatttccttcaggagaagtaaaaaagacaaatctattaggagtttgtaccctatttattattcccttattccccagtgagaagtcttggattatttgagagatgaactaaacctcataggctttatctcctttaaaaaatctctgatactgggtaagtgaggagctgcagatgaaaggtttcccatattccttccacttatagagtttctctttcgtgtgaacttttttgtgtctacaaaggtttgatctgtaactgtaggctttcccacattccatacatttatacagtttctctccagtgtggatcctctcatgttcggttaaaaatgaatactggctgaaggcctttccacactgat

SEQ ID NO: 292384 - DNA, 606 bp, Homo sapiens
tttttaaaagaaaattcacatattgaagcttactcttttaaagggaatatggtcttatgagagaaacaaaatgtatattcaactatttttcatgatttttaaaaagaccttttacattttttctatgaattaaatactcataggtttttagataccttagaatttatggttcttttaaaatttaacaagtcagtgctcttcatagtctcactgatcaattttatcatgacttagtggcaactaacatatttccttcaggagaagtaaaaaagacaaatctattaggagtttgtaccctatttattattcccttattccccagtgagaagtcttggattatttgagagatgaactaaacctyataggctttatctcctttaaaaaatctctgatactgggtaagtgaggagctgcagatgaaaggtttcccatattccttccacttatagagtttctctttcgtgtgaacttttttgtgtctacaaaggtttgatctgtaactgtaggctttcccacattccatacatttatacagtttctctccagtgtggatcctctcatgttcggttaaaaatgaatactggctgaaggcctttccacactgat

SEQ ID NO: 292385 - DNA, 606 bp, Homo sapiens
tttttaaaagaaaattcacatattgaagcttactcttttaaagggaatatggtcttatgagagaaacaaaatgtatattcaactatttttcatgatttttaaaaagaccttttacattttttctatgaattaaatactcataggtttttagataccttagaatttatggttcttttaaaatttaacaagtcagtgctcttcatagtctcactgatcaattttatcatgacttagtggcaactaacatatttccttcaggagaagtaaaaaagacaaatctattaggagtttgtaccctatttattattcccttattccccagtgagaagtcttggattatttgagagatgaactaaacctcataggctttatctcctttaaraaatctctgatactgggtaagtgaggagctgcagatgaaaggtttcccatattccttccacttatagagtttctctttcgtgtgaacttttttgtgtctacaaaggtttgatctgtaactgtaggctttcccacattccatacatttatacagtttctctccagtgtggatcctctcatgttcggttaaaaatgaatactggctgaaggcctttccacactgat

SEQ ID NO: 292386 - DNA, 638 bp, Homo sapiens
atatatttgtgtcacaatattttttatttttttaaattttttttttggtgagatggagatttactcttgttgcccaggctggagtgcaatggcacgatctcggctcactgcaacctccacttcccaggttcaagcgattctcctgcctcagccacctgagtagctgggattacaggcatatgccaccatggtcagctaattttgtatttttagtagagatggggtttcactgtgttgcccaggctgatcttgaactcctcacctcagatgatctgcctgcctctgcctcccaaagtgctgggattacaggcgtgagccactgtgcctggsagaattttttaaaaatttcaatacataaagtgtaatgaagctgaaacttgaaaaatatacatgcttttaccatcatttaaatttttaattttagcagtttgggctgtgtttaaaatgtagatattgacatattcccaaaaatactgttaatgaagaatacaaaacaaagcacgatagtgttgatggctgttgtgagaccttggttcttagtttcaaaaatttaaacaagagacacaaaacaatgaagatgcaacatagagggatttattgcaaagttgaaatactattttaaaaattaggtgcaaaat

SEQ ID NO: 292387 - DNA, 638 bp, Homo sapiens
atatatttgtgtcacaatattttttatttttttaaattttttttttggtgagatggagatttactcttgttgcccaggctggagtgcaatggcacgatctcggctcactgcaacctccacttcccaggttcaagcgattctcctgcctcagccacctgagtagctgggattacaggcatatgccaccatggtcagctaattttgtatttttagtagagatggggtttcactgtgttgcccaggctgatcttgaactcctcacctcagatgatctgcctgcctctgcctcccaaagtgctgggattacaggcgtgagccactgtgcctggcagaattttttaaaaatttcaatacataaagtgtaatgaagctgaaacttgaaaaatatacatgcttttaccatcatttaaatttttaattttagcagtttgggctgtgtttaaaatgtagatattgacatattcccaaaaatactgttaatgaagaatacaaaacaaagcacgatagtgttgatggctgttgtgagaccttggttcttagtttcaaaaatttaaacaagagacacaaaacaatgaagatgcaacayagagggatttattgcaaagttgaaatactattttaaaaattaggtgcaaaat

SEQ ID NO: 292388 - DNA, 542 bp, Homo sapiens
gctgtctcagcgttccatgcaccgtctcatttctcccttgtcacaacactaggaagttgcatcgattcttctctccaaaggagtctgaggatcagagaggttaagcaacctgcccaagatcacacagcaacccaatcttttatactttattaggttttcaatagtatcaactcgggttttttttttttttttttttttttggktgggggaggaaaaaggaagtgaagggcagaggtcaggaggaagctttgggtccccttcgttctgttttcatgacaggggcggggggcgtggtttggggtgtgccacatcctggcacttcctgaaggacctccctttggtccccctggcagcgtccagagacacgcgaatgctggacttaacatccttgctccttgtccatctctgggcctcagtttccccaactgtatggtggaaattgtagtctctgcttcttctcagggctgcgatgaggattagggtccatgcccgtctcacagaggagcccctgcccctctgagtcaggttctcaccatggagaa

SEQ ID NO: 292389 - DNA, 542 bp, Homo sapiens
gctgtctcagcgttccatgcaccgtctcatttctcccttgtcacaacactaggaagttgcatcgattcttctctccaaaggagtctgaggatcagagaggttaagcaacctgcccaagatcacacagcaacccaatcttttatactttattaggttttcaatagtatcaactcgggttttttttttttttttttttttttggttgggggaggaaaaaggaagtgaagggcagaggtcaggaggaagctttgggtccccttcgttctgttttcatgacaggggcggggggcgtggtttggggtgtgccacatcctggcacttcctgaaggacctccctttggtccccctggcagcgtccagagacacgcgaatgctggacttaacatccttgytccttgtccatctctgggcctcagtttccccaactgtatggtggaaattgtagtctctgcttcttctcagggctgcgatgaggattagggtccatgcccgtctcacagaggagcccctgcccctctgagtcaggttctcaccatggagaa

SEQ ID NO: 292390 - DNA, 584 bp, Homo sapiens
atctgaggctggtggtacaagaggggaaactgagtcacctgctgctcctggtgtgggggaagttagaccatgtagagcttagagcctgggcgtctcgctggcacgatggttcattcctgtcatctcagcactgtgggaggctcaggtgggaggaacactgaagcccaggagtttgagacctgggaaacatagcaagacccccccacggccccaccaaatctctattaaaaaaacaaaaaacaaaacaaacaaacaaaaaaaaccaaggccagccacggtggctcacgcctgtaatcccagccctttgggaggccaaggtggttggatcacctgaagtcaagagtttgagaccaggctkgccaacatggcaaaactctgtatctactaaaaatacaaaaaaaaaaaaaaaaattagccgggcgtggtggcaggtgcctgtaatcccagctactcaggaggctgaggcaggggaatcgcttgaacccgggaggcggagattgcagtaagccaagatcgtgccattgcactccaggctgggcgacagagcaagtctgtctaaaacaaaaaacaaaaaaacaaaacaa

SEQ ID NO: 292391 - DNA, 570 bp, Homo sapiens
caatccaacccgtttgggtgttgaaaggcgcttttaataaattgtgcgaagaagccataaactgtgtctctcgcaggagaggctttgaagtcagaggacaggctgggtacactacacccaggccggtggtggttcccgctgtcaggtggtgttggtactaagaatgccagataataataaaacataataatgaccctgggattaggtgttagaatgaaggcacagtgagccccggaacagggtcacccactggataagcgctcactaaacggcagctaaagcagctgtcagtactctctctgtctggaggaatgaggaaggggaaactgagtcctggagcccycccccccccccccaggcgcgcggtcgcaccagccagccctccccgggccgggccaggacgttctcaccactcgtgccctgctcccccttccctgtcccccgccggacctctcccacgaccggggaggaagtgggagaaacggacaggggaaaaaaaaaagtcgcgctgaaccaacgcctccccactccccacctccgcccctcgcgagccatgcagacccccttgtg

SEQ ID NO: 292392 - DNA, 376 bp, Homo sapiens
tgcctccggagagggcgtggggattccgtgtcagtgccccccgccccaacctcagaactggaccagggcgtaaccctgagcgtgccgctcccacactgggggtgcctccccaccaccggccgatcacttcctattggcaaactggtctgggagaggtcccggggaggccaggctggggcaggggcccaggccaggccaggcctaagcccagccctgctgctgccagggcctgagggcttcaggccgggggcgtttgtccgcgagggccacccsccatggggccccgagagcacctatcggcggggccggggcctctgtttaccaccagccatcgctgtggagacagagcttgggggagaagggggggcaggagccg

SEQ ID NO: 292393 - DNA, 529 bp, Homo sapiens
ccgtttccgagggcgccataaccttgcccagacctggttggagctgggttgttagcggggatgggggtggggaatgatgatgtggcaggcgtagtaatggcgggcaccgcggtggaagcggggagacagggaggcgccttatgtaacccgcgggccgcgagtttgagatcgattttctgccgggggactaggggcggcagggaatggcagaacgagcaaagcgacacctgaaaggctccccttttccttccaaataccttctcctgatgctgttaatcgtcgaccttaggcacttgtccttcctatgactcccagatgtacaaagactcttattgagacacgaggtgtaggcttgtggcagttagggccgttccggctccccgttatttcctggggtgggtggccttgtctgatcccstttgccaaggggtgaccttgcattttatgatgaagcttcttgctcggggaagtttgggtggcccggtgacaacgtggagggggctttaggagaggattcatcccttacgtg

SEQ ID NO: 292394 - DNA, 583 bp, Homo sapiens
ggatctcactctattgcccaggctggagtgtagtggtgccatctaggctcactgcagcctcgctctcctggactccagcaatcctcctcccacctcagcctccagagtagctgggactacaggcatgtgccaccacgcctggataatttttgttgttgttgcagagatggagttttgccatgttgccaaggctggtcttgaactcctgagctcaagtgatccacctgccttgacctcccaaagtgctgggattacaggagtgagccacagttgagtggaatttttaygctatcctgaggctacagaaagaataaggggcttggggcttccagaagaggtagcacacaggttatgggaaaaggaaagaaggaaaatttgtcaaagtggtcttgtcatgcaaatgaagcatcacaggtagcagctctcagaaagaatagaagtggactgtggcaaagtttctctgacaaacctttaaacgtgttaggctcttagtctctttttcctgtgagctcatctttcctagatctggagaagagggtgctcagagaaagcctggctgcttatttcactaatgtagattttc

SEQ ID NO: 292395 - DNA, 586 bp, Homo sapiens
taccttttcaccttcttaatggtgttttttgaggtacacacattttactaattaatttacaactgaaacttattctataaattattactctttcatggttattggtatttgcatcctgtttaaggaatctttgcctatgcttacacattaacctgatctgttatattttctttaacagtgttcttggtttgcctttcacattgaggtcgatgatgcttctcaaattaaattttgtgtttggtgttaggtaggggtaaaggttgtgaaagaaaaatagaaacttgggaccccaattcactatgccattccattctgtgagagtacacagaaaaaaataattcacaatgccaaaaggagaaaaaattaagctgaaagctgaatcaggcaagaaackaactttccttttgttcctaagcagagagctgtggataaaaggttaaagatctccacaggtagctatgctttgttcaccttatcttatgtaaagtgctgatttactgagcaggagactaataacatgattgactattcactcccttatgtgctctttttctcttgcgacacgtggatttagtaacgtgaccat

SEQ ID NO: 292396 - DNA, 596 bp, Homo sapiens
aagtaaacctctttcctttataaattgcccagtctcaggtatttccctatagcaatgtgagaagggactaatacactaatataaataaataaacagcagaaatgtatctaatacacatagaaagaatgatggaattagaaagtcaccatgtgaggggcttaacagtaacaattgattcaggcaagagtgatcagcagcctaaaatgagtaaggaaaagtttgagtaacataatatttacagagcctctatgcactccccagaagatacttaataattagaaagaatgaagttacagtggggtgtgtatgtgcatgtgtgcgggtgcatgcaggcacatgtgtgtacacagtcatgcaccacatgcaatgtttcagtcaatgatagaccacatttttaccataactttgctatgtttagatatgyttagatacataaatacttaccattatgttacagttgcctgagcattcagtacagtgccatgctgtacaggtttagagccttggagccgtaggttataccacagagcctaggtgtggagtagtctctaccacctatgtttgtgtaagcccactctctgatgttctcacaaaga

SEQ ID NO: 292397 - DNA, 516 bp, Homo sapiens
cccagccaaaaatgtatttaaaaaaaaattagttgggtttgatggcatacaccggtggtcccagctacttgagtggctgagcagtaaagcatattggagatttttttgtattaatcttacaacttttctgtaagtctgaaatatgccaaaatgaaaagctcaaacataacaccgataaacttcaaataaagacattttagataaacaaagatgggagatttcaggatcagcagacttkaaccaattaacatgttaaagtacatattttaagcagaaagaaaatgattccacatggaatgtcagagatacaagaaggggtgaagaggaaagaaagtgttgagcaggtcatcagtgtaaatgaacaccaacttcataaagtacagcaagtcctcaaatcatgttgtttcattataatgatgagaaaaaaaatcactttccagtctacacatcctccccttacctgtgtgggttttctccgggtcctctggtttcctcctgcattccaaagatgtgcat

SEQ ID NO: 292398 - DNA, 516 bp, Homo sapiens
cccagccaaaaatgtatttaaaaaaaaattagttgggtttgatggcatacaccggtggtcccagctacttgagtggctgagcagtaaagcatattggagatttttttgtattaatcttacaacttttctgtaagtctgaaatatgccaaaatgaaaagctcaaacataacaccgataaacttcaaataaagacattttagataaacaaagatgggagatttcaggatcagcagactttaaccaatkaacatgttaaagtacatattttaagcagaaagaaaatgattccacatggaatgtcagagatacaagaaggggtgaagaggaaagaaagtgttgagcaggtcatcagtgtaaatgaacaccaacttcataaagtacagcaagtcctcaaatcatgttgtttcattataatgatgagaaaaaaaatcactttccagtctacacatcctccccttacctgtgtgggttttctccgggtcctctggtttcctcctgcattccaaagatgtgcat

SEQ ID NO: 292399 - DNA, 554 bp, Homo sapiens
aactttcaaaactgagttctcagctttgctaggatgggatgatggggttaacatacacatcgttaaacccactcctttgctaaccatgatgaggctttcttccctaaggatttaacagaaaccagccctttcaaagcctccactacygatatcaacctctcctttcttgcctgataagagaccacccacaacagagaggttctggccagcgtacagaggatgcacagagcgagttttcatgtcctctgcttcaccttttaatgtcagagggctgaaaactccaccctgggatcatgctaacactgccattttttgtacatgggacccatgaagaagccagaaactcaattgtgcatgcatgcatttctccttccataaatattcatgactcctcctggagcttattaaataaatgtatttggccattccagtcagcataaattgctatttcctttacctcctccttgaagagtctgtttctggcttctggctggaggctatgcttcccagcctgtcagaaggacaaccctgcaggctacaaccctttataggaa

SEQ ID NO: 292400 - DNA, 613 bp, Homo sapiens
ccattccagtcagcataaattgctatttcctttacctcctccttgaagagtctgtttctggcttctggctggaggctatgcttcccagcctgtcagaaggacaaccctgcaggctacaaccctttataggaaataaatctctcactggttgggtggctcatgcctgcaatcccagcactttgggaggctaaggcgagtggatcacctgaggtcacgagtttcagaccagcctggccaacatgatgaaaccctgtctctactaaaactgcaaaaaattagccaggtgtggtggtgggcatctgtaatcccagctaatcaggaggctgaggcaggagaatcgcttgaacccaggaggyggaggttgcagtgagccaagatcacgccattgcactccagcctgggcaacaagagtgaaactctgtctcaaaaaaaataaaaataaacataaaaatgaagaaatgtctcctttccaaatttatgaacctcatcattcttccgttgacagcattaaaaggttcaaaaagacctttccatactctcccacagaagccctagaaattgtcattttgttcatcattctggatgcctgagaacttgtaatccaatgagtaga

SEQ ID NO: 292401 - DNA, 635 bp, Homo sapiens
tttaatatagatgcacagttctacatagaaaactttgtaattaggtgtgtcaaggtaggttagacacacacatatacttcctagcattgccaataagggagaagatacaatgtgctcattcagcagccagatgtaagttttcctaccattctraaaggaatctgactctttgaagaaatgtctgatactagaactgggacagtaaatataggagccaggataatctggaaggatcagaaagtaagtaagtactaaaaaaattaaaatatatcaaagaaaaataagagccaataaaaacagctactgatggccaacacaggaatgaattgtgcaacataatactgtagtgttgaataataactaaagcttaaagtaattatctaggtgtctgtatttgtatacataggtgaataagcaaatggagttgcatagaaatctcctttgcaaaagaattccaaataattgatgtagacactcagccatcaagaaagtggagccaactcctcactctgtaagtgtgggctctgcatagtgacttgctccaaaagaacacatgcagtatggacaaggaggagaaataacctcacagtggagaaatctgacaaacagtagctctgccaaacgatccaagttaa

SEQ ID NO: 292402 - DNA, 635 bp, Homo sapiens
tttaatatagatgcacagttctacatagaaaactttgtaattaggtgtgtcaaggtaggttagacacacacatatacttcctagcattgccaataagggagaagatacaatgtgctcattcagcagccagatgtaagttttcctaccattctgaaaggaatctgactctttgaagaaatgtctgatactagaactgggacagtaaatataggagccaggataatctggaaggatcagaaagtaagtaagtactaaaaaaattaaaatatatcaaagaaaaataagagccaataaaaacagctactgatggccaacacaggaatgaattgtgcaacataatactgtagtgttgaataataactaaagcttaaagtaattatctaggtgtctgtatttgtatacataggtgaataagcaaatggagttgcatagaaatctcctttgcaaaagaattccaaataaytgatgtagacactcagccatcaagaaagtggagccaactcctcactctgtaagtgtgggctctgcatagtgacttgctccaaaagaacacatgcagtatggacaaggaggagaaataacctcacagtggagaaatctgacaaacagtagctctgccaaacgatccaagttaa

SEQ ID NO: 292403 - DNA, 635 bp, Homo sapiens
tttaatatagatgcacagttctacatagaaaactttgtaattaggtgtgtcaaggtaggttagacacacacatatacttcctagcattgccaataagggagaagatacaatgtgctcattcagcagccagatgtaagttttcctaccattctgaaaggaatctgactctttgaagaaatgtctgatactagaactgggacagtaaatataggagccaggataatctggaaggatcagaaagtaagtaagtactaaaaaaattaaaatatatcaaagaaaaataagagccaataaaaacagctactgatggccaacacaggaatgaattgtgcaacataatactgtagtgttgaataataactaaagcttaaagtaattatctaggtgtctgtatttgtatacataggtgaataagcaaatggagttgcatagaaatctcctttgcaaaagaattccaaataattgatgtagacactcagccatcaagaaagtggagccaactcctcactctgtaagtgtgggctctgcatagtgacttgctccaaaagaacacatrcagtatggacaaggaggagaaataacctcacagtggagaaatctgacaaacagtagctctgccaaacgatccaagttaa

SEQ ID NO: 292404 - DNA, 635 bp, Homo sapiens
tttaatatagatgcacagttctacatagaaaactttgtaattaggtgtgtcaaggtaggttagacacacacatatacttcctagcattgccaataagggagaagatacaatgtgctcattcagcagccagatgtaagttttcctaccattctgaaaggaatctgactctttgaagaaatgtctgatactagaactgggacagtaaatataggagccaggataatctggaaggatcagaaagtaagtaagtactaaaaaaattaaaatatatcaaagaaaaataagagccaataaaaacagctactgatggccaacacaggaatgaattgtgcaacataatactgtagtgttgaataataactaaagcttaaagtaattatctaggtgtctgtatttgtatacataggtgaataagcaaatggagttgcatagaaatctcctttgcaaaagaattccaaataattgatgtagacactcagccatcaagaaagtggagccaactcctcactctgtaagtgtgggctctgcatagtgacttgctccaaaagaacacatgcagtatggacaaggaggagaaataacctcacagtggagaaayctgacaaacagtagctctgccaaacgatccaagttaa

SEQ ID NO: 292405 - DNA, 586 bp, Homo sapiens
gatcagtccttgtctggtctggctctgccccactctccttctcacctagttggaatccctagctacttttcagtagaggagagtgtgtaccccaatcccagcttggttcagatctgcatttaastcatggaacctggctgctccccaggtcctgaagaaaaaaacggtctctctgtgggtatgataaaggatgggcctgtccccaggacccctgtgagagggaagcccaatgtcccaccaggttggcagggctggggaagggaaagtgttatggcagccccaagaaaaaaaagaggcagcagagggagcaggacagcgctcacatggaactcatgccactgcctgaggggagggaggagtgcacgccagtgacgtcagggggcagagaggcgcagttccagggcggctttccccctcacttcctgccatgttactctgatcgcctccaggtgagcctgcccactttgtgcccaggggcctgtagaaaaccacagctccccatggttatgcccccaggagtggggcagagcagggaggagtcctggacagaggagaggaaggggcaggagggagtgggcctcaaact

SEQ ID NO: 292406 - DNA, 560 bp, Homo sapiens
taagtcattagcactaattttgagccaactaactaattaatatgagatgatacaatgtcctatactttggtaaatacagactatgtttaaacaatgtctgtaacgtgacttgtaaaatgctcctggctttacaaagatgtgattaagatgtagtaacacatgctaaaccatttccccctgcagagcatgtggtaactttcatcagtcacaytgagagtccagaagataaaggaaaaggtcatggattttgctgagaacttaccagagttgaactccctcattttccgttccccagcattggcgggttctgggactggtggctgtggcggctcgttggtctttgtctcttagaaggtggggaataatcatcatcttgaaaaagaaaaaatggtcattactgaaggaaccatcttaggttacagccacctctgggtcaattcccaacattcaaaagctgagcagggctttaaagctatcttattaataattatttctgtattgcgaacttcagcatacttttttctagttacatttgaaatgttattcttttgggatgtgct

SEQ ID NO: 292407 - DNA, 560 bp, Homo sapiens
taagtcattagcactaattttgagccaactaactaattaatatgagatgatacaatgtcctatactttggtaaatacagactatgtttaaacaatgtctgtaacgtgacttgtaaaatgctcctggctttacaaagatgtgattaagatgtagtaacacatgctaaaccatttccccctgcagagcatgtggtaactttcatcagtcacattgagagtccagaagataaaggaaaaggtcatggatttygctgagaacttaccagagttgaactccctcattttccgttccccagcattggcgggttctgggactggtggctgtggcggctcgttggtctttgtctcttagaaggtggggaataatcatcatcttgaaaaagaaaaaatggtcattactgaaggaaccatcttaggttacagccacctctgggtcaattcccaacattcaaaagctgagcagggctttaaagctatcttattaataattatttctgtattgcgaacttcagcatacttttttctagttacatttgaaatgttattcttttgggatgtgct

SEQ ID NO: 292408 - DNA, 560 bp, Homo sapiens
taagtcattagcactaattttgagccaactaactaattaatatgagatgatacaatgtcctatactttggtaaatacagactatgtttaaacaatgtctgtaacgtgacttgtaaaatgctcctggctttacaaagatgtgattaagatgtagtaacacatgctaaaccatttccccctgcagagcatgtggtaactttcatcagtcacattgagagtccagaagataaaggaaaaggtcatggattttgctgagaacttaccagagttgaactccctcattttccgttccccagcattggcgggttctgggactggtggctgtggyggctcgttggtctttgtctcttagaaggtggggaataatcatcatcttgaaaaagaaaaaatggtcattactgaaggaaccatcttaggttacagccacctctgggtcaattcccaacattcaaaagctgagcagggctttaaagctatcttattaataattatttctgtattgcgaacttcagcatacttttttctagttacatttgaaatgttattcttttgggatgtgct

SEQ ID NO: 292409 - DNA, 589 bp, Homo sapiens
ctaaagttatacaaatatagaagaaacgggataaaataaagcttagattggaaaaaatatttaagattctacaaaattcacgcgtaaacaagggaagctgagtaattgtatgttcaaatacttttaacaagtgcaaaacatgtaggcttaaagaaatagagctggccaggcatggtggttcacgcctgtaattccaacagtttgggaggccgaggcaggcagataacttgaggtcaggaattcgagaccagcctggccaacagagtgaaaccctctctctactaaaaatacaaaaattaggccaggagtgatggctcatgcctgtgatcccagcactttgaraggccgaggcgggtagatcacctgaggtcaggagtttgagaccagcctaaccaacatagggaaaccccgtctctactaaaactacaacattagccgggtgtggtggcacatgcctgtaatcccagctactcagaaggctgaggcaggagaatcccttgaacccaaaaggcaaagattgtggtgagccgagattgtgccattgcactccagcctgggcaaaaacagcgaaactccgtctcaaaaaaaa

SEQ ID NO: 292410 - DNA, 566 bp, Homo sapiens
aagcctgcatacacacacacacacatgcagagacacacactcaccctgttgagtttttttttttaattttgattgtattatatgtataaatcaatttgcagagaattgctgtctacaatattaggtcttctagtccatgaccatggtttacctttccattttatttgaaataaatgagaaaaaaagttgcttttttctgtgaagatttacaaatctttggttagatttgttcccaagtatttgatactttaaaaaaagtatcaaaattttcaaagactgtagtacccatttcctgtttcaacagttactcagctgatcaatgttgacgtttaattcttttgtaaatgctggtgttgtaaatttccttatagtgtttgttgcttctgtatggtataaaactgatttttcctgagttttgtttacagtgaaccttgctagacttgttaattctaaacatttagtatgattctttggcattgtctacrtattaggaaaaaaacagcttttgcttttccgttccatggtagacagcatctatattgtcctcagtgatccttgcctcctgg

SEQ ID NO: 292411 - DNA, 555 bp, Homo sapiens
ttacagaaaaactagatggctttgtggagaaagagaatttaactagttattaccagttcaaccgctacrtccccattcagaccatcagcatactgtgtgtcttcctttttccctgctttccccttgcaatctatttgctatacaggtgccacagtaaaaagcaattcagatcaagtgactcctctgttcagaacccaccagtggtttctcaggtcatttataatgaacccctcagtctttaatgatatagcctacaaagttctgcatgatctgcccccttggctgcctctctaacctgatttctgacttgtgttttccttacacacactgtctcttgatgctggacgcattcctgtacgtcacacactcccagcatgctctcacattacaatgtttgtaattgccattccctccaccttgaaagtttgtctctgcagtatttccctggcttgctctcatttcctttggatctctgctcacatgttacctccttagagagggccttcctgaaaatgatagaagtgttttttttggagcacatcccctcactcccca

SEQ ID NO: 292412 - DNA, 606 bp, Homo sapiens
ctcaggatacaaaatcgatggcaaaaatcacgaacattcctatacaccagtaagagtcaaaccaagaaccaaagcaggaatgtgatttcattcacaattgccacacacacacaaataaaataccgaggaatacagctaaccaggtaggtgacaaatctctacaaggataactataaaacactgctcaaagaaatcagatatgacacaaacaaatggaaaaacatcttgtgctcatggataggaaaaatcagtatcattgaaatggccgtactacccaaagcaacttatagattcaatgctatttctattaaactagtgctgacgttcttcacagaactagaaaaattttaaaattcaaatagggccaaacacagtggctcactcctgtaataccagcactttgagaggctgaagtgggcggattgcttgagtccatgagtttgagaccagcctggcyaatatggtgaaaccctgtctttactaaaaatacaaaaattagcctggcatgatggcatgagcctgtaggcccagctactggagaggctgaggcacaagaaccacttgaacccaggaggcagtcacaatgagctgagatcatgtcactga

SEQ ID NO: 292413 - DNA, 447 bp, Homo sapiens
tcataattctagattgtatttgtttatcatttatctgccacactagacagcaaagaacttggtcttctttggtctccactatatccccaacacctcaaacaattctggacataataggtcctgaataaatatttgttaaatgaatgaatgtatraagctactcacaacagctttctaaacatttgtgtgggtgagtggcttagtttcaagagtagcagggagggcatggtggactgttagaatataagtttcccccatagactcctagatcatttccgatatggcattaaactatttgttcatttatatttctttctaccattaaataatataacatattacccacaactgggaacaattctgtattttcctattagttcttatattccaggtaatgaacttgagcttatttcctgatcagaattatggttaaagcatgactgccag

SEQ ID NO: 292414 - DNA, 517 bp, Homo sapiens
tggaaaaaaactatatatttctaaaatttcgttagttagcaggatataattatttttttcaatcagtaaaacaactattatcactgtttaaaaatacattatgatcatctgtttgcatatagatatgtgtacaatatttatattgcatatgaaatactcattaacatttgtgttagcattttaaaatgtcctgtgtttggacaaaataattagagacaggcctgagtggtggtgggatgctgtgctaatatggagactatttggaatgcttctgtttgtggatggcatcaagtctcatatccaaaattaaaaagatcagtctatgtkttactgaatataacatactaagtcttggtcttggatagatggagaaaaacaatgaaacactaaagtcctggtgtaatccttctggtgacatgtttaataagccacaaaggaaatgccggaggtcttaaagatagtctacagcagccccttccttggaccttcattactacaaattctctgtattcttctt

SEQ ID NO: 292415 - DNA, 539 bp, Homo sapiens
agtaaatattttaggcttttgctaggtgcacagtctctgtcaccaattactcagctctgccagggtagcacaaaagcatccacagacaacgtctcaatgaatacatgtggctgtgttccaatacagcatttgaacaaaaacaggaaggtgccctgatttggctgcaagccatagttcatggaccccaatctaagtaatctcaatcctatgctttaacaccctttaaattccagcaatccataaatgtgtaacacaggctccagctgtgtatatctaatttcctacttgatatctctactcggatattattcataccactctcaaacctaacattcctaagacagaatttctgattccctcctccctgtgcaaayctgctccctccctagcatttctcacctggctaaatggcatctttgtcccatccagttgctcaagcccaaaggagtcatctttattttttgctttttgtaacattccttcaccaatttatcagcagcaccattgactctacctttaaaatacatcctaaatcaaac

SEQ ID NO: 292416 - DNA, 539 bp, Homo sapiens
agtaaatattttaggcttttgctaggtgcacagtctctgtcaccaattactcagctctgccagggtagcacaaaagcatccacagacaacgtctcaatgaatacatgtggctgtgttccaatacagcatttgaacaaaaacaggaaggtgccctgatttggctgcaagccatagttcatggaccccaatctaagtaatctcaatcctatgctttaacaccctttaaattccagcaatccataaatgtgtaacacaggctccagctgtgtatatctaatttcctacttgatatctctactcggatattattcataccactctcaaacctaacattcctaagacagaatttctgattccctcctccctgtgcaaatctgctccctccctagcatttctcacctggctaaatggcatctttgtcccatccagttgctcaagcccaaaggagtcatctttattttttgctttttgtaacattccttcaccaatttatcagcagcrccattgactctacctttaaaatacatcctaaatcaaac

SEQ ID NO: 292417 - DNA, 518 bp, Homo sapiens
attcaaacattattagaagagttgtctgttagtatgatcaaatgcggagggcacagtgtttgctgggtttgtcatgtagaaatattcttttcttccagggccacagctcctttgatgggcattttgataggaatgcaattaaaaagtagattggatattctgttgcagagtataatggataatgacattttgatcaattaaaacatgtacaatttctaaaaattttatttttttctgaagatatttatatrttaatcatagattggaggaatacagaaaaataaagctccctgagaaactttagtcttgagtggtcacattactcctggatccccactgtgtatgtgtcactgcttcaagggatacacatactcctacacacattcacaaataaatagaaacaggtttatagaccatactgttataacttttaagtcatttttaaaaatgtgaatatttatccatgtcatcaaatatcattttaaaatatagattttagtgaatgaccaatatttctt

SEQ ID NO: 292418 - DNA, 560 bp, Homo sapiens
ttaaacacggcacaaatgtgagctctcaaatgtgaycaagggacagtcactcaagagtgaaatttaagagatcaaccaaaaggagctgggtagcctgggtgctctagaatctgagcccccagacagacactatctgtgcccactccccgagtgaggctggtcttgtcatcctggccaattcctgcaggtaggatcacaaagacaagtaattcttgatcttagtagtcatgatcagagctctgtgtgctgtgggaattatcctcaggattttatacataatcagtagagaaaatgagcattggagaatagaagaatattaaagaataaaagtgtcatctttaatttcctttatatagctgaggtattcataaattatttagctgcatcctgctccactgtgagagcaagtgagggcttttgatgttctaaggagggactattctcattcagacatgttactttgcttgaggaaaaggcacatctttaggactggctagggtcacatttaaaactcatagaaggcaataggctgaaggctaccatccttacctattggaatc

SEQ ID NO: 292419 - DNA, 506 bp, Homo sapiens
tttaattcacaattaaacacggcacaaatgtgagctctcaaatgtgatcaagggacartcactcaagagtgaaatttaagagatcaaccaaaaggagctgggtagcctgggtgctctagaatctgagcccccagacagacactatctgtgcccactccccgagtgaggctggtcttgtcatcctggccaattcctgcaggtaggatcacaaagacaagtaattcttgatcttagtagtcatgatcagagctctgtgtgctgtgggaattatcctcaggattttatacataatcagtagagaaaatgagcattggagaatagaagaatattaaagaataaaagtgtcatctttaatttcctttatatagctgaggtattcataaattatttagctgcatcctgctccactgtgagagcaagtgagggcttttgatgttctaaggagggactattctcattcagacatgttactttgcttgaggaaaaggcacatctttaggactggc

SEQ ID NO: 292420 - DNA, 506 bp, Homo sapiens
tttaattcacaattaaacacggcacaaatgtgagctctcaaatgtgatcaagggacagtcactcaagagtgaaatttaagagatcaaccaaaaggagctgggtagcctgggtgctctagaatctgagcccccagacagacactatctgtgcccactccccgagtgaggctggtcttgtcatcctggccaattcctgcaggtaggatcacaaagacaartaattcttgatcttagtagtcatgatcagagctctgtgtgctgtgggaattatcctcaggattttatacataatcagtagagaaaatgagcattggagaatagaagaatattaaagaataaaagtgtcatctttaatttcctttatatagctgaggtattcataaattatttagctgcatcctgctccactgtgagagcaagtgagggcttttgatgttctaaggagggactattctcattcagacatgttactttgcttgaggaaaaggcacatctttaggactggc

SEQ ID NO: 292421 - DNA, 579 bp, Homo sapiens
attgcttattcagctatcaggctaactaaccatacaacccagcatactttttttttttttttgatgatgaccacaaacctatccatgcaatttttgtcaaaaatgttgctgacatcaagacgcagtatcccaagagaaagctccatggctgacatacttgctattggctcctaggcatgctcccttcctttcataagtgcttacagaataattaaaggctgttttatcagtgatgattatagctatgtttactgagcttgccacacgctgggcactgcggctctgcattttacaattccttcattcttatttactgttaggcctctaggtggggacagagttccagaaactctgggtcagtttttaagcaggcttggagactcagaaccagaagctgcgacccggtggaaggtgtggmcagagggaaaatgtttaattgtggccgctatttctatcgtgcatcatattctggggcttgctagagaatcaccctgtgcctctgcctccttcttgttagattttgctaccttatttattggtttcttcctcactaggataatttgtgaagatagaaatatt

SEQ ID NO: 292422 - DNA, 509 bp, Homo sapiens
tttgcaggagcagactagaaaaagccyatattgttataaatggagcattaagggtgattcagatgagggctcagaagaggagagaggtgtaggaagagtctgaacttcttagagattacttaagtggcatggtcagaattttggtagcaatatgtacagaaaaggccattctgatgaggaagaagatattgaaagctgaaataaaggccatcctcattatacaattgcacaaaaacctgggtgaattgtgtccatgcccaaggacttcatgaaatgcagaacttaagagtgatgaattaggatttctggtagaagaaatatgtatgcagcaaagtacagtggctacttttatccacatacaataaaatgtgactagaaggaaatggcttaaagatggaacaaaacaatttggaaaatccacagcctagctatttaaagagtgaaaaggcacatttaggagagcaaactaagggtgtggtcaagccaccatttgccaaagagactagtat

SEQ ID NO: 292423 - DNA, 1116 bp, Homo sapiens
tttgtgggctattgggatagaatgaatgtattttgtatgtgagaagaacatgagttttaagagtccaagggaaaaatgctatagttttaatgccccttctaaaattcatgttgatattaattgccattgtgacagtagtaagagatgaarcctttacaaggtgattaggccatgggggctctgtctacgtgtgtgggtttaatgcctttaaatgggtactctcttgctcttgagtgcactctcttgtccttctgccatatattaatgcaggaagaaggccctcacaagacgctgagcagatgctgggatcctgttcttggattttccagcctgcagaactgtgagccaaataaatttctattgtttataaatgacccagtctatggtattctgttagagccacagaaaatagactgaggaacctaccatagtggcatggactggccaatgcagaaacttacaattcatctttacatagaactcagagacttaggtggaacaagatttctaaagcctattccatagagcttattctaatctggtcttagtcttctagcttctgcttcctttgtggaagataaawtcaacattctctttctctgtaaatggtaccaacattcatcctgttaatcaaggtgacctccaacagtgctgaatcatagctcttcctcctataaccctctttcctccagcaaaaatctttcctcctttccattccttttcatagctcatccccaaataagcaaagtatgtagctgatatggaagacaggtggctaaaagctgtgtttctggatagtgtagatggggacttcaatcttgatctgctactcacctgccatacgaccttgaaaatgactaattcacccttctgagtctttttttttwtttcttgaaatgcggtttcactctgtcaccaaggctggagtgcagtggcacaatctcagctcactgcaaccttgtctcccaggttcaagtgatcctcccacctcagcctcccaagtatctgggattacaggcatgcaccaccacacctggctaatttttgtatttttagtagaaaccaggtttcatcatgttggccaggctgatctcgaactcctgacctcaagtaata

SEQ ID NO: 292424 - DNA, 629 bp, Homo sapiens
catatcatttaactgctctagtcaggaatctcatacccatgcacctagaaaaaaaaatggggagcttcctgtatttccttgatagtgaaatttttctttcttctaatttttatgtctattgtagctccattctttcctttgttacctaccaggatccctcccttctgtgggagtgggagaaagaggagaagttatagagccgagggcttgctgttattttaagaccactcttataaccatcaattactgcaatgggttaagccagacaaacctggattcaaattcttgctccacaagtgatgtaaggatttgacccagatcatgatagttcatttctttaagactttgtttcctctttcacaaaatggcaaataatgcctccatcatagcacattaaatgacttagcatggtacctggcacaaaagtagctcccttcttctctccctgtttcttttaatgggtatkgaaataaacaggctgactgctcccacacacgatatcctcagcagtactcagcttttaaattcttgcctcctcttttgttgccagctgatacttcttgctgcctgtctcttcagcttctaaacagctgctacactttttagagcattttttgactgctggctaa

SEQ ID NO: 292425 - DNA, 564 bp, Homo sapiens
cttttattcccaagccccagggatgctgtctgtttcttgcaggtgctactctatatactactctatatttgggggcggggggggttgccttttcagtttcctagtcaacaattccgtattaatgcaattctttgcattaaaatctctctttaaaaattggtctgagtattcaaccctgacaagatcctgactaaaaatccctattacaagtcccaccactctgaactcacttgcctagtgaccatgatgactaaggcacaggcctttgccagagtgcccaactggtactagtttgtctgggacatccctggttttagcaccaaaagtcccaaaccmgacagttggtcaaccttcctgtggcccatgtgtcaaccatcagatatatctcacaatattcagaagagagccatccagggatttcatttgtaatttttttttggtttagaattaagatatacagaaaaagtctgtcatatcttagtgttcaacaaataagcatattactcttggaattctataagtatattaaatctgtgacatacggtcattgagagtacaactcat

SEQ ID NO: 292426 - DNA, 564 bp, Homo sapiens
cttttattcccaagccccagggatgctgtctgtttcttgcaggtgctactctatatactactctatatttgggggcggggggggttgccttttcagtttcctagtcaacaattccgtattaatgcaattctttgcattaaaatctctctttaaaaattggtctgagtattcaaccctgacaagatcctgactaaaaatccctattacaagtcccaccactctgaactcacttgcctagtgaccatgatgactaaggcacaggcctttgccagagtgcccaactggtactagtttgtctgggacatccctggttttagcaccaaaagtcccaaaccagacagttggtcaaccttcctgtggcccatrtgtcaaccatcagatatatctcacaatattcagaagagagccatccagggatttcatttgtaatttttttttggtttagaattaagatatacagaaaaagtctgtcatatcttagtgttcaacaaataagcatattactcttggaattctataagtatattaaatctgtgacatacggtcattgagagtacaactcat

SEQ ID NO: 292427 - DNA, 507 bp, Homo sapiens
gagtcaaggaaatgtgatgatgtgagctgagtggggaaaaggcaacaaagcaaaaagagagagagattggaagatgttgtgctgctaactctgaagatgagagaatgagccacaagccaaggagtactggcagcctctagatgccagaaaaggcaaggattggattctcccctggagtcatcagaagcatcacagccctgccaaccctttttagatttctaacctatggaactctataataaatttggtcrttttgagccactaaagttggtggtaacttttatagcagcaataggaaactaatgcatctaccgacatccattgctgaaacaatagatatagaaagtgacaatcggtcatagtcaggatgcatggacactggagtttgtgcaatcaagacttgtgcataagagagaacgaaccttcactgatgtcatggctgtaggccagtgcctcgtgatccttatggtcattgtgttacacagtagtatcaaccttttgtggttt

SEQ ID NO: 292428 - DNA, 480 bp, Homo sapiens
aagtttaattttgaacaagttgaattaaggagctatcaagcgagcctcctacaatctcctgctataaaggttcctaagtrgcaaaattacttgcagtccccaaaggatgattcatttgttttaggaactgccaaggcaataaaatgttgggaactctagaaatcaatttcctatggatcctgaagcccagagagactcctaattttctgtagcactctacgacgcttttataccaaaatgtctcacagtgtgttccacaggtcattagccccattaaatgcggcgtaatcacaagctttctgtagccaaataaatttgagagggcctgcatactatggtatccacctggagaaccacaatgcacattgataaaggcaattagaaatctttcagcaaataaatggcagggtttgtttttgcttaatctgcgttctcaatctgatttgaccataaacacttttgcttaatatagtctctttc

SEQ ID NO: 292429 - DNA, 1203 bp, Homo sapiens
tgggagtgaaaaaaaaaaaactaatacagaacctcacaggataatttagaaggctcttatgaattgttgatttctaaaggtaagttacgtccttgctagagaagtaacataatagctaaacacaagtgcttagtatttattttgcatgccagtgatatttataatctagctttgattataggagagcaagagcaatgccatcctaattatcagatcttcttcacagatcagagaatagtatatctgttatctagggatgttttatttattgattggagttaatttttcagagcaaatctgtgattaaaactaagatgatagaatatcacacatcaaagatgtggactttgtttgattcactcagaccagggctcagtcatacctgcatttgttactcaccatgctgggctgaacgataacaattcattccmcaaatattgattgtgctgcacccaccaccacttcccaggcactgttccaggcactgtgatggagacaagcaaggtttctgctctcatgtagtttacattcctgcagaagtgaacagccaacaaaggaagcaaataactaaataatatttgcttctcawcaccaaaatcattcctttctgctgcawcacactcccttcaggtgaattgagaaactgtctcttcaggatttcagctccctcctgactgcacagctaataaatctttcttccctgtaagagacatgtcatgatcaatattttcctgtgctgaaaaccctatgttttatcacaaaagatctagcttcgaacttaattccattttgttcactttcattctcctcttattcagatttaaaaaaaaaaaacatatcaaaaagaagttttcaaaaggcagattatcattcccacatggggaactgttctaaatgtgctttagaaagagcttgatgctgccaaaatggctcaaaaggctaacaagtccatgggtggttattaattgagaaagattattgtctgtgtgctccagagaaggagggaaaaggctctctgctcattatagctctaccctctgttcttctcataacctttgttggaacttgcaaggtggcaggccagtccatgggcttcaggctaaaggaggagaatgcttaacatgaataggtcaaagagtgtactgtctcataacgaaatctcagagagaagtacttaattccaatgctggaaaccttgtaaag

SEQ ID NO: 292430 - DNA, 541 bp, Homo sapiens
ttctgcctttctggaccaagccagtgttcatcttacacatattgattgatgtctcaggtctccctaaaatgtataaaaccaaactatgctcagaccaccctgggcacatgtcgtcaggaactcctgaagctgtgtcacgggcgcacgtccttaattctggcaaaataaacttcctaaactgactgagatctgtctcagatattcagggctcacaatttatttattcaatcatctattcaaccatttatttatgtcagtatggacttayggatatttattttatactttgggttatagattaatacttccttattttgttgctcaaattgttccagctgtggccactgggcactctttcatctgtaagaccttttttattcattaaaaaaatacgaatataatttatgtatgcaagactggtttttacaatttgagaaaataacatgccgtgtaattcagatgctgaagccctgtctttaatgaacaataacattcgacaataacattggattctgggttttttcccatgctttcccctcct

SEQ ID NO: 292431 - DNA, 545 bp, Homo sapiens
tataaaattcggtgcatccaccacctacgggtcctttccacttggagacccgtctctctatggagagagctgcttctctttctcttctcttctcttctgcctattaaacctctgctcctgaactcctcatgtgtgttggtgttctaaattttcctggcacatgatcacgaaccctgggtttataccccacacaatgtagccacttcaccaacagatcatggtctaaacattccagggctagatggtgyctgagatgctgtgcagcattctcttgccaaacttctaagtcggggctgaactagattcttacctcagagccactaagtgcatcctgtaatcctgcctacttgccctggattttgtcctgactctgcaggaaccgcgtgtccttaagcaaggagctcaacttcctgagcctcagtgttttcatctttaaaagaggcctattgtcagtacattagaaaatgctcgtagcaatgcctaacatttcatgcaaactatatggtgtttctattgtcataacagatttgaggaaaaattcttct

SEQ ID NO: 292432 - DNA, 627 bp, Homo sapiens
tttatattaagattaaagttttgattattccacatatctagacataccagttattcaagagattatttggaagacaaatgcaacatgagaatttctccaggagaagcagagtaactaatcgcatattatgaacttaaaagaaaggtgggaaataaaattaaagttgctttataattatcattggtagtcttatttgttcaatgttctggtgacaaaagtgatttttcatgttttttttaaaatcagaataaaatgtatgtttctctactagttaaataaatggttttaatttttaaagtaatatgtatttagctaataaaaattctctaatcatgtttaatctttaccctcatagaattttatgataggaatcatataaatttaaaattttcaggtttctcataggtttcatccaaagagtttatgaatttcttccataaattctgcaaaaatagtcaaccagcctctgattaaacaccttcaggtctataaattcatgargtacttcagtctttgttgaagagtgtttattattaaaaagttccttttcatattcaagataaaatccaaacacttagcccctctactaccttggcagcttggcaaaaatacatttatcctttaatt

SEQ ID NO: 292433 - DNA, 627 bp, Homo sapiens
tttatattaagattaaagttttgattattccacatatctagacataccagttattcaagagattatttggaagacaaatgcaacatgagaatttctccaggagaagcagagtaactaatcgcatattatgaacttaaaagaaaggtgggaaataaaattaaagttgctttataattatcattggtagtcttatttgttcaatgttctggtgacaaaagtgatttttcatgttttttttaaaatcagaataaaatgtatgtttctctactagttaaataaatggttttaatttttaaagtaatatgtatttagctaataaaaattctctaatcatgtttaatctttaccctcatagaattttatgataggaatcatataaatttaaaattttcaggtttctcataggtttcatccaaagagtttatgaatttcttccataaattctgcaaaaatagtcaaccagcctctgattaaacaccttcaggtctataaattcatgaagtacttcagtctttgttgaagagtgtttattattaaaaagttccttttcatattcaagataaaatcyaaacacttagcccctctactaccttggcagcttggcaaaaatacatttatcctttaatt

SEQ ID NO: 292434 - DNA, 1056 bp, Homo sapiens
ggacctggtgtgtgatgttcccctccctgtgtccatgtgttctcattgttcaactcccacttatgagtgagaacatggcggtgttgggttttctgttcctgtgttagtttgctgagcatgatggtttccagcttcatccatgtccctgcaaaggacrtgaactcatccttttttatggatgcatattattccatggtgtatatgtgccacattttctttatccagtctgtcattgatgggcatttgggttggttccaagtcttgcttttaaattaaggtttgactaaaggttaggtacagctttgtcttttttttttttttattttttccgtagatgttggacatttatatgtgacacattctgggcttatagggtttcatatttgtgttcctatctcatttgctgatgctactagtaaaggcaggttaagggggcaatgtgaagttatttgaaactgaagactgtcatgctagatttttagagtgtaataaaagwtattgaagtaggaaaagaaacctcatggaatagaacatttttgaagaaatgaaactgaggcacccctgacatcacgatgacacactgtttaaccttgaactacttggattctttggaatagagataaagttattccagatgtaaagaccttaggaaacatggcataaaggcctaagtgacatttaatttgaagatacaactgctgtgtttcctaaaaccccaagtacctctccaaagaccaaacactctgaaaccaatacaaaacataattcctcaaggaaagaaacgattttccaaacaaaatacaagtttccatttgtaactcattactgctgtctgctccttcaattttgagatcttcagaaatcatacttagaatttccaacgctctttactcagccataatgttaatcactacagtaatccaaataaagctacaataaaccaaaaattagcagtaatcaagaaaatgcattccaaatgaacaagcaaaaaawttttcaaaacttacatttaattatacttgaaaagttataaattagaaccaaaaactcaaaata

SEQ ID NO: 292435 - DNA, 1925 bp, Homo sapiens
tgtctgagatcacaaaagtggccctggccccatgaatccactaggcattgccctaatgagggctctctccagtggctccacccttgctggggctcttgcaccctagrcctgtaatgcaaattgactctggatcattcttctattgtcttagacaatagttcctggcttctgtttaaataactaactaatctccctatcagttaatcttgaccacatcctttgtgttctctcccagataggctctctcattcttttcagaatgaataggctcagaatattccaaatcttcaagttctgcttcttttttaataaacaacttwttgaagacggatgtgatatttgtagtatgtattggtaagtgtaaaacttaattcgaatattaaatattacataaaatataggcatgtatgatttatggaaatagaatgaaatagaaatgtaatagaaatagaaatgtaatagaaatagaaatgaaatagaaatgtataatcactttctacttggctaggaatccatctgcaccttggagttcatggggaaattctaagtactattgataggagaattaagttttctgagcctgaaatgaaataattgtctcttagaaaaatcacgtggggagctgtgtagagggtagaaatgaaataattgtctcttagaaaatcacatagggaatcatgtagagggtagaactgaaggggtgatcatagaaacagggagaccaactgaaagagctgtagctggccgggtgcggtgactcatgcctgtawtcctagcactttgggaggctgaggtgggcggatcatgaggtcaggggttcgagaccagcctggccagcatagtgaaaacccatctctactaaaaatacaaaaattagccaggtgtggtggcatgcacctgtagtcctagctactccggaggctgtggcgggagaatcatttgaacccggaaagcagaggttgcwgtccagtctgtggtatttcgttatggcagcctgagcagaccagcaaacctggtcatcaaatggggcgaagagcctttattcagatgtcagctttttcatttgtatccttaaaaggtccatctaactgcctaaaactcaaactcatgatctttttttttttttttccaacttttattaagttctggggttacatatgcaggatgtgcaggtttgttacatgggtwaacgtgctgcacagatcaacccatcaccttggtattaagcccagcatccattagctattcttcctgatgccctccctccccagcacccccaatagggcccagtgtgacttgttccccctgacgtgtctgtgtattctcatcattcagctctgttagcctcaccaaactgacacaggaacagaaaaccaaacacggcatgttctcacttataagcggggagtgaacaatgagaacaaactcagattttacactttgctgttcattctcaatttgcagaacctggtttctttccaatattctttttctctgttaatgwtatggcacttttggtttccttggcaggaaaagctcaaatgaagttttggtaaattgttcgagggtattaagaaatgcatctaaaaaaatgcttttaacaggaatgctgtgatggcacatttgagaaggaggaagcccacagctgwgagtgatgcatggctatttaacataaacaaccaaatccaatttagctgcttcatcagaaaatttgaacaggcaagtatttgttaagtttcaatgacctcccaatatataaatctatagcaaattctaccagaaagagattatggaggattttggtactggttgctgatctaagattgagttaaatttactggaatttctttttcatggccctaaattataatttatgctactaaattatgttttctgtcaaatataaggctatatattttactata

SEQ ID NO: 292436 - DNA, 421 bp, Homo sapiens
tatggcacttttggtttccttggcaggaaaagctcaaatgaagttttggtaaattgttcgagggtattaagaaatgcatctaaaaaaatgcttttaacaggaatgctgtgatggcacatttgagaaggaggaagcccacagctgtkagtgatgcatggctatttaacataaacaaccaaatccaatttagctgcttcatcagaaaatttgaacaggcaagtatttgttaagtttcaatgacctcccaatatataaatctatagcaaattctaccagaaagagattatggaggattttggtactggttgctgatctaagattgagttaaatttactggaatttctttttcatggccctaaattataatttatgctactaaattatgttttctgtcaaatataaggctatatattttactata

SEQ ID NO: 292437 - DNA, 565 bp, Homo sapiens
acagacttcttgtggtagtgtgaatgcctcagggatcaagaggagctaggatgggagaggctcaaggagtgcgtgggactcggtggcttgactggagtcttctgaaggatgcattattttgttttaaacactttcataaaatgagttcactagtagagaactgtcctgacttgcaccaggagggaaaaaatggcactgaaagcaacatgaaataagttttaagataaactcgactcacatgacagtcaaaggatattaatttccaaagygacttgggcacacacgtgtacataacaggagcgcacctctgtgtggccagggtcatgcccactgccctccggactctacccaccagactgtacccaccatcttagtttttgttggagtgtacagtaacagtcacatactcaaagagttaaaatagaaaccttacacatgcctgctcttaaactgtaacgtcctcgtaacagaaattcttatcggaggtctgcatggtacttcgcaaacaagacgttctaccttttaaacaaataattcattaggtaattaaattcaagtgagatta

SEQ ID NO: 292438 - DNA, 580 bp, Homo sapiens
agctacctcctgaactaggggagaaaacataagcattggcccctgtgcattgaggtgttcacccttgctgcctaactcactctgtctgtactcccaactctttgattttcttcttcctaaatattcttcaagtgatataaaaactcaaagggattgtcctcagatgcctgacagtttacccttttacaaaccagagctggttttaattcacrttgagatgcatatggtggccaacatgctctctacagaggggctgcaaggaccccttggctatgcccgctggagacactgagtgtgggccactgatcagaagacctaattcatgaaattcaaatgtaaggttcctattctttttgactgctgacatctggccatctgggagcattcagatattaagcttcctttacttgaggtgaatgtcttgtgtaagctgcagcaggagtggtgtctttctcccagctcagtatctttcaccagaaacacaagcacaggacagtcagcccattcagaagtccaaacaacactctgttgaaccagaaagagagcactggctcccagatgggtaaactgaggcccagat

SEQ ID NO: 292439 - DNA, 1162 bp, Homo sapiens
agctacctcctgaactaggggagaaaacataagcattggcccctgtgcattgaggtgttcacccttgctgcctaactcactctgtctgtactcccaactctttgattttcttcttcctaaatattcttcaagtgatataaaaactcaaagggattgtcctcagatgcctgacagtttacccttttacaaaccagagctggttttaattcacattgagatgcatatggtggccaacatgctctctacagaggggctgcaaggaccccttggctrtgcccgctggagacactgagtgtgggccactgatcagaagacctaattcatgaaattcaaatgtaaggttcctattctttttgactgctgacatctggccatctgggagcattcagatattaagcttcctttacttgaggtgaatgtcttgtgtaagctgcagcaggagtggtgtctttctcccagctcagtatctttcaccagaaacacaagcacaggacagtcagcccattcagaagtccaaacaacactctgttgaaccagaaagagagcactggctcccagatgggtaaactgaggcccagatwgggccaggtcttgcatctgagagtgtcctgattaaattgattatcaaattataatatcaaaggttaaaataaaatttggatgagtgatctctagatatgaatatgacacttcawgagaaaaaagaagtactggggaattaacaaaagagggagataacagtggtggaaagatgcccattggagcggctggagtcctcagctctgcctttcagccttccagccttccagcctcaggcactggcacaatgtcaggatctgctcttcagtaaaacggagttcactcacaggcctccgctgatgcatgacccccagagttgcaactcatctgatccccactcctcctgtgcctagaggaaaattgtgctcagccctgggattgcatgtcccctccctatgacacttcttgaagaaaggcaagaggtcctctatgtccactctgcagataggaagacagaggcctagagacactgtgacctgaagaagatgctgtcgcatgcatgctgggcctggggctggaaccctggcctttctccatccacagccatgaaggaaggagcatgcacatgcggcgctacccagct

SEQ ID NO: 292440 - DNA, 624 bp, Homo sapiens
cctgattaaattgattatcaaattataatatcaaaggttaaaataaaatttggatgagtgatctctagatatgaatatgacacttcatgagaaaaaagaagtactggggaattaacaaaagagggagataacagtggtggaaagatgcccattggagcggctggagtcctcagctctgcctttcagccttccagccttccagcctcaggcactggcacaatgtcaggatctgctcttcagtaaaacggagttcactcacaggcctcygctgatgcatgacccccagagttgcaactcatctgatccccactcctcctgtgcctagaggaaaattgtgctcagccctgggattgcatgtcccctccctatgacacttcttgaagaaaggcaagaggtcctctatgtccactctgcagataggaagacagaggcctagagacactgtgacctgaagaagatgctgtcgcatgcatgctgggcctggggctggaaccctggcctttctccatccacagccatgaaggaaggagcatgcacatgcggcgctacccagcttctctgctctggctctgctgacattggggctggataattctctgctgcagaaaggggagggtgtcccat

SEQ ID NO: 292441 - DNA, 581 bp, Homo sapiens
gggccaggtcttgcatctgagagtgtcctgattaaattgattatcaaattataatatcaaaggttaaaataaaatttggatgagtgatctctagatatgaatatgacacttcatgagaaaaaagaagtactggggaattaacaaaagagggagataacagtggtggaaagatgcccattggagcggctggagtcctcagctctgcctttcagccttccagccttccagcctcaggcactggcacaatgtcaggatctgctcttcagtaaaacggagttcactcacaggcctccgctgatgyatgacccccagagttgcaactcatctgatccccactcctcctgtgcctagaggaaaattgtgctcagccctgggattgcatgtcccctccctatgacacttcttgaagaaaggcaagaggtcctctatgtccactctgcagataggaagacagaggcctagagacactgtgacctgaagaagatgctgtcgcatgcatgctgggcctggggctggaaccctggcctttctccatccacagccatgaaggaaggagcatgcacatgcggcgctacccagct

SEQ ID NO: 292442 - DNA, 527 bp, Homo sapiens
gaagttgtggaaccaatgttcaaggagactgtggaacaactgtatttatacacagattgtctactttttcttctgtgaatttggcagattgtgccttccaaggaattggttcattttgtctaggttagcaaatgtgtatggtatttgcggtgatgtgctctctttaatttttgatagcagttaattttcttttcttttctttctcttagttatcttgtatagaggcttgttggttttcctgatcttttcaaagaaacaacttttcttgtagttgatgatactttctattgatttcttgttttcaatttcaatgatttctgctctagctctaattatttcttttattctgctctcttcagatataatttgctctttgttttctagttttctaaagtggaaactttgattattgattttagctctttattttttctaatatatgcmttcagtgctataaatctcactttatacactgcttttattgtatctagaaaattttgataaattgtgtcatattttcattttta

SEQ ID NO: 292443 - DNA, 1019 bp, Homo sapiens
tggcggcccacacctctaatcccaacactttgggaagccaaggcaggtagatcacttgagcccaggagttggagaccagcctggggaacatgacgaaacccatctccacaaaaaatacaaaaattatgctggacatgatggtgcacacctgtagtcccagctacttgagaggctgaggtggaagggtcagttgagcctgggaggttgagactgcagtgagctcatgatcacaccactgcactccagcmtgggtgagagagcgagaccctgtttcaaacaaaaaaaaggaaaacaagataaaaaataacaaaacaaagtgtgttgcacgtgtacccgcaagcatatttttctgaagtctttccttgcctgtaaatctgcacgtatatgaacatatatgtacaagtgcactgaaaatatttttgtttctgtgctataggttagtctgttttatacttctggaaaaggaaaaacaagtttgaagtcatcttactcaacgatatctatgattttgactcaatcgttgactccatgagagattgagtggcttaccccagactgcctggcttactagattcagaaaccawtgaagtcatcttactcaacgatatctatgattttgactcaatcgttgactccatgagagattgagtggcttaccccagactgcctggcttactagattcagaaaccwcaactcactgtggggcccacccccaacaccaacgcatttcctattgtaccatgcagctaattgtgttggtgttattgctaggtgtaaaatagtcacaagtgctaacaattagaagaatcttacaatgatagacttccagaatgagttacatgagggagatataaacgttataaattagtacatgaaatttggaaaaacagaaattataattatcctcaagtatggccttctaatgtgactagaaatggtgtggtttctaccctgtgcatttatggcaaagccccaggacagactgtcctgtcaccaagccatcatgacggttttcctg

SEQ ID NO: 292444 - DNA, 559 bp, Homo sapiens
agtgagggagggaggcagaaaggagagaggacacggtgggycacagcacccaggggtacctgggacaggcactggcctttggcttttcaacatggaggattcaggcaggccctgtcctctctgcttttgaatctcttgcctgagaggggaatcctaattccaccctcccctgcccaacccaaccatgatgccagtgggtcgctggtgcctcctctcacagaggcaaggtctagggtggggttggggattccaagtggagatggggtttgtggacttcgacttgggaagagtggaccactgaatgcacttctcaaaatgacagggccctgtttgttggtggggactgcaagttggaggtcaaaaaaaaagggaaggtagcagagcctggggagggtcgcctgcaaggctgggggagcattggccccacggaggagcggagcttcgtggtgcccttgtggaaagaacttgcaaggccagaggaacctccagtggtcagtggccactgcctctgcaacgcgggccacaccacaggacccagcactgccataggagtcagcca

SEQ ID NO: 292445 - DNA, 559 bp, Homo sapiens
agtgagggagggaggcagaaaggagagaggacacggtgggtcacagcacccaggggtacctgggacaggcactggcctttggcttttcaacatggaggattcaggcaggccctgtcctctctgcttttgaatctcttgcctgagaggggaatcctaattccaccctcccctgcccaacccaaccatgatgccagtgggtcgctggtgcctcctctcacagaggcaaggtctagggtggggttggggattccaagtggagatggggtttgtggacttcgacttgggaagagtggaycactgaatgcacttctcaaaatgacagggccctgtttgttggtggggactgcaagttggaggtcaaaaaaaaagggaaggtagcagagcctggggagggtcgcctgcaaggctgggggagcattggccccacggaggagcggagcttcgtggtgcccttgtggaaagaacttgcaaggccagaggaacctccagtggtcagtggccactgcctctgcaacgcgggccacaccacaggacccagcactgccataggagtcagcca

SEQ ID NO: 292446 - DNA, 315 bp, Homo sapiens
cagataagttttttgtatttttagtagagattgggtttcactctattggccaggatggtctccaacttttgatctcaggcgatccacctgcctcagcctcccaaagtgctgggattacaggcatgagccaccatgcctggctgggttgaggactttttaaggaacatgactctgttctagtycatcaatagttgacgcagaagaccagcacttagacaagccagcagtaacagaaccctggctaaatcttgttctgattcatataaattacctttctgagccatccaggtcattttttgaaccaagcacacaaga

SEQ ID NO: 292447 - DNA, 541 bp, Homo sapiens
aaacaggaacgtcactcctttttgcttctgctcatgttctgtttggcacatatgatttttaattgtagccattgataaagaacacgttaagaatgacaagtcaagcattgcactattgccttgtgttagttcttttattaactccaccaagatttaagtgagatttgccagctcctcaatttcattatctcctttgcaccttggcttaccccattagcaacttcaagacaacagttttaccttttcagttctcactttttgggctgttcaaagtatcacacctgtctcagctcacctggccagacttcagtttgtagcaataacctaaaaactttttcccttgaggcttttatccttgtctcaattgtcattagatgctttcatcacttggagtgcctctgaattgaatgatccctgccggytgtgacctggtgaagacatctgtgccttcaatggccacctcttgtagcagcacctctgtttgatttgatgggctctgaatcacaagccttgctgcttgttccacatgtagttttggatc

SEQ ID NO: 292448 - DNA, 537 bp, Homo sapiens
cagtgtttccatggagtctccaaactgacttcatatttttttaagttttttttttttaacttttctactcaatgggctgttaaatattttcttccaagttttaagtccacccttttgaaattctttgtttctgtattatctccaaggaaatccccaagtgcttaaaatatcaaacctgcttgtgcagtgaccattgatccttgtgggatgccctgggtcttcccaactcacttcctgggccggagagcctgaatgccatttgaagagtaagctatgcattagattattttacaaatcagaataatgggttgttttcttagtgctcttgtgagcacagtggtagattctttccagattggctgaattccaggaaactgcatgaaaaggactgtagtgtctctgcttgccttctctccagatgccacatccctggataaatgagctggagcccacaggacagcctggactccatgtggtagacctagaaatagctaccacttctctgagctaatrcatgtaagaagccaacccaaatag

SEQ ID NO: 292449 - DNA, 582 bp, Homo sapiens
  misc_feature (1)...(582): n = A,T,C or G
tgatgtatttgaaaaggcattcacatgcatcaacatttgttgaaaagactctacattttattgtcttsagtgctttgtcaaatattagttgactacattcatttgggtttatttctagactccccattctgctccactgatctatttattattttgccagtatcacactatcttgattactgttgccttatagtgtcttgaagttggattgtattagtcctccaactttatttctgtcttcaatattgtgctggctattttggatgttttgcctctccataaaaccttcagaatcaggttggtaatattcacaaaataattggctagaatttttactgggattgcattgaatctgtaaattatttgaaaagaactgacatctggacaatatcaagtctttctatttatgattgtggaatttgtctgcagttattttgcttttctttgatttttttcaacagttttgtagttctcttcataaggattttgtatatgttttgttagatttattcctaaatattttccttttttagtgccaatgccaatggcattatgtttttaactttacatttgccanatgaa

SEQ ID NO: 292450 - DNA, 570 bp, Homo sapiens
  misc_feature (1)...(570): n = A,T,C or G
attcctaaatattttccttttttrgtgccaatgccaatggcattatgtttttaactttacatttgccanatgaaaatttttacttgttcatttctgatatataggaaagcaattgacttttgcatattaacctcatatcctgctatcttgctatagtttacttattagttccagtttttttgttgactttttctgaatttctacatagatattacatcatctgtgaatgaaggcaattttatttcttccttttcaatctgtgtattttttattttcttctcttggcatattgcatttactagtacaatattgaaaaggagtcatgagagaagaaatgtttgcctcattcctgatcttagtggaaaagctcctagtttctcaccattaagtatgatattagctgtagggtttttgttaatatactttattaaattgaagaaattaaacttctaatcccagtttattcaaacttttttattataaaatttaatgggtgttggattttgtcaaatgccttttctacatctgttcatatgataaagtgattttttttttcttatctaggctgta

SEQ ID NO: 292451 - DNA, 570 bp, Homo sapiens
  misc_feature (1)...(570): n = A,T,C or G
attcctaaatattttccttttttagtgccaatgccaatggyattatgtttttaactttacatttgccanatgaaaatttttacttgttcatttctgatatataggaaagcaattgacttttgcatattaacctcatatcctgctatcttgctatagtttacttattagttccagtttttttgttgactttttctgaatttctacatagatattacatcatctgtgaatgaaggcaattttatttcttccttttcaatctgtgtattttttattttcttctcttggcatattgcatttactagtacaatattgaaaaggagtcatgagagaagaaatgtttgcctcattcctgatcttagtggaaaagctcctagtttctcaccattaagtatgatattagctgtagggtttttgttaatatactttattaaattgaagaaattaaacttctaatcccagtttattcaaacttttttattataaaatttaatgggtgttggattttgtcaaatgccttttctacatctgttcatatgataaagtgattttttttttcttatctaggctgta

SEQ ID NO: 292452 - DNA, 412 bp, Homo sapiens
acagacacaaaataaaatgaaaacagctgtggacacaaaaatcccatgtggacagggggaggccatttatcttggaaactcgaggaaggaattccatgcggtattgaccaatgtgtatttgggaaaggccgggaaccatgcaacatgccccagtcactagrtggctgttgatcccttgaaaggcctgtaccactgaagcatgagacagtgcctttcccagggagcaagagtcaaatgtaggcattggtagactttgcagaaaagatttcccacagcacaagaagtgggtgctccagatacagcctgatggaaggtaagtgcctcctgtggacttccagctgcaaggcagtcccataggatgagctatgctggctggcagcccaggtagctcagagtctcacaaacgcttagc

SEQ ID NO: 292453 - DNA, 1080 bp, Homo sapiens
tttactacttctctccttaccccacttatctaaagtgctcagaatacaatcagaaaaagcaataaaacaaaatggattaatgcttcatgtgtacagagaatatacatacctgaagttcttcaaaatgtggtattaagtatagaatcttaattcagtgctacaaaaaagactgatgtttattttgtatctaatactaaattatcagagtaatatgaccagttatttatctgtatttaatctcctctttttttctgaaarccaagtttaaaagccaggaaaacttttgtttttcttgattgggctggatatcttccttttgcctgtccacatctacgctctacccttctctttgttgtgtcatgctgacctgtatagatttcatctgtgggtttccattctttctagcttccttgtgactgtggttaatggaaggaagggactaggcaggagagaagacagaagaaaagtgaaattggcatgttgattttccctgcttccttccaggaactggctgtctttttttttttttttgwaggtcaggagttcgtgaccagcctggccaacatggcaagactccatctctactaaaatacaaaaattagccaggcatcatggctcatgcctgtagtcccagctactcaggaggctgaggcatgagaatcacttgaacccaggaggcagaggctgcactgagccaagatcacgccactgcactccagcctgggtgacagagtgagactccatctcaaaaacaatatatatatatwtttcttatttataccagtttattataccttatttataccagttttggcatttaatcttttttctaggaatttatccactttaagtagatcttcaaacttactgtcctgtagctgcttaaagcctttgaagtctagcctttcaaggaagtaatcatatcatgtgcatggccctgaagctccctgtacactttcaatgctttacaaataataataataattaacaggcactatccgatgaatagaaatctaccaaaaatattagaaattatctccaagagtagtaagggtaatttttatgttctaacatgttgta

SEQ ID NO: 292454 - DNA, 645 bp, Homo sapiens
ccttgctactcagaggggcaacctcccgcagcatttcccaggaggagatagttagaaatgtagacttttggaccctactccagacaggatgaatgagaatttgcatttatgataattatgcacaaaagtgtgcataatgaagtttgacagatgctacatttcattcctgtcctccaaggtgaggccacaaggctacagcagtaaacagcatagacgaggtcctgccttcatcagcctccacactggtagagggaagggaaacagaccacaaataagaaaatgattacaactaagttctaagccccaggtgcttctaaaaatgccatttcctggtctctacccttaactgaatctatctgggtctctaggggaaatctgcatttaacaaagtgagtcatttgccctctaaagtgcaagagccatggccctccctgctaggcctcagggaagaatcaggcaagaatgccagcatctttcctacttttcatattgcctcagtccccagagccagagaaatggactgcaagaaatccttccaataggctggccaactgacartctatgcattgatttagaacattgaacctcagagatccatgcgatgctacttaatatggtgtgcaaggctgcaggcactcacaactg

SEQ ID NO: 292455 - DNA, 556 bp, Homo sapiens
aagccaggtcttctcagctttctacatctgcctgcccagtcataatcatctttctaatgagccccaaggccctgtagtgtcctgtgaattatttaaggaagattaaaatatttccattctactgtacttctaagccttgcacaagccccctctscaaaaatgtatataaacagaaagcttgaaatatattttgttaaactaagtagaacaacaaaaacagtaacaacaggaccaaccatttctcaagaatactagttatgtattttttttttcctacagtggcagcagcatcatttaggcagacttagcagtgttaggaatttaggttgcacaaaagtcactttcttaggagcattactaaacaataggctattgcacaaacaagtaagttttccatctgtggacatctttttttctttttagcttctttaaagatttttgtccattaatttcaaactatagtagccttagtcttcccaaaaagtaacagcggctaatgagatttcttacaatccccctccattcctgttcatctatatatttaatggtttccctt

SEQ ID NO: 292456 - DNA, 649 bp, Homo sapiens
tgggcaacaatagtgagactccatatccaaaataaaaaaaaaagaaaaagataagagggtctgataaaggatttgtatccagaatatattgtgggacttcaaaaagttcatggaaaaggcatattattaaaaaaagtatccatggatttcaaaatttttctgcaccagaataaactcatactaacttgttgtaacatgtctgaacaggacctagttttagacactragaaggataagacattaatttgaaaagaacccctatcaaagaaacatgaattcagctaaaattgaagcaagaacaaacagctgcagacaagagcagagctttcaatacaaatgtatacaagtgggatcaagatcctgaagcatttacttagcacaatcctgtaaacaaagcacaatcaaagcaatggctaccaagaggtgaaagtggtccagtcaaagcaaaagtgagcttgtcaatggcaaaggtcatggcaacagttttttgtggatgatcaaggcattttgctgttgattttctggaggaacaaagaaagataacatctacttgttatgagagtgttttgagaaagctagccaaagttttagcagaaaagtgtccaggaaaactttaccagagagccctcctccaccacaacaatgctcc

SEQ ID NO: 292457 - DNA, 1135 bp, Homo sapiens
tatatatgtgtatatataaaatgttaggtagaaaatgaccacaaygcacagtgctataaaagtatagaagtagagaagatactacaaattgaacgctaggattacaggttcgggggcagataaaattcttgtgaattttaagggactggtagtaggtgaggctgtaaaagttcttgggcaatgggtgccacgatgggattttaaaaaacagaacaatctaactgtgctatctggtatagagaataaattagaaagttgtgtcaagcagattagaatgagaagaaaacaggcaggaaaattagttaaggagggtctattacaattgtattagaaaatagaaaataagaacttgaaccaggatagacagtaggatggggaaaaaaggttatttttcaaatatgtaacaaaagttaactctctaggtcttgcctgctgaatgtatatggagtattggtgtaagggagatggaagataaatctaaatttcaggctgagaagaaggtggtttctttaaagtaatatatgtaatttggggctgggtggaggcggggtgaggtcttacactttcwtatatatgtgtatatataaaatgttaggtagaaaatgaccacaacgcacagtgctataaaagtatagaagtagagaagatactacaaattgaacgctaggattacaggttcgggggcagataaaattcttgtgaattttaagggactggtagtaggtgaggctgtaaaagttcttgggcaatgggtgccacgatgggattttaaaaaacagaacaatctaactgtgctatctggtatagagaataaattagaaagttgtgtcaagcagattagaatgagaagaaaacaggcaggaaaattagttaaggagggtctattacaattgtattagaaaatagaaaataagaacttgaaccaggatagacagtaggatggggawaaaaggttatttttcaaatatgtaacaaaagttaactctctaggtcttgcctgctgaatgtatatggagtattggtgtaagggagatggaagataaatctaaatttcaggctgagaagaaggtggtttctttaaagtaatatatgtaatttggggctgggtggaggcggggtgaggtcttacactttc

SEQ ID NO: 292458 - DNA, 567 bp, Homo sapiens
tatatatgtgtatatataaaatgttaggtagaaaatgaccacaacgcacagtgctataaaagtatagaagtagagaagatactacaaattgaacgctaggattacaggttcgggggcagataaaattcttgtgaattttaagggactggtagtaggtgaggctgtaaaagttcttgggcaatgggtgccacgatgggattttaaaaaacagaacaatctaactgtgctatctggtatagagaataaattagaaagttgtgtcaagcagattagaatgagaagaaaacaggcaggaaaattagttaaggagggtctattacaattgtattagaaaatagaaaataagaacttgaaccaggatagacagtaggatggggaaaaaaggttatttttcaaatatgtaacaaaagttaactctctargtcttgcctgctgaatgtatatggagtattggtgtaagggagatggaagataaatctaaatttcaggctgagaagaaggtggtttctttaaagtaatatatgtaatttggggctgggtggaggcggggtgaggtcttacactttc

SEQ ID NO: 292459 - DNA, 1073 bp, Homo sapiens
gtaaaagttcttgggcaatgggtgccacgatgggattttaaaaaacagaacaatctaactgtgctatctggtatagagaataaattagaaagttgtgtcaagcagattagaatgagaagaaaacaggcaggaaaattagttaaggagggtctattacaattgtattagaaaatagaaaataagaacttgaaccaggatagacagtaggatggggaaaaaaggttatttttcaaatatgtaacaaaagttaactctctaggtcttgcctgctgaatgtatatggagtattggtgtaagggagatggaagataaatctaaatttcaggctgagaagaaggtggtttctttaaagtaatatatgtaatttggggctgggtggaggcggggtgaggtcttayactttccattagagattagaagtgtataataatttagtgaaggaagtgttccctctgagctggtgaagccagggatagtgagattctgggacatgagctgagctgcacaggaagacawgcagggaaaaataagatgaaactggcatctgctgtgccagaaagcaaagaagtgctcatgcgggacatatcaccatgacaagaggtgatcctgaagtggcttccactggaaaaatggcaacaagttaagatcaacatgatcaatgataacaaaagwttttagccattgcgtaacataggcaatttagagttcatacaaatagatagatagataaattaattgatagaaagttttatgaggaagaggatacttatgtaatacctccccacaaaaatgcttattaactgcaaaggaacaaagaataactttacaaagaaaagcctggcaatgtcactttatcaagcaagccaaatgaacatcaccagttacaggtcaaattgagatattgtgccatctgatagactgcaaggagaacacaacctcacttctgtgagattcgcatctgagatgcttaactggaatctagtcatcaggaaacatcagacaaatgtgaattgagggacattctgcaaaataacctgctgatagccttcaaacatgtcaaaactttcaaataa

SEQ ID NO: 292460 - DNA, 607 bp, Homo sapiens
ttgttgaaaacctcaaaaaggcccgcagaaatccctatgggtaacagttgattaaaacaaaaagaggaagaatttatgtttacccatatcacagaaagtcaagctgttggagaaattggattgtagtgtaagtgtgaaacatcttayagaagagtgttgtgttggaatgaccattatatatgacctgaagaaacagaaggatatactgttgaagttctgtgctgaaaaggataaacagaagttaatgaaaaatagaaaaacatttgcataaagctattaatgaagatctcgatcatgtattgaaagagtgggtatgtgagtgtcacaaagaacatgtgccacttaatggtatgctgatcatgaaacaagcaaagatcatcatatattgaagattgaagggaactgtgaatattcaacaaattggttgctgaaattcaagaaaagtcatggcattaaatttttaaagatttgtggtgataaagcatctgctgatcatgaagcagtggagaaattcattgaaaagtttgtcaaggtcattgctgacgaaaatctgatgcccgaacaagtctataatgctgataaagcatcactgttttggtgttattgc

SEQ ID NO: 292461 - DNA, 557 bp, Homo sapiens
tttttttttttttttcagatggagtctcactctgttgcccaggctggagtgcagtgatgtgatctcggctcactgcaagctctgcctcccgggttcacgcaattctcctgcctcagcctcctgagcagctgggactgcaggtgcccgccaccacgcccagctaattttttgcatttttagtagagacggggtttccctgtsttaaccaggatgttctcgatctcctgacctcgtgatccaccttccttggcctcccaaagtgctggaattacaggtgtgagccaccgcgcctggcctctaaatggtaatttcttatgcaagatgctttgccctgaccttctctacttttactattgtctttgtcactgaaacatctatgtgtagcttataatagcagatttacaagtgatttaaagataaactgttatgtttaagcaaatgcacactctttttcttaaaatttagatttctagttctcaagcaaattggtacaactgtcagagcttgttgagattaatgcaattaaaaacttcctgcagacaggctattcaaacata

SEQ ID NO: 292462 - DNA, 589 bp, Homo sapiens
acaaaatgcattattaaaaaattaagaaataaatatccccctcttacttaaatagrgattgattttataatgtggaatgctgaggagagctgctctaagatatattaaagcctggggacagggagaatacactataatgggcattttgctccctcagccagaggaaaaaaatcctcagagtgaatggatgtatttgtgaaatggaagctgctattctctgtttgttcacaagccgggtatgatgcactgctggcttcgtcatgtgagggtagaaagacctgcaggacacatctgtctttcctaagcacaaactgttagtctggatgagggttatgaagacaaatgctttcctggaactgaagttggagaagcactgtttctttcctttaactttaaatcacaattctggcttccaaaaagatgttctcaaaccaggattctgccaagcatcctccaaggtgtcttatttaacaggaggatatggcacagatctctccacaaggtgtacccttcaagaggaaatattacataggatcacttctccagaaacttgaagattttcttttcctttttttctttttcttttctt

SEQ ID NO: 292463 - DNA, 589 bp, Homo sapiens
acaaaatgcattattaaaaaattaagaaataaatatccccctcttacttaaatagggattgattttataatgtggaatgctgaggagagctgctctaagatatattaaagcctggggacagggagaatacactataatgggcattttgctccctcagccagaggaaaaaaatcctcagagtgaatggatgtatttgtgaaatggaagctgctattctctgtttgttcacaagccrggtatgatgcactgctggcttcgtcatgtgagggtagaaagacctgcaggacacatctgtctttcctaagcacaaactgttagtctggatgagggttatgaagacaaatgctttcctggaactgaagttggagaagcactgtttctttcctttaactttaaatcacaattctggcttccaaaaagatgttctcaaaccaggattctgccaagcatcctccaaggtgtcttatttaacaggaggatatggcacagatctctccacaaggtgtacccttcaagaggaaatattacataggatcacttctccagaaacttgaagattttcttttcctttttttctttttcttttctt

SEQ ID NO: 292464 - DNA, 559 bp, Homo sapiens
ggggttacacaaggacatgaataccagaagacaaggatctttgggagccatgtcagaaactacctaccagcgtgagtaagaaataaacctctcttgtattaagtcacggagatttcagagttgatttgccacagcagctaataccttgagtaacacaagagagaagagcagcagatggttctggtaaagtggagtcagggcaggccagatcctacaatgccttataagctctgattaaaacaaaaacaaacaaacaaacmaaaatggcatttattccaagtgcaatgagagatcatcaaaagatttaagcataagagaaagaattggggttttgttttatgattattcttgctactgcttataaatgcattgagaggaaacaagagtagaagcagagaggcttgtcgggaggctattgtcatctgattcaggattgggtaataaagaaaataggggttgagtggttaattttatgtgtcaacttggctgggccatggtgcctagatatgttgtaaaacactgttggagatgtttccgtgagagattgtttggatgagat

SEQ ID NO: 292465 - DNA, 559 bp, Homo sapiens
ggggttacacaaggacatgaataccagaagacaaggatctttgggagccatgtcagaaactacctaccagcgtgagtaagaaataaacctctcttgtattaagtcacggagatttcagagttgatttgccacagcagctaataccttgagtaacacaagagagaagagcagcagatggttctggtaaagtggagtcagggcaggccagatcctacaatgccttataagctctgattaaaacaaaaacaaacaaacaaacaaaaatggcatttattccaagtgcaatgagagatcatcaaaagatttaagcatragagaaagaattggggttttgttttatgattattcttgctactgcttataaatgcattgagaggaaacaagagtagaagcagagaggcttgtcgggaggctattgtcatctgattcaggattgggtaataaagaaaataggggttgagtggttaattttatgtgtcaacttggctgggccatggtgcctagatatgttgtaaaacactgttggagatgtttccgtgagagattgtttggatgagat

SEQ ID NO: 292466 - DNA, 556 bp, Homo sapiens
aaatcaacctaagtgttcatcaacagaagactggataaacaaaatgtagtgtatgtatatatatatatatatatatatatatatatatatatatatataaacacatacatacatacacacacacacacacacacatatatatatatatatataccrtgtgtattagggttccctagagggacagaactactaggacacatatatatgtttattaatgtatagttttaattaattaattaatattaataatactaataatatttatttaattaattaatactaattaatagtttattaactattaacttatatgatcacaaggtcccacagtaggctgtctgcaagcttgaggagcaagaagagccagtctgagtctcaaaactgatgaatgtggagtcccatgtttgagggcagggagcatccagcatgggagaaagacgtaagctgggaggctaggcaagtctcgcctcttcaggtttttctgcctgctttatattcgctggcagctgaatagattgtgcccaccagattaaggatgggtctcccttcccaagcc

SEQ ID NO: 292467 - DNA, 568 bp, Homo sapiens
ggttattttaccaaggctttgactggaaggatatgcttccctttaaggagtcaagcttgacttacagagctgatagaagcccagtggggaaactggcctcatacccttgtctatgcagtccccgtacagggttcctgaccygtggtcagtaaagaatgtcactttctaacaggtccaggagctccaagtttattatgggaccttaagaagaaaagatcatccaactcacaggtgtttgaggatacaaacccatggttaggcttggctttaaaaggtcttatttgaaattccttgtggaactgaattccttaaaagccaatccaaaaggcctatgtagaaataattattcttgctatttgtactgtatgcaaagagtcaggccaagcataaaactaaagtctattttgcaaactaccagtcctatgatgatttattttttaacaaacgaggactggagagtgagaaatcatgtttcaaaacttatatttgtcattaaattctaaactcactagttgtttttaagttttcacctacattttagactaaccctacttgttccggtgaacca

SEQ ID NO: 292468 - DNA, 568 bp, Homo sapiens
ggttattttaccaaggctttgactggaaggatatgcttccctttaaggagtcaagcttgacttacagagctgatagaagcccagtggggaaactggcctcatacccttgtctatgcagtccccgtacagggttcctgacccgtggtcagtaaagaatgtcactttctaacaggtccaggagctccaagtttattatgggaccttaagaagaaaagatcatccaactcacaggtgtttgaggatacaaacccatggttaggcttggctttaaaaggtcttatttgaaattccttgtggaactgaattccttaaaagccaatccaaaaggcctatgtagaaataattattcttgctatttgtactktatgcaaagagtcaggccaagcataaaactaaagtctattttgcaaactaccagtcctatgatgatttattttttaacaaacgaggactggagagtgagaaatcatgtttcaaaacttatatttgtcattaaattctaaactcactagttgtttttaagttttcacctacattttagactaaccctacttgttccggtgaacca

SEQ ID NO: 292469 - DNA, 602 bp, Homo sapiens
gattttcactttaaggcccctcccctgaatctcagctaagcaactgctctggcctgcagttctccatcattctgtcctatggctattgctttaggaggccttcttccaatagggaatcatctgtaatctgttaagcaagacattcttggcagccagtagcctaatcatgatttctttaaatagtttttttcccatgtcctttcctaattgggcttatactgttcagacaggcatttatataatatcattctcccaagtctttgatcaggcactgtgtttacagaacttgttttttaagccttttttcatctcagatggaataatccagaaaaaccacaatttctccattacaaggcttcaaagtccaaaagagtcagccctactgttagtgacaccagaactgggcaactcagaatctctgttaccagagcacaaatgggtgtgtcattccacrtatcactgaagattccacatcctctcccggaatgcagcaggaggggacacaaatgtagttacactattctcttaatcttttcaccaaactcttagattatatttgttgaagacatcaagtttggagatatttccttaatgtaaaaaat

SEQ ID NO: 292470 - DNA, 597 bp, Homo sapiens
cactttaaaaagtttttgcatgagaaggagtgtctttatgcatgttggatagcaaaggtgtactatggtagatactgtgagagttcctcaacaattattttatcccttcaccatgatgaataatcttgtgttaggagaaatgtacccctcccccagcatcagaaaagggctctgattaatctaaaccagtaaagaccatcctgtctttcttgccacaaggattgtttcagagatagcttcaggccattcctagaaccaaataatttttttttgtgtgatgattgtaggtccaacactctttcctggcatacaaatggagacaccaataattttagttgcagcaggcagraattttgttaccatgaggaataggtaaattcagccatcttttccactcatgctcagaaattaaatcctctaatagaatatctgcttggtcatgttgaaagtcaaccagcccagttcctggctgcctggcaggatctggcctctatagattccaagtgggggatagcatcatcatttaccaactcaccaaccccttgcacaataccagagaagcaattctacaaatggaaatctggttgaggttagcaa

SEQ ID NO: 292471 - DNA, 582 bp, Homo sapiens
tgcatattttgttcaacaaacagcattacatcttctatggtcaataggtagaccattctattttagaagaagccctctgctttttgtttaatgaaatttccctctatggctaagtcacctaatgttcttgaaatatcttatttattagcagtttgtagattctcaagaaccattctgcttggtgtccttcrttggtgtgaaggtatcatgttttagataatgaggataccactgtttaaaaacacaaacacaaaatttcatttcaataattatgtgcaaataaaatatagtatccttggttcaatggattcatcattaattgtattgctaagatgagatctggtgaactggaagacttgcgcttcttatctactctcactggggctccgtttctttgtggataaaacaaaggggttaaaccaaatgatctgcagatttccctttatatctaacattttgtgagtcagtgagtacacactgaatttggaggtgttaggtttgatgacagcttatgctataggcatcccaggcagcaagaaaacttaggagctaacctcctggtcacggggctacgataacttt

SEQ ID NO: 292472 - DNA, 1191 bp, Homo sapiens
tttacaactatattggccaacttgcaaatttatgtgtagtatgcctggatggttatgcagagaaagcagctactctctgggggctaatgtctcttctccaccaatcagaatgcagttcatgattcattaggtttgttggctagattatttaacttaattcaatataaattatttaattcctaaagmcttcctggtattcaatatgaatgaaacaattattcctggacacaatcatccaaataacaccacacagttttaccaagccccaagatagtcgttaaatcccagctttccactgctttacataaactacttatgctgagtttttgagggtataatgttactgaaattgtttggattcaataagggactatatgttattctatatttaatgagagaacatcccaattacatagcaatgcgggaaatcataaaatatttctaggtagcaactttgcccttgttttgatagcttattttcttttgtatctattcttgcccatggggaaaggaacgagtctattttttccaagtgtaagactgctgctgagaagcattccaagagatggctaaccgtctcttgacatcattcctagccagtgagtwtgccaatagtgtgtcttaattagtcctgagaatttatgtggcccatgaaagaggcataattttcctaagattgcacagctaagttacatatctgagacttgaagacatcctcagattatgttatccctaaatctctaattgctwtgtagcaaaagattttagccatttttttattcctgaatcaaggatacataaataaagttgtattcaatcaatccaaaaatcctcaagcccaaataatcctagtacttgagcagaccttatagtgtgtgtgcacaagtgcgcatgcgtgtactctatttttagattatcttttaagagggaccggtgacatggtcatacagtacaacagaagaactcactccctgtttctctataattcccatattacactcagcacttgctctcctttcattctgtggcttctgtgctgctagcagtgaccagtgactcaggaaggctgcatatagtgaagaaaaagttgcctttccaggcacagttcagtcctgaggcgccttttcacaccatctcatagacatttcagagccaaactctagctttctttttatgactacttttccattc

SEQ ID NO: 292473 - DNA, 545 bp, Homo sapiens
tctgtttgatcaagggcttccttttaatctattgaatcttttcaccacatgcagacctttaaaattgttgcactagttgaccaaaaatcttttccctaggatcccattctggtgaaaaaccaaaagggcagggccactggcattaagaacaagcctgccaataagataaactgtgaaagaagatcccgttcctagaacacaaagtgagagcacttgtgaatccctgcccatgtactcaactctttcgctgtctttcttccctccatggaagtcagactctcagctttgtactcaaaccttctggtgataatttgggacatcagccgtcctagaaaagtctctctattgtattggtttttrttaaacaaaataacctaatatgcttagtgaatatgtctacacacatgtgctaaacatttgtttaattatttaacttggaaaattttggtgtatcatttctaacagagatagtctttgtgccatcatataactaacaaatttgaaggcattcattggcatcatgtattttctctaatgagtcctaa

SEQ ID NO: 292474 - DNA, 547 bp, Homo sapiens
accttttcaacaaatggtgctgagataattggctagccacacataggagaatgaaactagatcctatctctcaccgtatacraaaatcaactcaagatggattaagggcttaaacctaagacgtgaaactatgaaattttagaagataactttggaaaaacccttctagacattggcttaggcaaggatttcatgaccaagaacccaaaagcaaatgcaataaaaacaaagataaatagctgggacctcattaaactttacgagcttttgcagggcaaaaggaacagtcagcagagtaaacagacaacccacagagtgggagaaaaatcttcacaatctatacctctgacaaagggtagtatccagaatctacaacgaccccaaacaaatcagtaagaaaaaaacaaacaatcccatcaaaaagtaggctaagggcatgagtaggcaattcacaaaagaagatatacaaatggcaagcaaacatatgaaaaaatgctcaacatcactaatgatcaaggaaatgcaaatcaaaaacacaaaatgtgat

SEQ ID NO: 292475 - DNA, 547 bp, Homo sapiens
accttttcaacaaatggtgctgagataattggctagccacacataggagaatgaaactagatcctatctctcaccgtatacgaaaatcaactcaagatggattaagggcttaaacctaagacstgaaactatgaaattttagaagataactttggaaaaacccttctagacattggcttaggcaaggatttcatgaccaagaacccaaaagcaaatgcaataaaaacaaagataaatagctgggacctcattaaactttacgagcttttgcagggcaaaaggaacagtcagcagagtaaacagacaacccacagagtgggagaaaaatcttcacaatctatacctctgacaaagggtagtatccagaatctacaacgaccccaaacaaatcagtaagaaaaaaacaaacaatcccatcaaaaagtaggctaagggcatgagtaggcaattcacaaaagaagatatacaaatggcaagcaaacatatgaaaaaatgctcaacatcactaatgatcaaggaaatgcaaatcaaaaacacaaaatgtgat

SEQ ID NO: 292476 - DNA, 1208 bp, Homo sapiens
ctttgctgtgcagaagctttttaatttgatgtgatcctatttgtcccatttgtccatttttgctttggttgcctatgcttgtagggtattacttaagaaattgttacccagtccaatgttctagagactttcttcaatgttttcttttagtagtttcatagttcagagtcttagacttaagtctttcatccattttgacttgatttttgtatatggcaaaagatagaagtctagtttccttcttctgcatgtggatatccagttttcccagcaccatttattaaggagactgtcttttcccaaagtatatacttggcgcctttgttgaaaatgagttcgctgtagatgtatggattcatttctgggttcaaaactggtattccagttttgttctttttgctcgggatacctttggctattttgagtcttttatagtttcatataaattttaggattttttttctatttctgggaagaatgtccttggtatttttatagggactacattgaatctgtagattgctttgggtrgtatgaacgttttaacaatattgatccttccaattcatgaatgtggaatatctttccatwcactgttctaaggggaaaaatgttcaaacatgtatactaaatgttgccctggggttctcattacttaattaacatgcacacataaaatctggagtgtgtacaacaacagctagccttaataataggtaagtcgcgtcagtctctttttctaatattctattttaagttgtgaaccttaatccaggtaagctgtctgtcatttggcaaagatgtgaggttttctcaggaaagggtaggtatgtaaggcagctctawcatgacctgatttttaactacctttcaagggatattttacaatgtttttgtgaacactctggtggattctgggaccttaagacgccattcctttggaaatatgtaattaataaagcgttatgggaaagatgtgtgatgacaatgtctttcttgagttatgctaatttgattacaataaatttaagtaaattctaaagtaattatttctttcaaataacagcatttccagtatttaaaggaactgtccccacaagagtcttctgaattgaatttaatttgtctattacttataatatgctcttaagtttaacaaaaagcaagcacaatgagttattcctaacacccaaattgatggggttttc

SEQ ID NO: 292477 - DNA, 617 bp, Homo sapiens
cactgttctaaggggaaaaatgttcaaacatgtatactaaatgttgccctggggttctcattacttaattaacatgcacacataaaatctggagtgtgtacaacaacagctagccttaataataggtaagtcgcgtcagtctctttttctaatattctattttaagttgtgaaccttaatccaggtaagctgtctgtcatttggcaaagatgtgaggttttctcaggaaagggtaggtatgtaaggcagctctaacatgacctgatttttaactacctttcaagggatattttacaatgtttttgtgaacactctggtggattctgggaccttaagacgccattyctttggaaatatgtaattaataaagcgttatgggaaagatgtgtgatgacaatgtctttcttgagttatgctaatttgattacaataaatttaagtaaattctaaagtaattatttctttcaaataacagcatttccagtatttaaaggaactgtccccacaagagtcttctgaattgaatttaatttgtctattacttataatatgctcttaagtttaacaaaaagcaagcacaatgagttattcctaacacccaaattgatggggttttc

SEQ ID NO: 292478 - DNA, 647 bp, Homo sapiens
gtatattaatttaatcatttagtcctttaggaaatgaccttctatgaatgctatgagcactttctatgaacaaggccctatattaggtatatgtgaatcaccatgtacttccaaggaagtgtaatcactttcaataaaacacaggacataggaattctaaagttgaaacagctttgggtattctgttagataggaatacttttgaagactaacaatttttaaatattgcactagagagaggtgaagagttgaaaggattagagacagaaacaaaagacatcgctgctacgcacataattcattcagtgctgctggttacaaatgatatggtattcaagttactttttcaagcttttcatttttatgcataatttcttcaaagatgcctttggggatggacaatttcagccagtaaattattttttacataagcatttaggtatggctataaaatcatttttgcttgtatcatgttctcatcatccccaagaaaaaccccatcgtccccaagaagaaaaaggcctaacgttttgtgtttttagattttaacttcatctgaaataataatagaaacatgttaaaaccaactatttgagcrttaataaatttctaataatattcatattcaaagtagttcaaaattcata

SEQ ID NO: 292479 - DNA, 530 bp, Homo sapiens
tatataaaggatttttgtgtcaagttattggttattgtgtgatgcccatttagccttagtttgaaaacttttaacaaagcagttaaaagtattcaatctatttgtttgaaataactccttccatgggtactctactaatgatggaattgtatcataagcatattaaacttgagaaagaaagaactgaaacagtcccttaccaccgctccatctgaatttatgttctgaagatggaagacatgaatcctggtatgtttaggctttgtgtccccacccaagtctyatcttgaattgtaatccccataatccccacatgtcaagggagagaccaggtgcagttaactagatcatgaaggtggtttcccccatgctcttctggtaatagtgagttcccatgagatctgatggtattataaattgcttttccccctttgttcagcacttccccttcctgctgccttgtgaagaaggtgccttgcttcctcttcgccttctgccataaatgtaagtttcctgaggcctccccaact

SEQ ID NO: 292480 - DNA, 588 bp, Homo sapiens
gcaagctactgtcatgtacccacctcttggcaagttgccttagacctggatcacacttaccaggttgatctggctggagaagaaagtgagcacaggcagtgcctgggcagctaagtggttgtaagtgcctgggagtgtcaattaagtctcctttacttgtgacttaatctgaaaaatgtcatttttatgaggttactaggtgatttkttttcctcctcaataatctgcccttaaatgtaatctataaaacacgccctgcccctttaaggaatttctgccatatattggtagacattaattattttaaaagcaaacagaagtttctctgcgctcactgttttctgcttggaaaccatgtatctgtgagcagagatcaaaagcatagatattggaaataatggcagaattctaaaggtcactatattaggtactttcagcctatcttcttgtctaacatcatttgtgtatttcaatcacttgacaaatatttaataaacatgacattgttctaatagttaacaaaataaagaacaaaaactatgtccttatagatcttaaatgtccaatttattaatggattaatgacaa

SEQ ID NO: 292481 - DNA, 964 bp, Homo sapiens
ctagcacagaacttttgggctaaaatgacataataggctgygcaccatcgctcacacctataattctagcactttgggaggccaaggcaggtggatcacctgaagtcaagagtttgagaccagcctggccaacatggcgaagccccatctgtactaaaaatacaaaacccaggcgtagtggcatgcaagtgtaatcccagctccccgggaggctgaggcaggagaactgcttgtacttggaaggcggaggttgcagtgagctgagatcacaccactgcactccagtctggggcgacagagcaagactcggtctcaagaggaaaaaaaaaaaaaaaaaaaaaaaaaagacataataaagccagattatagaatctttcccctaatggaataaacttaaaatcgctgttaaaagaaaaaaaagtcaaaaatgttaccagwtagtttatgaactagctcattttggaagttacaaatacaatgtaccacagtgggggaaatgtggtattcacagctgaagacttatctaacagtgacagtgagaatggaataatggaataatgacacataagtatgaatgaagctgtatctctttgcttcaaatttggccaacaaccacacgtgagctgggaacaacatggctacataccacaatcccctacatcctcaaactggtgacatttatcagccagccatttctcacaaatgtggatttttatagataggagttatgaaaagtacatgcacattgaagatccacaattctgctgaaggtctttcatgagaattttgaaaatttccttcaaaatcaaactgttttccctcaaacaawgcctgagctatgaaaacaggtttaagttgccaaagaattcacctgtgattgtttgtagtctaacatctaaaggactggaatggaatgtcagaatgtcagtcagaaaatattttctttctatctatctatctatct

SEQ ID NO: 292482 - DNA, 526 bp, Homo sapiens
tagtttatgaactagctcattttggaagttacaaatacaatgtaccacagtgggggaaatgtggtattcacagctgaagacttatctaacagtgacagtgagaatggaataatggaataatgacacataagtatgaatgaagctgtatctctttgcttcaaatttggccaacaaccacacgtgagctgggaacaacatggctacataccacaatcccctacatcctcaaactggtgacatttatcagccagccatttctcacaaatgtggatttttatagataggagttatgaaaagtacatgcacattgaagatccacaattctgctgaaggtctttcatgagaattttgaaaatttccttcaaaatcaaactgttttccctcaaacaaagcctgagctatgaaaacaggtttaagttgccaaagaattcacctgtgattgtttgtagtctaacatctaaaggactggaatggaatgtcagaatgtcagtcagaaaatattttmtttctatctatctatctatct

SEQ ID NO: 292483 - DNA, 501 bp, Homo sapiens
tgagtggaaatttgtacatgataatctaggtgaggctgaggctccctggctgtgacagttccctttgggctattcccctgtacctcctgggtcagctgatctgcctccatccagaaaagatgctgaggaaagtcaggagtggtcagtagcttttgtcatgtgggtagctaattacaagttttgggttaattttttttttttttaattgagacagagtctcgcttttgttgcccaggctggagtgcagtggtgcaatctcggctcactgmaacctccacctcctgggttcaagtgattctcctgccacggcctcccaagtagctgagcctacaggtgcgtgccaccatgcctggttaatttttgtatttttagtagagacagggtttcgccatgttggtcaggttggtcttgaacttatgacctcaagcgattcacccacctcagcctcccaaagtgttgggattacaggtgtgagccactgcgcccggtcaagttttgggt

SEQ ID NO: 292484 - DNA, 568 bp, Homo sapiens
gtcttggcctacacataaaatatgctaacactaacaatagttgatgagctaaaaaataaaactgcaaaaaaatctcatgttttaggaaatgttttaggaaagtttatgaatttgtgttgggccacattcaaagctgtcctgggctgcatgcagcctacgggccgcaggttggacaggcttgccatatgaagagccaacaaacaggcatggtgtggtggctcatgcctataatcccagcattttgggaggccaaagtgggaggatggcttgagttcaggagttcaagaccagcctggacaacatggcaagaccccatctcagaaaaggaaaaaaaaaaaagcaaataaaattttraaagcaaacaaacaaataaataaataaaaagatctggaggaactccaggacagaatgggcagctaggtctccccaagccttggaacccagtatgaaaagctctcagggactagggatgcaagcttcctagtcttaatccctcaattccacccatccctccaccacatactttctcactttggcttctgtgcatatttgcttcatcctttcttct

SEQ ID NO: 292485 - DNA, 568 bp, Homo sapiens
gtcttggcctacacataaaatatgctaacactaacaatagttgatgagctaaaaaataaaactgcaaaaaaatctcatgttttaggaaatgttttaggaaagtttatgaatttgtgttgggccacattcaaagctgtcctgggctgcatgcagcctacgggccgcaggttggacaggcttgccatatgaagagccaacaaacaggcatggtgtggtggctcatgcctataatcccagcattttgggaggccaaagtgggaggatggcttgagttcaggagttcaagaccagcctggacaacatggcaagaccccatctcagaaaaggaaaaaaaaaaaagcaaataaaattttgaaagcaaacaaacaaayaaataaataaaaagatctggaggaactccaggacagaatgggcagctaggtctccccaagccttggaacccagtatgaaaagctctcagggactagggatgcaagcttcctagtcttaatccctcaattccacccatccctccaccacatactttctcactttggcttctgtgcatatttgcttcatcctttcttct

SEQ ID NO: 292486 - DNA, 568 bp, Homo sapiens
gtcttggcctacacataaaatatgctaacactaacaatagttgatgagctaaaaaataaaactgcaaaaaaatctcatgttttaggaaatgttttaggaaagtttatgaatttgtgttgggccacattcaaagctgtcctgggctgcatgcagcctacgggccgcaggttggacaggcttgccatatgaagagccaacaaacaggcatggtgtggtggctcatgcctataatcccagcattttgggaggccaaagtgggaggatggcttgagttcaggagttcaagaccagcctggacaacatggcaagaccccatctcagaaaaggaaaaaaaaaaaagcaaataaaattttgaaagcaaacaaacaaataaataaataaaaagatctggaggaactccaggacagaatgggcagctaggtctccccaagccttggaacccagtatgaaaagctctcagggactagggatgcaagcttcctagtcttaatccctcaattccacccatccctccaccacatactttctcactttggyttctgtgcatatttgcttcatcctttcttct

SEQ ID NO: 292487 - DNA, 1182 bp, Homo sapiens
tttgtttttttgggacagggtcttgctctgttgcccacgttggagtgcagtggcacgatcatagctcactgcagcctcaacctctcaacctcctaggcttaagtgatcctccctcctcaccctctcaagtaggtgggactataggtacgtggcacctcacctggctaatttatttttgtactttttgtagagatggggtttcaccatgttgcccaggcttgtcttgaactcctgagctcaggtgatccacttgcctcagcctcccaaagtgctgggattacaggcatgagccactgcccccagttgtgtgcatagtgatttaacaaatggtgccgtttctcagtaaaatgataaagaaccagctctarttgcagaatgcctgggttagaatccagaaattacttgtaatttctgggactttgggcaagttattaagttagtgcaaaagtgattgtggtttttgccatacttttaatggcagaaaccacagttacctttgcactaacctaacagcaaacttctctgcctcagttttcctcgtctgttaaatgggagtaataaagtttactccaacccwagcatgtaattttaaaatattatcttaatagttaawagagctttatattcagttggagacaagtaatacaattaaaattcatagataataccaagattaattttcatcaatacactcaatctgatttgtcacaaaataatttaaagggctgaactatgaataaaattttaatgtttgctgcatcttttcatgaatgtgctaaaaaaacaaaatgcttgagggagggcagatatatggagagaaacctagtaacatgaatagtggagtaaagagcaaaggacatttttacagttaattttgaagccttacattattaaccaaattaaccatagttaacgaagtacacagttgttattacattcaaatatataggtaagaaaattgtacaaagcaaagaactgaataattgtccaaagtttaacatcaaatatgtaaaaggcatagaaagataaatgaagtctaatcactcttctaagtagctagctgtatttggtaaatacttttaaatgtgtcattccaaaattatacaaaatattttatttctacctgtgatattaagtatttgtgtcctcttgtatacatattcaagttatgtttccacaaaa

SEQ ID NO: 292488 - DNA, 605 bp, Homo sapiens
agcatgtaattttaaaatattatcttaatagttaaaagagctttatattcagttggagacaagtaatacaattaaaattcatagataataccaagattaattttcatcaatacactcaatctgatttgtcacaaaataatttaaagggctgaactaygaataaaattttaatgtttgctgcatcttttcatgaatgtgctaaaaaaacaaaatgcttgagggagggcagatatatggagagaaacctagtaacatgaatagtggagtaaagagcaaaggacatttttacagttaattttgaagccttacattattaaccaaattaaccatagttaacgaagtacacagttgttattacattcaaatatataggtaagaaaattgtacaaagcaaagaactgaataattgtccaaagtttaacatcaaatatgtaaaaggcatagaaagataaatgaagtctaatcactcttctaagtagctagctgtatttggtaaatacttttaaatgtgtcattccaaaattatacaaaatattttatttctacctgtgatattaagtatttgtgtcctcttgtatacatattcaagttatgtttccacaaaa

SEQ ID NO: 292489 - DNA, 570 bp, Homo sapiens
tctcttagctttatgattatctggaatatagttataaccatattaatgccattatctgaattctaacatttgtgtcagctttgaggtcagttttgatctatttatctcattatgggtcatatttttctgcttctttgcatatttggtaattttttgttggatggcagatattgtgaattttatgttgtgggttctgggcattattgtatgcctataagtattcttgagattcattctggtttacagttatattacaagaaaacagtgtaatccttccaggtcttgcctttaagatgtattagatgggactgaagcagatattaatcaagggttaattattccccaccactgatgcaagatcattttgtgtactctaccctatgcttgtgaatcatgaggttttccagtcttgctgataggaataggtattattacccattgtgtgtgggcacagggcactgttaactgcaagtgcaggttacygttacttctaatcctttcaggtagttctttccctagccttaggcactttactcacacaatgtgctgcagtacttgggtgaatttaca

SEQ ID NO: 292490 - DNA, 542 bp, Homo sapiens
atgactgaaagaataggaatatattcctagagtaggtatataaattctagatcacttgaggaaaagaactagcataagagcaaaaaacttaatttaaaaaaaaaaaaggcaagaaaggaaaaaaaacccctaggaaaaacaakacaaataaaatttaaaagtaagacggtaataaaaattccagatttcccaataatcataataaatttggttatctataaatatcacaatcgcaataaatatagtatacataagccaccaattatataggcatattatataggcatacacacacacacacacacacacacacatgtagatataatctcaccagttattatcagatagaatgttttaaaaatccagttagatgcttttatagaaaatataagcaatataatataaatgatatatattatacataatataaacaataaatataatataaagaataaggaaactaacaggattaaaatgtacagataaaagagacacatgaggcaaatcataaccaaaagtcagctggagtaactatatggtac

SEQ ID NO: 292491 - DNA, 590 bp, Homo sapiens
cacaaaacttttaaggaacacatcatgccaaattcaaataaacattttrgaacagaaaataagaaagaaatctatggcttattctataagaccagcataactttgatataaaacaagataaggacaaaacgagaaagaaaaattataataccctgttgttcatgaaaataggtacgaaaagcctagaaagataatatatgatatccatgttgggattactctgtgaaagaaagaacaatttttagaaaatatatatatattaattaacataattatacatgttattcaaactattaacagattttaaaatacggttatctaaacagatgtagaaaagtgttttacaaaatccagcatctatccttacttcaaaaagaagtcagtaaactaagataattttgttaacctgatcatgtatatctacagaaaacagaataaacatcattctaaaccagaaaatatcagaagcatctactttaaaaacaaaaacaaaaataagaatgtctactattgccatttatagtccacattttacagaaccagtccaatatgactagaaaaataaaagttatggtattctgagtataaat

SEQ ID NO: 292492 - DNA, 590 bp, Homo sapiens
cacaaaacttttaaggaacacatcatgccaaattcaaataaacattttagaacagaaaataagaaagaaatctatggcttattctataagaccagcataactttgatataaaacaagataaggacaaaacgagaaagaaaaattataataccctgttgttcatgaaaataggtacgaaaagcctagaaagataatatatgatatccatgttgggattactctgtgaaagaaagaacaatttttagaaaatatatatatattaattaacataattatacatgttattcaaactattaacagattttaaaatacgrttatctaaacagatgtagaaaagtgttttacaaaatccagcatctatccttacttcaaaaagaagtcagtaaactaagataattttgttaacctgatcatgtatatctacagaaaacagaataaacatcattctaaaccagaaaatatcagaagcatctactttaaaaacaaaaacaaaaataagaatgtctactattgccatttatagtccacattttacagaaccagtccaatatgactagaaaaataaaagttatggtattctgagtataaat

SEQ ID NO: 292493 - DNA, 613 bp, Homo sapiens
tgtgtaacatgaacaattgacttattctttctgtgtctcagtctcctcatcagtaaaatgagatagtaacagtggcccttcataaggttctcagtgaatttaacttgtttaacagtcatccatatttcagagaattcctgggcacagaargaactcagtaacttagttgtctacctttactgccagcaccactgtcgccattacacaaaagtacctagcagcatacctggtatgaagtaggtaagcactgaatatttgtggaaaaacccaagcgatcttacatttgggtttttattttaatgggatatgcctttcttattctttgtcatgaatcaattatatattatggaaggcaatagtcatgctattttcctccagtaaaataattctataacccttcatatctgctcttttggccatatattctcagtattacgtaagccaagacagcaggttgaagcaaaaataaatttggtaaaactattaaactacatcatccaaatcagtggagataaatgaaaaaaaaattcctctatgtctcctccctagtgtagagtttttattgatttctcatttcttaacttatatgaagccttgacttttctgttttttc

SEQ ID NO: 292494 - DNA, 613 bp, Homo sapiens
tgtgtaacatgaacaattgacttattctttctgtgtctcagtctcctcatcagtaaaatgagatagtaacagtggcccttcataaggttctcagtgaatttaacttgtttaacagtcatccatatttcagagaattcctgggcacagaaggaactcagtaacttagttgtctacctttactgccagcaycactgtcgccattacacaaaagtacctagcagcatacctggtatgaagtaggtaagcactgaatatttgtggaaaaacccaagcgatcttacatttgggtttttattttaatgggatatgcctttcttattctttgtcatgaatcaattatatattatggaaggcaatagtcatgctattttcctccagtaaaataattctataacccttcatatctgctcttttggccatatattctcagtattacgtaagccaagacagcaggttgaagcaaaaataaatttggtaaaactattaaactacatcatccaaatcagtggagataaatgaaaaaaaaattcctctatgtctcctccctagtgtagagtttttattgatttctcatttcttaacttatatgaagccttgacttttctgttttttc

SEQ ID NO: 292495 - DNA, 613 bp, Homo sapiens
tgtgtaacatgaacaattgacttattctttctgtgtctcagtctcctcatcagtaaaatgagatagtaacagtggcccttcataaggttctcagtgaatttaacttgtttaacagtcatccatatttcagagaattcctgggcacagaaggaactcagtaacttagttgtctacctttactgccagcaccactgtcgccattacacaaaagtacctagcagcatacctggtatgaagtaggtaagcactgaatatttgtggaaaaacccaagcgatcttacatttgggtttttattttaatgggatatgcctttsttattctttgtcatgaatcaattatatattatggaaggcaatagtcatgctattttcctccagtaaaataattctataacccttcatatctgctcttttggccatatattctcagtattacgtaagccaagacagcaggttgaagcaaaaataaatttggtaaaactattaaactacatcatccaaatcagtggagataaatgaaaaaaaaattcctctatgtctcctccctagtgtagagtttttattgatttctcatttcttaacttatatgaagccttgacttttctgttttttc

SEQ ID NO: 292496 - DNA, 1097 bp, Homo sapiens
atattctaaaccatgaatagtaggtaattacaaactagagctttaaccaatttccaagaaggtgttgataaaaatcatctaaaatggggtttttagcccartcctgaaccaccccctacttgaggcctcacttcagtgctctgtacacatatggggcaattacatctggaagacaatgaagcagcaacttggagctctaattaaagacagaaatgggagcacaggattaaagccaaaattaaaggggtctattttcatttgagttgtacatttttccagtatcttctaccccagttctagcccaaccaatttactgaaaagtatgtaattcagaaacagatgaaaacttagtcattattttaaatactgttaagtactgggtgctattaactagtgggtagagctatggaaaattcaagttctgaccaacactgtcccatgctctgtataaatcataggcaatcagtgaccatagttagttactagactcttttttctagatgctaactatacaattgcttagtggcctccagaaataccctgcactawatattctaaaccatgaatagtaggtaattacaaactagagctttaaccaatttccaagaaggtgttgataaaaatcatctaaaatggggtttttagcccagtcctgaaccaccccctacttgaggcctcacttcagtgctctgtacacatatggggcaattacatctggaagacaatgaagcagcaacttggagctctaattaaagacagaaatgggagcacaggattaaagccaaaattaaaggggtctattttcatttgagttgtacatttttccagtatcttctaccccagttctagcccaaccaatttactgaaaagtatgtaattcagaaacagatgaaaacttagtcattattttaaatactgttaagtactgggtgctattaactagtgggtagagctatggaaaattcaagttctgaccaacactgtcccatgctctgtataaatcataggcaatcagtgaccatagttagttactagactcttttttctagatgctaactawacaattgcttagtggcctccagaaataccctgcacta

SEQ ID NO: 292497 - DNA, 1179 bp, Homo sapiens
gttaagacgccacttccctctctgatagtttctaattcagttgatcttgacacgattgtcttcataagcttatacaaccagcatttatgtttatttttctttctccagctctgtttcccatccactcttgattcacatctctctccttccttttccccattcttgctcattattttctctccttcctagtttcttccagtcccaaagatgtgtgtgggactggaagatggaagatgtagatgtcatgtccaaatgaactaaatattcacacacatctaaatatttgcatttcaagttagaattataaggaatggattaggaaaatasaggtttagagggtagcctaatggtagaattacctcatttgcaatctgttgggggtatatgtgggccttctttgcatatttgaaataatacttcatagaagcaaactatgctggtcactagaaaaaaataaaaagtttttttgaactgatttgcccacaacaccttcaatttctcctgggccaatactctactacccttaggctatgagggcaggtgataattctattaattaaaggcagttttgatctggaaagtagatcacttagacttcgtaagggccagtcaaggtcttaaactctttcttgatggtattggwtagctgcaaaacaaaataaaacacctaacaataatcttaatcaaggaggtgaaagatctctacaaggagaacatagatgacacacacaaagcatagatgacacaaacaaatgtaaatacatcccatgctcatggattggaagattcaatattgtgaaaatgaccacactgcctaaagcaatctacacattcaatgcaattcctattaaaataccaatatcatttttcatagaattagaaaaaacaatcctaaaattcatacgaaacaaaaaaaaagawcccaaatagccaaagcattccttaacaaaaagaacaaatctggagtcatcaaattccttgacttcaaattacactataaggctattgttatgaaaagagcatggtactggtataaagtagatacatagatcaatagaaaagaatagagcattcagaaataaagccaaatacaaccaactgatcttcgacgaaagcatacaaaaacaacttggggaaaggacacttattcaataaacagcgctgggaaactggatagcc

SEQ ID NO: 292498 - DNA, 543 bp, Homo sapiens
atggtttacaaaggggctatatatctttagaagatcaaaataatctttacattatgtatgttttccttctttttatataatctaatgcaatttgtagtaattattggttctgattatttcagttcaactgggaaaaaaccctttgatgcagcttttatttttattttttgtataagctatgcatatgtatcttttggctcttgtgagtttggggactggttttccagcataatttgmgtaagatacctatttttgaattggctaataattataagctgaattttgttagctttaatccagcagaagctggagggtgtagacgtgttagaacagtacaattggatgctcactcctttcatctgtatacaaagcaatttcattgaaaaagaaggtaaatgattaattccttggcttactgatttttcattgaagggttataatcatttataaaacttttttttaagcttctgaaagttctttgaaaaccagatattcccctctccactccccccaaaaaagtcccacactttttgaagtattttg

SEQ ID NO: 292499 - DNA, 587 bp, Homo sapiens
cttcattgagcctaatttcatgcttctaaaaacagcataagttctgtgggtagtgttcagtatgcttcagtgaaccgaatgcatcctagtggcctgagaagactcctactgcttctaaacatgtatgaataatggttgccacctgcaagtagcttaggcagtgggcaatcatacttcaattctaaagggtgtggaagggatgagtattttctgtttgaagctcaagctagattaaatgaattcttgatcttaatctactttgaactctacttggaacacatcatgagttgttttggcttactattartttttaaatacaaatacagtgctcttgtattgaaagcataggattttgtgtaggagaaaatttgaatgtcttgaaaacattcaaaggagagctcagggaaataaatgaaagctggtggatttctaaaaatctttattgaggattaatattagaaacttgctgtacagtctaactgatttttgactttgtttctgggctattggtttcatataagacactattagtaatttcagaacaaataatatggccacatttcttgttcctaataaattggtactac

SEQ ID NO: 292500 - DNA, 625 bp, Homo sapiens
tggggtattagtccattctcacacttctgtgaagaaatacccaagattgggcaatttataaaggaaagagktttaattgactccagttgtgcagtgctggggagacctcaggaaacttacaatcatggtggaaggggaagcaaatacgttcttcttcacatggctgcagcaagaagtgccaagtgaaagggggggatccccttataaaaccatcagatctcatgaaaaatcactcactatcatgagaacaacatgaaagtaactgcccccatgattaaattacctcccactgggtccctcccatgacacaaggggattatgggaactgcaattcaaggtgagatttgggtggggacacagagctaaaccatatcattccaccatggccctgcccaaatctcatgttctcccatttcaaaccacaatcattcctttccaacagtcccccaaagtcttaactcattctagcattaacccaaaagtccaagtccaaagtctcatctgagacaaggcaagtacctcctgcctatgagcctgtaaaatcaaagcaagttagttacttcctagatgcaatgggggtacaggcattaggtaaatacacccattccaaatgggagaaattggc

SEQ ID NO: 292501 - DNA, 625 bp, Homo sapiens
tggggtattagtccattctcacacttctgtgaagaaatacccaagattgggcaatttataaaggaaagagttttaattgactccagttgtgcagtgctggggagacctcaggaaacttacaatcatggtggaaggggaagcaaatacgttcttcttcacatggctgcagcaagaagtgccaagtgaaagggggggatccccttataaaaccatcagatctcatgaaaaatcactcactatcatgagaacaacatgaaagtaactgcccccatgattaaattacctcccactgggtccctcccatgacacaaggggattatgggaactgcaattcaaggtgagatttgggtggggacacagagctaaaccatatcattccaccatggccctgmccaaatctcatgttctcccatttcaaaccacaatcattcctttccaacagtcccccaaagtcttaactcattctagcattaacccaaaagtccaagtccaaagtctcatctgagacaaggcaagtacctcctgcctatgagcctgtaaaatcaaagcaagttagttacttcctagatgcaatgggggtacaggcattaggtaaatacacccattccaaatgggagaaattggc

SEQ ID NO: 292502 - DNA, 624 bp, Homo sapiens
tgcgtatgaacacgcacgccaggcattgttctaacttgccttcgttacatactagctccgttatatcctcacaactacccttagagggaggtatgagtattggcccggcgcrgtggctcacgcctgtaatcccagcactttgggaggccgaggtgggcggatcacgaggtcaggagaatgagaccatcctggctaacacggtgaaaccccgtctctactaaaaatacaaaaaattagcctggcgtggtggcgggcgcctgtagtcccagctactctggaggctgaggcaggagaatggcgtgaacctgggaggtggagcttgcagtgagccgagattgggccactgcactccagcctgggtgacagagcgagactccgtctcaaaacaaacaaacaaacaaacaaacaaaaaaaaaaacaaaaaaagggaggtatgagtattatccccattttcatgggaggacagtgaaaatagcagagattaagtaatgtgctgaagatcacacacacagaaaggagcagagccgggctgagataggcaggctgactctggactctgttcttttaaccaaatgtgtgtatctttctggagtgaactcctgactttatgtacatgaactacat

SEQ ID NO: 292503 - DNA, 578 bp, Homo sapiens
actgactggtgtccagtatttagaaacaatttttttttcatagattctgtcttctttatttttagttgtttaaagtaggaaggtaaatctgctctattacttcctcatggccacagattgaacttccttttcttcatttttaaagcattttacagaagtaatattgacttgtaaataataaactgcatatatgtaaagtatacaatttgaagctgggcacagtstgatatgtttttgactgtgtccccaccagaatctcatcttgaattcccatatgttgtggaagaaacctggtgggaagtaattaaatcatgaggacaggtctttcctgtgctattcttgtgatagtgaataagtcacatgagacctgatggtcttaagaaaggggagtctccctgcacaagctctctctctcttgcctgctgtgatgtaagacatgccttctgccttctgccatgattgtggggcctccccagctatgtggaactgtgagtccattaaatatctttttctttgtaaattacccagtctcaggtatgtctttatcagcagcatgaaagcagactaatacagtaaat

SEQ ID NO: 292504 - DNA, 578 bp, Homo sapiens
actgactggtgtccagtatttagaaacaatttttttttcatagattctgtcttctttatttttagttgtttaaagtaggaaggtaaatctgctctattacttcctcatggccacagattgaacttccttttcttcatttttaaagcattttacagaagtaatattgacttgtaaataataaactgcatatatgtaaagtatacaatttgaagctgggcacagtctgatatgtttttgactgtgtccccaccagaatctcatcttgaattcccayatgttgtggaagaaacctggtgggaagtaattaaatcatgaggacaggtctttcctgtgctattcttgtgatagtgaataagtcacatgagacctgatggtcttaagaaaggggagtctccctgcacaagctctctctctcttgcctgctgtgatgtaagacatgccttctgccttctgccatgattgtggggcctccccagctatgtggaactgtgagtccattaaatatctttttctttgtaaattacccagtctcaggtatgtctttatcagcagcatgaaagcagactaatacagtaaat

SEQ ID NO: 292505 - DNA, 578 bp, Homo sapiens
actgactggtgtccagtatttagaaacaatttttttttcatagattctgtcttctttatttttagttgtttaaagtaggaaggtaaatctgctctattacttcctcatggccacagattgaacttccttttcttcatttttaaagcattttacagaagtaatattgacttgtaaataataaactgcatatatgtaaagtatacaatttgaagctgggcacagtctgatatgtttttgactgtgtccccaccagaatctcatcttgaattcccatatgttgtggaagaaacctggtgggaagtaattaaatcatgaggacaggtctttcctgtgctattcttgtgatagtgaataagtcacatgagacctgatggtcttaagaaaggggagtctccctgcacaagctctctctctcttgcctgctgtgatgtaagacatgccttctgccttctgccatgattgtggggcctccccagctatgtggaactgtgagtccrttaaatatctttttctttgtaaattacccagtctcaggtatgtctttatcagcagcatgaaagcagactaatacagtaaat

SEQ ID NO: 292506 - DNA, 655 bp, Homo sapiens
caatccccactatgtgtcatcccaccttccagctcccattgctagttagtcactaatatatcactatgagttagtttgtatcttttaaattttacgtaaatgggattataaggtatgtattcttttattttgccttgttttaattaacgttattgtattagttcatttcacattgctataacataatgtctattgcctgaggcagcataatttataaagaaaagaggtttatttgactcacagttctgcaggctgtacaagcatggcaccagcatctgctcagcttctggtgaggcctcaggaagtttactgtcatagcagaagacaaagggggagctggctagtcacatgatgagagagggagctagaaagagtgggtggargtgctaagctcttttaaataaccagctcttgtgtgaattcactaccatggtgacagcaccaagctgtccatgaggtatctgatcccaagactcaaacacctctcactaggcccacctccaactttggaggtcacatttcaatgagatttggagggggcaaacatccaaagaatatcaattattatttaaagattcattcatattgtgtttatgagttatttatttatttttattgcttgctagtattctattgtattcgttactaaaatgtg

SEQ ID NO: 292507 - DNA, 451 bp, Homo sapiens
tccaggaagaccatcttcccattccgtctcctttccagctccccatgcatcccatccccaccactcaataaaacccccacattcaccatcttcaagtctatgtgtgacctggttctttctggatgccagacaagaacctgggtaccaagagggcgttgagctggttaacacttaagccgtctgtagattgcaaagctaaaagagtgcactgtaacacacaccatgctcacktgggctttaggagttgcaggcacccacccttatatactgctgtggggccagagccccaaagcactcacccaggctcatgcacctgcccgtctgcatgctcccccttctgtaaggagtttgagcagcagcggaggctgcggccaaactgacaagccacacccttgtcacataccctgtgagggggggtcagggaactttcccatttcactgtcatcaaaat

SEQ ID NO: 292508 - DNA, 631 bp, Homo sapiens
aaattgaaccaagttagctattattctgagatggtgggaggttgaaaaatgagggtcaagaagggaggcactggtaccagatggtcagaaagatgcgcagagtgtgtaaaatggataagaaaggaagtagatccagaagggagaatgaggtaggtaatggctggggtgaaaatgtagggccaaaagtctggaggtaccataaggtcagaagcaagttggaataatggaactgaacactgcagataaagtcaatcttgaattttgaactttcagtctgggcaccgtggctcatgtctgtaatctcagcattttggaaggccaaggtgggaggattgcttgagcttaggagttcaagaccagcctgggcaacrtagcaagatcctgtctctactaaaaataagaaaaaattagttgggtattgtggtgtgcacctgtagtcctagctactcgggaggtttcggtgggaggatcacttgtgcccaggagattgaggctgcagtgagctatgatgacaccactgcgctccagcctgggcaacagagtgagaccctgtctcagaaaaaaaaaaaaagaagtttggactttcagaggagaccagatttggttgggagggaatgccgagacaacaaac

SEQ ID NO: 292509 - DNA, 584 bp, Homo sapiens
tacaccttgctctgtaaagtgctatgggttttagcaaatgcataatgtcatgtatccaccatcatagtattataaaggatagtttctttgacctaaaaatcccatgtttcaccaattcaactctytcctttacctttcatctttttactgtctccacagttttgtcttttgcagaatgtcatgtaattagaattatactttgtgtgtgtgtttgtgtgtgtgtggtgggaagaggctctccagttttggaaaggagggtgcagagaagaatttaagacttttgtattttaatttgacgaaaccttgagtgtggatttttttttaatctttacacttacacctgttatttgtacatttcttctgaatttttgtgtgtattttcttcagagtgtttagaattatggatgacgataataatcgaacccttgattttaaagaatttatgaaagggttaaatgattatgctgtggtcatggaaaaagaagaggtggaagaacttttccagaggtttgataaagatggaaatggaacaatagacttcaatgaatttcttctcacattaagagtaagtggccccattaatc

SEQ ID NO: 292510 - DNA, 584 bp, Homo sapiens
tacaccttgctctgtaaagtgctatgggttttagcaaatgcataatgtcatgtatccaccatcatagtattataaaggatagtttctttgacctaaaaatcccatgtttcaccaattcaactctctcctttacctttcatctttttactgtctccacagttttgtcttttgcagaatgtcatgtaattagaattatactttgtgtgtgtgtttgtgtgtgtgtggtgggaagaggctctccagttttggaaaggagggtgcagagaagaatttaagacttttgtattttaatttgacgaaaccttgagtgtggatttttttttaatctttacacttacacctgttatttgtacatttcttctgaatttttgtgtgtattttcttcagagtgtttagaattatggatgacgataataatcgaacccttgattttaaagaatttatgaaagggttaaatgattatgctgtggtcatggaaaaagaagaggtggaagaacttttccrgaggtttgataaagatggaaatggaacaatagacttcaatgaatttcttctcacattaagagtaagtggccccattaatc

SEQ ID NO: 292511 - DNA, 583 bp, Homo sapiens
gacgataataatcgaacccttgattttaaagaatttatgaaagggttaaatgattatgctgtggtcatggaaaaagaagaggtggaagaacttttccagaggtttgataaagatggaaatggaacaatagacttcaatgaatttcttctcacattaagagtaagtggccccattaatcagtgtatctgctgagtttggctttcacgtrgtttgggttggctaccttgaggttttgtttttacaagttgttagtacactgtggggagggggataagcagaaaactgtgaacagacttaggaatttttggagcaattgtagtgtctattacataatagcacacaaatattatttcacatcgttgaggggaatgagatattttatcacataggataccaaaaaagctcatttgcttatgtatgtctctgtatgtattcttctatttttgtagcctccaatgtccagagccagaaaagaggtaatcatgcaagcttttagaaagttagacaagactggagatggtgttataacaatcgaagaccttcgtgaagtatataatgcaaaacaccacccaaagtaccagaa

SEQ ID NO: 292512 - DNA, 573 bp, Homo sapiens
ataaataagaaaatcactcataaaaactccatgtgtaaatgagggctaaacagagtgtcacctaatttatcaatgagatagaactctgagatctgctgctctgagagatggctcccagagtagaagaccttgagtcggcattgatggtggttgggatttggataaggagagaaaaggggaagggagaagggtacactctagggagtagaaacatttaagccaggataattatkgcagagggtatttgtgggaaactggttgaatttgtgggtgactgctagaaaggttgttgctttcctgggatattttctttgtatctcaagatacttttatgtactgtaaatttaacacttcccatgaatatttattatcatttttttcttacagaggaaaatttgaaaacttattaaatgttctagaatacttggcgttgcagtgcagtcattttttaaatagaaaggatatcatggattccttaaagaatgagaacttcgacatggtgatagttgaaacttttgactactgtcctttcctgattgctgagaagcttgggaagccatttgtggccattct

SEQ ID NO: 292513 - DNA, 505 bp, Homo sapiens
ccaggttgggtctaggaattctgtccaggaactgggtcctggaattgggaattgtagggatctacttactctattccctcccttcctaaagcaggagtctcgcccatggccaccccaccccaagcctgtgagaagtactgcctggctactgctgatgtttattttaggcccgagggctttkgaattagcaggtggtgaatcctgccaggcttaggtctctcccttcagggcagcaggttctcttctgacccagggcatgtctagcaatgttgtccaggagctaaggcctagatgtggagatgttaggattctccttggtgcttaattttactgcagctaaactagtacccacattgcaagacaaagactttttaactcttccctctcctctcctggaggaaggagtctctcctggagctctgagctgccctgcctggagttgggggaggggtgacaccagcactcccttggctgccctggctggtgtctcaccaggtcatgtgca

SEQ ID NO: 292514 - DNA, 446 bp, Homo sapiens
tcttatttacaacagctcacccaagcatccgtctgtttgtcacccacggcgggcagaatagcataatggaggccatccagcatggtgtgcccatggtggggatccctctctttggagaccagcctgaaaacatggtccgagtagaagccaaaaagtttggtgtttctattcagttaaagaagctcaaggcagagacattggctcttaagatgaaacaaatcatggaagacaagaggtatgcagctccttggggttgtggtcataatgacgaatgaaggcaaaaacactaagggcactatgggagtctgtttttttggttttgttttgttttgctttagattaaaactgtattttcyaggacatgggataatatgtgtgtgatgccaacagctgacctgtgtcctctgagagcaagactagagcatttaagttagatgctaagaatc

SEQ ID NO: 292515 - DNA, 593 bp, Homo sapiens
ccatcaccactgtgtgaagttggcccattgggcagaacatctatgtccagtataagtcaagagatggccattcactggctggccagctgtaagttacatctgggaaaccacaagagatcccatctgtttgtagtttcccagagccatctgtaaaccaagaaatgccaagtggccttggcattcagcctgcaacagtccattgttagtcttcatgcccygaaggcctttttgaccagtcaaactgggctgttacattgcaataggatgttttgtatcaaatccagaattaaaaaagcaatgtgcacttctgcactcagtatgcggtacagcttttgttgaataacccactgggacttgggtagcttaggtgataggcaggagtggatatgtcccattgttatggctcaaattcttggctgtgaggggcagagcttctcaggcagccgtgatgttctgtaccagagcagccaacatgtcaatgcctgtaataatgcactcaggggtaggaactgcagtcactgccacacaaaatggcacaaaaagccttatccaaagcagataaacaccttcagtcactgtgttcatcctaaaac

SEQ ID NO: 292516 - DNA, 652 bp, Homo sapiens
ctaaagacaaaaacaagtacaaataaatcttgaagtctaaccggtgttgtagcattgtttaaatcatgacgaaatatggattacttagaatttactacttcaactattgaaaagtgcacaattcagtggcattgcatagagtcttcttgttgtgcagccatcaccactatctatcttcagaactgttttgtcaccccaaactgaaactctttacttattaaacaataattccccttacttcttcyccctagctcctggtagtctgcattctactttctgtctccatgaattgactattctccatacctcattaagtggaagtaggtttggttttaccagtagcatgagttagaaaatttggctctgtgttctgattgtaggattgagcaaatgtgtaaatatattgaagatgtcaggagtcaggttgctcactgtcagaaagaagacacaatataggaagaaagaaaactggcaggaaccctgtggtattgaattgaaataatggaacttgagttattagtatgaactcatggtttttaataaatacatagaaatagatgtaaatatatttgtgtatctgtacacttcagggcctagaacttcttttctggctaaaaagtaagaaagtgcttaaaaacagaataaggatgta

SEQ ID NO: 292517 - DNA, 652 bp, Homo sapiens
ctaaagacaaaaacaagtacaaataaatcttgaagtctaaccggtgttgtagcattgtttaaatcatgacgaaatatggattacttagaatttactacttcaactattgaaaagtgcacaattcagtggcattgcatagagtcttcttgttgtgcagccatcaccactatctatcttcagaactgttttgtcaccccaaactgaaactctttacttattaaacaataattccccttacttcttccccctagctcctggtagtctgcattctactttctgtctccatgaattgactattctccatacctcattaagtggaagtaggtttggttttaccagtagcatgagttagaaaatttggctctgtgttctgattgtaggattgagcaaatgtgtaaatatattgaagatgtcaggagtcaggttgctcactgtcagaaagaagrcacaatataggaagaaagaaaactggcaggaaccctgtggtattgaattgaaataatggaacttgagttattagtatgaactcatggtttttaataaatacatagaaatagatgtaaatatatttgtgtatctgtacacttcagggcctagaacttcttttctggctaaaaagtaagaaagtgcttaaaaacagaataaggatgta

SEQ ID NO: 292518 - DNA, 534 bp, Homo sapiens
taacaagcagtaaaatgaaatggtgattaagaaattacaaaaaaaaaaaaaaaaaaaggccaggaccagacagattcacagctgaattttatcagacattcgaagggttgytaccaatcttattcacactattccaaagacagagaaagagggaatccttcctaaataattctatgaggctgttattaccctaataccaaaaccaagacaggacatagcaaagaaaagaaaactacagaccagtatctctgatgaacatagagatgcaaaaatccttaacaaaacactagctaactgaatacaacagcatatcaaaaagataatccaccatcatcaagtaggattcacaccagggatgcagggatggtttaacatctgcaagtcaataaatatgatacatcacatgaacagtacaaaaatcacatgatcatctccatagatgcagaaaaagcatttgacaaaatccagccttcttttgattaaaccctcagcaaaatcggcatagaagggacatactttaagctgataaaaacc

SEQ ID NO: 292519 - DNA, 581 bp, Homo sapiens
tatcctaaagtgtatatggaatcaaaaaagagcccacacagccaaaccaggactaagcaaaaagaagaaatctgaagacattacattacctgacttcaaactatactataaggccatagtcaccaaaacaacatgacactggtgtaaaaatagacatatagaccaayggaacacaatagagaactcagaaatgaatccaaatacttacagtcaactggtagtcaacaaaacaatcaaaaacaaaatgtggggaaaggacgccctattcagcaactggtgctgggataactggcaagtcacatgaagaagaatgaaactggatcctcatctctcaccttatataaaaatcaactaaagatgcatcaaggacttaaatcaagacatgaaaccataaaaattctagaagataatgttggaaaaacccttctggacattggcttaggcaaagacttcatgaccaagaacccaaaagcaaatgcaacaaaaaccaagattaatagatgggacctaattaaaccaaaaaagcttttgcacagcaaaagaaacaattagcagattaaacagacaacccacaaagtgag

SEQ ID NO: 292520 - DNA, 547 bp, Homo sapiens
acagtcccccaaagtcttaactcactctagcattaacttcaaagtccaaaggctcatctgagacaaggctagtcccttctgcctatgaccctgcaaaataaaaaacgttagttacttccaagatacaatgggggaataggcattaggtaaatactcctgtcccccatggaagaaatctgccaaaagaaaggggctacaggccccatgaaaatctgaaacccagcagggcagtcattacatcttaatgttccaaaataatatcctttaactccatatctccatatcatacatccaggggatcccaaagccttgggcaactgcagggctgtggctttgcagcattcagcctacaagactactctcacaggctggtgttgagggcctgtggcatttccaagtacagggtgtcagatgctggtggatctacaattctggggcctggaggrcagtggtcctcttctcacagctccacaatgaagtgccctggtgggcactctgtgtggggaatccaatcccacatttatcctctgctttaccctagtagtgg

SEQ ID NO: 292521 - DNA, 596 bp, Homo sapiens
acaacctatgctcacgtgtaagcaagtaagttaccttataaggtaatttaatttgtaaaccttatataaggaacttatgtttagaagggaagctgtgggaaaatttggaaaatttgcagcttagctatgttgtagagaagaaaagattttcagggaaggaattcaaggaggctgctgaaatatgcacaattaaaaggatggaaaatgccggtagtcaaaacaatggggaaaaggacttgaagacgtttcttagaccttcatggaagcccctcctatcacaggyaaggaggcctagaagggaagaatggtttcataggccaggtccagggccttaccatcctgtgcagcatcaaacactgcttcctgtgtcccagctgctccagcttcagccatggctaaaaggtgtccaggtacagctcaaaccactgcttctgagagtgcaagtaagtcttggcagcttccacaaaatgttatgactgggtgcacagagtgcaagagttgaggtttgggagcctctgcctaaatttcagaggatgtatggaaaagcctggatatccaggcagaagcttgttgtaaaggtgaagccctcacaagga

SEQ ID NO: 292522 - DNA, 610 bp, Homo sapiens
cttgtccctacacaaatctcatgtcaaattgtaaatccaatgttgaaggtggggcctggtgtgaggtgactgaatcatgagaggagattttcacctgggtactgtgttgcaatagtcagtaacttctcaatagatttggtagtttaaaagtgtgtggcacctccccctgccttcctttttctctgcccatgtaattattggctgattcctcttcaccttccattgtgattgtaagtttcctaaggcttcctcagaagcagaaacaactatgcttcctgtacagcctgcagaactgtgagccagttaaayctctttaaaaaattacccagtctcagatatttcttaatagcagtacgagaattttctaacataaaaaattttgatggggcatggtggcccatgcctgtaatcctagcactttaggaggcctaggctggtgtatcactttaggttgaaagttcaagaccagcctggccaacatagtgaaaccttgtctctacaaaaaatataaaaattagctgtgcatagtagtgtacacctgcaatcccagatactcagatggctgaggcatgagaatctcttgagcctgtgaggcggaggttgcagtgag

SEQ ID NO: 292523 - DNA, 549 bp, Homo sapiens
tataccattctattttggctttatccagtggcatctattgtaggtctgccctgggggtaacaagtcagtcaatcattacaacatagtcatgagggattttgtcgaaaagtcccagcaagagagtggctggattaagatcactgtagtgggaaatagttatattgggagataataaaagccaaaatttataagaggctgaccagctgacagatcttgagtatgatgacagtttagaagggtatccagagaatgcagcacaaaaatggtaaggggrtaacccataataatttcttcaacagacttgtacagaagggcaattgctgtgattgctgtcatacaaggaggcagcccttgagccacagcgtccagctgttggctacaattgccaataggtctctgataatcaccatgtttctgggtcagtactccaaatgcagtacccacaatttcgtgtgcaaaaagggagaaaggaaatttgtagtttgggttttctaaagctgaggcatcagttagaatttcctttatttgttgtacagctgattgtccctc

SEQ ID NO: 292524 - DNA, 593 bp, Homo sapiens
agtagctcctccattctggctgtttagtttttgtgcctgcgttttccatcctggttcacagttacactaatttgggcatatcaaagatccccatttaggccattgtaacttagaatctgctttagttatagtggtccacttggttaaatatttgcatgactatttgccacaatacccatccggagtttctgaagggggaactttatgttcctccggggtcttagagaccttattccccataacttagagttcctttttggatttcaccaagttgggatgtgtgttggaccccaaatgtgctgcttgcagacctagcttttcagggccatcacaacctaaactggttcagtccacmcatgttgcggctacctggcatatgtgtcaggggctgaaggtgtgggaggggtcagctccttatatgcacctgtcagctgagattagaccctaagtatgttctcctgagggggaaacctattcagaggcactgaacatcttagggagtgcttctctccatcaccctcatgtgattctcagtcacctgagaatgccacaaaaggctgagaggagcaaggtgctgcctatttgtttttgca

SEQ ID NO: 292525 - DNA, 1149 bp, Homo sapiens
agtagctcctccattctggctgtttagtttttgtgcctgcgttttccatcctggttcacagttacactaatttgggcatatcaaagatccccatttaggccattgtaacttagaatctgctttagttatagtggtccacttggttaaatatttgcatgactatttgccacaatacccatccggagtttctgaagggggaactttatgttcctccggggtcttagagaccttattccccataacttagagttcctttttggatttcaccaagttgggatgtgtgttggaccccaaatgtgctgcttgcagacctagcttttcagggccatcacaacctaaactggttcagtccacacatgttgcggctacctggcatatgtgtcaggggctgaaggtgtgggaggggtcagctccttatatgcacctgtcagctgagattagaccctaagtatgttctcctgagggggaaacctattcagaggcactgaacatcttagggagtgcttctctccatcaccctcatgtgattctcagtcacctgagaatgmcacaaaaggctgagaggagcaaggtgctgcctatttgtttttgcawaaagactgttggtgaaaatttggggaaatgcttaatgcatgaatgtatagggagataaaataataaccctattagttttgtttgcttaataaaattcgagaccaacactttaggtactcagagtgccagaggcctcagcacaatttctctgtagctctgagatactcagtttttttttaaagccttttttcattaaccagccttcatgcaaataatcttcttctttgcatttcctcagcactggatagtcttttggtatgttccttcatcacttcaggtgtctgggtttccatgccccaataaggagacggctctccaggaaacacaacatctgcttgtcttatctcctccaggatgctctgtgctgagcccatcctgtcacagtggcagaggctgcagaactgaactagaacagccaagagcactgtgggaggcattctaaggtgggagggtgcctttggawcaatatgagcaaaggatcagtttcacctgatagatggttcttttgtaggacagaaagtcttaatactaaataaatgttacttgatgtgttca

SEQ ID NO: 292526 - DNA, 459 bp, Homo sapiens
aaacaaacccagtaacatccatacatttgctgagcttctggagcatatgttgcctatttcccttatttgggtcttagcataaactgcccagatagacacagagagagagagagagagagagagagagagatggatattatcctcagtttgatcatgaattctgtgagggcagaaaatcttatactgctctgtattttccagtcctgagaaccttgcatatatttcatttctttaaacctcagttatctcaactctaaaatggggacaataattgctacggtctgtatgtttgtgtctctccaaaattgatatgttaaaatccttacccccaaggtaatggtattaggaggtagggccattgggaggtgattaggtcatgaaggggaactctcctgaatgggattagtgcctttataaaagaggccrcagcgagctagttagttcttccatcatgtgagg

SEQ ID NO: 292527 - DNA, 538 bp, Homo sapiens
ggaggaattcttagataggattatgaggaaatgatcacagtgctgattttggtaaaggaactgaaggtcaacttagtaaaatgcataaagaaaaacagcaaatacacactatggaatattttgtagcagttagaaggaacccactagatatgcccacagcaaatggatagatggtaacaaggtatatttgagtttttttataagacaataaatagcatagtatttatgacacaatactattgatataaaataaactacattagcaaacaaaaacattctatctatctatctatctatctatctatctatctatctatctattttkttttctccaaggacatatccaaatgcgaggatacatgtcaaagcacaacagagtggttactatttttttattaacatgtttttttaatgggtgagtaagacagggaagtggggataaaggaaatttgctgaggtaatagctttctattgctgcataataagctaccacaaacttagaaagtttggaacaatacctgtttattagcttacaatt

SEQ ID NO: 292528 - DNA, 580 bp, Homo sapiens
atatgtgcacatggatttgaggattcttttaaattttgctgcaacccaccagccatttgcaggtgataagttgaaaaacacttgatgtctrtaagttcactttttattggtaattaaggaacttttggagaacaccatggagattaaagaggtcttatagaaaatataacccaatttcctcatttgcagatgaggaaactgaggcccaataaaaagtgaatgagatcacagaactaaagccagaactaaagtcttcctcccagggctgtgcttgcatgctctgtgtccaagtgggcaattatacgtccccagggtgaggttggccacttagagagctttcagaagtgaattttctactcagtgttagagaccaaatggagcatcatgtggcttttcattttcaaggcattaaaataaaagaaatcaggatttaaggcatttccccagcatggaagggagaaataggatctctcaattgtggaacatggaatattccatggtgataagttgtagattccaaggatagagaggagaccaggagtgagggaaaaatatagtagttatttttcataaacaatat

SEQ ID NO: 292529 - DNA, 608 bp, Homo sapiens
agatttacatgatataatgttaaatggaaaagagaaaggtggagaaaaagtcacatattttaaaaaatgagatgatcagggacatctgaatactgactgactatttgataaattaaagaattatggctaatttctttaggcgtgaaaagagcattgtagttgtatttttttttaaaagagaatctgtgtttttggagatacatactcaaatattttctgatgacattatctgctgtctggaatttgccacaaaataatccaggatgtggtttgggggaagtgggtgggtatagattaaatgagattgtccaagaattgatcattgctgaaaatgggtgaggagtacatggaggttcattataccattctatttttgtaatgtttggtattttccatrataacaatataaagaactcctattaggatgtttaatggaaaaggcaggaacttgagacccttgagtattcagggtttagagagggaagaatgaagagggtgaggagaattccattctgtggaatcataaatatttcttgactgactaaatgataaattgcaggtatgaatgaattgataaccaaacctgattcttctaattctagtgcaag

SEQ ID NO: 292530 - DNA, 547 bp, Homo sapiens
tgcgcatttttcacccaaggatactgaaactgagggaggcccactgacttgctcctagtcactatggcaggaccagacctgggtgctcatcatctttccatagaatcacactactctttgtttgaaggatggcaaattggcaatgaatttgcagacggagaccaggaggacccatgagagagcacaggacatccatctggacattttcttsgtatgtgaactgatggatgctggtccacaccagctgtgaaaggaaagagaagaaagagggtctccattaatatcatcagaactttagaggaatccttcctggatagttagaggagatggaattaggactggtcctggatacctttgcgatctgggtaaaacttgcctttcctgctttcaggactatgcgctcctctctccttcatttgccaggaccccaggatatctgccttgctcattgtgcaacatctttaacgttgatgtcctagctaagtctgttccccataatcctctaaaatcttctttttttagctgaggcttctataatagaacactg

SEQ ID NO: 292531 - DNA, 556 bp, Homo sapiens
atgaaccattgttatatttaacaatgtggatgattctcacacagttcatactgaatgaaaaaagtcaaacacaagagttgatattgtgtaattccatttatttacatgaagtccaaagccaggcaaaactaatctatgtttatgaatgtcagaataacagttatctttgggataggtgatgaccaagaggtgtgtgaaggaagcttctctgttggacagaatattctctttttgatcttgaggkgagtaacttggtatgttctctgtgtacaaattcaacgagctgcccacttaaaatgtgttcatttttcgatatattcatttaagcttaagaaaccaacttgcctaaaactgaacttctaattctcccatcaacatctgtcctactcacaatcactactcacagatctttatttttgagacggagtcttgctctgtcacccaggctggagtgcagttgcaccactatggctcactccagccttgactccctgggctcaagtgattttcccatctcagcctcccaagtagctgggaccacaggcacatatcacca

SEQ ID NO: 292532 - DNA, 561 bp, Homo sapiens
ataggcttggctttattctgagtcctgagacaagaagtggggcagaagaaagacctttcccctcaattttagggcaaaattcctggatgatgctgtcatatcccttgttttgctggtactcacagaactcttagggctctcagctatcccagggattcacatgagaatcaagtctagatttctagaaattacttcactttttttgtactcttttccacaactycccttctaatcaggtttgaaattgcttacaataaaagacacatattgaataggaccaatagtacaaacaaaaaagataaatagcgtatgtgggggtatggggtgtaataagccaaaaaagctttttgcatggatttactgcaattggaacatttacttctgatcatcctggaagtggaagagaaaatgaaacgtagttgttatgcctgattaaaacttgccccacatttggttatgtgaacatgggatttttagagggatacaatccaagaggaacctatctcaaaaatcctcttgaaaggacattaaattcatgactggatttttatttttacaggc

SEQ ID NO: 292533 - DNA, 513 bp, Homo sapiens
ggtttccaagcttttttgaccctgacctaataagaaaaacattttatatctgtacccagttctttcatatgaatgtatgtaaatagacatgcttatacaaattatgctttccctttttatatgcaatgcactctgatatcttctattcgatttcctttatgcatttgctggtgtagtgttgattttaaagagacaaaaccaaagatttgctgaagttatttttggttctaactgtacacaattttattctaaccrtatgcaattcattcctataatacctctagataactggttctcaaacttgactacacattagaatctcctgtttttgttttgttttaattactgatgcctgtgttccaccacagagatactgatttaattggcatggggcataacggagatcagaatttttaaaagcttcccagggagtccaaggctgagccaagtttgagaaccactgttgacagagactccatacaccaaaggcatctctgcaactggaaatagctt

SEQ ID NO: 292534 - DNA, 579 bp, Homo sapiens
gcacacacagcttatattgccaaagcttactagaatcttataacatagatattcttatcatctcctatttgtagacaatgayactgaggcacaaacatgttaagtgcctttctaaaagtcacatatggagagaagattaaaggagcctaccctcagctcctgtgatcttgatctcaacgctcttctgcctcttttttaaatcacagaaagatcaagtttgaaaagacctgttttaggatcttcacgttttagaggagggaactgcgatcaaaggaagttggacacacagttgacatagcaactcaggttaatgccagaattgggagtttgaatccagtcgttttttatccagcagaaggggcagtgactataaaaccatgttattgtttctaagagttttagtccattatctgccctacaggtacactttctctttggaaatgaccttccttattctgtggtaagctcttcctcttcccttgttttcttcctactcacttcagtcccttcaccatccctccccaggtcctcttctctgctccatctttcctcttttcctttcttctccctctctccact

SEQ ID NO: 292535 - DNA, 569 bp, Homo sapiens
agcaaatactacaaatagtgcccttcccctcccccatagagagctggttgtgaacatttaccacctgaaggaataatcttttacattctgttctgttcatttttgaatgtttaattcattgtcataacaattttagggttttgtttttatagagtttatttctttagctcaacacaaagcttatctttttaaagcttcacttcaaagcttttttttttttttttttggaatgtggcttacatacttgtyccctttgaactgtcctttgcatttgattggcttaacataattacagtaatatatatttactctattcacaatccatctctcctctttatcattttagtttttctcttccaaatttacactattaccagctaatgaattatataatttgagccatgtgccatggctcatgcctgtaatcccagcactttaggaggctgaggtgggaggataacttgaggccaagtatttgagacaaacccgggcaaaacagactctaaaatatatattttttaagccaggaatggtagggtgcacctgtagtcctagctacccaggaggct

SEQ ID NO: 292536 - DNA, 569 bp, Homo sapiens
agcaaatactacaaatagtgcccttcccctcccccatagagagctggttgtgaacatttaccacctgaaggaataatcttttacattctgttctgttcatttttgaatgtttaattcattgtcataacaattttagggttttgtttttatagagtttatttctttagctcaacacaaagcttatctttttaaagcttcacttcaaagcttttttttttttttttttggaatgtggcttacatacttgttccctttgaactgtcctttgcatttgattggcttaacataattacagtaatatatatttactctattcacaatccatctytcctctttatcattttagtttttctcttccaaatttacactattaccagctaatgaattatataatttgagccatgtgccatggctcatgcctgtaatcccagcactttaggaggctgaggtgggaggataacttgaggccaagtatttgagacaaacccgggcaaaacagactctaaaatatatattttttaagccaggaatggtagggtgcacctgtagtcctagctacccaggaggct

SEQ ID NO: 292537 - DNA, 1099 bp, Homo sapiens
caaaaacccttgaattatctttgactcatctctttttctctcactctatgtaaaaatccgtcatcaaacacaattagctctggtttcaaaacattgccagaatctgatcacttctcgccatctccactgccatcacccrggtccaagtcactactgtctccttccaaggctattgcagtggcgtcataaccattttccctgcttctactcttgctcctactctattcttcacagagcacccagagtgatcctttgaaaatgtatgccatttctctgctcaaaaccctttactagtttccctctccatttgggataaaatccaaactcttttccatggttttcaaaagccctctcctctctttatggcctccttttctattctctttcttgcttactcagttcccacaatactcaacttcttcctgttccttaaacacaatgtgcctcctcctaaggagctttgcacttgctatttctttttcttgaaacactcttcctttggaaaaatgcataattcactcattttgttaagatttaaatgtcagtttaacagacagggatacctattctgactttttaatctaaaatcacactcgtattactatttctttwaatctatccccactccccttcaatccttgcctcaaagggccctttctaacctgatttccctattgcaaattctaaccatattctcagcctctgtattgaactcccctgctattgcactatttgttccctagcactgagagccttctaagacgctacacaatgtatttatttactatgcttactgagtctctctgtccctaccactccatataagctacacagaaataggggtgtctgttttgttcactattgaatacccagaacctggaacaatgcctggtawatagaagctattcaaaaaacatttgtttaaggactcaatagtacacatacgaaaaaaccaaatataaaaatataaattatacatatataatccatatgtatatttgtttatatacatattttgcttatatacatacatatttatcacacaaatatttacatgctgattatccataggaatttttaatttttaattaaattttta

SEQ ID NO: 292538 - DNA, 487 bp, Homo sapiens
aatctatccccactccccttcaatccttgcctcaaagggccctttctaacctgatttccctattgcaaattctaaccatattctcagcctctgtattgaactcccctgctattgcactatttgttccctagcactgagagccttctaagacgctacacaatgtatttatttactatgcttactgagtctctctgtccctaccactccatataagctacacagaaataggggtgtctgttttgttcactattgaatacccagaacctggaacaatgcctggtatatagaagctattcaaaaaacatttgtttaaggactcaatartacacatacgaaaaaaccaaatataaaaatataaattatacatatataatccatatgtatatttgtttatatacatattttgcttatatacatacatatttatcacacaaatatttacatgctgattatccataggaatttttaatttttaattaaattttta

SEQ ID NO: 292539 - DNA, 487 bp, Homo sapiens
aatctatccccactccccttcaatccttgcctcaaagggccctttctaacctgatttccctattgcaaattctaaccatattctcagcctctgtattgaactcccctgctattgcactatttgttccctagcactgagagccttctaagacgctacacaatgtatttatttactatgcttactgagtctctctgtccctaccactccatataagctacacagaaataggggtgtctgttttgttcactattgaatacccagaacctggaacaatgcctggtatatagaagctattcaaaaaacatttgtttaaggactcaatagtacacataygaaaaaaccaaatataaaaatataaattatacatatataatccatatgtatatttgtttatatacatattttgcttatatacatacatatttatcacacaaatatttacatgctgattatccataggaatttttaatttttaattaaattttta

SEQ ID NO: 292540 - DNA, 584 bp, Homo sapiens
tggctatttgataaacgggaaggagatagtatagagtcctaaccccttcctctaagttttagaaaccccaactgaaccagaagaggcctccattgagcctttaaccctgttcctactcttcttcctgtggtgctcacactgagaacatttccccataaacaccctgcatcccaatctctatctatctcggagtatctcagggaaccagacctgcaccacagacattcccttcattccttgtttcagccccacacctcatccctgcagggtgctacatcttctctctcagagtcctgaccctttctgagaacatttctctagaaaataaatcttgggtatttctgtggtagggtgtgygggtagaaacaggagccttggataggatgtggggaggcaggcttctcttccattctcacacctttccttttaaattcctccatttaattacagataatatgaacatatggtccattcactacaattgattaggagtccattcttttagattgttggttcatctctgttagcatgaattaaaaacaattttatctattaaaagtagaaaaggtataagaacattttcc

SEQ ID NO: 292541 - DNA, 549 bp, Homo sapiens
tagcctcccagcctacatctttctccccatgctggatgcttccttctctgaaatattggactccaagttcttcagttttggaacttggactggctctccttgcttctcagcctacagatggcctattgtggaacsttgtgattacgtgagttaatacttaataaactaccctttatatatatgtgtgtgtgtctatatatatatatatatatatatatatatatattccattaattctgttcttccagagaaccctaatataccttgtcatatttattgaatcaactttttaaaagtctaatttctgtgttctcttgaaaaatcagaaagcctgccaaccctggcctatattttcacatgataacaactgtgaggagctcagaagtcactgcgcatgcaggtgaggatatatctataccctccttgcccaggatccccctgccttctccatttgaatagctcctggctcctgcagatatgtgagttgtgacctgctggaagagtcctgaaagggagagtgacaggatcaaatgaagactttcagtaagt

SEQ ID NO: 292542 - DNA, 557 bp, Homo sapiens
actcctggcctcaagcaatctgcctgcctcagcctcccaaagtgctaggattgcaggcgtgagcccctgaacctggcaagttcaagtatttttattttagttaccaaaaattagtgaggacatatgcagtttatctttctgtacctggcttatttaacataatgtcttccagttccaactatgctgttgcaaattacacaatctcattctttttttatggctgaatagtactccattgtttatakgtactgcatgtttttttgcatccatttgtctgtcgatgggacacttaggttgcttccaaatcttagctattgtgaatagtgctacaataaacatgggagtgcagatatttttttagacaatttttatagaaaaacaatttttctatctcctctcttggcattataaggctaactgacagagttcttattcccaggtgctactagagaagtcagaacttcactattcagttgatagactttcatttactctctcaccttccaatgtgcctagtatccccaggttaagacttctcttatttatttttatagcat

SEQ ID NO: 292543 - DNA, 583 bp, Homo sapiens
ctggtatttccctcccttatatcaggagccagtatgtgctcaggcaaagcaggctagaggtaaatgctgtgcccctgcaggtgaggcctgctcttctctagagctgcctatgmcaagatagtcaagtttcttttaggccatttggtcaactgacttccagcctttatgattaataaaggtaataatttgacatctcttgccatttatctctagctccactttgttccaacctgcatgggaaaaagaaacttactaagttgcctaaaattccaattattttaacctgggatagtctagactttctttcatcctacaatatttactttaagacaataataaatagaatctttttagaattattgtttaaggcactactctataagcaatatgtgagaaccaactttatataagacttggtctccaaaataaaataatttgctctttaataaaggaaagaagctctctctccacttaacactcccttacccctttctattctgatgctctgacacttttctgtccagcagagctgggtgttatcccagctatgctaattaccagctatgtgaccatggccaaataa

SEQ ID NO: 292544 - DNA, 583 bp, Homo sapiens
ctggtatttccctcccttatatcaggagccagtatgtgctcaggcaaagcaggctagaggtaaatgctgtgcccctgcaggtgaggcctgctcttctctagagctgcctatgccaagatagtcaagtttcttttaggccatttggtcaactgacttccagcctttatgattaataaaggtaataatttgacatctcttgccatttatctctagctccactttgttccaacctgcatgggaaaaagaaacttactaagttgcctaaaattccamttattttaacctgggatagtctagactttctttcatcctacaatatttactttaagacaataataaatagaatctttttagaattattgtttaaggcactactctataagcaatatgtgagaaccaactttatataagacttggtctccaaaataaaataatttgctctttaataaaggaaagaagctctctctccacttaacactcccttacccctttctattctgatgctctgacacttttctgtccagcagagctgggtgttatcccagctatgctaattaccagctatgtgaccatggccaaataa

SEQ ID NO: 292545 - DNA, 583 bp, Homo sapiens
ctggtatttccctcccttatatcaggagccagtatgtgctcaggcaaagcaggctagaggtaaatgctgtgcccctgcaggtgaggcctgctcttctctagagctgcctatgccaagatagtcaagtttcttttaggccatttggtcaactgacttccagcctttatgattaataaaggtaataatttgacatctcttgccatttatctctagctccactttgttccaacctgcatgggaaaaagaaacttactaagttgcctaaaattccaattattttaacctgggatagtctagactttctttcatcctacaatatttactttaagacaataataaatagaatctttttagaattattgtttaaggcactactctataagcaatatgtgagaaccaactttatataagacttggtctccaaaataaaataatttgctctttaataaaggaaagaagctmtctctccacttaacactcccttacccctttctattctgatgctctgacacttttctgtccagcagagctgggtgttatcccagctatgctaattaccagctatgtgaccatggccaaataa

SEQ ID NO: 292546 - DNA, 1086 bp, Homo sapiens
ctggtatttccctcccttatatcaggagccagtatgtgctcaggcaaagcaggctagaggtaaatgctgtgcccctgcaggtgaggcctgctcttctctagagctgcctatgccaagatagtcaagtttcttttaggccatttggtcaactgacttccagcctttatgattaataaaggtaataatttgacatctcttgccatttatctctagctccactttgttccaacctgcatgggaaaaagaaacttactaagttgcctaaaattccaattattttaacctgggatagtctagactttctttcatcctacaatatttactttaagacaataataaatagaatctttttagaattattgtttaaggcactactctataagcaatatgtgagaaccaactttatataagacttggtctccaaaataaaataatttgctctttaataaaggaaagaagctctctctycacttaacactcccttacccctttctattctgatgctctgacacttttctgtccagcagagctgggtgttatcccagctatgctaattaccagctatgtgaccatggccaaataawtccatctatcatttgctttgtgtggacatctaagtaataaaggtataaggattagaatctgtttttaataacagtcatatttttaactaaggggaagatccaaagagtggacaagttcatttagacctttggaaaagtactattaaaaatgattcatgtaccttaattatgccagtggagagaaaaatttactccttcttcataaatgacacttagaatttaattttaggtgttctgcttggtgggtgtttgaaaataaagtttgacaaaacttatggcttcaaagttgatctcatcttcttgtgacctatatcttaaaaataagagtgaaggatgaaagttactgtgctctttaagcaccaaaggaatgaatgatgcaatttctaagcaataagaaatawgaagattgaatctactcagtaaatagattgactatgttatcagtaatgacttctgactgataaagtgatatttatattatcaaaaactctagaacagaaca

SEQ ID NO: 292547 - DNA, 544 bp, Homo sapiens
caaaagggagacaaatgcaataaaagatatagagttttggatataagataaagatataaataaaagatataagacaggcattggttcctattccacctttaatattttctagttgtgtctcagagaaaaagaagttaaactttcctatatctcaattctctttaaaatggaaatggaaaacttttagattttggtgagaattttaaagatgatgtaagatacccaatgtttacaagatgataaagagaagaaaaaagttatttaaaaataagatacccaatgtaatccctggaaccaagcacacaataaatggtgactattagaaagactgatctcttttccaaacatatctctctyattcttgactggggaggtcttcaagatctaatagaatgacagtatccttgtgtagactaatgttatactactatttagagtaacaacacacagagcactatgcaacacaaagagtcctataaaaaagcattgaaggagtagattaagagaccccccaaaaatttgtttttgagttggcctaggatgg

SEQ ID NO: 292548 - DNA, 480 bp, Homo sapiens
agccatgtggaactgtgaatcaatcaaacctcttttctttataaattacccagtctcgggtatttcttcatagcagtgtgaaacagactaatacacttttttatctaatacttaacattttctgcctaaatatctaataattactagattcctcaaatgatacagtgagttcatccatattatagagaaagttacagagctggttaatacaaagtttcagaaacctggaaatgaaaacactttactctcycagaattcactcctcagatcctaatcacttccaaaatctatcctgtatcttaaaccataaaactctaaatgaccatttggaagaaaaagttaaatctgaaaagggtcacaagacttacgctgatgtttaagttgtaaacgcactgcttatttgaccaaaggaatctataaattcattaataaaacaattttgacagggtagttttttcaaacaagagatagcttggtgaa

SEQ ID NO: 292549 - DNA, 572 bp, Homo sapiens
ttactattttgcccaggttggtcttgaactcctgacctcaagtgatcctctcacctcagcctcccaaagctctgggattacaagcatgagccattatgcctggcctgatacttgatatgattttgacttttaaaaatttattgagacttgttttgtgtcctaacatatggtttattctaatgaatattccatatgttgatgagaggaatgtgtattctacaggctgttggatgaaatgttttgtaaatstccattaggtccatttggtctaaagtgcaatttaaatccaatgattcttttttatttttttgtctagatgtgtctaatgctgagagtgggattttaagtcccccactattattgtattaaagcctatttcttccttgtatgtaatactatttgctttaggtatctgggtgttatttttggatacaaatatatttagaattgttacatcctcctgctaaattgatccatatatcattgtataattactttccttgtctttttcttagtgttttttatttaaagtctgttttatctgatacatgaatagctagtcctgctagttt

SEQ ID NO: 292550 - DNA, 613 bp, Homo sapiens
cctgttcaacaacatttatggaactttgattttctatacagacttactggggttagaaaagaaaattcagaggtctaagtcattaaggagtttaatattaggtaggatatagaatatagagctaatttttattacattttgaaatcaatttgatcaatgtatagaatgggcaatatgcacatgcatgacatttaaaaagtatatattatctcccagtcatcaaatttcatgagataccaccagccacccggcctattctatctttccagggaggcagataagcaaatatgcatgaataaatgctcataaaatgttgacatctagtatgaaatgaatttgaactttaaactggctgaatacaaaaaaggcaaaaaaaatatggcaatgacaagttttacaaattagagattcttggattctgctggtggtgctaattagagaagtctggttgtcaagcctggatcaagttaaggttgaagaaagagaatgattgagacagactttatatattaaktatatataatactttggccatattctaatacccagagcaatttgcacctgaataatggccataattcctatttctcactactcttatcaatgtggtatt

SEQ ID NO: 292551 - DNA, 625 bp, Homo sapiens
gttcaagcaatttctacctcagcctcctgagtagctacaattacaggcacgtgacaccatgcctggctaatttttgtatttttagtaaagaggaggttcaccatgttgaccatgctcgtctccaactcttgacctcaagtgatccaccccacttggcctcccaaagtgctgagataacaggcttgagccactgcacccagccagaaacaatctttaagctagttttataatgtgaaccctatttcagaaaaarcatttatcttacaatcattatcttccatcttttactaaaatacatatcataccaatacattccttatttttagctacaaacattatattggactattaaattctgcttcaacattccctaagaatcataaaatgcccatgacatgggttagaatagaaaagatccaagttctggttctatctccagaacttattagcattttgatcttgggaaaattaataaacctttctgtaccttgattctcttgtctatgaacatttcagctgcaggaactgtaaattaatttggtataaatactcctaccatggcaaatttaacaatccactcacaaaattcctgaatatttaataatcagctctagcgagttggtag

SEQ ID NO: 292552 - DNA, 583 bp, Homo sapiens
cagagaataaaagtccagagaataatgccttgagctttctcgggggctaactcctgccagcctatgatatttcctctggtgaaatattttgcttttttattgactttgtaggtagaacataaaagagaaaaatcaaactggcttgcagaaatagatcacaggctggtctgaagctctgtttctgctgtagaacaggtaacctggagaatttaccgttgtagttaacatccaggaagagtctgagattgtttacactggatacctgcacctggtaagcaggcaggcatagagtctgggtgtctagaacagctaagagggcccagagaatataagcattcctgcaaagtggtagggaagcttcttgtagctggcagcgtcttcactctgggcaggtggagtcattagcaggttagaaagcttgagagatcagggagascatttatcagtctgggaacatcctgtgtgtctattttgtgcagtcatggtaaggcaggtgaatttttatatactttgcaattaaatggtatctgttggcatttttccatcagtcacaacaccagcatgtgttgatgcacacacacga

SEQ ID NO: 292553 - DNA, 589 bp, Homo sapiens
cccactgatcatggatgaaagatgcatattttatgtggatcagatayggggagggacaaggggagggagggggctagtatgaggttatcttagatcttgatcaaaaggtcatcctggaaggtgtgaagccctccgtagaaagaggttgaagataaacagttagattcccagggaaagaaatcctaagcaaaccctaagcaaccagtcagagcaggtacattcactcacctcaacagaactgtgggagaactcccacatggggcaagtctccaaagagcccaaaaatattgctctgaaagacagtcagctttgaacaccctctgaacccagcaagtatcagtaacagttcgcagaattaccaataagacatttcctgcccccttaccttcatcccatccccagcttcccatccccagcttccaacaccagctgaaagcgtagctagtgggctgggagaggaggtcacggagagcagatggagaaatgtagtataattagccattcccaccttccccattgctagactgcaaagaggaattttgattataacactggaccagtgatactgaactgaacaggcttttttgaa

SEQ ID NO: 292554 - DNA, 589 bp, Homo sapiens
cccactgatcatggatgaaagatgcatattttatgtggatcagatacggggagggacaaggggagggagggggctagtatgaggttatcttagatcttgatcaaaaggtcatcctggaaggtgtgaagccctccgtagaaagaggttgaagataaacagttagattcccagggaaagaaatcctaagcaaaccctaagcaaccagtcagagcaggtacattcactcacctcaacagaactgtgggagaactcccacatggggcaagtctccaaagagcccaaaaatattgctctgaaagacagtcagctttgaacaccctctgaacccagcaagtatcagtaacagttcgcagaattaccaataagacatttcctgcccccttaccttcatcccatccccagcttcccatccccagcttccaacaccagctgaaagcgtagctagtgggctgggagaggaggtcacggagagcagatggagaaatgtagtataattagccattcccaccttccccattgctagactgcaaagaggaattttgattataacactggamcagtgatactgaactgaacaggcttttttgaa

SEQ ID NO: 292555 - DNA, 616 bp, Homo sapiens
atttggggtggtatgcctggtcctcaagttcattggctcttgttatttattcttcacctgaagccatcatctcagtttctgacattaaaatctgttagtatggaaacaattttggttgtgtcaagagactgaaggataataactccatggtagcctaagtagcaggagcagacaaaaatctcagtaacaaagatactatttttatactggagttgctagtaaaatgtgttggagaaaggggagataggaatgagaggaaataaaatgtcacttggatgtgtctggttccttgaagaaaactcttgttaatcttagttggaaaagaagtgtgctatgtgttcatgatccctccagagtgctccagaaattgctagaatgaagtaaaattttacagaatttatccaactgtctgagcctcttggcctgtgttggtaaaaagcaactgtagctttttctgtgaaccttctytttataggaagagatgccaagataggcaagagggccagggagagtcacaaaaattgcagcaaaatagaatgtcgaatgaaattttcccattgattgtgcatttcagaaaaggccacatggtagaaagcaataggtgctttgtgtatcc

SEQ ID NO: 292556 - DNA, 583 bp, Homo sapiens
gtgcatttcagaaaaggccacatggtagaaagcaataggtgctttgtgtatcccattttctaaagagagccaccaaggaacgaccagccataaccctgtagcaatcactaacaaatgctgctaccatcaccttccatctcaccaaactacgtcagtagttctcaaacctgacgtagaaaaacattagaagctggagagcttttcaaaaatactcatgcctgagcccaactaatcaagtcagaatttatgtggttgaatccagccactggttttcttttaaaggctccctagatgattctagtcactcagccaatgtggaggcccactggtccacaagaacagaagtcttaggatctttggagttayacaatgctggctatgataagtgctctgacttctctcttttcttgggccaagtcaaggaactctgcactgaagatgactctgactgtgtccaacaaaggaaccactcatgtacccgacagagatacattgctaacacttgaatgccagccacacagcagccatggacaggcagtcattgaccacaatacagcaataaagtcagaagattttggctctt

SEQ ID NO: 292557 - DNA, 520 bp, Homo sapiens
ggagtgagctatgcagaattagtaaggaaagtaaggaagaaatataaagcagaagattggtgttagaaataaacatagtagggaaaaatcattttcctggggcaaaagtttctgtgggaaatcatttacctagaataaaagactaaattgagctaagaaataaagtcattgttatatttggaaggacataattggrctcatcaaacgtaaaatctatgtggtaatgatcaatattataactcttacacaatattacatttctctataatgaagacagagacaaaagagaatcaactgaaaagtaacatggtgattctcattccgagattctctgaaggtcaccatgctgtgaggcccttcaaacatcctctgtattagttttccatcactaaaatgtcattatttttcctcctcatgagaaacagactgtgattgtggaacccattgttttctgaatggtctgtgtgcccttgccaaagatggtagtatctgcaaatcccctgctaaaaaggttagtctt

SEQ ID NO: 292558 - DNA, 554 bp, Homo sapiens
ctctctggcttctggaagctggatcatatgcaaaggacctaagtgcagccaatcagaggctcccaacttgggcctttaaatcttgtgacagtccagaggtctaacagtagctagcacatrgtaactagcagcatagcagggtgacccagctgacctggccttctgaggtttctatctggacctggtactccagctatctttttttggtatcctttttgattaatttaaccaatgtcagcttctcttatttgcaactaaggacctaactagcatgacatctggaaccagaactaaggggctatagacacaaccacaggaaatctcagtctcgagatatgagattgggtatctgtcctaggtgaaacttagggtacggaaaatcaaggctgtgtaagggatggaaactgcaccctgtgacacacacagtagttaaggagcttattaaattgtgccctgggatctcctggaattaagtgtccattaaagaccaggttttgacacagagaccatatcagagccatggtgtcttttaatgctcactatagccttatgta

SEQ ID NO: 292559 - DNA, 563 bp, Homo sapiens
gaattgcgtgtgcaagggatctagtttgtgctctgcttatgagaatctaactaatgcctgatgatctgaggtggaccaatttcatccccaaaccatcccctacaccctgctatccatggaagacaattcttccatgaaaccgatcttggtccctggtgccaaaaaggttggggactgctggtagactaaattatgatgaatttgaatttaagttgaaaacaaagttatagatcaagggctggcaagctttctctgtaaagggccagakagtaaatattttcagttttgtagacaatatgatttgtcacaactactcaaccttgtcctgttgtacaaaacaaaaaaaagtcataatagtatgtaaataaatggatatgtgtttgtctcactaaaattttatttataagaccagatggtggggtaaatttggcctataggttatagtttatcaacctgtcctaaaggccattttgtgtccctttagtcaccattaatgttattccactaaacaaagatattggagtaagtttttcataagatacagtggtttagcataaaaaggt

SEQ ID NO: 292560 - DNA, 558 bp, Homo sapiens
aactcaggcgccaagagaagccagtctggtaagtttctgagaatgaaagtccgctagaccattccctaagtgtgtgatttcagaaaagtcacttaacctcccgaggttcagtttctctgctgtatgtgataggtgttgtgaggattcaataaatacataaaagggaggtggtaggaaggtactagttcaagttcatgttgattttttttttttaatgttcacaatattggcaggagcaagatagagaagctgagagaaaagtttgtgcrttggggggactgggaagggaagggagtgaccaaatttaaagttctatgtacatatatctatacacatgtttatgtatatgtatatgtgtatgtaaatatgtagttttcaataggccccaaatagcaatgtcaagaagaaaaatcatgcaatttctggctacttgtagtctttattctatgacttgaagactgttgacggcgtctggctgtaaaagtacctctcactttctggtgccaccaggagggctgggttctttggactcagcataggtttgggctcctgaacatc

SEQ ID NO: 292561 - DNA, 625 bp, Homo sapiens
ggcaaaaatattttgtatatagttattatatcagtcttttatgtgaacatgtgtgtttctttatatctgaaaggcatgtgactattggaacatatttatattaactcattctacttttatataatcttggaagtctgaatttttcttttgactttaccctcccraggaaaataaaacttatcttatggaaaaatttttttcaaggtaactgtgccaacagtttgagtaaacttggaagattctgcaatgagtaaacactgccctatagtcttggaagaagactcaaacgttttactcaaactaattatttacatcttttaattggtaataaattcaattgaatatgcgtataagctttgcaagcttcattcccactcaaaaataacaaatatattcaggttgctttttaaatttaaaaagtgaatatgttgagtcagctcttgattaatatttgttgattcaaaaatactgcccaaaatttacaagttgctgatatttttgagcagagaacccagatcatgaacccaatggttttaaaagcctaattttaattttttttccttctctatttgctatccaagtttcaaaatttgttatttgctactcaagtgacagtgttaataaa

SEQ ID NO: 292562 - DNA, 625 bp, Homo sapiens
ggcaaaaatattttgtatatagttattatatcagtcttttatgtgaacatgtgtgtttctttatatctgaaaggcatgtgactattggaacatatttatattaactcattctacttttatataatcttggaagtctgaatttttcttttgactttaccctcccgaggaaaataaaacttatcttatggaaaaatttttttcaaggtaactgtgccaacagtttgagtaaacttggaagattctgcaatgagtaaacactgccctatagtcttggaagaagactcaaacgttttactcaaaytaattatttacatcttttaattggtaataaattcaattgaatatgcgtataagctttgcaagcttcattcccactcaaaaataacaaatatattcaggttgctttttaaatttaaaaagtgaatatgttgagtcagctcttgattaatatttgttgattcaaaaatactgcccaaaatttacaagttgctgatatttttgagcagagaacccagatcatgaacccaatggttttaaaagcctaattttaattttttttccttctctatttgctatccaagtttcaaaatttgttatttgctactcaagtgacagtgttaataaa

SEQ ID NO: 292563 - DNA, 617 bp, Homo sapiens
acttcttcatcagaatctccttttgtctttgtatattctagagtataagaaaggccattacagcccctggttcggacaccaacttttacacctacatgctcaggcttatctttaagaagttgttttatcttgtttactgctgaaggtgtcagggtgagggctgcccgggtgggctgcagcttcctcttgctcacagcccgggcagttgcccggactaaggaaggcgacattttcgccgtcccggcgccccggtgcctcgggccggaggttggctgcctcagcctctctccacggacacggcgggcgcattggtttcccaacttttaaattgtgcctctcattagcaaaatagtttgacaatgtctctctctaaaatgtgtgcatattccttttttcttcaaatcatatacayatagtattgttattctgtatattaaatactaagaaagtctaatttctaatttttgagataaaagtatgaacagaaattctattattttaaaattttctggagtatgtaacttcactttggaaactgtagtcctatatttctgatttgtaataattttcctgctctaatatttctttgggatacaactttttttctgtcatttgaa

SEQ ID NO: 292564 - DNA, 545 bp, Homo sapiens
tgctggggattttctgggatgtatcttagtacttccatgagtaataaagttaatggaaaattccagcaattaaaacaagagacaaccactgaggtctcagacacttaggaattcattccaacatttattcaggaattgatatttgcattacccctaaatactggggcatgataaactagcatcatcactccccttagaaccagcatcatcataccccctagagaccccagcaccaaccagttagcacctctccttgaaggtcacggtcctacctattccctaccaggggccaccttcaaaatcctgaggcaatagtacaatgyaatgaccctcaacccggtctcagaggtttcagtttcagctctgcggggcaccacctccttcaagcttctaaactttaacaactccaaactctttcatgtattcacccagttctagagcagtaactgcttctacgatttctgccttctcagtgtttcctttctgccttttcatttcttgagtacttgattaaaaaatctttacatgaaatctccctgttcaaa

SEQ ID NO: 292565 - DNA, 589 bp, Homo sapiens
tgtaatgaccctcaacccggtctcagaggtttcagtttcagctctgcggggcaccacctccttcaagcttctaaactttaacaactccaaactctttcatgtattcacccagttctagagcagtaactgcttctacgatttctgccttctcagtgtttcctttctgccttttcatttcttgagtacttgattaaaaaatctttacatgaaatctccctgttcaaataatcagtgtgatttctgtctcttgactgtacagytgatcttccataaaccctatgagattatatccatttttcagatgagaaaacagacacatagaacagatgagtaactggaccaaggccacacaaccagtacaacacaggaataggacttaaacccgggtatttctcattccaaagcccttgttcttttaaacactgcacagttctgcaagatgaaggcagatcttttacattgttctctgacctcttctagcaatgatactggtattcaaattagactgggtggaaacaaggtaggtcatgtaaatgcaagagcgagtgcacctgcagctttaagagaatatatgacacagggtccaagt

SEQ ID NO: 292566 - DNA, 589 bp, Homo sapiens
tgtaatgaccctcaacccggtctcagaggtttcagtttcagctctgcggggcaccacctccttcaagcttctaaactttaacaactccaaactctttcatgtattcacccagttctagagcagtaactgcttctacgatttctgccttctcagtgtttcctttctgccttttcatttcttgagtacttgattaaaaaatctttacatgaaatctccctgttcaaataatcagtgtgatttctgtctcttgactgtacagctgatcttccataaascctatgagattatatccatttttcagatgagaaaacagacacatagaacagatgagtaactggaccaaggccacacaaccagtacaacacaggaataggacttaaacccgggtatttctcattccaaagcccttgttcttttaaacactgcacagttctgcaagatgaaggcagatcttttacattgttctctgacctcttctagcaatgatactggtattcaaattagactgggtggaaacaaggtaggtcatgtaaatgcaagagcgagtgcacctgcagctttaagagaatatatgacacagggtccaagt

SEQ ID NO: 292567 - DNA, 552 bp, Homo sapiens
tgggcgcagcttcagcagacttaacgtcccttcctgatggctctgaagagagcagtagatctctcagcataaagttccagctctgctaatggtcagactgcctcttcaagtgggtccctgacccccgtgtctcctgacggaaagacacatccyagcagggggcaacagacacctcatatagaagagctccagctgacatctggggggtgcacctctgagatgaagcttccagaggaaggaacaggcagcaatctttgctgttctgcagcctctgctggtgatacccaggcaaacagggtctggagtagacctccagcaaacctgcagcagatggccctgactggtagaaggaaaactaacaaacagaaaggagtaacatcaacaacaacaaaaaaggacgtccactcagagaccccatccaaacatcactaacatcaaagaccaaaggtagataaatccacaaagacagggagaaaccagcacaaaaaggcagaaattccaaaaactagaatgcctcttctcttccaaaggatcacaattccataccagcaa

SEQ ID NO: 292568 - DNA, 552 bp, Homo sapiens
tgggcgcagcttcagcagacttaacgtcccttcctgatggctctgaagagagcagtagatctctcagcataaagttccagctctgctaatggtcagactgcctcttcaagtgggtccctgacccccgtgtctcctgacggaaagacacatcctagcagggggcaacagacacctcatatagaagagctccagctgacatctggggggtgcacctctgagatgaagcttccagaggaaggaacaggcagcaayctttgctgttctgcagcctctgctggtgatacccaggcaaacagggtctggagtagacctccagcaaacctgcagcagatggccctgactggtagaaggaaaactaacaaacagaaaggagtaacatcaacaacaacaaaaaaggacgtccactcagagaccccatccaaacatcactaacatcaaagaccaaaggtagataaatccacaaagacagggagaaaccagcacaaaaaggcagaaattccaaaaactagaatgcctcttctcttccaaaggatcacaattccataccagcaa

SEQ ID NO: 292569 - DNA, 513 bp, Homo sapiens
ccagcaaacctgcagcagatggccctgactggtagaaggaaaactaacaaacagaaaggagtaacatcaacaacaacaaaaaaggacgtccactcagagaccccatccaaacatcactaacatcaaagaccaaaggtagataaatccacaaagacagggagaaaccagcacaaaaaggcagaaattccaaaaacyagaatgcctcttctcttccaaaggatcacaattccataccagcaagggaacaaaactggaaggggaatgagtttgacaaattgacaggagtaggcttcagaaggtgggtaataacaaactcttctgagctaaaggagcatgttctaacccaatgcaaggaagataagaaccttaagaaaaggttagaggaattgctaactagaaaagccaatttagagaagaacataaatgacctgatggaactgaaaaatacaacacgagaacttcatgaagcatacacgagtataaatagccaaatcgatcatgctgaagaaacaa

SEQ ID NO: 292570 - DNA, 610 bp, Homo sapiens
caggcaagtaaaatacataagcaaagtggactgcaatatggaytgcagcaagtgggggcaaggcaagccctgtgcacagtggccaggtgctgccaagtccagccaattactgttacacagaaacatgggaccaatgttgtcagatcacccagttttcaaaagaagttcaaaatctagaatatttttagagaagtttcctgatttttaaatgaaagcaattgattgaaaaggtttgaggtttaagatgcaggcaaaacaaaatgtctgtggcctaaattcaacctgtttgcacactctgacttaggtaatagcctagggtagattgttcgtttgtttgtttttaaacagatgtagaggtttcatgaaattttctcatcctttggctatttttctcttatgcagattgtcagttaatattccagagtctacaaagggctgcagggatttccatgatgactgagcagcagggcccagaaaccatcaatcctctgtaggtttataaactgattcccagttggcacagcattctggggtggtcataaagaataaggtgtagggagtagtagcatgcttcctgagggcttcgagggccaataactgaaattaggtt

SEQ ID NO: 292571 - DNA, 510 bp, Homo sapiens
  misc_feature (1)...(510): n = A,T,C or G
acagctttagccaacacctccatggcacagtgacaaaagccaacacaaacagggagygggaggtttgctgacagctctgtgcactgagacctcaggactggtanttggtgaggcaggctcaagcagtgactcgtgggggagccaaagaagactcaatcatgttgtctcttgtatcagctccctccacaaggaacggaaatctacaagaggctgagtcctcctttaatcaaagcaagagaagaagcactcaggacggggtgggatgcatgtcttcagacactgactcagcccctcctgtataaggtctcactgctgcagcagggctgggtccacatatctccttctgtgtttggtgtcccagagccgtgcttagaactccaacattaccctgtgtgttcatggtgatgacgagattcccaagcacagtgacttaaataagagaactgtacttccttctatataagctcaggtgtactgtccangggtggctggtaccctatgttgttgggg

SEQ ID NO: 292572 - DNA, 531 bp, Homo sapiens
gcatagccaaactgttcacttgaaggaccggaaaatatttttgcttctgggagaccaacattgtaggccaaacaacaatttaaaatgcctattaagaaaaatatgaaatagcacatatttacaattcatgaatataagtgtgtcgtataattctcaaaggccatttttaagaaaacttgcttgacctaataattattacttatcaacrtttacccagaaaaaataactactgctttttaagtacttatttggaggcccggcaccaagctaaatactatatatgcataattcattatcttactaatcttcatggaaatgctagaagatagttactaatattatctttgttttgcagagaattttgaggttccaggggacaagtatatctcacagctggaaagaggaaaggatgaagacaaaatttgaacacaagacttaaaacaactaaattatctctaagtattcttaagtaatttgagttatatttgtccttcccaaaacaacaagactctaagccacccaagggcaagg

SEQ ID NO: 292573 - DNA, 589 bp, Homo sapiens
atttcatgcttgtggctaggaagaatcaatattgttaaaatggccatacttcccaatccaatttatagattcaatgctattcctatcaaactattaatgacattcttcacagaattagaaaaaactaattctaattcatatggaatcaaaaagagcctaaatagcaaaaacaatctaagcaaagagaasaaagttagaggcatcatattatccaacttcaaactatactacaaggctacagtaatgaaaacaacatggtactggtacaaaaatggacacatagatgaatggcacagaatagagagccccagaaataaagttttacactgacaaccatctgatcttcgacaaagttgacaaaaaaaaaaaaaagaaagaaatagggaaaggactgcccatttactaaatggtgttgggataactggctagtcacaggcagaagattgataatggaccccttccttacaccatacacaaaaatcaactcaagatagatttaaggacttaaatgcaaaacctgaaagtataaaacctggaaaataatcaaggaaataccattccaaacattggctctggcaaggatttcatg

SEQ ID NO: 292574 - DNA, 609 bp, Homo sapiens
gtttggggaaaaaatgatatctgtactgtcctaatactttcattcatcttgttacttgtcaacagagctatcctagttagacatgttatgaraaaggaaaaacattttaaaagcaaacaaactctgtcaaagaagtgaaaacaaatttatcaactaaaggaatattttagcaaattcagatacacttacaaatagaattatttttgcatatactaattggaaagaagtagaaatttttcagcttggccttcattcagaaagtgtgtctttaatccccttacagtagctgtcatacatggctcatagattcatcactcattgaataaaatggtgccaagaacccttgatacaagtgaagatgatatgggcctgtcttctcagcttgcagtcagtaagaactatagccaagttctgaaagggttattgaaatagaatgtaacattgctatggaagggtccaagtgaggagtgatacctaaattgaattagaagattggcagggttcctagggtgcatgaacctcagtgaaattaagatttaaacgatgcacagaatggaggctggggctaaagagtattccagaaagagagagaggacatgaaaaaaggca

SEQ ID NO: 292575 - DNA, 609 bp, Homo sapiens
gtttggggaaaaaatgatatctgtactgtcctaatactttcattcatcttgttacttgtcaacagagctatcctagttagacatgttatgagaaaggaaaaacattttaaaagcaaacaaactctgtcaaagaagtgaaaacaaatttatcaactaaaggaatattttagcaaattcagatacacttacaaatagaattatttttgcatatactaattggaaagaagtagaaatttttcagcttggccttcattcagaaagtgtgtctttaatccccttacagtagctgtcatacatggctcatagattcatcactcattgaataaaatggtgccaagaacccttgatacaagtgaagatgatatgggcctgtcttctcagcttgcagtcagtaagaactatagccaagttctgaaagggttattgaaatagaatgtaacattgctatggaagggtccaagtgaggagtgatacctaaattgaattagaagattggcagggttcctagggtgcatgaayctcagtgaaattaagatttaaacgatgcacagaatggaggctggggctaaagagtattccagaaagagagagaggacatgaaaaaaggca

SEQ ID NO: 292576 - DNA, 603 bp, Homo sapiens
caaggtctggtggctgcaactcagctttcactctctgggaacaacttgaataccacattgtgggcataaggaccttctgttttcattgcgtcagtattctattcaagaacctaaacatctgccccaggaactaggagatgagtcctattgctagttatgttgcttgcttttctagtatcacttacatccattttaaaaggtagaaactgtactccaggatctctgaggttcttcatggcagatctaaattgtaatgattcttacctgtttccatgaagacatctcaggaggctagacacttcaatgtatcacaatgatatctctccatcctctgaattcaacatgttatctgtaccactcattaattgtgaacacatgacatmtattatgctatggaaactgatgttacagctctctaagttatagaaaatgatataaccaagttttaaattatatgaaaattttaaagacaccaagacatactatagtcttaaattccaataattcagaagttcaaagacaacatcaaagtccatttctttccataaggctaactccaatatactagctttatccttaagctagttgacatcgcagttgcaa

SEQ ID NO: 292577 - DNA, 622 bp, Homo sapiens
tgagggagaaccagaagtgcaatgcgccctctcctcaggaagctgatggtcagctgtggagtgagacatactcaygcagtaacagcctctgactctgaattggtgagagaattccctgggagtcaacttgctctctggattgaggagcctcatgaatgatgaacttaccttaattaagaagatagacaaagcaatgatctagaatctgaaagaaaggactactttgattactgaaaagtgcctggtctggcttctgttggtgagctacaacaaagagcagaaagaattggaagaggttatttctaagggccaggagcagggagactgcagttcatagagtgtccatatatccaaggatgtttgtgactgttcatatgagcccagttttaccttcacatgggcctataatagatattatatgggtaaatgcagataaataaaatacaattatgccataaggactggggcagactgtaattgccactgaaattcagaggagggagaagtcatagactaccctgctttaggacttccctgagaaagagaagatctgagctctagagttgacatttaacttaaatctctgcaaaaagcaccttccaaagaattgtcagaaaagaat

SEQ ID NO: 292578 - DNA, 600 bp, Homo sapiens
ttggtgagctacaacaaagagcagaaagaattggaagaggttatttctaagggccaggagcagggagactgcagttcatagagtgtccatatatccaaggatgtttgtgactgttcatatgagcccagttttaccttcacatgggcctataatagatattatatgggtaaatgcagataaataaaatacaattatgccataaggactggggcagactgtaattgccactgaaattcagaggagggagaagtcatagactaccctgctttaggacttccctgagaaagagaagatctgagctctagagttgacatttaactyaaatctctgcaaaaagcaccttccaaagaattgtcagaaaagaattttgcactaataaagtatcctatgatatctcgttgagggaatagtgacattcaggttcattatcacactttgagctgatgattttcgtagatgtgtaggtacttagaatttcctttcgaaaattctttttttttttttttggtcagctttgtagggatcagctttgtgtccacaaaataaaatttactaatttttagtgcaaatttagagagttttgacttgtatacagtcatg

SEQ ID NO: 292579 - DNA, 637 bp, Homo sapiens
cttttttattaacgtgctatttcttttgtagggaaaaaccttattttaattgttttctytttcttttttttcatttttaaagggactacaagaaataactttgaagggaaaaaagtcattagcttagaatatgaagcatatctacccatggcggaaaatgaagtcagaaagatttgtagtgacattaggcagaaatggccagtcaaacacatagcagtgttccatagacttgggtatgatttcctttatcactctaaaagttaagtgtaattgttttccatctttgtactaactctgattcttgaatctttcttagtaattctatattaccatgagaggaatattcatgtattatttttggaggacaatagggatggctgttagtacctttagggactgcctagtgagttttgatattgggagagctcttgttgcctctgttgctgtaacaaactgcagttgtgccaagacttgcaggccctatacaatctgtgacagattctttttgatataaatgcctcgaaagtcattagagtggtttgcctttttgtacccctaaaaagagaagagttcttggctttaaaaagaagccagtaattgagactgtatctatcatactctgttagttactagtttg

SEQ ID NO: 292580 - DNA, 634 bp, Homo sapiens
tttatagtattttgatagacttgtacatataagtcccatatagttcttaaatttttttttccagctttatttaggtatacttgacaaaaattgtatgtatttaaagtatacaatgtgatttttgatacacatatacattgtgaggtgattaccataatccaactaattaacatattcctcagctcacatagtcccctcttctgtgtggtgagaatatttaaggtctactctcagcaaatttcargtaaacacatagctcataaaataataaaatacaggcaaaatttgggcagtcggcatcatcacaaaatttgcattatgcatattaagaacaaaagctatactttcagacacttagattgaaggatttttttcttatgtctgggacaaataagaaacgtagtaatcctatttgttatatgtagtgaaaacatcttttacctaaggaacccatttattcaacaaatatttattgaatgcctgttttgtgccaggcacccacccagtgatctttttctgccaacctaaaataccttgaggaacactctgcatcttatctgtggctgggacccataggacagccacactgactttaggaatcacctggttacatcagttgatgcttgttcattag

SEQ ID NO: 292581 - DNA, 572 bp, Homo sapiens
atgtctaccaattctcaagtttctaaataagtacaaaagtattactttagaattgatagtagaagtcttcccaagattactgttatattgactagtatgttaacatagtagacaatcagtacttgttagktgaatgaatggatttataagccaggggttttcactttggtgtggctaaaatataataatagggtattgagctccttcagtgttcattattggatgcctgtattattcgttcttcctatccttctttagttgcaaaccaatttgaatggtttgggtctgaatgaggttggtcaaatctgtttccaccattagtgtagagaccacctttaagatggatgatccagaggttttagtattctggacctaaagccactggattgatcttaacttctttgcttaagattgccaactaagttctgcaagcaaagtgatgatgagatcagagaaaccctcataggaccactcagactagaatgaaactggggacctcccctctcctcactcatttctggggctctgaggtgggattccaaccagggtagcttctttgcgtgggggattag

SEQ ID NO: 292582 - DNA, 572 bp, Homo sapiens
atgtctaccaattctcaagtttctaaataagtacaaaagtattactttagaattgatagtagaagtcttcccaagattactgttatattgactagtatgttaacatagtagacaatcagtacttgttagttgaatgaatggatttataagccaggggttttcactttggtgtggctaaaatataataatagggtattgagctccttcagtgttcattattggatgcctgtattattcgttcttcctatccttctttagttgcaaaccartttgaatggtttgggtctgaatgaggttggtcaaatctgtttccaccattagtgtagagaccacctttaagatggatgatccagaggttttagtattctggacctaaagccactggattgatcttaacttctttgcttaagattgccaactaagttctgcaagcaaagtgatgatgagatcagagaaaccctcataggaccactcagactagaatgaaactggggacctcccctctcctcactcatttctggggctctgaggtgggattccaaccagggtagcttctttgcgtgggggattag

SEQ ID NO: 292583 - DNA, 590 bp, Homo sapiens
tgctggtccctctagacatttaagtgtgacacttatggtttccgttcccattctcccacatcccactatcctttccagattattctagggccctccaatgcccctgaagaattattcaggacaatgaaagaaatcttttagaattatattttaaaataaaaataacacctcccaacatatggaaaacaataagagacataactttcacatagaaaagagtgaccaacttctcatatattttcaaaataataatctaaatagattctggttagttgtccaatttagtgcaacctgggaaaccattggacataaactctgactttcccctaagcctagccctccccgaccccgggctcctctagcaaagccttctgaaataggatttatgagatgaccaacaatgcaacgaaactgtggacaaagatactgacattagatttgccatggccactcatgacaaagtttctattggcttttggcccattttcagatgtctgtatgatgagagataaattctccaatatcccrttagagttactaagcagcccccccattcagtggagtatacatatataaaggttctatttctt

SEQ ID NO: 292584 - DNA, 591 bp, Homo sapiens
ctctgtttcttgtcactttatactatctgggatagattccataaatttccagtcatgctgagccattaaaactctgttattttaaagcatcaacctcaaatttgatttaagtctcttccctcctttggatctttcttgtatggtttttcagagggctgtgcagacccttttgctccacagtttcttaaccaggagatccagcttgaactccacctcttcttcctaccatcatcagcacatgcccccaccacaaagcttcttgttactgccctcccccaatccctgcacttactcaggcaaccaccttgtgggcagggcaagatgtctacaacctggctattttctgacccaaagtcaactcactcatctttgccacaaacagtggtagggcagatcagaaccctctccttcctagtgtttctctttaggtgcttcttcccccaayccagatttacgtagagacaaattagccagttcatgacctaagcagatgtttaatcaggacatccatccattccactgaggttgccaatcttgcaggcccccagcctctgagctcttctgtcttgccttggtgaggagaaaggaggt

SEQ ID NO: 292585 - DNA, 591 bp, Homo sapiens
ctctgtttcttgtcactttatactatctgggatagattccataaatttccagtcatgctgagccattaaaactctgttattttaaagcatcaacctcaaatttgatttaagtctcttccctcctttggatctttcttgtatggtttttcagagggctgtgcagacccttttgctccacagtttcttaaccaggagatccagcttgaactccacctcttcttcctaccatcatcagcacatgcccccaccacaaagcttcttgttactgccctcccccaatccctgcacttactcaggcaaccaccttgtgggcagggcaagatgtctacaacctggctattttctgacccaaagtcaactcactcatctttgccacaaacagtggtagggcagatcagaaccctctccttcctagtgtttctctttaggtgcttcttcccccaacycagatttacgtagagacaaattagccagttcatgacctaagcagatgtttaatcaggacatccatccattccactgaggttgccaatcttgcaggcccccagcctctgagctcttctgtcttgccttggtgaggagaaaggaggt

SEQ ID NO: 292586 - DNA, 591 bp, Homo sapiens
ctctgtttcttgtcactttatactatctgggatagattccataaatttccagtcatgctgagccattaaaactctgttattttaaagcatcaacctcaaatttgatttaagtctcttccctcctttggatctttcttgtatggtttttcagagggctgtgcagacccttttgctccacagtttcttaaccaggagatccagcttgaactccacctcttcttcctaccatcatcagcacatgcccccaccacaaagcttcttgttactgccctcccccaatccctgcacttactcaggcaaccaccttgtgggcagggcaagatgtctacaacctggctattttctgacccaaagtcaactcactcatctttgccacaaacagtggtagggcagatcagaaccctctccttcctagtgtttctctttaggtgcttcttcccccaacccagatttacgtagagacaaattagccagttcatgacctaagcagatgtttaaycaggacatccatccattccactgaggttgccaatcttgcaggcccccagcctctgagctcttctgtcttgccttggtgaggagaaaggaggt

SEQ ID NO: 292587 - DNA, 312 bp, Homo sapiens
agttatagattaaaaattttgaggcamattctgtaatctctaaatatcagtatgttctttttttaaatttttgcaactttaaaatcaaaaaacaaaaagattaaagcaaccttattgtaaagaccttggaatatcataaaccataaagatccattgcaatattcatttatgcactgatgttaacacatatcacaagcaatatctaattcacttactggcagcacagtcatcagaataataatatccattagtaaaaatagaatgacgttgaaaattgattacatttttagaataatacagttataaaacata

SEQ ID NO: 292588 - DNA, 523 bp, Homo sapiens
taggtgataataaatgtgagagaataaatggaaatgaaagaagttaattttcatatgtaaaaattaaacacctgaaaggagcatggtattgttgyttcttccatggagaccaaatcagccttaaataaataaccagagttaagatggatgaaagaagttgagaagaacattatacacattctttagcttcataataatagttcacaagaggaaattattaccttggctactccccgatcacttgagtgggaagtaaagatgatagaggaaaaaagacaagtaataccctccaatcagggcagactactgaggaaatcactatagtgcaagttgtctcatcatttttcttcttaggtagtgtagctttgatccatggaagcaggtaaatgatcccttaactttactgcctggtgcatttgtgttagggagaaaagcatatgtgaaatcaaagtgaaatggacgttttggttctgttttcaaatttaaagtagttataagtatcattatcatgaccaaagttctt

SEQ ID NO: 292589 - DNA, 602 bp, Homo sapiens
aaggttatcatcctgaagtgcagagggctccacactcatccagccttgctggggagtggggacatatagagtgggtagagaggagagattaccatgcttatttcagctgacattatcaaggccaaggcaatcatgtgataatgtgtgaatgaatcagaaggggtagcccagatatttctgtactcatatcaacattcacacttcaatcccagccagctgccatgttccttttctgagttttcactagccactttccamgggagactcatcacctttattttattaatctgctaagaagagaagcccccctcagaattatacttagtacctgggattgcttccttgacagtatatccctgccaaacttctgaaaggaaaggtctctgctgccatttttcttcttctgtaaataatgatctctttaatagaaactaaatcactcattcattcatcgggcatttttactgagcatttattaagtgccaggcacagaggtaagcccctggaggtccaggatagatagagaaacatgctgtctgcctcatggagcttccagagtggtagagaagctggacattaaacaagtgaagacacaaatccat

SEQ ID NO: 292590 - DNA, 547 bp, Homo sapiens
acaatttagtattatactaggctcttttacaatttggggacatttacttaagcagtaataaaaaatatgtaaacaaatatggatatggtgtcatttccaagacatgaatcctaaagatgatattagaacaaagttccagcatctgtacaaagtactattcattcaaaaaaatatttttttgtcctcgcgcagtggttcatgcctgtaatcccagcactttggaaggccaaggtgggaggattgtttgaggccaggagttatgaactgttcatttattccatcttaatgtttaaaagaaaataacaaatccttccattatagcttttcattgatttttgttagaattatattgggcaaacagttcaaatgcatccttaaataattattcaatatgcatagagagcagaaattaaaatgttttctgtcatcttcatggtcccattaaactgaacagtagcytagcctgtctgtgccaatttgcagcaaatctatattattctgagaaaacagactgcattttaataaccttatatttcctttgccatat

SEQ ID NO: 292591 - DNA, 604 bp, Homo sapiens
tgcgaacggcaaagtaggttgctaagcctggctgtggcccgatgggttgctcatggtttatgctggtggtcatagagccatgctgtgcaagttccttgcagcggcagtagcctgtagcaggtgtcctgatagttcagttcagtgggttaaattactaggaaactgggaagcaagacttaatccgtgagtactgtgctttttgtgattacactcagacatgtggctgtcatttggaagatggccagccaattggatctggaagttgcctrgtggaagcggaattgaatgtgtggaggaagaatggtgtgaatttggaacaagtggctgagtctttttatgggttaatgtatcactttcaattccttactccagctgttgccagcagataaattagctaaattaaaagcagacagactggaggagttttccgaaataaatcacttctcttctgttataccagtgttggttatactagccatccccattcccagcagtgagaggaacagggctggtcttcaaatccaacatgcccccttttctgccacacccttatagaaccaaagctttggactattgagggcctattatttttgttaaaagacta

SEQ ID NO: 292592 - DNA, 604 bp, Homo sapiens
tgcgaacggcaaagtaggttgctaagcctggctgtggcccgatgggttgctcatggtttatgctggtggtcatagagccatgctgtgcaagttccttgcagcggcagtagcctgtagcaggtgtcctgatagttcagttcagtgggttaaattactaggaaactgggaagcaagacttaatccgtgagtactgtgctttttgtgattacactcagacatgtggctgtcatttggaagatggccagccaattggatctggaagttgcctggtggaarcggaattgaatgtgtggaggaagaatggtgtgaatttggaacaagtggctgagtctttttatgggttaatgtatcactttcaattccttactccagctgttgccagcagataaattagctaaattaaaagcagacagactggaggagttttccgaaataaatcacttctcttctgttataccagtgttggttatactagccatccccattcccagcagtgagaggaacagggctggtcttcaaatccaacatgcccccttttctgccacacccttatagaaccaaagctttggactattgagggcctattatttttgttaaaagacta

SEQ ID NO: 292593 - DNA, 546 bp, Homo sapiens
gaaagattatttgacactttatttgatgttaatggaaattcttcgtgtttgatttatttgttcagagtcattagcctcgtgagaacccttcatggggcctttatttcacagtatttgcatgagcattgttttttatctttgaaaaatgggtaatgttatgaaaaggaatatgtgttagtctctaaacatrcaagccttatatcaaaatagtctgacagtgtatttatacaaaacatgctgcaggtatcaaacaaaattgtaatcaaattagaattttaagccttgttgttttactctccaagtccttataaaccagaagccctaactttttagaataacactgttcaataggaatagaatgtgagcaccatgtctaatttaggttttctagtagccacatttagaagtgtaaaaaaaaattgttttttttgtgaaagcagttttaacaacatattttttttactatatccaaaatgttatcctttcaacatgtaataaatttcaaaatgattaatgagatactttattttttcatactaagttttt

SEQ ID NO: 292594 - DNA, 606 bp, Homo sapiens
cgtggtacttatgtaccaaaagggcacctagggtgaaatttcactttctacccccattccactctgggttggactgaaaaacacgcactggtgcaattaaggatgtaaaaaaattaaccaaaccagcggatatagctaagaactcaagtaaggctaagcttgctgttgaacagtgacgcaaagtcaccccggtgtgtcttcggtgggacagtgatcatataaaatcagatgttgacatatgaaaacagtgtttctgatttgttaaattaccacattaacagcaagtgctgctggtttgatttgcacctgatatgataagaagctaattatatgacagggcgacccacgtggcagggcaatttaagtcctagcaacacaatatttayctggacagcaaacagtcaagctgctaattcaagatgcaatcttttccagaaacttagccaatgcggtaaaaaacaacgttccccattcctcacacagacactcgccaggtctaggaaataaactataacttattttttggtcaactactgatttagaaatgatttactgatgaccttttataataagtattttatattaaatagtcttaagtaaaaatgt

SEQ ID NO: 292595 - DNA, 442 bp, Homo sapiens
tcagtcattattcagttattagaaaataagatttacaaggcatccatggaggggaaaacaattacacacctggttagttgggctgaggcttgcagagakaaaatcacctgcacactgttgcagagccagtgctccaacctagacttccggacaccaaagcctatggccattaagcactctgctggactgtatcttggatagtttgctttatggggaacgtagtacaactttacaatacaactttaaaaataaagtatagcagagtagcagtttgtccacagtcaaatatgaaatatgtaaacatttcacaggttctttttttaatttttattttaggtttgggggtacatgtgaaggtttgttatatgggtagactcatgtcacaggggttggttgtacatattatttcatcacccgggtattaagcccaaagcctaatagt

SEQ ID NO: 292596 - DNA, 442 bp, Homo sapiens
tcagtcattattcagttattagaaaataagatttacaaggcatccatggaggggaaaacaattacacacctggttagttgggctgaggcttgcagagataaaatcacctgcacactgttgcagagccagtgctccaacctagacttccggacaccaaagcctatggccattaagcactctgctggactgtatcttggatagtttgctttatggggaacgtagtacaactttacaatacaactttaaaaataaagtatagcagagtagcagtttgtccacagtcaaatatgaaatatgtaaacatttcacaggttctttttttaatttttattttaggyttgggggtacatgtgaaggtttgttatatgggtagactcatgtcacaggggttggttgtacatattatttcatcacccgggtattaagcccaaagcctaatagt

SEQ ID NO: 292597 - DNA, 442 bp, Homo sapiens
tcagtcattattcagttattagaaaataagatttacaaggcatccatggaggggaaaacaattacacacctggttagttgggctgaggcttgcagagataaaatcacctgcacactgttgcagagccagtgctccaacctagacttccggacaccaaagcctatggccattaagcactctgctggactgtatcttggatagtttgctttatggggaacgtagtacaactttacaatacaactttaaaaataaagtatagcagagtagcagtttgtccacagtcaaatatgaaatatgtaaacatttcacaggttctttttttaatttttattttaggtttgggggtacatgtgaaggtttgttatatgggtagactcatgtcacaggggttggttgtacatattatttcatcaccygggtattaagcccaaagcctaatagt

SEQ ID NO: 292598 - DNA, 621 bp, Homo sapiens
caatttgcaaagatatggtgtcacagaaaggaatatcatggtcttaattggaaactgggaactattccaagctattagttttccaggtggttgacagatgttttcgtgtttttcttgaacatttaaaataacgcttgcacccatgtacattccctctgttgcctcaggacacattttgagaactctggccctagtcccatcactcctacaccacagggtgaggggtgaggatacctccccagctgggaaaaacccagaactggggaagagatgatttggccatggtagctttctttctgtggttaatggaagaaagctttcaagataacaaattgatatgcttttgaaatgttcattagtgtaatattatcttgcaatctaggtaagagatgactacaaacttttcatgtagatccagtgagaattagaacctttgtaatgcaacgtgtctttttatttatattcttcctagtgagaccagggaagattaataatctggaataaaagatacaaattgacataaagggaattcttcttcctttttcaaactcaggactggaarcaatactactcttatacttagcaggcaaaagtagtagagaggagtggctgtgactgaaa

SEQ ID NO: 292599 - DNA, 582 bp, Homo sapiens
gatgggactgggtggtaggtgggtaaggtggcagatagatgcaagagcaggaaccactcaccaggcactaggaaaagctccatctagccaggcatattggcaatagtgtgccctgactagtctttgggggcaaaacataacagtctcctaaaaagtggctcagaacaggtaattcctagacatatgcccaggcgtgaacaggacaacttattgaggtatggaaataaaatcttatattttttcttatccgctcacaaattttctttttcttgtattttgtaaaatagataatattttgacataatagtgcaagaacataacttattgaaaataaatatacgtaatggaggtgcttgcacttttttttttttttttttttttttttttactaatagatacggtatccaataaaattggtaatcactkgtctggactcatgtgacttcaggaagctctatacaccagcttgcagttcatggatgggacaggaagagagtatcttaagcctattttggaaggccaggtggactggagtctcagggacggaagataagcacagggaattaaagcagaagccagcta

SEQ ID NO: 292600 - DNA, 593 bp, Homo sapiens
atagttggattgcatatttacttttcagtagtatgttggcatgcatgtagatccagccttcctttcaacaaagaacagtggtggaagattcccttaaatggttactctttcctcaataagagcaaccatataaaaattatagaactattagtcatcatagttgaaagtatcgcataagattaacagagtccccatctggtgatatgtttttacatcagatttattaagatcagagcgggttttaactagagcaatgacactgctattattaaataagagayggaaggcctaatacataattgtctatttctttctagacatttatgtgtttttattaggataatgaatacagaattatcaacatcatgatcatagtttttttggtttttaagtagtatctgtaatggcaagctcatttttattttataacctacccacacacagacctacagtgaagcaaaacagatgctgaaatatgtttgttgccattggctttgaagaaacctcagagaggtttgcctcagtattttaaaagcaaaatggttggtacctttctgaatagatgtcattgtgtccttcaaacaaagctgaca

SEQ ID NO: 292601 - DNA, 593 bp, Homo sapiens
atagttggattgcatatttacttttcagtagtatgttggcatgcatgtagatccagccttcctttcaacaaagaacagtggtggaagattcccttaaatggttactctttcctcaataagagcaaccatataaaaattatagaactattagtcatcatagttgaaagtatcgcataagattaacagagtccccatctggtgatatgtttttacatcagatttattaagatcagagcgggttttaactagagcaatgacactgctattattaaataagagacggaaggcctaatacataattgtctatttctttctagacatttatgtgtttttattaggataatgaatacagaattatcaacatcatgatcatagkttttttggtttttaagtagtatctgtaatggcaagctcatttttattttataacctacccacacacagacctacagtgaagcaaaacagatgctgaaatatgtttgttgccattggctttgaagaaacctcagagaggtttgcctcagtattttaaaagcaaaatggttggtacctttctgaatagatgtcattgtgtccttcaaacaaagctgaca

SEQ ID NO: 292602 - DNA, 591 bp, Homo sapiens
ttccaaagatttataagtcatgtcgttctcaaaggggtctctggtctccaaaatttgaaactctttgcaacagggtggctatgttttagaatgacataaacagatacaatgttctccagagtccagagcagggtctaaacctattgggatactatacttgtgttatcaactgaaccacttggttagttcactaggaagatctgcaggtcttgagctgagcttagtgttttacagacatgtgccattcattcatcacctacaccactcatcaaatatctgaagaactatgaaggctgaaggaaaataagtgggtgagcacaggtgcaaakaaataataaatttggagcattctatttcgtgttatttcttgctaaaactggcatattaccccaaacatcaattgcaatatgctattcaacaagagtttttaactagtttataataggaaaattgctcttttttaaaaaccagggttaaagtcacatcctttctctcctctgacaaagtcactgtcacataaaataatggtcctagagtcaaaataataacagaactttgttctgatggagactgtaaatataccaatactcc

SEQ ID NO: 292603 - DNA, 645 bp, Homo sapiens
tgcaggtcttgagctgagcttagtgttttacagacatgtgccattcattcatcacctacaccactcatcaaatatctgaagaactatgaaggctgaaggaaaataagtgggtgagcacaggtgcaaataaataataaatttggagcattctatttcgtgttatttcttgctaaaactggcatattaccccaaacatcaattgcaatatgctattcaacaagagtttttaactagtttataataggaaaattgctcttttttaaaaaccagggttaaagtcacatcctttctctcctctgacaaagtcactgtcacataaaataatggtcctagagtcaaaataataacagaactttgttctgatggagactgtaaatataccaatactcccattaaaaatataggtgggctgcctgaactgagaaggttgtgtcatggctgttagttttaataactggaaggcttgacagagataattgcrttagtgcttcactggcctcaagatgcatgcaatgagtaaaattaagaccatcttattaaaataccaaagcattgtataggaaactcccatgtattcaaaggggaaagaagaaaaaggaatttcatatttacggagcatgtactattttcaaaactctgttctag

SEQ ID NO: 292604 - DNA, 575 bp, Homo sapiens
ttcaaatgacagcatcaaagatagtaatccacggtgctcaacaaaagtcgaatgaccttttttccttctccattcataaatacataagagctgatgcttcattatgtttaaatacaaaatgcacactcctactttgttttcctatatgtgagttctcatgtattcttcaaatgctcatctaattactgttacctactattccaaatgcaaatgacaaggtcccagtttactgttgatcctatattacaagagtcatcaattttggttgagaaacacaaaggacaaatatytcattattgtgctaaccatgcctattattagttttgtgcccccataacataagtaatagccccaaatacatggcacttatcacacaccaggcataattctaaatggcatgttctccatgttatggaagaagagactgaggcatggagagagtgagtaacttggccaaactcacaaggctacaaaggcagagaatcaggttttgaactcagggctgcctagaccctgtgttcttaactatcatcatatagtgtctctcttactgtttctcactgaagatgagagag

SEQ ID NO: 292605 - DNA, 536 bp, Homo sapiens
gtctctcttactgtttctcactgaagatgagagaggattaaaatctcaggaataaatgtaacctccacaggtaggcttatgcataaaattcagatgcaatgaataacaaaatgactgcctcccacaaaattaagaagcaaacatataatgaggacttactctgtgcacacactggtgaggacacgttacacatttcatatcacygagttcacacacacacacacacacacacacacacacacacacacctatatgagggcagtatgatttccccatgtgataaagaaggaaagggaagctcagacagattagatatattgtctgacattgttcagatagcaagaagcagattcaagatgcaagcatagaccagagaccattatttgagaccatgaggccttttctcaccagttattcattcacttaatattaatcacttaatatgcatttgctgagcacctgtcgatgtcttgtaaatcagtgcaggaaaatcataagatttgaaatcacagcatctaggttcatatctcagcttc

SEQ ID NO: 292606 - DNA, 536 bp, Homo sapiens
gtctctcttactgtttctcactgaagatgagagaggattaaaatctcaggaataaatgtaacctccacaggtaggcttatgcataaaattcagatgcaatgaataacaaaatgactgcctcccacaaaattaagaagcaaacatataatgaggacttactctgtgcacacactggtgaggacacgttacacatttcatatcactgagttcacacacacacacacacacacacacacacacacacacmcctatatgagggcagtatgatttccccatgtgataaagaaggaaagggaagctcagacagattagatatattgtctgacattgttcagatagcaagaagcagattcaagatgcaagcatagaccagagaccattatttgagaccatgaggccttttctcaccagttattcattcacttaatattaatcacttaatatgcatttgctgagcacctgtcgatgtcttgtaaatcagtgcaggaaaatcataagatttgaaatcacagcatctaggttcatatctcagcttc

SEQ ID NO: 292607 - DNA, 536 bp, Homo sapiens
gtctctcttactgtttctcactgaagatgagagaggattaaaatctcaggaataaatgtaacctccacaggtaggcttatgcataaaattcagatgcaatgaataacaaaatgactgcctcccacaaaattaagaagcaaacatataatgaggacttactctgtgcacacactggtgaggacacgttacacatttcatatcactgagttcacacacacacacacacacacacacacacacacacacacctatatgagggcagtatgatttccccatgtgataaagaaggaaagggaagctcagacagattagatatattgtctgacattgttcagatagcaagaagcagattcaagatgcaagcatagaccagagaccattatttgagaccatgaggccttttctcaccagttattcattcacttaatattaatcacttaatatgcatttgctgagcacctgtcratgtcttgtaaatcagtgcaggaaaatcataagatttgaaatcacagcatctaggttcatatctcagcttc

SEQ ID NO: 292608 - DNA, 565 bp, Homo sapiens
tcagagtatccaaaaggaggcytaagaatctgtatttttaaaagcctctccaaagtgatatgtagcagtaattgaaaaggacaatctctttacttcattgatgaaatagctaagtcccagagaagtcaagaggcttgccaaaatcacaacgaggtagtagcggggtcagaactcaaactcaaggctcccaattctcaacccagtagtattgcccagcatcagttcttatctttgcgttataaatacattcctgcccatcaacagtggattgcaaaagcagggaggaagagagggtggcaagggtcaaaaaatagctatcaggtcctatgttctctacttgggtgacaagataattagaagcccaaacctcagcttcctgcaatatagccatgtaacaaaactgtgcatggacccctggatctaaaatttaaaaatcaataaataatacaaaagaaatacattcatatttttctgaaatattcttcagaatatcaagtgggaatccctttgttttgcaaagctggtctgatatgtttaagtaaatttaaccagatagttgttttct

SEQ ID NO: 292609 - DNA, 600 bp, Homo sapiens
actcataattacattgcaaatttaaaggacagctctgtaggaagaagccaagagcagaataagcatagatgtggtttggattttatttttcctcttgtcaaatttaacttaagttctgaattctataaaraaagaaaaagagtggtgaaacagtcatattttaagatttttaaaagtcttaaagacatggaaaaagcaaagacgatacctacactgcttatttaaaaaaaaactcgatttgagtttcatgaagtactggcatttgctcactctgtaattctcaaagactattttcaaaatttggtcaaattaaatttcaaaggtcagcaaagtatataatcatgtttgggttcttttttcccccaagtttaaaaaactgacatctatcctttttttaggctatctgaatgtatgaaaaaagagtagaagttattttacagcatatatttttctgtaaaagtaactacatttaacattaaattatttaccagtggtattcattttatataagcaggctggagatggaggttctatttacatatttccactgtcatggtacagtatagtactaagtattttacaggccagcaatcaaaagaa

SEQ ID NO: 292610 - DNA, 563 bp, Homo sapiens
taaataactgtattttttaagaaagccatattattgctttagtttggtcattcatatatccaaaccttggactcatcatcttgcaatctcatgtgttcagttattccagagaaaacattaaggagaattgtattcttcttcccagctaaattttaggtcctcaaagctggcaaccacaatttatgctttctaaaaatcatctatgatactaagtatgagctggatcatgaataaaacccttgtaacaataaatgcttgatgacttacttcatctcattagcaagggaaggtaactcataattatcaaggtactacaggaaatagggcactatctggaaatgctaaatacatctccttgcatgaatcacttcttaccagaattccctttctttccagatcccacctccagggttctgtggtccataccaggcactacaktcctcaggggctacagcctatgagcgtctcatggggctatgaaaccatttgagacctggaaaatgaagtaattgaatacaaacagaaaactgcaaaatgaggactaacatttaattaaatgttca

SEQ ID NO: 292611 - DNA, 542 bp, Homo sapiens
atggaatcactgtaattctctatgggaactcatgaaagtggaacttgccgtttaatattgaacgacactgagcacagagttattgatgatttctaatgygggatttggtttatttttcagacacggagatgacttgattgtgactccatttgctcaggtaagcacagcttggtgaatgggcaggtttctcacagatgtaaaaatttaatttggggaattagttcgggttattaatttaatttaattttaaatcaagcacaagtacaaatacaaattcttggttcattcaagcaattcaaaagcaatgctagagaaagtgactttggctatattaatctgtttcctataaacccatagtaccaaagagtgtctttgcttcaaataataaattagctaagggatatacttaattgggctcatactgacataagcactagaagcagaaggctatatcatggcttaagttatgtttagtataattaggtacatgatcagtgcttgaaattcaatattccaattcaacccaataccttatttatctc

SEQ ID NO: 292612 - DNA, 542 bp, Homo sapiens
atggaatcactgtaattctctatgggaactcatgaaagtggaacttgccgtttaatattgaacgacactgagcacagagttattgatgatttctaatgcgggatttggtttatttttcagacacggagatgacttgattgtgactccatttgctcaggtaagcacagcttggtgaatgggcaggtttctcacagatgtaaaaatttaatttggggaattagttcgggttattaatttaatttaattttaaatcaagcacaagtayaaatacaaattcttggttcattcaagcaattcaaaagcaatgctagagaaagtgactttggctatattaatctgtttcctataaacccatagtaccaaagagtgtctttgcttcaaataataaattagctaagggatatacttaattgggctcatactgacataagcactagaagcagaaggctatatcatggcttaagttatgtttagtataattaggtacatgatcagtgcttgaaattcaatattccaattcaacccaataccttatttatctc

SEQ ID NO: 292613 - DNA, 528 bp, Homo sapiens
ctgtaatcccagctacttgggaggctgaggcaggataattgcttgaacccgggaggtggaggttgcagtgagccaagatcatgccactgcactccagcctgggtgacagagcaagactctgtcaagaaaaaaaaaggaaagaaagaaaacttataattctatatctaagacctsagagagaggtgaacagacaaaatatggcataacaatgtaagtaacatcatcaaacatagaaccaatcattccaatttgagttcattcaagtagctattcttgtttctaaccaaatgatctaggtattattataagaaaaaatatatataaatatttaataacaaatgaaaaaaggtctgtgtatgatatatggtcttttacatcaagtaatatttattaagctgcaacaaatagattagtaaattggacttgaaccctgccatcagtgctcttaaattccaaggaaatctagtcttttacctgattagatattttctgtagtgtacctataatctccaaggaaaaaaaactaat

SEQ ID NO: 292614 - DNA, 560 bp, Homo sapiens
gtgcttgtcaggggctgggagaagaggagaataggaagttactattaatgagtacagggttgtcgatttggaaggatgaaaaagttctggagatggatggagataatcgttgtgcaacagggggaatrtacattacaccactgatcagtatacttagaaagggttaaaatgtcaattttacgtgatgtgtattttaccataataaaaaatacttaatatttacctatgcttagagagagttgacatatagtcatttgataaataaaatttgtaaatgcgtatgcttagataaacatagaaaattgttttaaagtagaacttatagatttctagctttaaaactgtggagaaacaatcttcctatgccatttttttctttaaaaagtcactcaaaccaataattagtacaaaaaacagaaaggtacatttcatctttgaggaaactgggagatgtctgtgactctaagccacaatacataaagatagaagtaggaagagaaaaggtcaatgacttaaccaaatcagagaacaatactaaagtgaagcaaactgagctgccc

SEQ ID NO: 292615 - DNA, 592 bp, Homo sapiens
atatataatatggctctaagaaatatgctcatgatagattggaaagtatagaatatctattgtaatctgaaaataggaatttagagaacagaagatttgatagtaggcagagtatttgaaaatagtaatacttgagaaaacytgagttgtatagtaaaattactccgtaacacctcattcagttggcttcatttaatgtttaatgtttaatccatggataaatgtcataagtctcacaagtcacgctcaccattggatgataagagaaagggagatcacattttaggtgcgcacaatctacctgtatgcaattgacgctttccatgtaagtgttgccaagttgtatcggggcaccattagtggtatgagacagactttaggagttattttggactcctttttttctattaatatatcttatattttgggggcaaattataccagtatattaaatctatttacagaataaatataaagttaccttttatattcagtttaagtttttttaaaaagtgagtcaattaagaaaaatatcaaatcatggtatagatggaatgctaatatggaaagaattatgaaggtggtgttatga

SEQ ID NO: 292616 - DNA, 601 bp, Homo sapiens
tatcagtcaaatattagacacatctattatatttatttatttaattacatgtataaaatcaatatagattatagatttggtatrtagagaaaatatatgtttgtgtgtatatatatgtatacacatacatacacacacacatgtttacttgagcattaaaaaaacccaaacggcctctcttcttgtgcctctgcacataaaggccacaggcctcaaattgctcagagggacaatgttttctcaccagtgttgctgtctgcatttctccaccaccaccctaccctcattccttttcagttgacttcccatgagagagacctaaaactttgccatttatctctttttcagatgtttatttgtttccaggttgatctccaaaatactttgttcttgggacacatctttctggctttaccatcttcactctgattacataaatctattttgtgttccattggtctactttctccaaatctgtctactgtcctccgggattccctaaagccaaacattacgtttggaagtttgttgtattgtgcaagaatccaatgttttggattacttctttacctttttctatttgtttctctccaagtatcat

SEQ ID NO: 292617 - DNA, 601 bp, Homo sapiens
tatcagtcaaatattagacacatctattatatttatttatttaattacatgtataaaatcaatatagattatagatttggtatatagagaaaatatatgtttgtgtgtatatatatgtatacacatacatacacacacacatgtttacttgagcattaaaaaaacccaaacggcctctcttcttgtgcctctgcacataaaggccacrggcctcaaattgctcagagggacaatgttttctcaccagtgttgctgtctgcatttctccaccaccaccctaccctcattccttttcagttgacttcccatgagagagacctaaaactttgccatttatctctttttcagatgtttatttgtttccaggttgatctccaaaatactttgttcttgggacacatctttctggctttaccatcttcactctgattacataaatctattttgtgttccattggtctactttctccaaatctgtctactgtcctccgggattccctaaagccaaacattacgtttggaagtttgttgtattgtgcaagaatccaatgttttggattacttctttacctttttctatttgtttctctccaagtatcat

SEQ ID NO: 292618 - DNA, 579 bp, Homo sapiens
tctatttaaataataatttggtatatatgactatttgagcattttaaactgttgtcattttacaataattattttagtatgatttaatatccaaattctgttgcttagattcaccctcagtggacatttcttctgaagggccttcctagacttccccaattagaattaaaactctcttctctgtgctgtcatgaaaccttgtacatttctctaactcttgaaggattacaattattgycttctgtctcacgtacctctcctgtgagcatgttttggagtagactgggtttgctcatctttgtagagcaatgaacccctgttcccagcaccatgcctgctccatcatgggcattcaacatctgtcctttgcatggaaagtagaacagtgagttcttccatattacaaagaatattacagtcaatttttatttttaattttcttttagtagatggcacttttcaggagattgtactgggtgagttgtagacacagtagttactctttatggcaagagttgtatagtatccgggaggatttttgcctcttccctgtggctttctttcacccttagtttgcca

SEQ ID NO: 292619 - DNA, 564 bp, Homo sapiens
gcctggaaatccatgccattttaataagagatatttttattctaggtaaattgtttacttaatcacctcctaacaaggctgtgtcagccaagttaaatatttaaatttatttttatttaaataaattttaaaaccaacagatttctttctcattttaatgaatttagcctttgagttttcaaagataaaatatacagagtagaacattttaatgtatctgtagagagggaacacaaaaagggcacatcaggaaaaaatagttggaaaaaagtgaattttatacaaaattaactcataaaatgaatataaggcattatttcacttrttgccaaaatctgtctttacagataatcttcgggagacctttatttttataggccctagttaaaatattttttgaatgcttgaggctctatttcactaataagagaaataaactttttctttctataaataactgctactagcttgtttgtcagctctctaaataaactcattttactattactatgcttgagtgctgttatatattcctttgttactgtgcataatccctggctataa

SEQ ID NO: 292620 - DNA, 671 bp, Homo sapiens
tgtctgattttgcttttggaaaatttatcatttcttcttctagttaaatataatttttaaggaaagtatttgagtattattttgacccatgtatatggttctcccagcagcaccttagatgtaggtactttataaatagtatacttcagggcttgctactcaaggtgggattcatagataagtggcattggcatcacctgaaaacttgttagaaacatacgtacctactgaattataatctgcatgttaatacattccccaggtgactcatatgctctttaatgtttgagaatcattgctttcagctgttttgttctcagcttatttcagctttatagacagcttactttgctcctagtagtaattgcttttgctgcacgttacattttcctgtctgctagyagataatgcacttttttggaagagcttgctttttaaaatgtgtctggtttgaaacaagaatggagtagtctatttcaaaagacaattgtcttttgaaataacgtttctcagttgagttaagagctgttgtattgattatggcattttagaggtagctgaattattaatttggcttcatttggcagatagaacagtttaaaatcagcgattttatgaaacatggtgttttatgtcatgagtctgttatcattgtcttaaatatatgctag

SEQ ID NO: 292621 - DNA, 436 bp, Homo sapiens
aaatcttcaagttataggagttcaagaatgagaagagaaagataaagggaaagaaagcttatctaaagaaacctttcaacctggaaaaagatgtaaataatacaggtaaaggaaagacaaagatctcraatcagattcaatccaagtaagactgcctcaagacatataataatcacattattgggatcccagattgaagatggccgaataggaacagctccggtctgcagctcccaataagatgaacacagaaggtgggtgatttctgcatttccaactgagttacccagttcatctcactggaactggttagagagtgggtgcagcccacagagggtgagccaaagcagggtggggcatcacctcacctgagaagcacaaagggtcagggaagtccctcccctagccaagggaagcgtgagggactgtgacttga

SEQ ID NO: 292622 - DNA, 490 bp, Homo sapiens
aagtatggaggatgaatgtgggaagggaggtggataaggtcagagaaactagttagaagttattctggtaagagaggttgagttactgaaccaataaaatgatatgatgcattgacaaatttgagagagactgagtcccagcagaatttggcagctagttagatataatggttgagagtgagagagaataattaaggttttttttcttttagatgaatgggggtgctattcccttggattgtaaaggaacagttttgggagggcagtgaagcaaggaatgctagacatattgagattgacatgcctgtgggstgtgagatatataggtagatatattgaacagttggctttatacatatgtatgtttagagtttagaagataactctgggctgagatatactttgaaaaacattttctcttagataataactgattagtcataggtgacaagtgagtagtttaatggaaggagagtgggtaatgtgaaaa

SEQ ID NO: 292623 - DNA, 499 bp, Homo sapiens
atagccagacagatttagaaataagtcctggccctaaaacttctatctctgtgatactgaataagtcacttgtcggagaatgagtttccttgaagggagcatgataaggatattcaggggattaataaaattctgtttatttattcacctggttggtggttagtctggtgtttacagtttgttagaattcattgtgcatttgtgaattttctctatgtgagtaacacttcaattaaaacagcagtgtgctggggaatatttctccagtgagaagccccaatttgtaacacttgccggtctccatggtgtaaatattctcgccacacctgaattcattaatatgaaatcactgaatgaagagttgggaagagatgtgcacakttagctcttttgagttagtatgagttgtctctagcacatccctagataaaatatgtttaaaagaaaattaactatgtaatgaaccttttaactgtgttattttttaacttccttcaga

SEQ ID NO: 292624 - DNA, 569 bp, Homo sapiens
agaagccctgattttagtgctgaattggatgattttttaaaaattatttatagccctataccattcttaggatgtttcaaggagtctctaccttgtctctctaaaattaactgagaatcttaacggttaatcattccatacattttttttagttttccagtttactaattttgtcttctttaacccagcttttcatatgtaaaatctccatttgggtacttttttcaaattcacttattcttttttattatgtcctgttcttgccttatcgactatatttctttttttaaatctcttaacacgctcatttttaaaagttccttatatatttctcggttatatagtcttcaaaagtgaattcttctggttatatgtctgcttatacttgttcgttggcagttgattttctggcatgtttcgtaatttataattgtgagtttatctttagtgggcattgtttctgtatgtcttggctgttctgaaytatggaagcaattctgtggggccagttttgtgtttgattttctgtgatcttatggcttttaccagtaaaagacttgttttaatgt

SEQ ID NO: 292625 - DNA, 473 bp, Homo sapiens
attttgaatgaagttttactgtggataatatgctataaaacagcattgcatgctacagataaatttttgtgaaaagaagagtctaacaatgcagaaaacttcattgttgtcacaggcactccttcctccagcaaccaccaccctaatcagtcagtagccatcagcatcaagacaagacccttcacctccaaaaaggattatgacttactgaaggctcagatgatcattagtaytttttagcagtaatgtgggttttaattaagcatgtacattagttttgtaagcacaaagctattacacacttaatagactacattatagtgtaaacataacttttgtatgcactgggaaaccaaacaatgtgtgtgtcttgctttattgcaatattcactttaatgaaatggtttattactaaacccgcagtgtctccaaggtgtaggtatactagatttggtctttgactctgggtcagc

SEQ ID NO: 292626 - DNA, 495 bp, Homo sapiens
atggcaaattgattcattgtgatgggatcacttattccaaagacttcctgtctttattttgttgccatgcctaccttttagccatgatamaacagaatcaaatattggccactgggaaaaaatattcaaagcaagaaagaatgtgaacagaacttatgaccatgatgattcaatgttttaccacaatgctttctaaaacagaagagtgtaaaaggatattcaaagtcaatttcctcagcgaggctttgcagaaaatgaggaaactacagaaacaaaaatggcaggacattctacgggtgattttaaatgttgctatgttttatgggaaaaaaatactttaccttttaaagaatcacaaagaattattggaaacccaaactctggaatgtttgcaaatttagttgagcttctatgtaattatgtctatataggtagccaggaagttgatgattttttaaaaatctgtgccttatttgtgtgataaaatacacaatg

SEQ ID NO: 292627 - DNA, 495 bp, Homo sapiens
atggcaaattgattcattgtgatgggatcacttattccaaagacttcctgtctttattttgttgccatgcctaccttttagccatgatacaacagaatcaaatattggccactgggaaaaaatattcaaagcaagaaagaatgtgaacagaacttatgaccatgatgattcaatgttttaccacaatgctttctaaaacagaagagtgtaaaaggatattcaaagtcaatttcctcagcraggctttgcagaaaatgaggaaactacagaaacaaaaatggcaggacattctacgggtgattttaaatgttgctatgttttatgggaaaaaaatactttaccttttaaagaatcacaaagaattattggaaacccaaactctggaatgtttgcaaatttagttgagcttctatgtaattatgtctatataggtagccaggaagttgatgattttttaaaaatctgtgccttatttgtgtgataaaatacacaatg

SEQ ID NO: 292628 - DNA, 611 bp, Homo sapiens
actctggaatgtttgcaaatttagttgagcttctatgtaattatgtctatataggtagccaggaagttgatgattttttaaaaatctgtgccttatttgtgtgataaaatacacaatgaataattaatgctcataggaaaaccttatgaagggaaaataaatcttgggaatcaaaatcactaagctaaagggaaaagccaagctgggaactgcttagggcaaacccgcctcccattgtatccaaagtcacccatctgctcaccgagataaatgcatacctgattgcctcatttggagagggtaatcagcaatgcaaaagaatgaaaccatttgtctcttacctacctatgacctggaagccccctgtctggccttctcacctttctggactgaaccaatgtacatcttacacgtattgattgatgtctcatgtctccctaaagtgtataaaaccaagctgtgccccgatcaccttgggcccatgttgtcaggacctcctggggaggcatcacgggcgcacatcctcaagattggcaaaataaactttctaaaaaatctgagagctgtctcagattttcagggttcacacakgtaatgtaggatgtcaatgt

SEQ ID NO: 292629 - DNA, 587 bp, Homo sapiens
tgtaggatgtcaatgtttataaaacagacattattctatctactattagaaatatgctgccaattaaccttacactttctcaacaaaataaaaaatgttgatgaggtacaaataatatatctaagcttaaatagtgttacaagttttaatatgcctacttttcaatttttcaatactatttttactaatttaacactttaagtgaataactaaaacatgaataagtgtttacaaggggtgcacatgtttcctccagcctctgcctatccccagctttcatcccaactgtcttgatggtggctctaagcatttctcctttctctatgccaagatctctcccagaaacaaacccaaatcttactatatgttatggcacgctatgatgatgagcagcgatgagcagccgaagcctcaaggaagggatgcttttgtaaaacaagacttgtagaatataacgtgtgaaagtaaagcccatggcagagctccctcctcagcacacggggagcagacaggaagcttttgcctcaccttcctcaatggcctscagccacgtctcccaggtcagtcttaaggacaacgaaactctg

SEQ ID NO: 292630 - DNA, 586 bp, Homo sapiens
ctcaccttcctcaatggcctccagccacgtctcccaggtcagtcttaaggacaacgaaactctggtcttcactgtggacatgccacactaccaggtgctccaaagccatggtgacccatcctcgggtgggtcctgagaacaaagctctggttctaatyctaaccctaaccctgtcccaagactttgagcctgaagctaaatcctgatccctaccctggtccctaattctgacccttactttaaccctgactttgatcttgaccctgaccatgaccccacctctaaccatacttccagccctgactctgacccagatcctaatcctatgcctaaccctattattatctttacaatctatctctactcttaccctctagtgctaaatagctgtacccaaaagcacttttaaattatttcttttcttgaattctctatggacatcctaaaggagatgtcaatatgtatcttgcattccctctgagtggtatggcttcagatatgaagttctaatactttgcaagacataaaaagtttggagggtaacagcactgggttgttagggatgtaagttggcattcatgatagt

SEQ ID NO: 292631 - DNA, 586 bp, Homo sapiens
ctcaccttcctcaatggcctccagccacgtctcccaggtcagtcttaaggacaacgaaactctggtcttcactgtggacatgccacactaccaggtgctccaaagccatggtgacccatcctcgggtgggtcctgagaacaaagctctggttctaattctaaccctaaccctgtcccaagactttgagcctgaasctaaatcctgatccctaccctggtccctaattctgacccttactttaaccctgactttgatcttgaccctgaccatgaccccacctctaaccatacttccagccctgactctgacccagatcctaatcctatgcctaaccctattattatctttacaatctatctctactcttaccctctagtgctaaatagctgtacccaaaagcacttttaaattatttcttttcttgaattctctatggacatcctaaaggagatgtcaatatgtatcttgcattccctctgagtggtatggcttcagatatgaagttctaatactttgcaagacataaaaagtttggagggtaacagcactgggttgttagggatgtaagttggcattcatgatagt

SEQ ID NO: 292632 - DNA, 586 bp, Homo sapiens
ctcaccttcctcaatggcctccagccacgtctcccaggtcagtcttaaggacaacgaaactctggtcttcactgtggacatgccacactaccaggtgctccaaagccatggtgacccatcctcgggtgggtcctgagaacaaagctctggttctaattctaaccctaaccctgtcccaagactttgagcctgaagctaaatcctgatccctaccctggtccytaattctgacccttactttaaccctgactttgatcttgaccctgaccatgaccccacctctaaccatacttccagccctgactctgacccagatcctaatcctatgcctaaccctattattatctttacaatctatctctactcttaccctctagtgctaaatagctgtacccaaaagcacttttaaattatttcttttcttgaattctctatggacatcctaaaggagatgtcaatatgtatcttgcattccctctgagtggtatggcttcagatatgaagttctaatactttgcaagacataaaaagtttggagggtaacagcactgggttgttagggatgtaagttggcattcatgatagt

SEQ ID NO: 292633 - DNA, 586 bp, Homo sapiens
ctcaccttcctcaatggcctccagccacgtctcccaggtcagtcttaaggacaacgaaactctggtcttcactgtggacatgccacactaccaggtgctccaaagccatggtgacccatcctcgggtgggtcctgagaacaaagctctggttctaattctaaccctaaccctgtcccaagactttgagcctgaagctaaatcctgatccctaccctggtccctaattctgacccttactttaaccctgactttgatcttgaccctgaccatgaccccacctctaaccatacttccrgccctgactctgacccagatcctaatcctatgcctaaccctattattatctttacaatctatctctactcttaccctctagtgctaaatagctgtacccaaaagcacttttaaattatttcttttcttgaattctctatggacatcctaaaggagatgtcaatatgtatcttgcattccctctgagtggtatggcttcagatatgaagttctaatactttgcaagacataaaaagtttggagggtaacagcactgggttgttagggatgtaagttggcattcatgatagt

SEQ ID NO: 292634 - DNA, 588 bp, Homo sapiens
actcttaccctctagtgctaaatagctgtacccaaaagcacttttaaattatttcttttcttgaattctctatggacatcctaaaggagatgtcaatatgtatcttgcattccctctgagtggtatggcttcagatatgaagttctaatactttgcaagacataaaaagtttggagggtaacagcactgggttgttagggatgtaagttggcattcatgatagtcattggtgctgttctccaaatattttcagttyattttttatgaatgcattctgactgttccatcccacctacttaaattttcccatggccacatgacttttttttttttttttttttttttgccgatggaggtgagaagaaataacatgtgactttttcaggagaaatctccaagaaacagcgttctattccgcatgcttttttctcttttctatagcaatggggatctcattgacggtccctccttccttctggattcctgtgttaggatgacacagcacagagctacctctcacctgaccagtcatgagatgtaaataaataaggaagaagatttttgagccactgaaatttggaggttgtt

SEQ ID NO: 292635 - DNA, 550 bp, Homo sapiens
tcttgatcttgctgctttcatgggaacttctcagttcactaaattctcccttctccaacctctgctgactatgtgttccaccaatatggaactaattctacttcttttcctgtttgcatgactttactaagaattatttacaactttaatggctcctttgagaaaatttttattttccaaattgcctccttttagacctttcctttcccasttgagtctctcaactccctataatcactgaaacttcaggcaccccactccatgccttggaggctctcaatgtgctcaagaatctgcaaaagcaaacacctggggctgaagaataaaatagaaaaaaaattatttctcagcctccataagattctatgtcaaaaaaaaaaagaaaatctttaaaatctccaaaaatattggtgagaaaaaagccttagccctcatataaagaagaaaaaacttgttccattttccagatacatagttataatacaaatataaaatggggcaaagacaaaaaccaagtcttctatataaactagtgaattttgtagttatt

SEQ ID NO: 292636 - DNA, 550 bp, Homo sapiens
tcttgatcttgctgctttcatgggaacttctcagttcactaaattctcccttctccaacctctgctgactatgtgttccaccaatatggaactaattctacttcttttcctgtttgcatgactttactaagaattatttacaactttaatggctcctttgagaaaatttttattttccaaattgcctccttttagacctttcctttcccagttgagtctctcaactccctataatcactgaaacttcaggcaccccactccatgccttggargctctcaatgtgctcaagaatctgcaaaagcaaacacctggggctgaagaataaaatagaaaaaaaattatttctcagcctccataagattctatgtcaaaaaaaaaaagaaaatctttaaaatctccaaaaatattggtgagaaaaaagccttagccctcatataaagaagaaaaaacttgttccattttccagatacatagttataatacaaatataaaatggggcaaagacaaaaaccaagtcttctatataaactagtgaattttgtagttatt

SEQ ID NO: 292637 - DNA, 550 bp, Homo sapiens
tcttgatcttgctgctttcatgggaacttctcagttcactaaattctcccttctccaacctctgctgactatgtgttccaccaatatggaactaattctacttcttttcctgtttgcatgactttactaagaattatttacaactttaatggctcctttgagaaaatttttattttccaaattgcctccttttagacctttcctttcccagttgagtctctcaactccctataatcactgaaacttcaggcaccccactccatgccttggaggctctcaatgtgctcaagaatctgcaaaagcaaacacctggggctgaagaataaaatagaaaaaaaattatttctcagcctccataagattctatgtcaaaaaaaaaaagaaaatctttaaaatctccaaaaatattggtgagaaaaaagccttagccctcatatraagaagaaaaaacttgttccattttccagatacatagttataatacaaatataaaatggggcaaagacaaaaaccaagtcttctatataaactagtgaattttgtagttatt

SEQ ID NO: 292638 - DNA, 575 bp, Homo sapiens
tttcctcttccttgttattctatctgggctctcaaccaattggatggtgcctgtattcatccatttttatacagctatgaagaaatacctgagtctgagcaatttataaagaacaaaggggtttaatgggctgacagttccacatggctgcaggggcctcacaatcatggcagaaggggaagcaaagctatccctcttcacatggyagcaacaagaagtgctgacccaaaggggaaaagccccttataaaaccatcagatcatgagaactcactcactgtcatgagaacagcatggcggtaaccaccaccatgattcagtcacctcccactgggtccctcccacgacatgtaggtattacaggaactacaattcaagatgagatctgggtggggacacagccaaaccatatcagtgcccatccacattgggtcatggttatctcagtgtcttccagaaacaccctcatagatatgcccagaaatcgtgtttgaccagctatgtgtgtctcttaatccactcaagtagatgtctaaaattaactgtcagaatatttatgcctgattcatggctgaa

SEQ ID NO: 292639 - DNA, 575 bp, Homo sapiens
tttcctcttccttgttattctatctgggctctcaaccaattggatggtgcctgtattcatccatttttatacagctatgaagaaatacctgagtctgagcaatttataaagaacaaaggggtttaatgggctgacagttccacatggctgcaggggcctcacaatcatggcagaaggggaagcaaagctatccctcttcacatggcagcaacaagaagtgctgasccaaaggggaaaagccccttataaaaccatcagatcatgagaactcactcactgtcatgagaacagcatggcggtaaccaccaccatgattcagtcacctcccactgggtccctcccacgacatgtaggtattacaggaactacaattcaagatgagatctgggtggggacacagccaaaccatatcagtgcccatccacattgggtcatggttatctcagtgtcttccagaaacaccctcatagatatgcccagaaatcgtgtttgaccagctatgtgtgtctcttaatccactcaagtagatgtctaaaattaactgtcagaatatttatgcctgattcatggctgaa

SEQ ID NO: 292640 - DNA, 568 bp, Homo sapiens
tccatttcagaaggagataattcacctttcctcttccttgttattctatctgggctctcaaccaattggatggtgcctgtattcatccatttttatacagctatgaagaaatacctgagtctgagcaatttataaagaacaaaggggtttaatgggctgacagttccacatggctgcaggggcctcacaatcatggcagaaggggaagcaaagctatccctcttcacatggcagcaacaagaagtgctgacccaaaggggaaaagccccttataaaaccatcagatcatgagaactcactcactgtcatgagaacagyatggcggtaaccaccaccatgattcagtcacctcccactgggtccctcccacgacatgtaggtattacaggaactacaattcaagatgagatctgggtggggacacagccaaaccatatcagtgcccatccacattgggtcatggttatctcagtgtcttccagaaacaccctcatagatatgcccagaaatcgtgtttgaccagctatgtgtgtctcttaatccactcaagtagatgtctaaaattaac

SEQ ID NO: 292641 - DNA, 459 bp, Homo sapiens
tttatacagctatgaagaaatacctgagtctgagcaatttataaagaacaaaggggtttaatgggctgacagttccacatggctgcaggggcctcacaatcatggcagaaggggaagcaaagctatccctcttcacatggcagcaacaagaagtgctgacccaaaggggaaaagccccttataaaaccatcagatcatgagaactcactcactgtcatgagaacagcatggcggtaaccaccaccatgattcagtcacctcccaytgggtccctcccacgacatgtaggtattacaggaactacaattcaagatgagatctgggtggggacacagccaaaccatatcagtgcccatccacattgggtcatggttatctcagtgtcttccagaaacaccctcatagatatgcccagaaatcgtgtttgaccagctatgtgtgtctcttaatccactcaag

SEQ ID NO: 292642 - DNA, 575 bp, Homo sapiens
tttcctcttccttgttattctatctgggctctcaaccaattggatggtgcctgtattcatccatttttatacagctatgaagaaatacctgagtctgagcaatttataaagaacaaaggggtttaatgggctgacagttccacatggctgcaggggcctcacaatcatggcagaaggggaagcaaagctatccctcttcacatggcagcaacaagaagtgctgacccaaaggggaaaagccccttataaaaccatcagatcatgagaactcactcactgtcatgagaacagcatggcggtaaccaccaccatgattcagtcacctcccactgggtccctcccaygacatgtaggtattacaggaactacaattcaagatgagatctgggtggggacacagccaaaccatatcagtgcccatccacattgggtcatggttatctcagtgtcttccagaaacaccctcatagatatgcccagaaatcgtgtttgaccagctatgtgtgtctcttaatccactcaagtagatgtctaaaattaactgtcagaatatttatgcctgattcatggctgaa

SEQ ID NO: 292643 - DNA, 579 bp, Homo sapiens
atggctgaaatttcaggatgaaagctatgaaatctctatttgtgtttgtrtatctattaatgtatgttatgtatatgtgatattttcttaactccagagagcattacaaaattcatttatgaaatcctctaaaagtgctctattctaacttggcttggaaaaaaataagcatttataaataaatattcaccaaactcctagaaatataggaactgatcaaatgtttcttaagttaacatgatttggataaaacttagttaaataagattaatatagtatttttggtgtaataaaacaactatatcttcaaaattatcattattgaatataaaacaagcataaattcctattctgcttgagttctagtcaaataagctaatattatacttactagaaacgtaaaatcttaaagcttatagatttgattctaattaagttgtcattcttatgaaaaacattatttttttatgctgaaaagatacacatatatttagagttagccagctggactcagtttaggtgatcccaattttgttacaacatcgaaagcatcataatcaggagcaagtcgaacatatg

SEQ ID NO: 292644 - DNA, 579 bp, Homo sapiens
atggctgaaatttcaggatgaaagctatgaaatctctatttgtgtttgtgtatctattaatgtatgttatgtatatgtgatattttctkaactccagagagcattacaaaattcatttatgaaatcctctaaaagtgctctattctaacttggcttggaaaaaaataagcatttataaataaatattcaccaaactcctagaaatataggaactgatcaaatgtttcttaagttaacatgatttggataaaacttagttaaataagattaatatagtatttttggtgtaataaaacaactatatcttcaaaattatcattattgaatataaaacaagcataaattcctattctgcttgagttctagtcaaataagctaatattatacttactagaaacgtaaaatcttaaagcttatagatttgattctaattaagttgtcattcttatgaaaaacattatttttttatgctgaaaagatacacatatatttagagttagccagctggactcagtttaggtgatcccaattttgttacaacatcgaaagcatcataatcaggagcaagtcgaacatatg

SEQ ID NO: 292645 - DNA, 594 bp, Homo sapiens
gtttcgcaagtaaagtaggttgcattttttataaggaaaaccatacagaagatacaaataaaaagagatacctaaccttccctgtgttatatttgtatgggtaaaatgttatgttttcagaaattatataaaattcctggaagtttgtcaatgtcctccttatccatgctatgtgccactatagagtaatgagtcataattccaattattactttaaatgttgtgccaggcacagtggctcatgcctataatcccagcactttaggaggctgaggcrggtggatcacaaggtcaggagatccagaccatcctggctaacccggtgaatctccatctctattaaaaatataaaaaattagccgggcgtgatggcaggcacctgtagtcccagctactcgggaggctgaggcaggagaatggcgtgaacccaggagacagagcttgcagtgagccgagatcgcaccgctgcactccagcctaggcgacagagcaagactctgtctctaaataaataaataaataaatgttgtctgccacagaaaaaatcgaatatccttgtcagctgtggtataatgaactctcatcagatctttc

SEQ ID NO: 292646 - DNA, 594 bp, Homo sapiens
gtttcgcaagtaaagtaggttgcattttttataaggaaaaccatacagaagatacaaataaaaagagatacctaaccttccctgtgttatatttgtatgggtaaaatgttatgttttcagaaattatataaaattcctggaagtttgtcaatgtcctccttatccatgctatgtgccactatagagtaatgagtcataattccaattattactttaaatgttgtgccaggcacagtggctcatgcctataatcccagcactttaggaggctgaggcgggtggatcacaaggtcaggagatccagaccatcctggctaacycggtgaatctccatctctattaaaaatataaaaaattagccgggcgtgatggcaggcacctgtagtcccagctactcgggaggctgaggcaggagaatggcgtgaacccaggagacagagcttgcagtgagccgagatcgcaccgctgcactccagcctaggcgacagagcaagactctgtctctaaataaataaataaataaatgttgtctgccacagaaaaaatcgaatatccttgtcagctgtggtataatgaactctcatcagatctttc

SEQ ID NO: 292647 - DNA, 594 bp, Homo sapiens
gtttcgcaagtaaagtaggttgcattttttataaggaaaaccatacagaagatacaaataaaaagagatacctaaccttccctgtgttatatttgtatgggtaaaatgttatgttttcagaaattatataaaattcctggaagtttgtcaatgtcctccttatccatgctatgtgccactatagagtaatgagtcataattccaattattactttaaatgttgtgccaggcacagtggctcatgcctataatcccagcactttaggaggctgaggcgggtggatcacaaggtcaggagatccagaccatcctggctaacccggtraatctccatctctattaaaaatataaaaaattagccgggcgtgatggcaggcacctgtagtcccagctactcgggaggctgaggcaggagaatggcgtgaacccaggagacagagcttgcagtgagccgagatcgcaccgctgcactccagcctaggcgacagagcaagactctgtctctaaataaataaataaataaatgttgtctgccacagaaaaaatcgaatatccttgtcagctgtggtataatgaactctcatcagatctttc

SEQ ID NO: 292648 - DNA, 1034 bp, Homo sapiens
gtttcgcaagtaaagtaggttgcattttttataaggaaaaccatacagaagatacaaataaaaagagatacctaaccttccctgtgttatatttgtatgggtaaaatgttatgttttcagaaattatataaaattcctggaagtttgtcaatgtcctccttatccatgctatgtgccactatagagtaatgagtcataattccaattattactttaaatgttgtgccaggcacagtggctcatgcctataatcccagcactttaggaggctgaggcgggtggatcacaaggtcaggagatccagaccatcctggctaacccggtgaatctccatctctattaaaaatataaaaaattagccgggcgtgatggcaggcacctgtagtcccagctactcgggaggctgaggcaggagaatggcgtgaacccaggagacagagcttgcagtgagccgagatcgcaccgctgcactccagcctrggcgacagagcaagactctgtctctaaataaataaataaataaatgttgtctgccacagaaaaaatcgaatatccttgtcagctgtggtataatgaactctcatcagatctttcwtctgtctcaaaaaaaaataaaaataagcataaaaatgaagaaatgtctcctttccaaatttatgaacctcatcattcttccattgacagcattaaaaggttcaaaaagacctttccatactctcccacagaagccctagaaattgtcattttgttaatcattctggatgcctgagaacttgtaatccaatgagtagaaagtttggtaccccawttatggctgtcaacctgccagttctcaggagtttgtataaaagcctaaatccgaaaggatctcatcccattaggacccttgtctccttttctgttgcctttgcccactggctctggcaacaggggtctttctttctccttggctatctttggatatgggggctccatcttctgtgccaccttagggaatgccttttgcaggcatggctaagtcattaaaaagccta

SEQ ID NO: 292649 - DNA, 384 bp, Homo sapiens
aaggaacaagatatcaacacacacaaagacatgagtgaatcttgcatgcacattgctaagtggaagaagacagtctgaggaggatacacacagtgtgacctcatttaatgagacactggrgaaggcaaactacacagatgggaagccattggctccatggggtgggggtttgaggcattccatatgatactttaatagtgggatatctgccacaatgcatttgtcgaaatatgcagaattttacagccaaatggttaaagcaaactctattcaaattaaatcaaattactcaggatgtggagtatcccaggacagaatacatcatgtgaaaaagaatttatgctacaaattactatggtttggatgtggtttgtccccacaaaa

SEQ ID NO: 292650 - DNA, 321 bp, Homo sapiens
aggcattccatatgatactttaatagygggatatctgccacaatgcatttgtcgaaatatgcagaattttacagccaaatggttaaagcaaactctattcaaattaaatcaaattactcaggatgtggagtatcccaggacagaatacatcatgtgaaaaagaatttatgctacaaattactatggtttggatgtggtttgtccccacaaaaactcatgttgaaatttgactcccactgtgtcagtgtggggcggtggggcctagtggacggtgtttgggtcctggggacggatccctcatgaatagattaatgtcctcca

SEQ ID NO: 292651 - DNA, 321 bp, Homo sapiens
aggcattccatatgatactttaatagtgggatatctgccacaatgcatttgtcgaaatatgcagaattttacagccaaatggttaaagcaaactctattcaaattaaatcaaattactcaggatgtggagtatcccakgacagaatacatcatgtgaaaaagaatttatgctacaaattactatggtttggatgtggtttgtccccacaaaaactcatgttgaaatttgactcccactgtgtcagtgtggggcggtggggcctagtggacggtgtttgggtcctggggacggatccctcatgaatagattaatgtcctcca

SEQ ID NO: 292652 - DNA, 384 bp, Homo sapiens
aaggaacaagatatcaacacacacaaagacatgagtgaatcttgcatgcacattgctaagtggaagaagacagtctgaggaggatacacacagtgtgacctcatttaatgagacactggagaaggcaaactacacagatgggaagccattggctccatggggtgggggtttgaggcattccatatgatactttaatagtgggatatctgccacaatgcatttgtcgaaatatgcagaattttacagccaaatggttaaagcaaactctattcaaattaaatcaaattactcaggatgtggagtatcccaggacagaatacatcatgtgaaaaagaatttatgctacaaattackatggtttggatgtggtttgtccccacaaaa

SEQ ID NO: 292653 - DNA, 321 bp, Homo sapiens
aggcattccatatgatactttaatagtgggatatctgccacaatgcatttgtcgaaatatgcagaattttacagccaaatggttaaagcaaactctattcaaattaaatcaaattactcaggatgtggagtatcccaggacagaatacatcatgtgaaaaagaatttatgctacaaattactatggtttggatgtggtttgtccccacaaaaactcatgttgaaatttgactcccactgtgtcagtgtggggcggtggggcctagtggacggtgtttgggtcstggggacggatccctcatgaatagattaatgtcctcca

SEQ ID NO: 292654 - DNA, 540 bp, Homo sapiens
aattatctaggtgtctgtatttgtatacctmggtgaataagcaaatggagttgcatagaaatctcctttgcaaaagaattccaaataattgatgtagacactcagccgtcaagaaggtggagccaactcctgacagagtgaggctctgcatagtgacttgctccaaaagaacacatgcagtacggacaaggaggagaaataacctcacagtggagaaacctgacaaacattagctctgccaaatgatccaagtgaacatcaaaggtgacagttcaccttgagaacatgaagtgacaatgggggacattctacaacattcctgaccaatcctcctcagtgctatgaaggtcatcatgagatggaaagcctgacacactgtcacagccaggaagagcccacgtgatgtctacatgtcatgcgggatcctggatgggatcctgggtcagagtaagatagaactaagggaatccaaatgaaatatgaacttcaattaataatagtctatcagtattggttcattaactgtgacaaattatgtaa

SEQ ID NO: 292655 - DNA, 540 bp, Homo sapiens
aattatctaggtgtctgtatttgtatacctaggtgaataagcaaatggagttgcatagaaatctcctttgcaaaagaattccaaataattgatgtagacactcagccgtcaagaaggtggagccaactcctkacagagtgaggctctgcatagtgacttgctccaaaagaacacatgcagtacggacaaggaggagaaataacctcacagtggagaaacctgacaaacattagctctgccaaatgatccaagtgaacatcaaaggtgacagttcaccttgagaacatgaagtgacaatgggggacattctacaacattcctgaccaatcctcctcagtgctatgaaggtcatcatgagatggaaagcctgacacactgtcacagccaggaagagcccacgtgatgtctacatgtcatgcgggatcctggatgggatcctgggtcagagtaagatagaactaagggaatccaaatgaaatatgaacttcaattaataatagtctatcagtattggttcattaactgtgacaaattatgtaa

SEQ ID NO: 292656 - DNA, 540 bp, Homo sapiens
aattatctaggtgtctgtatttgtatacctaggtgaataagcaaatggagttgcatagaaatctcctttgcaaaagaattccaaataattgatgtagacactcagccgtcaagaaggtggagccaactcctgacrgagtgaggctctgcatagtgacttgctccaaaagaacacatgcagtacggacaaggaggagaaataacctcacagtggagaaacctgacaaacattagctctgccaaatgatccaagtgaacatcaaaggtgacagttcaccttgagaacatgaagtgacaatgggggacattctacaacattcctgaccaatcctcctcagtgctatgaaggtcatcatgagatggaaagcctgacacactgtcacagccaggaagagcccacgtgatgtctacatgtcatgcgggatcctggatgggatcctgggtcagagtaagatagaactaagggaatccaaatgaaatatgaacttcaattaataatagtctatcagtattggttcattaactgtgacaaattatgtaa

SEQ ID NO: 292657 - DNA, 540 bp, Homo sapiens
aattatctaggtgtctgtatttgtatacctaggtgaataagcaaatggagttgcatagaaatctcctttgcaaaagaattccaaataattgatgtagacactcagccgtcaagaaggtggagccaactcctgacagagtgaggctctgcatagtgacttgctccaaaagaacacatgcagtacggacaaggaggagaaatarcctcacagtggagaaacctgacaaacattagctctgccaaatgatccaagtgaacatcaaaggtgacagttcaccttgagaacatgaagtgacaatgggggacattctacaacattcctgaccaatcctcctcagtgctatgaaggtcatcatgagatggaaagcctgacacactgtcacagccaggaagagcccacgtgatgtctacatgtcatgcgggatcctggatgggatcctgggtcagagtaagatagaactaagggaatccaaatgaaatatgaacttcaattaataatagtctatcagtattggttcattaactgtgacaaattatgtaa

SEQ ID NO: 292658 - DNA, 558 bp, Homo sapiens
cctttaccaacagtagcctgtgggcattaataactgtagagaatractctattggtggcagatgagcagaaaacatattttaggaaaagaagggtctttaaattgtaataggcaggctgggcataatgtctcacacctgtaacgtcagcactttgggaggctgaggcgggcagatcagctgaagtcaggagtctgagaccagcctggccaacatggtaaaatcccgtctctagtaaaaatacaaaaattagcccggtgtggtcgtgcatgcctgtggaccaagctacttgggaggctgaggcaggagaatcccttgcacctgggaggcggaggttgcagtgagctgagatcccccactgcactccagtctgggtgacagatccagactctgtctcaaaaaacaaaaacacaaacaaacaaacaaaaattataataggtaaactgctgccaaattcatagtgtataacttggtttttctgctttgtgcattgttgtcatgcttctagtaatgagactgctatcagtcaggggctatatacttttcaaaagcctaccaaa

SEQ ID NO: 292659 - DNA, 561 bp, Homo sapiens
tacctgtgaagccttgcttttttatttagaaaggtaagcgctttccaaggaattcctgtctgtatctgaacagttaaaattgtgtcacatgggcatttctagctgcaagagttttggaaggtaagtattacagcttggtttatttaagttaacagaaaaaagtggagcagagggagaaaaggtaagaaactgttagtgtctgtctcaattcattataatcagttcttcattaagaaaccatggtgatttgacttaaaatgagaattttttttttaattctctctmtaaaaaaaatctttcattagctttaacaacacaacccaggataaaaatccaagtttcttgacataacatgtgaattctttcatgatctggcctcttctttcttgtttctttttaaatttcatgtattttatttcattttttagagacagggtctcactctgtcacccaggctggagtgcagcagcataatcatagctcatttcagcctctaactcctgggctcaagcaatactcctgcctcagactcccagttagctagaactatagttgtgcacc

SEQ ID NO: 292660 - DNA, 578 bp, Homo sapiens
tgacagccagtagatttcctttgtgctcatggacaatgtaaacattcgtatggccaggaaaaaaaaaacctttagccacctgtgttcccattcttcatctttgattattttattattatcatcctcatcatcattatcaacaacaaacattgatttgtcatttattacataaaagctaatatattagagcatttggggacatttaatgatttyaaatttctgtctttaagaagcttactctctaaagagagagagtgtgtgtgtgtctgtgtgttcgtctgtgtgtgtgtgtgtgtatttgtgtgcatttttttgagacattctcactctgtcacccagactagagtgcaatagcatgatcactgctcactgcagcctcaatcttccatgccaaagtaaacgttctatcccagcatcccaagtagttaggaccacaggcatgtgacaccacacccagctaatttttgcatttttttgtagaggtggagtctcctgatgttacccaggctggtctcaaactcatggctcaagtgatcctcccatcttggcctcccaaagtgctcacatatatttatata

SEQ ID NO: 292661 - DNA, 671 bp, Homo sapiens
gattgaactaaactgaaaaacaggtagagggataggaatgatgtaatatggagtacgaagttggatattgagctgacagaacaccagagagtcagaagaggacttcagcagctkgctgtgaagacttggcagattgtggaacggggcagataaatgaacgccatttgattttactagcattagaacagatcagtaggtctcaaacatggttgcacttttccaccctatgagagctttagcaaagtattattacttgtttcactcactcaccatcccctgaacaaccacccctattcttattttggtttaattgatatgggatggagactgattattttttaaaggttttgtaggtaattctaaggtacacagagagctaagaaccactgatataggacttggttactcaatatgtggtcccaggatagacagcgtaggcatcatctgggagattaaatctcctccccccatcccacccctaaactttctgaatcacagtctctattttaaacaggatttccaggttatttatatgtacaatgaagtttcagaagcactgttttatgggatctataacgatttcatcctaggggacctctgtgacaagctaagactctagtttggtattactttgggcagattccctacacagggattagacacggcccatc

SEQ ID NO: 292662 - DNA, 671 bp, Homo sapiens
gattgaactaaactgaaaaacaggtagagggataggaatgatgtaatatggagtacgaagttggatattgagctgacagaacaccagagagtcagaagaggacttcagcagctggctgtgaagacttggcagmttgtggaacggggcagataaatgaacgccatttgattttactagcattagaacagatcagtaggtctcaaacatggttgcacttttccaccctatgagagctttagcaaagtattattacttgtttcactcactcaccatcccctgaacaaccacccctattcttattttggtttaattgatatgggatggagactgattattttttaaaggttttgtaggtaattctaaggtacacagagagctaagaaccactgatataggacttggttactcaatatgtggtcccaggatagacagcgtaggcatcatctgggagattaaatctcctccccccatcccacccctaaactttctgaatcacagtctctattttaaacaggatttccaggttatttatatgtacaatgaagtttcagaagcactgttttatgggatctataacgatttcatcctaggggacctctgtgacaagctaagactctagtttggtattactttgggcagattccctacacagggattagacacggcccatc

SEQ ID NO: 292663 - DNA, 671 bp, Homo sapiens
gattgaactaaactgaaaaacaggtagagggataggaatgatgtaatatggagtacgaagttggatattgagctgacagaacaccagagagtcagaagaggacttcagcagctggctgtgaagacttggcagattgtggaacggggcagataaatgaacgccatttgattttactagcattagaacagatcagtaggtctcaaacatggttgcacttttccaccctatgagagctttagcaaagtattattacttgtttcactcactcaccatcccctgaacaaccacccctattcttattttggtttaattgatatgggatggagactgattattttttaaaggttttgtaggtaattctaaggtacacagagagctaagaaccactgatataggacttggttactcaatatgtggtcccaggatagacagcgtaggcatcatctgggagattaaatctcctccccccatcccacccctaaactttctgaatcacagtctctattttaaacaggatttccakgttatttatatgtacaatgaagtttcagaagcactgttttatgggatctataacgatttcatcctaggggacctctgtgacaagctaagactctagtttggtattactttgggcagattccctacacagggattagacacggcccatc

SEQ ID NO: 292664 - DNA, 592 bp, Homo sapiens
tagctatcttttctctttctacattactgagtattagctatgttctttcttgggcttcagtgggccaagcatcaggctaaccttgtgtcaaatttcactacttaggaaagatgaattgtcaacactcgcaacaaatatggtatatttagtctttcttgagggaagaatgtgatgatgaaattagactcatattaatctgtggttgccaaatattaaattcttagaatatcacaggtaggtcatttatttagctgtgcatcaagcataattttttttcatgatatcaacatctttcaatatctataacagcttttcctttgacatttaaaaagaactatttaaaagcacaatataatctaccaatgttttrtaaagaaatgacacaatatgaacagagaccaattattatcagtcttcacttagaagttatgatgcgaaaacaaatcaattctaaatgaaaaaaaaagaaaacacctcacaaaccaaaaaagaattgatagtgtataatagcattaatggcaaaagtgagcaaatgtactatcagagtccaggtgaaacaacatattcacataacccattgagaggagggtag

SEQ ID NO: 292665 - DNA, 592 bp, Homo sapiens
tagctatcttttctctttctacattactgagtattagctatgttctttcttgggcttcagtgggccaagcatcaggctaaccttgtgtcaaatttcactacttaggaaagatgaattgtcaacactcgcaacaaatatggtatatttagtctttcttgagggaagaatgtgatgatgaaattagactcatattaatctgtggttgccaaatattaaattcttagaatatcacaggtaggtcatttatttagctgtgcatcaagcataattttttttcatgatatcaacatctttcaatatctataacagcttttcctttgacatttaaaaagaactatttaaaagcacaatataatctaccaatgttttataaagaaatgacacaatatgaacagagaccaattattatcagtcttcacttagaagttatgatgcsaaaacaaatcaattctaaatgaaaaaaaaagaaaacacctcacaaaccaaaaaagaattgatagtgtataatagcattaatggcaaaagtgagcaaatgtactatcagagtccaggtgaaacaacatattcacataacccattgagaggagggtag

SEQ ID NO: 292666 - DNA, 1197 bp, Homo sapiens
tgactttgtagactatacaaataaggtgaaagtgtactgatacaaagttttcttctagttctattttaggtctaagtaacagcaatggttttcatatttaagaaaaagatgggcagggcgcggtggctcacgcctgtaaatcccaacacttggaggccgatgcaggtggatcatgaggttaggagatggagaccagcctggccaagatgggaaaccccatctcgactaaaaatacaaaaattagccaggcctggtggagggcacctgtaatcccagctactcgggaggctgagaaaggggaattgcttgaacccaagagrtggaggttgcagtaagccaagatcacgccagtgcaccccagcctgggcgacagagaaagactccatctcaaaaaaaaaaaaaaaaaagaaaaaaaaagaaaaaagaaaaaaataaaggaaagaaaagggtagatgctgattttctcttttctgacctaattctaggtgataaatacaagtggttataccatggttactagacagcaaattgaattgggtgagctatcatgaaagtgttttctccttttctttggctacttaggagtttctgatccaatagagagcacaatcatgaattttaaccaactgccaaagggttcattcaatagatttgggtgtaggattcagtatgattgttgtgtgaacagaaawctactcacactgttcaccaaatatgtatggtttcaaactgaagttctctacaacttcctcattttcttttgcttcctactgactgtcttttgaaatgcctacttcatctgcttccaattttacctttcctaagggaacactaggggtctaatctggagacatggatatcagttatttttcccttcccaatgactcttctcccatcactcttggtaacagtcaatcagtttccctttaaacaatcaccattcttcacatcagtcatctgggtggggttaattttaccccttgctccagtaatggacatgttcccaaccttggccaacgagattgtgacgtggaacttcagctgcaacaactgggaaagaaatgctctctttctttttctcttctttttttwaaacttcagtcatgacttggcatttgttagacaaaattttgattgacaagcaaataaaaccatgttataaagtttggagtccacaaaaatacccagtctacttca

SEQ ID NO: 292667 - DNA, 597 bp, Homo sapiens
aagtaaatatcaaatgatatataaaagttaaatattaagccagttaactttttcacttgcactctaaccaggaaattctcaaatattggttctctacagtgatagcatattatattatctgggaaaagaaaaaattgcctaagaatatcagaatccctgaaggtggtcgtgtgtgtgtgtgtgtgtgtgtgtgtgtgtgtgtgtgtgtgtgtgtgtgtgtgtgtttactatttcggttagaatactagtgtgaaccgcggttgagaaccgctttcccagtctcagcactcaaccctatcccactctaatccgctgagggacagcatcagaccgctcaaactcagagggcrcgccgagaaccgcgtcccttccccttgaagccacgaagggggcgctcctgcaccggatttgctcattggcagctctaatccccaaatttagagacaaaccgcagaaaaggtttcgtttggaagccggcagaaagagaaaaggcaggggatggctttgtatatacagaggggcgacggataattcgtgtaaacaacaatatccctcaagatgagctcttcggagcttcctgcccagtggcagctcccc

SEQ ID NO: 292668 - DNA, 502 bp, Homo sapiens
ccattatttacaactagggcagacaaagggaaaactgatgatccaacacttatgtcagtttgaaattttgaaacaacaaaaagtgctttattcagagtggaattctgagtctcttagatgaatctcaaaataacaaagaaactcaaagaaaaaaataaaacaaaaataaaacaaaataaatgggaacaaataaaactccatctcccaaacaatcccaaccgccactcctttttcgcagaaattgctgcctggmacaatttgaaatgtggctatttaaagggaaaaggaatatatcttctcttcattccatctaaaatctataagttttcaattttagcataagaggagaaagcgtttatagctgagtttttccaagttgcttaaaaggaaagggctttgggatttgaaaaatcagttttctctttgtacttttccaaggcggggatttgaagctgggcactagatttgcttctcaagatccggtgccttaaacgttggggaa

SEQ ID NO: 292669 - DNA, 600 bp, Homo sapiens
actggggaaggagaggcagagctcggagacgggtgtgtgtgtgtgtgtgtgtgtgtgtgtgtgtgtgtgtgtgtgtgtgtagggggtgggggctcggggccagggaggaaggaaaggaagagggtaaaaaagaagctagaggagcgaagaaggaaaaactagaggacctcgtgtctttcgtgtgaaagcacccgcgtcctaaatcgtaggaacgaggtagtcattagcgctctgacccggaggagagacgcaktagagaaagaaatgaacagagaacatgcacctccctgcctggttcatttcgctttccttgaaatccctgggcctcaaggttcccatcgcttaagctttccccatctctccctcccccgccccttcaacatacaatgcactgaggctgagagggaaggaacggagcgagtcagggagagaaatcatgaagcttttcagggtaaaatacaaacctgctcatccagcttgccaacacgtttttaacatttgcatcgactaatctgtgaacagtcgttggggtgataatttcgtctgagagattaaccattcaagtctcaaagttcccaaggattgtgaaatcctgcttgt

SEQ ID NO: 292670 - DNA, 625 bp, Homo sapiens
atcttatcaggccagtttggaatgacagtggtataataaactatctttttttttttaatctgttgttttgctctacagaaacaagcaaaagtgaaaggaaaaaacatcacttaattgactcagtacaagtgtgctttaaatagtctctccagaactggttcaccttttttgttgttgttttgttgtgtttttcaaatcctttccctctctgtctctttttcctttcaataaatgtaaaacatgatgtagaatgtacaattttaatgaggtttccatttatatcaactcattcctacccattcattatttatttggcaattaagggaatctgtactgctattcagtttattttgtcaacaagcatttgctacaaagctactaattttcctgggttcaaaagaagtggaaatcctggcatattcccagcagccataacatttaagaactcaaaatgcttagtaaataatattctaagttatttacattkttctgtgtgtgtgtgggagggtatggttttttagaaatgcaatctcaaggtggcagaagcataggagatgcatataatataccatcattatagaacaaatttaacattgacattttgatgcaacatcattgtatttaa

SEQ ID NO: 292671 - DNA, 1181 bp, Homo sapiens
ttggtatcataatttaagagtttttcttttaagttgcaggtatattaattaattttaggtttctgtgctactcttttcccatccttggaagtctctttacgccagaaattcatttaattcttagtttttgatgatgacacacttaattttatatgttaaagagtttaactgtccamcctttttcagatgctggtgagtgtaataagcgagataatacatccacaatgggtggttttggagttggaaagagttttggaaacagaggtaattacttggttatgatatcttacaatcaaaacttgagtgattttttaataattgagtttaaatactgattgacagacattccatattgacatttaatttcaaggtatatattctgtgagtgcctttgcactaaagattatcttattaaaacttattaaaaacattttttaattttatgaaagattactgatgaatgcttttaaaattaattctagagacatgtctgtatgcttcagagatgcataactcttagacataggtttttaggaaataagttgaaagcaaaacttgacgactttttaaaaaagagtaaacaaaaagaawttggtatcataatttaagagtttttcttttaagttgcaggtatattaattaattttaggtttctgtgctactcttttcccatccttggaagtctctttacgccagaaattcatttaattcttagtttttgatgatgacacacttaattttatatgttaaagagtttaactgtccaccctttttcagatgctggtgagtgtaataagcgagataatacatccacaatgggtggttttggagttggaaagagttttggaaacagaggtaattacttggttatgatatcttacaatcaaaacttgagtgattttttaataattgagtttaaatactgattgacagacattccatattgacatttaatttcaaggtatatattctgtgagtgcctttgcactaaagattatcttattaaaacttattwaaaacattttttaattttatgaaagattactgatgaatgcttttaaaattaattctagagacatgtctgtatgcttcagagatgcataactcttagacataggtttttaggaaataagttgaaagcaaaacttgacgactttttaaaaaagagtaaacaaaaagaa

SEQ ID NO: 292672 - DNA, 594 bp, Homo sapiens
ccttcttgtttggaaatggtggtattttggttttacttttttttaagttactgttgtaaggtactactttaatatttttatttaactttatttgtttgtctttagtaggactaagctaatgagagctttgacttgcttaaacgttgggcaggaaagcagaagagaaaagggaagtggaaatcaaaacaacagagaaaagaaaatgyacatatttgggaaatagaacatgttactaacatctgtgtcacataataatcagtggtaggttgacatcatttgcctagatgttcatgactgaagaaaaatttttcacttaaaaaagggaaaacctcaagaggctgcctatgtttaaaaaaaaaagagcaagtattttcatttggtttttgatggaaatgataatacatttgaacattttttttcccattacaaagtactaaatgaggtcagacatggtggctcatgcctttaatcctagcactttgggaagctgaggcagaaagattacttgaggtcaggagttcaagaccagcctgggcaacatagtgaaactccgtctctaccaaaaaaaaaaatagccaggcatggtggtgcaca

SEQ ID NO: 292673 - DNA, 594 bp, Homo sapiens
ccttcttgtttggaaatggtggtattttggttttacttttttttaagttactgttgtaaggtactactttaatatttttatttaactttatttgtttgtctttagtaggactaagctaatgagagctttgacttgcttaaacgttgggcaggaaagcagaagagaaaagggaagtggaaatcaaaacaacagagaaaagaaaatgcacatatttgggaaatagaacatgttactaacatctgtgtcacataataatcagtggtaggttgacatcatttgcctagatgttcatgactgaagaaaaatttttcacttaaaaaaggraaaacctcaagaggctgcctatgtttaaaaaaaaaagagcaagtattttcatttggtttttgatggaaatgataatacatttgaacattttttttcccattacaaagtactaaatgaggtcagacatggtggctcatgcctttaatcctagcactttgggaagctgaggcagaaagattacttgaggtcaggagttcaagaccagcctgggcaacatagtgaaactccgtctctaccaaaaaaaaaaatagccaggcatggtggtgcaca

SEQ ID NO: 292674 - DNA, 542 bp, Homo sapiens
ttactgaacacattacccttattgaagttacatctggcaacagaaattttgtgctacagttttctcatttaagcaaataagacactgctaaaatccacctccaaaaccaygtttaacactctcatcagctgctatacaatacctgtttttccctacaattctactatgaaggctgattaagactaaaatggtatgacctcatggactctatgatcatagaaataagagtctcatcttatggagtcgttaattaacacacaaatctcccagattagtcctaaaaccaactggtttcatcagacttcttttataattagcataacctgaggtcactgaatactaaggaatcatgcacaatgcataactgtttctcattctttaatcttttgacttcgagtgtaccagctataatacagaaattactttctccctctctgttttataagctctgcttgactttcagtcacttgtttaagatactaccatgtttcagaaagagctgcacacagaaaagattaaacatctatggacagcaacaccac

SEQ ID NO: 292675 - DNA, 553 bp, Homo sapiens
caactcactttagctcagtagcatcgaggtgaagtcccgggagttctgttggtacatgaaggaaaaaatagactagcttcgaataagtcatatggtttcatcatgtaacatgtgaattttgctaatgtagagcacaactcagagtacggcggggccttcttggaccctacctaggagttttcactaatgaggcactaaaatactgggtgcattaagtacatscactgttatacacagcatgcacctcatgatcagtggtgttttaaggactcagctcagcatgtgcttttgttccccctctttcttttgtcctgtattcatttcattctgtcttggcatttgcagaaatactgtgcctcaccatgcagtgtgttctatagtacactataaattagctaactttcttctactggtggtgagagtctttttgctgttccattttgttttgagcaagaatcatggcttcttttcctagacagactttaagaggaactcattaaactgccacagagaagatgtctgttgccttaatgtgccgtgtgaattggttcag

SEQ ID NO: 292676 - DNA, 595 bp, Homo sapiens
aagtacagccagtacttagttaaatgagacatagtctgccctatgacccagcggcctcaatcctaaagagggcatgtttgtatgaggcgtgtacccaggtgccttttggagcattgtcatgacagaaagtcagaggttttgtgggcattgacagttgtgggtggttgggtaaatgggggaatgtcatrgagtaccatttagccattggaagcaacagcccgaaggaacacacagcaatgtggatagagcttaaaacatatcactgtgtggaaccaagcttaaaaaatcaattctgcagtatcatacttttaatgtcaatcaattaaaagtacacaccacataatgtacatttcataggagcatgtgcaaatagccgaatatccatcagatatagagaaagattgcttggaggcaggaggggagggcctaggactggaaagtagccatgcaggtaagtaaatggatgggtgattgaggaggaggagtcagcctactctctcctctacacttggatctccacaagaataaattggtaagcaaagaaatatgatataagggaggcttaaatgcttgagtgagaagtggatgcagccac

SEQ ID NO: 292677 - DNA, 535 bp, Homo sapiens
ctggtctgggaaatagctttcttacttataattctggtgggagtgtaggttagracaacttctgcagatggcaaattgtcaatgttaatcaaaatacatgtaccttttgacccaccagttcttctttggggagtaaagccatcagatagaccagtgtacatgctgaatgagtcctggaaaagattatttattatagcatcctttttaatagcaaaagattggaaacaacccaaacatcttttagtagttaagtggataaacaaattatgtttcattcgtgctatggaataccatacagctatgtaaaagactgagggctttgcactgatataaaagaatctcctgatcagagggaaaagtcaaagggccaaatagtaggcttaatatgtttcatttgctgtaaaagtaggaggggaataagagtatgtactcattggcttatgtagtcagatattacatatttgctcatattttgctcataaattctggacaagttcattcaaaacttagaacagtggttctctctgggagagaa

SEQ ID NO: 292678 - DNA, 1111 bp, Homo sapiens
tttgtgatttttgacagtagctgggatctatgtggaatagggggttttcaaaacgtttctcagtcaatatgtttactctacttcaccagccatgcagtrtgatatggtgcatcaccaatacttgaaatagactgcaacaggaggtcagaatggggcatagattttctcacacagcatgttagatgaaatgattttgtgtactttgaagtggaaaattcaatcagaattttccacactttttagttaaagcaacacttattcattgatgaaaggtagactgagaaaaatacaaaatgcagagtctagcatattgttcctggtcatagcaagaaatactttttctcctgtaatgtaatgaaagctatgcaagataaaaagggtctgcttaaaatatacagctatgggatgctaagaacatatgccaatatgtttagcatgtgggtggataaaaatggaacccagctttgtaagaagtttgtttttcattaagaaatggacttcatgcttgataaatggcawatgaatctgtaaccctaagaaaacaggcgtatacatttatcattcttttcataagaattaatgcctgttctagtactcttaagtatgaaatatctcttcattgcctgtaaccaacttgttttcctttgattagagatgcatcctgccttgtttatatgggtgcttagttaggtttgtacgggtatttctttccttgtttgtataagtgtaagttgacatttttccccctttggttcctaaatacagtgatgaagtttagctttataaataatgttgaacaagtgatactttgtaccccctttttataaagctctgattttaaagtcatcagttaaacttttaaaaacctccgagttttgttcctgttttctggacacattcatctccttgacagattcacatgatggagggttgaggtttctcatctttawgtgcttctggagtttgtcagaataatgggtggtagtaaaccacctgccattcgttcctccgacctcggactcctcttcccaggctcttccttattctggaaagaaaactcttctctatgtaactctcttctctgcctggacaatacctgtctgtactttag

SEQ ID NO: 292679 - DNA, 1003 bp, Homo sapiens
taataaccttaatatcctttaaaaataaacatttctagctgcttgctaatgtatgggaattcagttggctttattaaattaagattactaatttataatgattcttatctgtagatttggaggagggggtaattttgcaaataataatttgcaagtaataacagctttgctttttccttttccaatctttgtagctattctttcttttttcttattttcactaattaggacttccaggattaagttgaatagacgtggtgatactacacatccttgtcttaatcataaagagaatgctttccacattgcmtactgagtatgataaatgctatgggctttttttttttaaaaagctctgtatcaggtgaagaataccccttttcttgtttcttaaatttttcttttgctattaagtgctttttctacatttattgatggccattaatcttacattttcagaaaaaaatacaacattatcgtgacaaatatgtttatataatawtaataaccttaatatcctttaaaaataaacatttctagctgcttgctaatgtatgggaattcagttggctttattaaattaagattactaatttataatgattcttatctgtagatttggaggagggggtaattttgcaaataataatttgcaagtaataacagctttgctttttccttttccaatctttgtagctattctttcttttttcttattttcactaattaggacttccaggattaagttgaatagacgtggtgatactacacatccttgtcttaatcataaagagaatgctttccacattgcctactgagtatgataaatgctatgggcttttttttttwaaaaagctctgtatcaggtgaagaataccccttttcttgtttcttaaatttttcttttgctattaagtgctttttctacatttattgatggccattaatcttacattttcagaaaaaaatacaacattatcgtgacaaatatgtttatataata

SEQ ID NO: 292680 - DNA, 501 bp, Homo sapiens
taataaccttaatatcctttaaaaataaacatttctagctgcttgctaatgtatgggaattcagttggctttattaaattaagattactaatttataatgattcttatctgtagatttggaggagggggtaattttgcaaataataatttgcaagtaataacagctttgctttttccttttccaatctttgtagctattctttcttttttcttattttcactaattaggacttccaggattaagttgaatagacgtggtgatactacacatccttgtcttaatcataaagagaatgctttccacattgcctactgagtatgataaatgctatgggctttttttttttaaaaagctctgtatcaggtgaagaataccccttttcttgtttcttaaatttttcttttgctattaagtgctttttctacmtttattgatggccattaatcttacattttcagaaaaaaatacaacattatcgtgacaaatatgtttatataata

SEQ ID NO: 292681 - DNA, 586 bp, Homo sapiens
gtgaggctgatgaggaaagaaaaaaccaaaaagtcctgcttgtaccctgacctgccatttggattcttcaagaacatagtttttgacttagtaccaggaaggacatgggagttgttccaaattagaacrgggtgcattgtgagcaaataggtcccctcagaactcattatgctggatgagctgtgcaaagagagctgacaaattcaaccacagatttttactgaatgcctaccctatcagttgggaagggtgatgacaacccatgacataaagcacaaaagtgtatttcttactcgtgctttatatccattgtgagtagactgaggctctacctggcagtgtcctcactctgggataggctgacagagcagcccccatttggagcaagcagtcactgaagcagagctaggtaagagtgttctggaggatctcacacccacaatttagtgctttagcctggaaaggacacaccctgccttttctcacactcactggtcagactttgtcacctggccctgtccaactgcaaggagctagagagcacaatattattgtatgcctagaaggtggagagcccaaaagagtt

SEQ ID NO: 292682 - DNA, 653 bp, Homo sapiens
tttgggtagcaccagagattatgttacttgctcttagaaaataaaatgctaatgattgtaaaaagtcttggggaaatcttaaaataagtaaatcctttaagctatktttaattaggtgtttctcaaacttattggatccagaaccttttagcaaaggaaccttaagtttttcttgtcaaataaagccattcacaaagtgcacaacactctttggggaaatgttgagttaaatggactctgtagctctatattttggggagtatgaataattcatattggactgtcattctgtacacctggaaaacatcttctccactgtttcctgagaaggacccgggaagcttgcatttggaggaaggaaaagctctaacccagaagcctgtttgattaccgcgttattgcttagatctcctcattgtaagtgttaatgttgtaatactctgctactgtaggggtatcctggtctcagctgcctgacttgtccaaggactgtcctagtttgttagtccaggaaaataagctaggtcagctatcatatcccctcaaatgaaaaaagacggctagccgcctagactgcaattgcaaggaaaggtcaatcaatatattacctttctttccatgtgttccttggccgccggcagagttgtgccttc

SEQ ID NO: 292683 - DNA, 653 bp, Homo sapiens
tttgggtagcaccagagattatgttacttgctcttagaaaataaaatgctaatgattgtaaaaagtcttggggaaatcttaaaataagtaaatcctttaagctatttttaattaggtgtttctcaaacttattggatccagaaccttttagcaaaggaaccttaagtttttcttgtcaaataaagccattcacaaagtgcacaacactctttggggaaatgttgagttaaatggactctgtagctctatattttggggagtatgaataattcatattggactgtcattctgtacacctggaaaacatcttctccactgttkcctgagaaggacccgggaagcttgcatttggaggaaggaaaagctctaacccagaagcctgtttgattaccgcgttattgcttagatctcctcattgtaagtgttaatgttgtaatactctgctactgtaggggtatcctggtctcagctgcctgacttgtccaaggactgtcctagtttgttagtccaggaaaataagctaggtcagctatcatatcccctcaaatgaaaaaagacggctagccgcctagactgcaattgcaaggaaaggtcaatcaatatattacctttctttccatgtgttccttggccgccggcagagttgtgccttc

SEQ ID NO: 292684 - DNA, 653 bp, Homo sapiens
tttgggtagcaccagagattatgttacttgctcttagaaaataaaatgctaatgattgtaaaaagtcttggggaaatcttaaaataagtaaatcctttaagctatttttaattaggtgtttctcaaacttattggatccagaaccttttagcaaaggaaccttaagtttttcttgtcaaataaagccattcacaaagtgcacaacactctttggggaaatgttgagttaaatggactctgtagctctatattttggggagtatgaataattcatattggactgtcattctgtacacctggaaaacatcttctccactgtttcctgagaaggacccgggaagcttgcatttggaggaaggaaaagctctaacccagaagcctgtttgattaccgcgttattgcttagrtctcctcattgtaagtgttaatgttgtaatactctgctactgtaggggtatcctggtctcagctgcctgacttgtccaaggactgtcctagtttgttagtccaggaaaataagctaggtcagctatcatatcccctcaaatgaaaaaagacggctagccgcctagactgcaattgcaaggaaaggtcaatcaatatattacctttctttccatgtgttccttggccgccggcagagttgtgccttc

SEQ ID NO: 292685 - DNA, 653 bp, Homo sapiens
tttgggtagcaccagagattatgttacttgctcttagaaaataaaatgctaatgattgtaaaaagtcttggggaaatcttaaaataagtaaatcctttaagctatttttaattaggtgtttctcaaacttattggatccagaaccttttagcaaaggaaccttaagtttttcttgtcaaataaagccattcacaaagtgcacaacactctttggggaaatgttgagttaaatggactctgtagctctatattttggggagtatgaataattcatattggactgtcattctgtacacctggaaaacatcttctccactgtttcctgagaaggacccgggaagcttgcatttggaggaaggaaaagctctaacccagaagcctgtttgattaccgcgttattgcttagatctcctcattrtaagtgttaatgttgtaatactctgctactgtaggggtatcctggtctcagctgcctgacttgtccaaggactgtcctagtttgttagtccaggaaaataagctaggtcagctatcatatcccctcaaatgaaaaaagacggctagccgcctagactgcaattgcaaggaaaggtcaatcaatatattacctttctttccatgtgttccttggccgccggcagagttgtgccttc

SEQ ID NO: 292686 - DNA, 576 bp, Homo sapiens
gttaagaatataaattaagaacattgcttatgaaatccttagttttgggcttttcatttaaataagccctcttatygcaattaatattattgtttggtttatgatccttaaaaatatattccctttcagcatttcttggggttctaatttagctttcttatacatgttagatgatttgcaatttagattttaatttgatttctattctttcaaatatcatttttcttgtatttcatttttatttaaagcatgattctctctgtattcatggaagctgggcataaacaaactgctagaaaaatcaagctattaagtgagctgagaacataaaacattttaataggaatttcatataactaaactaagtatttgagagcccaaccagagaattatggctctttgaaaacaaactttatgggacttagtgttcttagtctaccctctattacagttcttaaaaaaactatagcatttctatcgttgactttaaatctttgtcacttcttgcatatgtaaagggttaaatgtgtctctgcttaatgacttgggggccatatctgtttgaagactgagttt

SEQ ID NO: 292687 - DNA, 623 bp, Homo sapiens
gcaacacagtggtactcctctctgtcacactcctctgtcactcttccttctggctagtgtggcrggagaaacaactttaccagaggacaatcctctccactgccctccgacttcagctcccatcgcttttggataggcagttcagcgagagctgctggatggggctggattaggccagtggaatggagtgggaactcctcaaatgttcctcacagcagttcctcgatgaacatttcagttactgaagaatgggtaacatcggaagatttgcttactttggggtaaccaacacagaactagtgaagagaggtaacttatttctaagtacagtcatgcgtcacttaacaaggacatgttctgagaaatgtgttgctaggtgatttcattgttgtgtgaacatcattgagtgtacttacacaaacctagatggtatagcctattgctcctagtctacaaacctgtacagcatgttattgtactgaatacgtagtcatttgcaacacaatggcaagtatttgtgtatctaaacatagaaaacatacctgaaaaatacaatataaaagatattttatatctgtatagggcacatatgaatggagcttgcaggattggaagttgctgtg

SEQ ID NO: 292688 - DNA, 623 bp, Homo sapiens
gcaacacagtggtactcctctctgtcacactcctctgtcactcttccttctggctagtgtggcgggagaaacaactttaccagaggacaatcctctccactgccctccgacttcagctcccatcgcttttggataggcagttcagcgagagctgctggatggggctggattaggccagtggaatggagtgggaactcctcaaatgttcctcacagcagttcctcgatgaacatttcagttactgaagaatgggtaacatcggaagatttgcttactttggggtaaccaacacagaactagtgaagagaggtaacttatttctaagtacagtcatgcgtcacttaacaaggacatgttctgagaaatgtgttgctaggtgatttcattgttgtgtgaacatcattgagtgtacttacacaaacctagatrgtatagcctattgctcctagtctacaaacctgtacagcatgttattgtactgaatacgtagtcatttgcaacacaatggcaagtatttgtgtatctaaacatagaaaacatacctgaaaaatacaatataaaagatattttatatctgtatagggcacatatgaatggagcttgcaggattggaagttgctgtg

SEQ ID NO: 292689 - DNA, 600 bp, Homo sapiens
attatgatttcttgaagccacattttaattttatttgtgagaaaaacaaaaacagaaatgaagactgggagctttaataacttaaaatgagactttcattgtatgtatttaaagatttccaagaattaataatcaaaaatatagtcttaagtatctttaggatatgtcaatatatttattgaaaattaaaaaaaaattgttattttaaaaaatagcagatactataggttgtatcacagtaccccagattcctgtaaagcagactcaagctctcattcttctgctccattagtgagttcagcattgaaatgcctaaagtaactgatttttttaaaaaaatcatttatttcagttacacaggcagtgtcttaatttctctatgtgtttgagtgactttttcagtgaagcacaatgagcttttcagaaaaagtattacacatactgatatttgacctagcactattgctgtagtaccagtctgatactaaaacacaccaaatgtctktagggcaagtttcttgtgaccctgaaggaatttcaggtcaataaattagagagaatctcaacatttggttatattctaacatactgatcccattg

SEQ ID NO: 292690 - DNA, 648 bp, Homo sapiens
cattttagatgaacaattctctataactgatatcrcattaatccagacaaaatgtcatttctctctttccatgctcagggtgtgaaaataggccaagtctttttatgactcatgtttacgcttactctctagaatttgatttatggcattcagttgaataggtgctctgagcttcctttggccagtttctaagtgtgtgtatcacgcaattaagcaatatcaggctcacagtgtaactggcttcacatcaaagttccattatttgccatcatgggcatgagccttttgtgttggtgtttgcaaatcacctggaggtggaagtatgttgaaacttacactaagatttcctctttgtgagaaatccaaattgcttaaatttagtggcttccagaagttcaaaggctgagaagcaccctctttgtactcattcatagtaaaggagaatattgagccacattcagtcatacagtcttaccatttgcagttggagagttgggaagagctggttatgcagtcttcaaatggcattatgttgaaaaatggcaatagaaatgtccaagaagatagaagcttagcttctcaaataagacacataaaattcttttactctttcccttagaaattctcatcattatgatatgtaaaaat

SEQ ID NO: 292691 - DNA, 586 bp, Homo sapiens
atcccagctcttgatcactgtactaaagtgactcccatttttcaatgtctgataatcctcattattgagaaatgtttttttaaatctttctccaaccttattgctatttaggctgtttccctgtgaacatattttcatctttttctctctctggtttaataatttggattcagtcttttagtcagtgcacatgtactaagccctaccctgtgcacaggcttttaataggcacaatactgttccatttccatatgaaccaggagcaagctttgcactcatgccacacatttatatatttggcaagtatagtaaaaatcrtatttgtatcactggtatggacttacttccagtatgtagtttttctcctttttttaacttctatcttttaaaaactcctatattatagttccttattctttttccccagctttgccccacccccacccctgagttattttattttaactcctgggtgtttactgaatgcttacctcatgttatggactgttatttttcaggtagaataattataacaacttcaattagaagtcctttttccaacttttctcctaataagtctctaaat

SEQ ID NO: 292692 - DNA, 607 bp, Homo sapiens
aaagtgaaataaaaattaagtgmaaaaatgaaatgaaggatcttgctcttataaaactgataagttattcagccattgcctgagagtggactggagtgaaagactgggtgtagacagcgaaagcagcagccccatgaagggctggaagaagtttatggtcaagttgaaaggaaaccataatggtgtgatttaaattatctgtctgaaccaaaactcacagagctctcagcattgtgtatagtcataacaataggcacatgcacacatcccagctgtgagcagtctagttcattatcctcctgaactttagatgctaaaagttctcacagttggaaaagcaatcaggacatttttacaggactcgccagagctgcctttcattgtctggatgtgcacctattcaaatgcattatttacataattcttgtttatgctgcaacaaattgtatcgcctcttcacacccatagaatgcatttgccacttccatttttacagatgaagatactgacagccatctagcgatcagccaattaaaaactgtggaactaccatgtggcaattagaatccaagacctgactttgcttcctttggccttgcctacacct

SEQ ID NO: 292693 - DNA, 577 bp, Homo sapiens
aaggtgatggcattaggagttggggcccttgggaggtgatcagatgataagggtgaagccctcgtgaatgtgattagtgctattgtaaaagaggcctcagggagcttgcttacgcctttccccatgtgaggacacaattagaaggtgccatctatgaggggcatgccctcaccagatgccaaatttgcaccttgatgttggacttcctaccctccagaactgtaagcagtaaatgtttgttgtttatgagctaccaaatttatggtatttttgttatagcagcctaaatagactaagacacttacctttaaaatagaatagtaattctgactgtgaagggttattgtaacaagttaatgataaatgattgtaaagccctaaatatgatgcctctagcctatagtgggcacscaataaatggtgactattaatgggaatatgattatttaatttttaaggttgtacaagtcttactatactataaaatacatacatactgtaagtactataaaaatacatacactaaaattttttagtgtacagttttgagtttggacaaatgtatatcgtcatgtaa

SEQ ID NO: 292694 - DNA, 573 bp, Homo sapiens
gttggctaagcttcttggatctgtaagttcatatctttctccaaatttgggaggttttcattcatgatttcttccaattttttcttctcctcatcttttgggaatcgaaagacataaatgttaaaccttttgatattttcttacttgtttttaaggctcggctcatttatgcctagttgttkttctctcttttcttcagttgagatcatttctagcttcacattcactgacttttccctctgtcatctccgttctgctattgatcccatccagttaatttttaatttcagatattgttttattggccctaaaatttctgtttagttcatttttttatagtttatatttcacttctgaaaactgcctttctattcctttcaatagtgtttactttcatctcatggagcataattacagtagttggtatagagcttctgagtgataattctaacatctagttcatcttgcttggtatctgttgactgttttttccccttgagaattggtcacattttgctgtttctttgtaagtcacataattttgagtcctggacattttgaatattgtatcat

SEQ ID NO: 292695 - DNA, 524 bp, Homo sapiens
taaatgggctgctgccttgtaaatatgttcctttaagtaatacaaaaggtagaagagatgaaatattcttcagaatggtttgaacattggttccattttagaatagtgcactacgcacatcgacagacactgaaaggacgttaggcaccagtgytagcattatagtggacctgtaatatggttttggttatcaccataataaccatcatcataatagttatggcaaccacattttacacttattatgtgccagaccttgtttctatgtgttttatatagattaactcatttgctcttcacagcaatcctaggaggcatgtatttattttccttattttaccagtgaagaaactaagaaactgagacacaagttgtccaaaatcacgcagctaataagtggcatattcaaacccaagaaactggcttcaaatcacactcatacgtggtcatgctccactgcttctcatggactaatgattgtgtttttgagcacttactatgctcttagttccatagaggatcca

SEQ ID NO: 292696 - DNA, 593 bp, Homo sapiens
cccccccactcacccttcctagtctctgttatctctctttccactctctaccttcatgtgatcaaatgttttagttcccacatatatgtgagaagaacatgcaatctttttgtgcctggcctattttgcttaagatactgcctcccagttccagctgtgttgctgcaaatgacatgatatcattgtttttttatggctgaatagtatttcatcgtgtaccatatttttctcatccattcttttgttgatgaacacttargttgattaggttgctattatgaataacaccacaatacacatatgagtgcatgtattcatttgatatattgacttcttttcatttgtgtagattacaaatagtgggattgctggatcaaatggtaattctactttgagtttttaaagaaatgtccatactgttttccacagtggctgtacagtgtccaagagttgccctttgcatcttcaccaacatctattatattttgtcattttaatataacaattctgactagggtaagatgatacctcattgtggttttgatttgtatttctctgatgttagtgtgatgttgagcattttttacatacac

SEQ ID NO: 292697 - DNA, 915 bp, Homo sapiens
cttcttcttactaggtatcctttgccttgatgtgaaaacctctcctctctggcctctgagatgaatgtgcatgactcaagggagagaagcttgtcatcaagaaggttgggggaaaagttgaggaccacaaagaggtttaataaaagtagctgtcttttttctctgcagaaaacttgcaacccactgaggcaggaayggtatgcacaaaagactggtgatgtgagcagtgccctctttctttattatggaatctaagagctcaatagaagcctcagactgacacagaagagctggggggtgtgaattgttccaaatcactgcacttctatgcatcttgcagaattgtggactttgcaaatgggctagatggagcagctgccaccaagtgaggtwagtgcattagcatcatagcctctctgagtttcctattttccaaagggggaaaataatacgtattttattgagttgtaaaactatcaattgtgaaaagcacttaacatagtacatgactcttgtcactttcttctttatatatttggatttgtgggtcaagtgagatcataaaaatcacttttcagaatatcacgttctatacaattgaacataggcctatattaaattagtttccttctcattcattatttcattttcttccctgtaactggtttgttgaataacaatgctacttcattaaaatgtttwgcaaacttaatttttctttttatcaaatactgtagttttctagtaaatgagataatgtatataaatatatacatgttctgtttgggggaggagggtagatgataatggtgttgctgtgcattctgaaaggatttgcaacctgagagagacagactggttctgatctgatacacttagtgtcagtacaataaacacactgaaccaagaaatata

SEQ ID NO: 292698 - DNA, 576 bp, Homo sapiens
ttgcgtgctccttatgagaatctaatgcctaatgatctgaggtggaatagtttcatcccaaaaccatgccccggcaactgccaccccrcccccgccaccagtactcatacgtggaaaaattttcttccacaaagccagtccctggtgccaaaaaggttggggactgctgtactaaaggatgacttttaaatttatataaatagctttttcctatatactttaggggaaggcaagatggcagatgatttgcagcaagtgaacttttgtgaggctgcttgcaagcttgtctgataattgtataacactgttttcatgttttattttaaaattccaaaattaatataagaaaaagactctgtatagtaaaatgctagagccttctgatgttaatttgcttcagggagttaataactggtcttagggctattttcttagactttgatctggttgacagaatacccagggtaatgatactagttgtctgaaaaatgtaggtaactcactcagttctctgtgctttctgctgcaaagataacctttgaaatagaaagccaaatctctgtgattttaagctat

SEQ ID NO: 292699 - DNA, 576 bp, Homo sapiens
ttgcgtgctccttatgagaatctaatgcctaatgatctgaggtggaatagtttcatcccaaaaccatgccccggcaactgccaccccgcccccgccaccagtactcatacgtggaaaaattttcttccacaaagccagtccctggtgccaaaaaggttggggactgctgtactaaaggatgacttttaaatttatataaatagctttttcctatatactttaggggaaggcaagatggcaratgatttgcagcaagtgaacttttgtgaggctgcttgcaagcttgtctgataattgtataacactgttttcatgttttattttaaaattccaaaattaatataagaaaaagactctgtatagtaaaatgctagagccttctgatgttaatttgcttcagggagttaataactggtcttagggctattttcttagactttgatctggttgacagaatacccagggtaatgatactagttgtctgaaaaatgtaggtaactcactcagttctctgtgctttctgctgcaaagataacctttgaaatagaaagccaaatctctgtgattttaagctat

SEQ ID NO: 292700 - DNA, 576 bp, Homo sapiens
tctgtcattcctgtttcatttctctcattttaaaacatttcttttctgaatcatgtgcaaatcccagatgacatattgttttacttgccaatacttcggtatgcatctttaacagataaagccttctttccataaccacaatgtaccattatcacactcaacagaattaacaacttgttaattcctaatatttatctaatacctaatgcatgttcagttttctcagattgcctcaaaaatattggtttttaatagttggtttattgyaattaggattcacatatggcccacatattacatttgtttgatatgtttgttaagtatttttagtctataataattcccttttctctcttaccctattttatctggaaacatgtcaaacatttttggaaaagctgttaggcaaatgcaatgaactcccacttgccttcacattttacacattttcttatagttcctctctctacgtgtgtgttgggggtgagcttattattgtcatcatcaacattattttgctgaaccatttgagagctttcaagtttgttgcagacattgtggtattttatgcttaac

SEQ ID NO: 292701 - DNA, 656 bp, Homo sapiens
agctatagacaatgtacaaataaatgagtgtcactgtgatccaagaaaagtgtgtttacaaaaaaagcagtgggccggatttagcccacaggccatagttttccaacctatgcgctagcttgatggccatgtgtctatcttaaactctgggggtttctgtcattaaaaggaagaagaagagaatggctatggggcagggggcaagggatatcagcctctgatacaaatactttttgttcccaggcaaattttgaaaacagataatccmattcttgatttatttgttggtatattgcatgctgactctagttgcagaaggcatatgtgttggaaaaagttatccatttaccatttttaagaaatgatctccactgggcctgagttcaactccatactaaagaaacctgaagcctctccattcagtgttcccagcagtcttcactgattccttctgttttactaattaaaatccatgtaacccacggtataactttgctgggtatggttgattgacactctccattcactccacctctttctatgtacttttctgtactgcagtctggaaagctaaaatctgcatttcccagactctcttggatctagggttctggatgcacttaggcaagacctaaaccacagcagtaagacagcag

SEQ ID NO: 292702 - DNA, 656 bp, Homo sapiens
agctatagacaatgtacaaataaatgagtgtcactgtgatccaagaaaagtgtgtttacaaaaaaagcagtgggccggatttagcccacaggccatagttttccaacctatgcgctagcttgatggccatgtgtctatcttaaactctgggggtttctgtcattaaaaggaagaagaagagaatggctatggggcagggggcaagggatatcagcctctgatacaaatactttttgttcccaggcaaattttgaaaacagataatcccattcttgatttatttgttggtatattgcatgctgactctagttgcagaaggcrtatgtgttggaaaaagttatccatttaccatttttaagaaatgatctccactgggcctgagttcaactccatactaaagaaacctgaagcctctccattcagtgttcccagcagtcttcactgattccttctgttttactaattaaaatccatgtaacccacggtataactttgctgggtatggttgattgacactctccattcactccacctctttctatgtacttttctgtactgcagtctggaaagctaaaatctgcatttcccagactctcttggatctagggttctggatgcacttaggcaagacctaaaccacagcagtaagacagcag

SEQ ID NO: 292703 - DNA, 656 bp, Homo sapiens
agctatagacaatgtacaaataaatgagtgtcactgtgatccaagaaaagtgtgtttacaaaaaaagcagtgggccggatttagcccacaggccatagttttccaacctatgcgctagcttgatggccatgtgtctatcttaaactctgggggtttctgtcattaaaaggaagaagaagagaatggctatggggcagggggcaagggatatcagcctctgatacaaatactttttgttcccaggcaaattttgaaaacagataatcccattcttgatttatttgttggtatattgcatgctgactctagttgcagaaggcatatgtgttggaaaaagttatccatttaccatttttaagaaatgatctccactgggcctgagttcaactccatactaaagaaacctgaagcctctccattcagtgttcccagcrgtcttcactgattccttctgttttactaattaaaatccatgtaacccacggtataactttgctgggtatggttgattgacactctccattcactccacctctttctatgtacttttctgtactgcagtctggaaagctaaaatctgcatttcccagactctcttggatctagggttctggatgcacttaggcaagacctaaaccacagcagtaagacagcag

SEQ ID NO: 292704 - DNA, 744 bp, Homo sapiens
ctaatatacaaaagttgatcatttttctatatactagcaatgagcaaatagaatttgaaattaaaaatacaatacmatttacattagcaccccccaaaattaaatagttaggtacaaatctaacaaaatgtgatacaagagctatatgaaaaaatctataaaagtgtgatgaaaaacatcaaagaactaaataaatggagatcttcatatwtgaatcaaccttgcatgctagggataaaacccacttgattatggtggattaactttttaatgtgctactagattcagtttgctagtattttgttgaggatttttggatttatgttcatcaagaatgttgtcttgtcacctgaaataaactgtttctggtggtctttactaataggtattgagaggaaaaagcatttgccagagcagtaactgcatactatgtaccagagagtgttttaatttgctcaaggaataaaaccatatctgaacaacagctgcaattggagttgccacctggttaagcttacwataatccactgttattctcgaagatccacctgtcttctgccaaattggaaagcatattggagagttgaatggagatgtggtgggaatcaccacccctgcatccttcaggtcctttatgacctctacagttcccccagaaatgtcgtattgcttttggtttagtattttcctaggtagacacagttctagtggcttccacttggcctttcccaccataatagccct

SEQ ID NO: 292705 - DNA, 597 bp, Homo sapiens
gctgtggcctcatcactctggtctctgccaccatcttcacttggcctcgtctgtgtgcatcgctcctctgtgtacctgtttcagagttcctctgcctctcctttaaggatgcatgtgattgcatttagggaccacccagataatccaggataaactcctcctctcaaagtccttggcttagtcacatcctttcagatataaggtcrtagtcactctcttgccatgtaagggaatagccacaggttccaggattagaggttagaacatgtctttagggccaccattcaacccattgcagggagtgagaagaggtcagatcccagaaagcacgcaacactgtgactcggtttttggtaaaatccattctcatttaagctagagaaaaattggcaagtaagaggtgggggaagcggggagcatctgtttggtgcagactctgtgcagggctttacatggatacatattgacaagagcgaatgtttatggagcatttagcagatccaggctctgtcctaaggactgcacacagactagctcatatatcctcatatcagcttcacatatacccccttttatcgataggaaattcaaaaaggt

SEQ ID NO: 292706 - DNA, 597 bp, Homo sapiens
gctgtggcctcatcactctggtctctgccaccatcttcacttggcctcgtctgtgtgcatcgctcctctgtgtacctgtttcagagttcctctgcctctcctttaaggatgcatgtgattgcatttagggaccacccagataatccaggataaactcctcctctcaaagtccttggcttagtcacatcctttcagatataaggtcatagtcactctcttgccatgtaagggaatagccacaggttccaggattagaggttagaacatrtctttagggccaccattcaacccattgcagggagtgagaagaggtcagatcccagaaagcacgcaacactgtgactcggtttttggtaaaatccattctcatttaagctagagaaaaattggcaagtaagaggtgggggaagcggggagcatctgtttggtgcagactctgtgcagggctttacatggatacatattgacaagagcgaatgtttatggagcatttagcagatccaggctctgtcctaaggactgcacacagactagctcatatatcctcatatcagcttcacatatacccccttttatcgataggaaattcaaaaaggt

SEQ ID NO: 292707 - DNA, 597 bp, Homo sapiens
gctgtggcctcatcactctggtctctgccaccatcttcacttggcctcgtctgtgtgcatcgctcctctgtgtacctgtttcagagttcctctgcctctcctttaaggatgcatgtgattgcatttagggaccacccagataatccaggataaactcctcctctcaaagtccttggcttagtcacatcctttcagatataaggtcatagtcactctcttgccatgtaagggaatagccacaggttccaggattagaggttagaacatgtctttagggccaccattcaacccattgcagggagtgagaagaggtcagatcccagaaagcacgcaacactgtgactcggtttttggtaaaatccattctcatttaagctagagaaaaattggcaagtaagaggtgggggaagcggggagcatctgtttggtgcagactctgtgcagggctttacatggatacatattgacaagagsgaatgtttatggagcatttagcagatccaggctctgtcctaaggactgcacacagactagctcatatatcctcatatcagcttcacatatacccccttttatcgataggaaattcaaaaaggt

SEQ ID NO: 292708 - DNA, 597 bp, Homo sapiens
gctgtggcctcatcactctggtctctgccaccatcttcacttggcctcgtctgtgtgcatcgctcctctgtgtacctgtttcagagttcctctgcctctcctttaaggatgcatgtgattgcatttagggaccacccagataatccaggataaactcctcctctcaaagtccttggcttagtcacatcctttcagatataaggtcatagtcactctcttgccatgtaagggaatagccacaggttccaggattagaggttagaacatgtctttagggccaccattcaacccattgcagggagtgagaagaggtcagatcccagaaagcacgcaacactgtgactcggtttttggtaaaatccattctcatttaagctagagaaaaattggcaagtaagaggtgggggaagcggggagcatctgtttggtgcagactctgtgcagggctttacatggatacatattgacaagagcgaatgtttatggagcatttagcagatccaggctctgtcctaaggactgcacacagactagctcatatatcctcatatcarcttcacatatacccccttttatcgataggaaattcaaaaaggt

SEQ ID NO: 292709 - DNA, 956 bp, Homo sapiens
ggatacaggacagtcatctctctgagttaagcatgtgaacacccaaaatcaaggactatagcctgtttcctgaacccttatctctctagggtacagaactttttttaagtcactggcagtttggagacaatgcttaagtgggtgggtggttctggttggtttataggtacacacgggcatccgggctggaggtggctcacacaagctcatgagagccagttgtgtaatctcttccctgcccctagttaagtgatgtcatgttggtagcttgatgttggccatggtgggagtatttatgctacaaaaatggccatttactgcaaatcaggactacccctctccctgcagcaccccagaaagctggttgttaaatacaatgagtacaccaatggccccagggyaggtttaagagtcagagaaggtataaattgctggtcaggcctggtggctcatgcctataatcccaacagtttgggagagtgaggtgggaggatcacttgagcccaggagtttgagaccagtctgggcaacatwgcctttcaaagggcattgcaaatwaaacaacttgcaaaaagttttctgggaaaaaaaaaaaaaaaagacacacacatacaaaagaattgctcctttggggaaggggagggcaaaaaatccctaaaacttcctcccacaaacagcttgtttcaaatcaaacatgagtaataaagaaatcagcaaaagcaacatagaagctgtacaatatagtgaggacagagtgggaggaaggaaaggctggaactagcatatacagttacaaaaacttaaatctcagagactagaggatcctgctctcccaaacaaaacagcctagccctggcccaatcacttgacggtagagcccatcagtgcgtccctgcacagagctgactttctaaccaggattttaatgatccaccctcaaatacaaggcaggcaag

SEQ ID NO: 292710 - DNA, 493 bp, Homo sapiens
gcacagtatcacttggtggtcacaacataacttcgaattgtacaygaagcttacaacctaggagtgggctataaattttttgataacaaggattatattttatgtaacactgaatccctttggatacccagaagaacatagaaaaaagattagttgaacagaaacacattaaatacttttgaatgactggctaaatgtggtccctgccttcaagaagtttataatttaccttggaggacaaacatatagtccaacttatgagactaaactgatttaaaatgacataatatagtccaatactactggattgatcaaggcaatgtacatagctaagaaaacacaaagagctgacgaagtctgtggtgctggatgcatggtatgaaacatcctactggaacaatcaacatacatatcattctgaataaaactgcaacgggatcatccgtctaattaaaagagggagcaagacacaatgatcgaagtcaagtagaag

SEQ ID NO: 292711 - DNA, 1007 bp, Homo sapiens
ggccttggaataagtgggctagttatctactggcatttgatagtttcaggtctgctaggaggtcaatcccctctgaccgcaaaggggatttccatcttaaacacatctaccacatgtcaaacattgcagtattagaaattcattctgctggatcttggagatgtctttggtacctcactgaaatgtatgtacctttggtcagggcaggttgtcgcccaaactaaatttagcacagcagaagacaattcattaatgggatgcttctggtgaagtggcaagaaacaaggctagcagaaagttgagcaggtattgagaaccattttaccatatgactacattaataaatgtttgtaaaagaataatgaacttattttaccactttctaattttgsctttcttggttaggcacagtaaagggtgtccagagatgagatggaagatgagagtgaccaacagagggagaaaatattgtcaaaaagtagttaggactacaaagcaggggaacttgatwatgtctaaatacaaattcatttattttagtgcaaatggagcataccactgtaaatgtcaaataagtcaccatccattatgataacagggcccagccaatctttccaacttattcaaagttcactgcatgaatgatccaagccctcagtccctagacagaacttaaaawatgtcctcattaaaaaattcaagggcaataaatcaggctaaaaaggcgacaagagacgaccctcctctgccatcaactctgggaaatgcccagagctttctgctggactagccagggagctgacagattctctgtatctatgcagaggaaagcagcaaagagtagcaatttaaagactgacaatctccacccaccaggaactgatattaatctatttaataaacgcatacattttagtctagtcagagatcatccacagatgaaagtaatgcttttttcacataggaaaaaaaatatcctatgtggaagtgttatccccaatagacat

SEQ ID NO: 292712 - DNA, 496 bp, Homo sapiens
atgtctaaatacaaattcatttattttagtgcaaatggagcataccactgtaaatgtcaaataagtcaccatccattatgataacagggcccagccaatctttccaacttattcaaagttcactgcatgaatgatccaagccctcagtccctagacagaacttaaaaaatgtcctyattaaaaaattcaagggcaataaatcaggctaaaaaggcgacaagagacgaccctcctctgccatcaactctgggaaatgcccagagctttctgctggactagccagggagctgacagattctctgtatctatgcagaggaaagcagcaaagagtagcaatttaaagactgacaatctccacccaccaggaactgatattaatctatttaataaacgcatacattttagtctagtcagagatcatccacagatgaaagtaatgcttttttcacataggaaaaaaaatatcctatgtggaagtgttatccccaatagacat

SEQ ID NO: 292713 - DNA, 549 bp, Homo sapiens
tctgtttctgttttttgcattttaagtaaaggagtcctttttcttttggctttgctatttctgaagttcaccaaacctgccaaagtctggctgtgtctctcccacatcatcaataactattagaatgggcctggcctggcttggctttgattagcgttgctgtgactactcaaggaacagccattggattgtaatttaaggggtgcaaacaattcctttcattagcaaactgtacagtcagcattctgtgctttgttttcacattttaagtcaggttctgaggagggatagactttggctaaaaaaaaaatggcatacagtatattgataatttcctgagaaagacagtttgctggtattgtgggttgtcattgagtaagttagggctggctggtacttctcaagcaagcgggatctactatgtcaagttttctactgtagctgcttgatgtaacctttmtgatgtggtcaagtgacacagaaaccaggaatcacttcctactcatcagagttacttattgtccaagcccacatggagtgatgttgcct

SEQ ID NO: 292714 - DNA, 567 bp, Homo sapiens
gtaacctttctgatgtggtcaagtgacacagaaaccaggaatcacttcctactcatcagagttacttattgtccaagcccacatggagtgatgttgcctgttttaarctgggatgtggtcctccttgatgcccgtggtgggcaggaacatccgtaactggcacttacacagtaagcctggcttcctttcttcactgtgtgttgctcacctctatccccaagccacacaatgcccaccatggagcctgtcatcttccaccccttggagtccgtcagtggaaaggagtaacaggtttttgttactcacatggttagctacatgatcagacactactgcatttaaatcgtgtctagggtacttataacacctaatacaatgtaaatgctatggggaggccagacaccactgcctccctcattccctaccccagtctcaggaaagcagacccctctaggcttgagaagcttacccattgcactccctgtgggagtgtctcaggaaagagcctgggttgggacttgcttttagcatgcttcccaacatccattccctttcctgggaccaaaa

SEQ ID NO: 292715 - DNA, 787 bp, Homo sapiens
gtaacctttctgatgtggtcaagtgacacagaaaccaggaatcacttcctactcatcagagttacttattgtccaagcccacatggagtgatgttgcctgttttaagctgggatgtggtcctccttgatgccsgtggtgggcaggaacatccgtaactggcacttacacagtaagcctggcttcctttcttcactgtgtgttgctcacctctatccccaagccacacaatgcccaccatggagcctgtcatcttccaccccttggagtccgtcagtggaaaggagtaacaggtttttgttactcacatggttagctacatgatcagacactactgcatttaaatcgtgtctagggtacttataacacctaatacaatgtaaatgctatggggaggccagacaccactgcctccctcattccctaccccagtctcaggaaagcagacccctctaggcttgagaagcttacccattgcactccctgtgggagtgtctcaggaaagagcctgggttgggacttgcttttagcatgcttcccaacatccattccctttcctgggaccaaaawtgaccatcatgttctattggcccttcgttttctgggagaaaagtagctgggttaagagctgcacaagtgtgcatctgaagcactggtccctcaagtaataaggcctggtacctaagtaggcgatwgtctgacagccgcaaacctcctttagcagttagtatgctgtttacatcgtgagtagtccatacagtgaggtctctcccttgtattattttgatg

SEQ ID NO: 292716 - DNA, 476 bp, Homo sapiens
tacttctcctgtcatcaagtgaccagcccagctgaattatcgttactcagtttcaattccaaattaccaggagaatgtagctctgatcaccccaatttgaaaagttatcttttcctagttctattgtctttggccagcagggcggagccatctaccacaaaaatggctgccatggctcacctgtgggygagggggcaactccagaacaagggagatgtaataagttaagcagataactcaaaaatgcatccactatttttgtgggaattataagtgtttctgctttatagatgagaacactaaataaaaggttgaatcctagggtgaggtagaaaaatcagaaatctacccaaatattttgactataaattttgtattttttgagttctacaacttaacctccctggaagctgacatagaaaggatcatcagtaaaactacagccaccttaactgaagaggtaatataataatatg

SEQ ID NO: 292717 - DNA, 1065 bp, Homo sapiens
ttgactataaattttgtattttttgagttctacaacttaacctccctggaagctgacatagaaaggatcatcagtaaaactacagccaccttaactgaagaggtaatataataatatggataagataatccacttaacgttctttgaaagggtctagagttgggccttgaagaaacagaccatgtttagttgtccaaatctggaagactgaacgaagcaaaaatagtgaaatctgatgatggagagacagaaagaggggaaggctgtgctagaaaaagktaatacatgtcatcatatatttgccttttaatggaatctaattcaagaaaacactactattttgggtaacagtagtttgtgctttctccaaacataaactcccatgttttggagatgaagagagtctaattcatgtctctaaggcatggcatctgatttccgttaagcacatcgcctgattcctttgagcacacaatgatcacttatgagctttggacaaagttctggcccctccagtgcttattttcatagttgacatagaccatacctacwgattcctctgcacctgatccacaaaagaaaaaggacaatcacttagtaaaaaacctttcatagaaatggcacaccttatgtttactcaattacagcagattatattatcccacctagctgcaaaggggacwgagagatgtagttcctagctgtgctgtcacttttcagtgacaatgctacattacggaaggtggaacacaagtttcggcagacaatcccacaaacaccatcctaattagagccagtgattctgtgtaaccgtgggaaaagaagtaatggtgttgggaaaattcagtgagtaccagcatactcgtatggctcctatattcaagcaacaccccatggcacagttgatggaatagttcatttgccaggaaatattaagttttattaataaactgtggaaagtcagaatttgagctaatatctgccctactacagaatctgacagggtcctatgctctgcagcattttatccatccaaaagagtcctaccatttccagtagcaaggt

SEQ ID NO: 292718 - DNA, 547 bp, Homo sapiens
ctgatccacaaaagaaaaaggacaatcacttagtaaaaaacctttcatagaaatggcacaccttatgtttactcaattacagcagattatattatcccacctagctgcaaaggggactgagagatgtagttcctagctgtgctgtcacttttcagtgacaatgctacattacggaaggtggaacacaagtttcggcagacaatcccacaaacaccatcctaattagagccagtgattctgtgtaaccgtgggaaaagaartaatggtgttgggaaaattcagtgagtaccagcatactcgtatggctcctatattcaagcaacaccccatggcacagttgatggaatagttcatttgccaggaaatattaagttttattaataaactgtggaaagtcagaatttgagctaatatctgccctactacagaatctgacagggtcctatgctctgcagcattttatccatccaaaagagtcctaccatttccagtagcaaggtgcattgactctatttccatcttaaatctgaaaccatttcagccagct

SEQ ID NO: 292719 - DNA, 487 bp, Homo sapiens
ctttccatactcagagccctcctcacagtatgaggaggtatgtagccaccacattccctgacccaccatccttgcccctttcagaacaatgttccatcttcacaatcttgccttgtctttttatccctgtaaatcccacactgcaatcccaatggtttctcacattccagaagataatgaaattttcagccagtacgttttttggctgtctattgacacttgactaaggatttgcaagtctaacctccatgtgccaattgggattcttctattagtgttccaaccttgttgacttraaaaagctgcttctcagcagagggatgattcttgtagcagctgtcagccagatacccatcagaaccaccacctatacacaactcttcatttgctaaaggaatgagagaatcagcttacaaaagtaagaatactcaccagcatctacagcagaatctacacagaactctctgggctcttccaatatggttaa

SEQ ID NO: 292720 - DNA, 563 bp, Homo sapiens
ccccaagggatgtaaaacatcttcacattcatagaaaagggcctgaacaacttttatttatcatgagataaaatcaattttctaagttttctgttggtatttttggtgtataagagactgctgataaggccaacttcaaaaataaatagttaatgaaactaaaccaaatgtattaaaatgttgggccagattcactttgacatttattgaatatttcagtaactgcacatgtggcttcagtagagcttctarcatgcaaataaagtttttttttcaattctggactattttcagattgagatcttcttatcgatcttgtttattcctgcttaagtgttgctttttgcagatcattaagtatattctctcatcatcataactttaaaagtatacatgcatctctatctacaggacagatgatcttatctctctcctttttagctatttataaattctcttagtaatgctatatctctaattgtaaaagtacactaatataacatctttccaaagtacatttataattaaaaactgcttcacctgtgttctgctcagtaggccat

SEQ ID NO: 292721 - DNA, 487 bp, Homo sapiens
agtctgccacagaagttttggcatctctacttcatttaatgttctacattaaatgaagtgtttggaaaactctggctctcaagtcagatccagccggtttccttttttggtaaggaaagttttattgaaacactcaatttactggcaacacccatttgtctacatattggccatatgaccttcaaagcctaaaatatttgttacctaacccattacagagaaagtttgctgacatttgatggagggcattacttttcccaatcttctaaccaccaccctggtatagcattaaaactgccccttggccctttaccaaagtgtcaaatcctgggtcacagaatggtgcccccatttcaacactctattccttctccagtcttatattactccctcattcagctggcttcttcaggattcccaggcaytatgtccttgttcctgtcagtacgtgttaactaggtccagccactgttttggtatttaatac

SEQ ID NO: 292722 - DNA, 573 bp, Homo sapiens
gaattttatcttccaataaaagtagtcaatattaaagacttggagagttcagggaaatctgggatttcaagacgctcaagtgaatctacccagatattcccatcttgtgctttcactcccatatcagaactctgactttggcttaggaaacttccctaggttgagaattcaagtttctccaaaattttctgcctcttccaattaagttctgtttcaagccatcagttttctctgccctccatttacagaaattaggatttctttaaatgctcctaaggaggccctctgactcatatttacatcaaactgtgaattaatagatctgagattatcatgatctctagatctacaacatttagcaaaagcaaaacaattccatggcccatagagttacccttttccatatgcctttgaaatgccrgagatatttgatcagtcagtgtccctcctttcatgtgcaccccctgccagttcaccatgggtgaacatcttagccaggaactatcatggctccaccaacccaggatgcactaccgtctggccagtaaataattcaactccagaattccagct

SEQ ID NO: 292723 - DNA, 569 bp, Homo sapiens
attaatagatctgagattatcatgatctctagatctacaacatttagcaaaagcaaaacaattccatggcccatagagttacccttttccatatgcctttgaaatgccagagatatttgatcagtcagtgtccctcctttcatgtgcaccccctgccagttcaccatgggtgaacatcttagccaggaactatcatggctccaccaacccaggatgcactaccgtctggccagtaaataattcaactccagaattccagctatagggtttctttcttaggactgctcccagtaccagtgtcctagaagcagggcctgagatggaaattcttcaatgaatgatttattgagatattactttcaggagaaagggagtaaaagaagcagtaaaggccttagtaaaactaagcaaaggcttattctcatctggagatcagcttcctttgatttrtaagaaattctggagtatagatgagtctagatgaatcataggtttgttactacctcgagggagggagtttgtcctgaccctcctcctattctcaggggcataatgttcaaggtaaagca

SEQ ID NO: 292724 - DNA, 586 bp, Homo sapiens
caaaaatgtgttggattcaagattatgtaaattcagagaagctgtagcagttctggggggttccatcaggtcccaaggtaartaaccttgagtgctcttggtgatttgagaaattctttggtcctatggttgatcacaaaagagatttagaaagaggacatgcgataaagtaaaatttcccaacagtctcactgctgaagccagtactggatttttagctttcttactgtgtgtcaagtactccttctacccacccccactccattttcccacatctctgaacatgtgactatcctttattcaccgctggactagtgtatggaacctagtcttacttgttaccttgataggaatacaaacaaggtcaaagccattcacccaaatgtgtccctgactgtttatcaggatatctataaataatcgaccaaattaatgtcagagaaataagttaaagagaagttctttctccatgaaagaatgttttaagttaatgggctgaccatctcatttaagagtgaagtaaggatataaatatcaagcagtcactgacttcacttcaatgtttaaggcttatctatttaaatcc

SEQ ID NO: 292725 - DNA, 600 bp, Homo sapiens
cttgaaaataatttataatctcctaatattaaatagagtgttctataaaaatttattagatgtagttggttgatggcattgttaaagtcttctagacaattattgattttctattttctattactttctatttttcttataatctgtcagtttttacttcatatattctacatctttcttagtaagtatacacacatttggaattgyttcttaataaattgatctttttattaatatagtcacaccaatatattatgattaatgtttgtatactacatctctttcacttgctaatttgaatctatctgtctttatatttaaagtgtgtctcttacagacagaatataatttggtcttgcttttatatctagtctgacaacctctgtattttagtaagaacgtgtagtcaacttgcatttaagtaatcatcaatttggtcaagtttaaatctcactttgctgtatggttctgatttgtcccctctgttctttgttcctttattcctgacttcttttgtggtaattgttttatcacaccatttacttattagctatacatccttatttgtgtgtgcattattgtttatattgtattggctgc

SEQ ID NO: 292726 - DNA, 642 bp, Homo sapiens
cagctagaggctttttgtatagcatgatacattaagagagaatagaaaacttaaattatcatgacttrtataatctttttccaatataatttttattttatttatttctttacttatttgagacagggtctcactctgttgcccaggttggagtgcagcttcaaacctccaaagctcaagtgatactttcacctcagcatccccagtagctaggaccacaggcatgtaccaccacacttggctaatttttgttgtttttgtttgtagagatggagcttcaccatgttgcccaagctggtcttgaactcctgcgctcaagctattcttctactttggcctcccaacgtgccggtattttacaggtgtgagtcaccatgcctgatctccagtataattttttaaatagactcttcttatgttatgtattttgaatacattttgtcatatctttagacctgttgatttatcatttttatcacgtaacttatatagaaagtctccatcatacaactttattggcaaacccaataatggttgtcaagtgcttcagctaagtcagacttattttcttgcagaaaagaagctaactttaagtaaaaataaacatgttaatatgagttttatagactatgaaaccatgga

SEQ ID NO: 292727 - DNA, 553 bp, Homo sapiens
ttgcagaactacagcttcaaataatagttctaaagacagtctcttaattcatcattatttattgattatctatgtgccttacactgtcacagagaatatagctttaagtatatgtaatttagtactgtattttaaatgccatcttattaattgcactcatgctgtgcaagtgaaaaataatacaagaataaggtaaaaccccagtgtgtgaagtaacctttttattttctcaaagtataaacaagagctgccaacaaaggagtaaaaataacagaaactaaaggcaacaaataacacccactaaattattgataggttaaataagagcccagagattaaaacagcccatgcttttgctcctyagtgcacctgcctgttttgcaggcagagggaagaaataataatatctactatagtgtaagaatgcaacaatgaccatttctggcccaagtaaacatgtataaaatttggaatttaaaatatagaatgtttagattcaacatgtcttattgatatttaaagatttaaaagggtcatccatgaatccacagga

SEQ ID NO: 292728 - DNA, 430 bp, Homo sapiens
agaatgtttagattcaacatgtcttattgatatttaaagatttaaaagggtcatccatgaatccacaggagtattaaagaatcattccrtctagccttgattctgaaatattctatatattttgagagataatccatacagttcttttctgtagaagcccttctttttggatactccatctgtcaagtcatctcagtagaaatgtattcaacaaatgttggttgcctaccacatcaagaactgctgggtgctgctggagaaataaggttggttgggatagcctccagccctgaggattagataatctagttacgagagatgaaggagtatagaaaggctcagctatgattcaagtcacctggaatcctttctagaactaaatgggctgtaatttttttcctccataagtcaatgtaacttcatattttta

SEQ ID NO: 292729 - DNA, 430 bp, Homo sapiens
agaatgtttagattcaacatgtcttattgatatttaaagatttaaaagggtcatccatgaatccacaggagtattaaagaatcattccgtctagccttgattctgaaatattctatatattttgagagataatccatacagttcttttctgtagaagcccttctttttggatactccatctgtcaagtcatctcagtagaaatgtattcaacaaatgttggttgcctaccacatcaagaactgctgggtgctgctggagaaataaggttggttgggatagcctccagccctgaggattagataatctagttacgagagatgaaggagtatagaaasgctcagctatgattcaagtcacctggaatcctttctagaactaaatgggctgtaatttttttcctccataagtcaatgtaacttcatattttta

SEQ ID NO: 292730 - DNA, 580 bp, Homo sapiens
aatgagacagagggtactaggtcaattacatgggttgcatctttctcatttctgtagtcacagttttcctttaaaaaaaaaaaaaaagaaatgaaaataaaagagaaaaaaatccaaaatagagtcctattgaatttagctccccaggattcatgagttgttcagaggtggcttgtastccagccttcatatttcagaactgtagggagatgagctcaattcctgatctctcacatggcatgtgcctcaatactttggcacagacccccatgatccgcttgaagcgggaagcattattctttaatttgtctttaaacttttatctttaatttgccctttcatgacactttaatgtgatccttgtgtttttatatgaattaaaatttataaatataaagcctcactcatgaggccctttattttcctatcagctggaagagaggatctgagtaattcagcaaggcgaggtttgtttagctgaaatgaaaagggaaatggtcaaagatgaaattgtttaattctttctcaccaactaactgcagaattatagatgtctcttgaatgcaataagttaatttca

SEQ ID NO: 292731 - DNA, 580 bp, Homo sapiens
aatgagacagagggtactaggtcaattacatgggttgcatctttctcatttctgtagtcacagttttcctttaaaaaaaaaaaaaaagaaatgaaaataaaagagaaaaaaatccaaaatagagtcctattgaatttagctccccaggattcatgagttgttcagaggtggcttgtactccagccttcatatttcagaactgtagggagatgagctcaattcctgatctctcacatggcatgtgcctcaatactttggcacagacccccatgatccgcttgaagcgggaagcattaktctttaatttgtctttaaacttttatctttaatttgccctttcatgacactttaatgtgatccttgtgtttttatatgaattaaaatttataaatataaagcctcactcatgaggccctttattttcctatcagctggaagagaggatctgagtaattcagcaaggcgaggtttgtttagctgaaatgaaaagggaaatggtcaaagatgaaattgtttaattctttctcaccaactaactgcagaattatagatgtctcttgaatgcaataagttaatttca

SEQ ID NO: 292732 - DNA, 576 bp, Homo sapiens
ttcagtgtctcattacttcatgtgttgcagatgatttaattaaagggtggatacatttcattggtaataggaatggacataatttacctgggaaacttggctttcaaatgacatgcctttgattaaataaaacacatacttttctttggttttagtgcttctgtgaataaacaactttgcaactctcttgtgctttgggggaacacgtcctctcagtttctcatgttgcctcacctttgtttgcactggactcaagctctgcaagcagtaccaggaggggtggtcagggccatttgtctacctttaaattgtgaattaataactggtaaaaacagaaggacaaaggacaagggcagagggcaaaatccctggctgtgrttttggagagggtgtagagagagaaaagttggttggccttgtcatttttccccgcttccccaagctgtggagggtctctgagacccctctttgtgccttttacttacccagctatgtgaggcaggttcctggcctctgttctgagtggaatttgaagatagggccacacttatgctatgaactcttgacctttccacc

SEQ ID NO: 292733 - DNA, 576 bp, Homo sapiens
ttcagtgtctcattacttcatgtgttgcagatgatttaattaaagggtggatacatttcattggtaataggaatggacataatttacctgggaaacttggctttcaaatgacatgcctttgattaaataaaacacatacttttctttggttttagtgcttctgtgaataaacaactttgcaactctcttgtgctttgggggaacacgtcctctcagtttctcatgttgcctcacctttgtttgcactggactcaagctctgcaagcagtaccaggaggggtggtcagggccatttgtctacctttaaattgtgaattaataactggtaaaaacagaaggacaaaggacaagggcagagggcaaaatccctggctgtgattttggagagggtgtagagagagaaaagttggttggccttgtcatttttccccgctyccccaagctgtggagggtctctgagacccctctttgtgccttttacttacccagctatgtgaggcaggttcctggcctctgttctgagtggaatttgaagatagggccacacttatgctatgaactcttgacctttccacc

SEQ ID NO: 292734 - DNA, 581 bp, Homo sapiens
gtcactattatggccgagttccctaataaatatgcactggtttgttttctgtttgtttgttttttggagacaaggtcttgctgtgtcacccaggctgaaatgtagtggtgtgattatggatcactgcagcctcaacctcctgggctcaagccatcctcctgcctcagccttgcaagtagctgggaccacagatgcacaccaccacacctggctaatgttttttatttttacttttgtagagataaggtctccctatgttgcccaggctggtcccaaactcctgagctcaagcaatcctcctgcctcagcctcctaaggtgttgggattataggcatgcatcaccttgtctggcctaatgtgcactttgaatggccctttgaaggtcctgatggtttacttgaaagaataatttcgggrgaagatacagaccaatgctgcaaggactatgttaaaatcttcatgaccatctcagaaataaaagaggagcaatggcagtgattagttcattcagaggcactggccattagactaaatagaaaggctttagaatgtcagattggaagggaccatgaagattatt

SEQ ID NO: 292735 - DNA, 655 bp, Homo sapiens
cttgcactgcataaccaataacaagttatagagctgaaaattttctgaactctcaatagtgaaagataatttaaatcatttaaaattttaaaaagttcctactagaaacaatcataaaatcacagaatatttgagcagcccaggattttaggactcacttcctaccttattttacaaaaaaagaaactcagaggttaagtaatttgccatagggtcatcctgctagttagtagcagatcttggtgttttgaggaatcaatattactaccttatttttactgtacctcttctatatttagctatgtttagatcacaaatacttctgtgttgttacaattgcctacagtattcagtgcagtaacatgctgtacaaataacatactgtatgcagtacagtagcaggtttgtagcctaagaacaataggctataccgtaagggacagacttaggagtcmgagagataaagtgttaactttcctggtgatgagaataattagagaaaaagaaatcttaggcatgacaccaaatgggcatactaatattcattcctgatttaggaatcttacttacccagtcattaggtaggcaacttcaggtgtctctttctagataaaaacccctattacctcatggcaaaagatagatcacaaaacat

SEQ ID NO: 292736 - DNA, 626 bp, Homo sapiens
ggcagaggaatcacttgaacccaggaggtggagattgtagtgagctgagatcatgccactgcactccagcctggcaacagagcaagactccgtctcaaaaaaaaaaaaaaaaagtgctaaatagctccttgttacctgcctaccagataaagtccaaagtcaacatagcatacactgaggggaaaaatgactaaataaagtcaggggatgaacacttgtgcagtgagaaattaggccccttgtccaatttctttctttctttcttttttttaattaaagttctgggatacatgtgcagaatgtgcaggtttgttacacaggtatatacatgccataatggtttgctgcacccatcaacccatcatctatattaggtatttctctaatgctatgtctcccctaccccctcacccctgataggccccagtgtgtgatgttccccttcctgtgtccatatgttcccattgttcagctcccacttatgagtgacaacatgtggtgtttggttttctgttcctatgttastttgctgggaatgatggtttctagcttcatccatgtcccagcaaaggacatgaactcatcctttttaatgcctgcatagtattccatggtgtataggtgcc

SEQ ID NO: 292737 - DNA, 575 bp, Homo sapiens
accatattctttgatcagacccacaatgtgtttaccttccttattaagggttatttgaaccctaggataaatcttatttggaaattgtggraccaacattaaattagaatttaataaatttaatctcttctctggccagtttatctccataggcatagcatcctgaggagggtataaattaaatgcaagaaatgcctggtccttggtgtctaaattgttatagacttgttaacagtagacaaatctattcccccacccccacttttgtattgcatcatatattggtatttgggagataaaaggttttgtcacatgaaaggtcatataattctaaagtgtcattttttgtcttggcaggactccctatggctgagggccttaagagtcaaaagatttatagccagttaattgttctaggccagaaaagaatggatgtagacaggcattcattacttctgaaaattattattttaagtaaagtttaaaaaagttgacaatactgtggcactgtgaaatccaccatcatgtttatgctgaaaccagatttccttcaggctccttctagctagtgaaag

SEQ ID NO: 292738 - DNA, 604 bp, Homo sapiens
attaagtgtcatgttcttcccttaaaacaattattttttaactattattgaactcatgcagacaactatactgttataaaattacaatctatattttggagaactcagaaaggtaaatttgcttacaaaaacatactttacccaaacaacttaaaagaaaaagattttcctgatcctcctttaaccagggcagcagcttttaagacaagaygtttgtttaccttggaaatgttatttacaaaccaaacagatagacaaatagagtttagcagcttctcacaattagtcctaggaaaaaggctctctgcttattaggtagcaagatgtatgtaaaccattttttattttatcatgaaactctttgggaaacattttttccattagtataggggtagcttcagttaatatttcacagcaaggcagtaaatgcctcatcaagtagaacttctctagctcagtcggtgttattgaaaagtactcatagtttttgccatcagccctgataaatgcattacacaaaaggctatgcagtggaggatttacatgagcaggttgacatgtcttcagttttgtagtactagaaaggggaaaacatcccccagtt

SEQ ID NO: 292739 - DNA, 609 bp, Homo sapiens
acaaatgccctttctctttggagctgaaaaacttagtctctcattatctgtgaaaacaacagttccattcctcatgaaaatgcacacagaaaaaccaaatcaagataaattttaggataaaaagcaatatagaattccctttagaatgcatctccaaactcaactatgatccttaaacaatttcctaggagaaaaccagctcagaataaatcaaagactgactatcaaccaggggggtccagggctcagracttaccagttccaccagaggagaagctctaagttggacaggctttaatgggccccgctggtaccttagctccaagtttgggcaactccttcggagtcctgcatcttctctgaggtcccatgtgtttgggcgccaagttattgttgatgtaaagagtcgaactctgtaagatattttaagagatttattctgaaccaaatatcagtgaccgtggcccatgacacagctctcaggaggtcctgagaacatgtgcccaaggtgattggggtagaacttggttttctatattttagggaggcatgagacatcaatcaaatacaattaagaaatacattggtttggttcagaaaggtgggaca

SEQ ID NO: 292740 - DNA, 1212 bp, Homo sapiens
acaaatgccctttctctttggagctgaaaaacttagtctctcattatctgtgaaaacaacagttccattcctcatgaaaatgcacacagaaaaaccaaatcaagataaattttaggataaaaagcaatatagaattccctttagaatgcatctccaaactcaactatgatccttaaacaatttcctaggagaaaaccagctcagaataaatcaaagactgactatcaaccaggggggtccagggctcaggacttaccagttccaccagaggagaagctctaagttggacaggctttaatgggccccgctggtaccttagctccaagtttgggcaactccttcggagtcctgcatcttctctgaggtcccatgtgtttgggcgccaagttattgttgatgtaaagagtcgaactctgtaagatattttaagagatttattctgaaccaaatatcagtgaccrtggcccatgacacagctctcaggaggtcctgagaacatgtgcccaaggtgattggggtagaacttggttttctatattttagggaggcatgagacatcaatcaaatacaattaagaaatacattggtttggttcagaaaggtgggacawcaaacaacaaaaattattttctcacagttctgaaggctgggaagtccaggatacctgtgccagcagattcagtttctggtgaaggctctcttcctggtttgtagacagctgccttcctctgtgtcctcacatggcagagagaggagagagagccctgatctctcttcttttaaggacaataatctcatcatggggaccacctcctcatgacttcatctaagcctgtttaccttccacaggcctcgcctccaaatgtcatcacgctggggattagggcttcaatatatgaattttgggagaacacaaactttcagtctcctcagtcttgctccctgttgcttcactcctttttcccagaatcacctcccaaataaaccacctgctcaccacaagttccctcctcaggctccacttttaaaggaactcaaattcaaatagtgtcttctctaaaacwtatctgttaactgtgcttggatgatataaaatcatgttttttcaaagatctattttataattgtaaagatgttacccttccttccccagtgatgtttcattgtcatgaattcctaacatttccattctctttctttatccacagattc

SEQ ID NO: 292741 - DNA, 551 bp, Homo sapiens
ccttaactttcatgaaatacccacgggttttttgtttgtccttattcttatacataaaattgcgttatcttgctggcattaagtatttgtagaagagaaatacacaatctcaccatttccctttttcctttttcctcagttttctgtaaacatacgtgtacacacacacagacacacacacacacacacacacacacacacccctgacttyaggtaaccagtgttgtcctagatgaggctgagcactgtttcctgtttctaacatttttccatctcttggagcctctcccttttcctccccctaccccaaagagaaacaagtaactattaatcagcttttatgggaaatggaaaatagactctctagcctagcattgtacaatagagttttctgcaattatgccaatgttctgtatttgcactgtccagtatagtagccgttagtcatatgctgctattttgcacttgaaatgtggctagtaggattgaggaactgaatttctaattttgtttcatgttaatgtaaatttaaatcaccatatgtgactagt

SEQ ID NO: 292742 - DNA, 551 bp, Homo sapiens
ccttaactttcatgaaatacccacgggttttttgtttgtccttattcttatacataaaattgcgttatcttgctggcattaagtatttgtagaagagaaatacacaatctcaccatttccctttttcctttttcctcagttttctgtaaacatacgtgtacacacacacagacacacacacacacacacacacacacacacccctgactttaggtaaccagtgttgtcctagatgaggctgagcactgtttcctgtttctaacatttttccatctcttggagcctctcccttttcctccccctaccccaaagagaaacaagtaactattaatcagcttttatgggaaatggaaaatagactctctagcctagcattgtacaatagagttttctgcaattatgccaatgttctgtatttgcactgtccagtatagtagccrttagtcatatgctgctattttgcacttgaaatgtggctagtaggattgaggaactgaatttctaattttgtttcatgttaatgtaaatttaaatcaccatatgtgactagt

SEQ ID NO: 292743 - DNA, 556 bp, Homo sapiens
ttcacatttggactgggcacttctttccaattggtgcaatggaattcgcttgtgagaagctgttttcttcctgaaggtaaaggttgctttgcctacttataaatacgaacttaaaaaataccagatgtatagttattctactagttgtttattctaaaagtatgttgaaagcagagattcactgaagaagtatctttctaccttcctttagtgttacatataatgtgatgtcataaataaccagatggttaaaaaaattatcaaagatccaggaaaaaaattatcatagtgatatttaaaaataataaattattatcctgtttgcttcagtgaaattgtctctgaatataacattgcattatcactcactttgaatctaccattcataaattttaaagtaaaaggaaactcatacaattattaatagttaatgctgaaagtgctctctgatttgataacttgagtttcttattgtgctaactaatggtgaacaagaatcagcctttctggtgtttagctrtaagatcaccacccctaactcaaactggaactaaat

SEQ ID NO: 292744 - DNA, 589 bp, Homo sapiens
tgattcatataattctaagcttttcaaaaagaagttacaattatatgggaattggagtgacttgcagttgggttattgttaaaatgtagagaaaatagagaatgggtgaatttaaatttttattcagtttaaaataaatgtcttaggcagagttggaaaaaatatttattagtaattcaaaaactgtttgtttctaaaagctagcatattaatacttttctctgaaacatgcagggaagactatgttaaaatataaacaatatatagtgttttgctgagagataaactcttgatatatttttttctaatgactttcctgatrtcagtgacttatcttgccatcttgtcccatgaaatagcttcacttgacactaaccaatggtcaggcagactccatgtgttcccatcaaaatacaaattactatctgtaatcactctgaacataaatataaattaaatgtaaaaatttcagctatttgtagcataatatccaagtacatatctatgtgttatcaaataccgaacatggacctacataagtttcattcctagccaccaaaacttagttttcaatattttttatatcttt

SEQ ID NO: 292745 - DNA, 553 bp, Homo sapiens
attagcactaactattcagtaaaatatccatgtgcattcttccccctgtcttattccttagaccaagtaaatttcaggtgaacttcagatgaggaaaataaacaaactaaaacaacaaaaattatctatctagttagctagctatccaaaagacttataagaaagccaggacagtgtgtttagtagagtgtgtatagattgtcttgtgcccactccccgaaatttatatgctcaaatcctagttgccagtgcctcagaatataaccctattttgaagtgaggtcgttatgaatataatttgttaagttagaatgatgttatatctaagtaggatgggtccttaatccaatatgactagtgtctttataaaaaaaggaaatttagacacagacatgcacattgggagaacaccacgtgaagactggagttatgctgcctcaagccacagaataacagaagcgaggaggcaggcctggaagagatccttccctagaggcttaagagggagcacgcycctgataaccccataatttcagattctggcctctagaag

SEQ ID NO: 292746 - DNA, 572 bp, Homo sapiens
aaactagcacagtcactgaccccactttgcaatcttcatgatcagactgaaggcaatataaatctcagagctacccacacacactgttagtactttacagaagaaaaaactacagaaaattcaaggtggtctatggagaagtcagacatagtctcactgtgtgaattcaggaaagatgttatgctaaaatccactaccatgttctacatttaacttacatttaaattaaatgaaactcttcaaaaaagttggtttgatatatcttgttactttaaaaactagatatctatttctctcttattctaatgtakgtcctattagaaggacagagcaatgttgcttgatatgacaaaaaatatatattagtttctgttggaatttcatcccaaaatgattgagatactgttccagaaaaatgtaaagtcatgacgcatatactgagacacaactcccccaaacaacagaaacaacagaatttcaattattacacaccatgttgtttgtgtaatgtcattaatacttctcccaagttgcatttttagaaatttccataaataggcacaaaacagtat

SEQ ID NO: 292747 - DNA, 582 bp, Homo sapiens
ggttctacttgctctttcatccccttctcttctttccctaccagcctattatcatccccttccctctctccatgactgaatacagtcccacttctgtctgattgctaactttgctttggattctttctctttcctcctattcactacattcttagctattgaagtttagaagcattttctctccattcaccttcatctcagttttctattctagtctctgaactggacatgaagcaaaatgggaggttctaatactatctctgtctcaaccaaagagatgtttgtctccttaagctttttggcatttcccacagtgatttgcaaatttctttttatgtcatggagtcatgtctttaaaggaagrcatatggaaaattccaatgactagagggaactgacctgttttcagcaggctaggaagcatagggtttcatttcttcaacttcccaaccccttacctagaggaaggcagagagggctcatcctggaaaaccattgctctacaacatcttttagaatgagggcagaagaacctacagacacatctctggcagactccatccatggggtaagcccctttag

SEQ ID NO: 292748 - DNA, 582 bp, Homo sapiens
ggttctacttgctctttcatccccttctcttctttccctaccagcctattatcatccccttccctctctccatgactgaatacagtcccacttctgtctgattgctaactttgctttggattctttctctttcctcctattcactacattcttagctattgaagtttagaagcattttctctccattcaccttcatctcagttttctattctagtctctgaactggacatgaagcaaaatgggaggttctaatactatctctgtctcaaccaaagagatgtttgtctccttaagctttttggcatttcccacagtgatttgcaaatttctttttatgtcatggagtcatgtctttaaaggaagacatatggaaaattccaatgactagagggaactgacctgttttcagcaggctaggaagcatasggtttcatttcttcaacttcccaaccccttacctagaggaaggcagagagggctcatcctggaaaaccattgctctacaacatcttttagaatgagggcagaagaacctacagacacatctctggcagactccatccatggggtaagcccctttag

SEQ ID NO: 292749 - DNA, 601 bp, Homo sapiens
aaagggagcatcagggaagagagagaacaaacatggagggtgttgggatttgcaaactgatctctacttggtagcaagtataactgaccattgatctcacaggaacgtcttcagaggtgctttatgaataatgcatctcaggacagactatctggtagaaggaaggaagaactgacccactagcttttctcttctattggtccaatgttcacttctgggactttaactcttccacacttcccagttacacatatatgggtgactcatggctcagcagcagcaggaaaactttggtgtgggaggcaaggggtctgtggcattggcctgagataagctgctttgggctgtgcccatgtcatgataacacaggtgatagtccagaagagcccttgcagaagtggttagcagaaggaatgaacaagtgaccaagagcccttcagacaggtgagtccrggaagatctgaggggttgcataaaaggtgtcttatagagaattttatttatttatttatttatttttttctgttttgttttttttttttaaattatactttaagttttagggtacatgtgcacattgtacaggttagttacatatgta

SEQ ID NO: 292750 - DNA, 612 bp, Homo sapiens
ttgctattattagtagtatcatcaaatgaggaggttgagccagaaaatctgtcagatcttttcctgactcaatgtactaggtctccaaatactgagacccaaaaatataccaatcctgtagtgagacagttgggaatcacagcatttgtcagagtgaaattagtgacagagactgcccctgaggccccaagaactttccctccatattaaccatgtcttttatttttagattttttattttttgtattctgatgctttgacatttggggcctcactgattctgcagggactgaccctcccaggattagccagtttctagagatagtaaacaacttactggagcactcttttcaaaggcaaaccaaccaatccagagcacacactcccaaccacctccattatagggctttcacactctgggccactatccacctgccctaatcgctccaggacttattaagtgccaggcaactgagggatcgytcctgtgtcccagagtaagttgaagttgttcaaactagctaatctgaaccctgcgtactctgaccttcccattctttcctgcttccacagagaggaggtgtaacgcattcaggaagtataaatgtgtct

SEQ ID NO: 292751 - DNA, 578 bp, Homo sapiens
atcctgtagtgagacagttgggaatcacagcatttgtcagagtgaaattagtgacagagactgcccctgaggccccaagaactttccctccatattaaccatgtcttttatttttagattttttattttttgtattctgatgctttgacatttggggcctcactgattctgcagggactgaccctcccaggattagccagtttctagagatagtaaacaacttactggagcactcttttcaaaggcaaaccaaccaatccagagcacacactcccaaccacctccattatagggctttcacactctgggccactatccacctgccctaatcgctccaggacttattaagtgccaggcaactgagggatcgctcctgtgtcccagagtaagttgaagttgttcaaactagctaatctgaaccctgcgtactctgaccytcccattctttcctgcttccacagagaggaggtgtaacgcattcaggaagtataaatgtgtctattacttgttaaaatgctttatttgaatgtggactgttgcaaatctactaatccagtttgaagaatcagaaaatccct

SEQ ID NO: 292752 - DNA, 593 bp, Homo sapiens
gttgctgtccattcttaatgggaactttccaaaggaatgcattttaatctgggtgcaatggtgtaaagaaagaaagcagtgaattggtgacttataaaggctcctgcctccaaaaaaaccctttttaaattaaagggtgtcatctggcacacagaatagttccctgagcttacaggaatgatttctacagatattttttagccagacggagaattgtcatcctgggartcaaaatcagactaattttttccagacctagaaacctcctgggacttggctagtgcaggtgcctgtcaggaccagggtttgtacatcgtcagattctttcttcctcctctagccccagaggctgtgctctagagcatactttacctctagagtagttgtcccctgagcatttgttttctttcctgacacaggaaggaagataaatactgttctgtcacagtttgagaaggcagtccatgatcatgatatagctaataaggtgctcaggagggaagagttcactagatggtggacaacgcgtggtgtttggtaataggagatatatgcaaaatttgtgttaacaggttatttaattctggttacta

SEQ ID NO: 292753 - DNA, 593 bp, Homo sapiens
gttgctgtccattcttaatgggaactttccaaaggaatgcattttaatctgggtgcaatggtgtaaagaaagaaagcagtgaattggtgacttataaaggctcctgcctccaaaaaaaccctttttaaattaaagggtgtcatctggcacacagaatagttccctgagcttacaggaatgatttctacagatattttttagccagacggagaattgtcatcctgggagtcaaaatcagactaattttktccagacctagaaacctcctgggacttggctagtgcaggtgcctgtcaggaccagggtttgtacatcgtcagattctttcttcctcctctagccccagaggctgtgctctagagcatactttacctctagagtagttgtcccctgagcatttgttttctttcctgacacaggaaggaagataaatactgttctgtcacagtttgagaaggcagtccatgatcatgatatagctaataaggtgctcaggagggaagagttcactagatggtggacaacgcgtggtgtttggtaataggagatatatgcaaaatttgtgttaacaggttatttaattctggttacta

SEQ ID NO: 292754 - DNA, 583 bp, Homo sapiens
catttgaaactctctagtctgttgagcttatcccattttagtgtattgaaaaaatttttttcttttatcatagaaaatcatagtggctataatgaatctcttcatcttgatatgttagcctgttttttaaagtttattatgtattggacatagagaaatgacaagataaaaggaaataaatacacatatacagatactggtcattttctctccaaattgttatttcagacaagataatttttttcttggtaatttcttgctgatttgagagtacatartagaatttatgcgttttgtatggggaatggaaagcatccccttttcttctcattgtagaaaccccaggatcataacatttaagaacagcattgataaccaattagtttaattagtatttggcaaccctgtttggtagaatccttggacttgcacctggagtgcagagatggcactactgaatgatgccacttttgcatcttaaagtgttactctatttttatataatgtctacctgtgagattcagctgcacttggatatgcttacagcaagctccctgaagaatttctctgtgtttggggagag

SEQ ID NO: 292755 - DNA, 897 bp, Homo sapiens
attatctcaaattctgattcatgttctgcacatttctcgttctagtctagttaaacagaacctcttactatgcctgttattctcttttctcaatcccagctgtatagtgtagaacaattctttattgttttcctgaaaatcgtgtccattttattcctcaaartattttaaaaaccaacctcttctaagagattgaccctaaaactctccaacctttggatataatttgggataactcgggaatgttatgaattccttatccttgctgtatattatcccttttttccctcaaatctgaagccaatcacccctttgaatgtttctgtttcaaaagacaatacattctcttcagtgtgtaaactggtttgaattgagttgcaacatgactaatacggatacctttttatggctaggttctccctcccaccagacccaaaatgccccctaawattatctcaaattctgattcatgttctgcacatttctcgttctagtctagttaaacagaacctcttactatgcctgttattctcttttctcaatcccagctgtatagtgtagaacaattctttattgttttcctgaaaatcgtgtccattttattcctcaaagtattttaaaaaccaacctcttctaagagattgaccctaaaactctccaacctttggatataatttgggataactcgggaatgttatgaattccttatccttgctgtatattatcccwtttttccctcaaatctgaagccaatcacccctttgaatgtttctgtttcaaaagacaatacattctcttcagtgtgtaaactggtttgaattgagttgcaacatgactaatacggatacctttttatggctaggttctccctcccaccagacccaaaatgccccctaa

SEQ ID NO: 292756 - DNA, 582 bp, Homo sapiens
taacagatataaaaataatggaaaagtctgaaatactgtgagaattacaaaaatgtgacatagagacatgaagggagcacattctgttggaaaaattgcactgacagacttgcctgggcaacatggcaagaccctgtctctatttcataaaaaaggaaatcactgatcacagatcaccataacagacacaataacaatgaaaaarttgtccgggtgtggtagctcacatctgtaatcccagaacttcagaaggccgaggtaggcagatcatttgaggccaggagatcaagatcagcttggcccacacggtgaacccatgtctactaaaaatacaaaaaaaaattagctgggtgtggtggtatgtgcctgtaatcccagctacttaggaggctgagacaggagattgcttgaacccaggaggtggaggttgcagtgagctgagactgcaccactggactccaacctgagcaacagggtgtgactccatcaaaaacaaagaaaaaagtgaaatattgtgagaatcccaaaacgtgaacagagacaagaagtaagcacatgctgttggaaaaacagcactaacac

SEQ ID NO: 292757 - DNA, 582 bp, Homo sapiens
taacagatataaaaataatggaaaagtctgaaatactgtgagaattacaaaaatgtgacatagagacatgaagggagcacattctgttggaaaaattgcactgacagacttgcctgggcaacatggcaagaccctgtctctatttcataaaaaaggaaatcactgatcacagatcaccataacagacacaataacaatgaaaaaattgtccgggtgtggtagctcacatctgtaatcccagaacttcagaaggccgaggtaggcagatcatttgaggccaggagatcaagatcagcytggcccacacggtgaacccatgtctactaaaaatacaaaaaaaaattagctgggtgtggtggtatgtgcctgtaatcccagctacttaggaggctgagacaggagattgcttgaacccaggaggtggaggttgcagtgagctgagactgcaccactggactccaacctgagcaacagggtgtgactccatcaaaaacaaagaaaaaagtgaaatattgtgagaatcccaaaacgtgaacagagacaagaagtaagcacatgctgttggaaaaacagcactaacac

SEQ ID NO: 292758 - DNA, 582 bp, Homo sapiens
taacagatataaaaataatggaaaagtctgaaatactgtgagaattacaaaaatgtgacatagagacatgaagggagcacattctgttggaaaaattgcactgacagacttgcctgggcaacatggcaagaccctgtctctatttcataaaaaaggaaatcactgatcacagatcaccataacagacacaataacaatgaaaaaattgtccgggtgtggtagctcacatctgtaatcccagaacttcagaaggccgaggtaggcagatcatttgaggccaggagatcaagatcagcttggcccacacggtgaacccatgtctactaaaaatacaaaaaaaaattagctgggtgtggtggtatgtgcctgtaatcccagctacttaggaggctgagacaggagattgcttgaacccaggaggtggaggttgcagtgagctgagactgcaccactggactccaacctgrgcaacagggtgtgactccatcaaaaacaaagaaaaaagtgaaatattgtgagaatcccaaaacgtgaacagagacaagaagtaagcacatgctgttggaaaaacagcactaacac

SEQ ID NO: 292759 - DNA, 537 bp, Homo sapiens
cttactccgtcacccaggctggagtgcagtggcattatctcggctcactgtaacctccaccccctgggttcaagcaattctcctgcctcagcctcccgagtagctgagattacaggcacatgccaccacgtcaggctaatttttgtatttttagtagagaaagggtttccccatgctggccaggctggtctcaaactcctgacctcaggtgatccgcccaccttggcctcccaaagtgctgggattacaggcatgacccaccaagtcaggtaattctagttctcatggtgagaactagaattagaagtggagcctgaagatgtgactgaattgcagcaatcttatgataaaatctgaagagatgaggagttgcttcttacggataagcaaagaaagtggctttttttttttgaggcagagtcttgctctgtcacccaggctggagtgcagtggtacaatctcggctcactgcaacctccaccttccsggttcaagcgattctcctgcctcagcctcccaagtagctgggactacagg

SEQ ID NO: 292760 - DNA, 613 bp, Homo sapiens
gcttacaatgtaaatttccacgctggggtatacaatctagagacactctcacaccaaattcatagtggcagttcttgagtggagggatgaggatgttatcaggatggagagatattggggcttcaaaggtactagaaaagactaaaaacttcaaacaggaacaaaaaaaagagaagagcattcctataaaatgagaaacttgtctgaggaagctaagtactgagggactgagcatgagctcactgaagkttgattggatcaaggacagttgcgtatctgtaaatggggagtctagaatgggctctggggtttgaaaatgtgggaaggaatctgagacggtgatataggtacgtggaatagcaccagcaaaagctttctagagtggccagagtaggattcatgcaagtagtcagaaagaatttttactatatagaatgaggccagataatggattgccttgaaagccaattaaaatgatgcacatttgctacatcagagagaataaccatgaaccgtttcaagcagaggaggagcatactagaagaggtctttctggaaggtgaatccagcgtagttcctgtccctgggagtagcattttcagtttgatcaaca

SEQ ID NO: 292761 - DNA, 613 bp, Homo sapiens
gcttacaatgtaaatttccacgctggggtatacaatctagagacactctcacaccaaattcatagtggcagttcttgagtggagggatgaggatgttatcaggatggagagatattggggcttcaaaggtactagaaaagactaaaaacttcaaacaggaacaaaaaaaagagaagagcattcctataaaatgagaaacttgtctgaggaagctaagtactgagggactgagcatgagctcactgaaggttgattggatcaaggacagttgcgtatctgtaaatggggagtctagaatgggctctggggtttgaaaatgtgggaaggaatctgagacggtgatataggtamgtggaatagcaccagcaaaagctttctagagtggccagagtaggattcatgcaagtagtcagaaagaatttttactatatagaatgaggccagataatggattgccttgaaagccaattaaaatgatgcacatttgctacatcagagagaataaccatgaaccgtttcaagcagaggaggagcatactagaagaggtctttctggaaggtgaatccagcgtagttcctgtccctgggagtagcattttcagtttgatcaaca

SEQ ID NO: 292762 - DNA, 590 bp, Homo sapiens
gtgcatcaaacctgtgcgtttcacagtagaagctccgtcctcacagcttagtaaacaccaatgatcctgtctctaattctctgtctgtaaaaggttcttttgaaccccaggaaaagtagttgacatgagaaaagcgtgcttcttggacagaggtgagggagtaggcaggagagtggtataaagtgataggtggtttgcagacgcgggcacgtcagggaacctttgcagrcaggtggccctagctgatgtccctagaccttgctcagttgagttctttgtgcacatctcccactgggctcctctggcccagagatgaggttgtctgctgaaagatgcagtaaagaggctttaaagattttgtggccttgaaccaatcacacaagcaaggctgaaaggactgagcctaaaatggagctgcccctgaatgatctgagtcttcatcaggcagcaccttgcacacagaccatcatctgatgatgggaacaaacttgtgtttgggtgaaacaggcttccccattgcagttactataacacctgtgtggtagtaaggtgcagaattactcaatgcccacttcaagtttaccattgag

SEQ ID NO: 292763 - DNA, 590 bp, Homo sapiens
gtgcatcaaacctgtgcgtttcacagtagaagctccgtcctcacagcttagtaaacaccaatgatcctgtctctaattctctgtctgtaaaaggttcttttgaaccccaggaaaagtagttgacatgagaaaagcgtgcttcttggacagaggtgagggagtaggcaggagagtggtataaagtgataggtggtttgcagacgcgggcacgtcagggaacctttgcagacaggtggccctagctgatgtccctagaccttgctcagttgagttctttgtgcacatctcccactgggctcctctggcccagagatgaggttgtctgctgaaagatgcagtaaagagrctttaaagattttgtggccttgaaccaatcacacaagcaaggctgaaaggactgagcctaaaatggagctgcccctgaatgatctgagtcttcatcaggcagcaccttgcacacagaccatcatctgatgatgggaacaaacttgtgtttgggtgaaacaggcttccccattgcagttactataacacctgtgtggtagtaaggtgcagaattactcaatgcccacttcaagtttaccattgag

SEQ ID NO: 292764 - DNA, 1026 bp, Homo sapiens
gtttttttaaaacaactgtctgaggaagattatactgttatcaccatttcacaggtgagaaaactgtggcttaattctgggtttgaatcccagttccccaagttatctcactggctgcactgctttaataaaattacataccctggctacagtgctgcctatgttatgaatacctaygccatgcctcacagtgacaccaagtcactgttcccctctaggaatccatgtgaaaataagtgttaccatgcacaacgtaacattcagtacatgcagactgcatatacagccaggatgcacatacagctgtggtaggaataatatgctacaccatatagcctaggtgtgtagtaggctacattaactacttttgtctaagcatactctatgatgttcacacagcaatgaaactgcctaatgacgcctttttcagaatgtattcccttgttcagtgacacatgactatgttttaactactaaagtgtatagaactatttatcattcaagwaatccctgggctttgggaagctgagtgggggaaaactgcttaagcccaggaggtcaaggctgcagttggcatgatgataccgctgcactctagcctgggtgacagagtgagaccatctctaaaaaagtaattattggtggccttatagcatggtggaagaagccaagctaaagactgaacgggagggaagaaagtacatacatgacttgagacttggctacaaaaggagagtgactgagggcaacacaagatcaaaagagaatttcttccaaatgtgggatctgcattagtaggattcttatgtggaaattwaaaaaaaaaaaaggtagaagaataaattgagggcaggagggatagaatctagaggttagcctgggatatcacagatactttgcaggacaggagggaaagaataatataaaagtttgtacatgtgagggagacaggaggttcccagcatccactcaagaaaaccccgcttttctataaagacacaggaatgaccatctgttgagggacaa

SEQ ID NO: 292765 - DNA, 547 bp, Homo sapiens
aagcagtatgttgattggtattttagcagtaggtctttatctagtcagagactggaaacagttaacaaacacacactttgagcagcactgccctagaccgtacttgaatggggttttaaaaatgggcttaagactaaaaatgaatttttctaatgcttgcccttctctgttgttaaaagatccccagccctccacaagtcttatttagtatttcttggggtctcatagggttatctctgacgaagttgccaaaccatatttacagaaggttccaaccttctccttagcttcaaaggctagaatgaaagatgaagaccactgcccccactctgctsacccctgcaaggaggaccactcagcccttactcctgtgcttcctgcctttccactcctgccgctgccagcatactgggaaataaggttcaggtgccacttctgtggactaacaaaagaagggaaactgggtcctacactgcaattgtgggcccccatcccaggtaacagaggagctctgtgacgctgctatcttctagggcaacagtcctca

SEQ ID NO: 292766 - DNA, 562 bp, Homo sapiens
caggagctacaatgtttgcaggcagtagaagatagatgttccagctgcagaagagagagataattcaccctttctctgcctttttgttccatttggccctcagtgggttggatgatggctgcccacgttggaaagggtgaacctttactcagcctacagacccaaatgccaatctcttctggaaactccttatagatacacccaaaaataatgttttacgtcctaactgtgcaccccttctgtcaagttgatatataaaattaactaccacaagggctaaggtagctgtcagctacattaagctttcctctttctctattcttttattttgggggcagaatctgagaaccccattatctgcarcccctattttctagtggaggaagccaagggctaattctgccagtgtagtgaaagatgcctttcacagggaatcctgaagagcactgaagccaaggaagatgccaagtgcgtgcaggtcagctaaggtcagcgagttcaggaggagctgggagccaatggcaaaaaccaaaggatcctaatcaaaaggacagatgataac

SEQ ID NO: 292767 - DNA, 586 bp, Homo sapiens
gttctgaacaacatctaaattgcaaatttagtcttaattaaatacagaattataaaaaaagttaataagaatagtcattaaaatttaaaactgggaaggctgtaggactgccagagttaataagtgatcattcacttaatatatgttcatacttattatgagccagacatgcttagatgttaggtgtatagatggcgataacacgtggtcccctcactcatggagcttacagttcataagasaggaacagtttgcaaactgcagtaaccatgttaaaggaaaaatacaagtgctgtgaaagaatggaactgggagttcttaattgaaattgggaaagtctctgaggagttgaggaaaatctagagagtgggtagaaattaggtaaaaagtagacagagaaggaagcagcctgtccagaagccctgagtaggaaagatcttggggttattgaggcagtgaagaaggggggttgcaggtctgatgacaggaattgaggtgagaccacgaggtgcagggccacttaggttgggctaaacattttggattttagtctaagcccggggggaaccactagagcattttaatg

SEQ ID NO: 292768 - DNA, 586 bp, Homo sapiens
gttctgaacaacatctaaattgcaaatttagtcttaattaaatacagaattataaaaaaagttaataagaatagtcattaaaatttaaaactgggaaggctgtaggactgccagagttaataagtgatcattcacttaatatatgttcatacttattatgagccagacatgcttagatgttaggtgtatagatggcgataacacgtggtcccctcactcatggagcttacagttcataagagaggaacagtttgcaaactgcagtaaccatgttaaaggaaaaatacaagtgctgtgaaagaatggaactgggagttcttaattgaaattgggaaagtctctgaggagttgaggaaaatctagagagtgggtagaaaytaggtaaaaagtagacagagaaggaagcagcctgtccagaagccctgagtaggaaagatcttggggttattgaggcagtgaagaaggggggttgcaggtctgatgacaggaattgaggtgagaccacgaggtgcagggccacttaggttgggctaaacattttggattttagtctaagcccggggggaaccactagagcattttaatg

SEQ ID NO: 292769 - DNA, 610 bp, Homo sapiens
aaccctaactggaaagaaaaatatgaagtagagaattgaggtacaatgacagtaaagatgagtacaagccatgcttttttcagaccaatggttctcttttattttccccttscataaaataggaggaaaagatcaattttcatttaataatcacagctactgtgaacagttatttggtagttcctatttctttctatcccagcagatcttggttagcaagaagtgttgaatctcccttctgttgcctcttccatttcacccatttagagttctctcagtacaacctttctcttcctctgcaagtcataatgacttagtttgcacaggatctcaaaaattaggtacctacctttaacgaatttctcatatcatgaagtctgtcttttgcctctattgttttctctatagattgaaaatattggatgtttccttgttgcttagagaaaacattgtatatctgtaaaatattgcaaattaacaagtaatttgcaaaatgcataggaaaaatgtcatttttaaatattagaataggtatatttctgagaattcagtgttctcatggtatttgttatgctgctcactttttgaaactccaaacttaggttgttta

SEQ ID NO: 292770 - DNA, 572 bp, Homo sapiens
tggtcaacaaagcaagaccctgtctctacaaaaaattttaaaaattagccaggcatgatagtgtacacctggggtcccagctactcaggaagctgaggtggggagggtcacttgaacctgggagtttgaggctacagtgagctgtgattacaccattgtactctagcctgaatgacagagcaagacactgtctcacagagagcttccttggaccatactaaaataaacctaattcagaaatgctgcttctaacattcagaagcagagttttccacataaaattattacttatacaacaataatgtttgtactgtttaaacagcaataattcttgcctatgggcatttccggttaattgtataatggtgattacttttgcatttgctgtyggtcacaaataccttccattcagaggtcacatttataggtggtttgggaagccagactgaataagaataatatcttgcagactaatttcacaaaatcttactcctttaacagtaaaaagattgctttcgtttaatatgtagacaccagagactctaccaggacataccaaagcaaaacaaccg

SEQ ID NO: 292771 - DNA, 460 bp, Homo sapiens
cgccaccacgcccagctaactttttatatttttagtagagacggggtttcaccgtgttagccaggatggtctcgatctcctgacctcgtgatctgcccacctcggcctcccaaactgctgggattacaggcgtgagccaccgcacctggccttacaaatattgttttaaagcctattctgtttgcagaagtgctagtttacagagaagttaatggtgaagtaaaggcagacccagttccccctcatgggagcrttaactatataatcacacaaacacatgttaggccacacctgggatctggggtgtacatcagaggtgcctggtgatttgagggcacattacccttgcctgagtgtcagggagggcttcccttgaagatctgaggctttagtggagatggggagggtgaggaggagttaactctggggagggtggggaccagagcatccagacagagga

SEQ ID NO: 292772 - DNA, 628 bp, Homo sapiens
aggctgtatattaaaagctcacagtgatgtcagactcaatggtaaattaacaaaagcttttcctgtaagatcagcaaggcaaggatgctcactctcaacatagcactgaaagtatttctaggcaacattgtacaggaagtcgtagccaggccagaaaaagaaataaaagtcatccaaatcagacaggaagaaataaaattacctctttacagatggcatgatcttatgtgtagaaagccatgaagactccacaaaaacctattagaactaataaatgaattcaataaagttgcaggtacaaaaatcagttgcatttctataggctaataatgaactatccaaaaaggaaattaagaacaattccatttacagtaacatcaataattaaaatacttaggaataggcaaccaaggagatgaaagagttatatactgaaaactataaagcattgatgaaagaaagaaatacataaatgaattgaaagatattatgtattcatkgatcagaagacttaatattgttaaaatgtccctattaccaaaagtggcctatagagtcaatgtaatccgtatcaaaatcccaaatggcattttttacaaaaatagataaaacaattttaaaattcaca

SEQ ID NO: 292773 - DNA, 518 bp, Homo sapiens
ggcataggacctgatatatggaaccatcttatcttccaccatcactatcattccatctccatgagcttatcttccaccaccactccatctccatgatttccatagagatcccctgcaggtgagattaagaggacttcaaagattggcaccctcatgactagacagatcctggagagtttaaaagtattttttccctttagaaatcaattcctactacataagaatgggtagttttccccaaaggggatatttagtgaataccatcttggggaactatgttcaattgtggtataggtttccctgaaggcctrtggttggtttcatgaaattatcttccaagccagactgacagttttcgagatgactggatttttcttcaaggaaaagcaagcttacctgttctccaggatcatgcatactccctgtggtcttttctgatgctaggtaaatttgttccaagtttcccatgctctactaagagtacaggatcaaccagagctgggcatccacatcatcct

SEQ ID NO: 292774 - DNA, 622 bp, Homo sapiens
aaaacagggagaaaagatagaattctcaacacctcccatgtctggtcatctctgctctttttctggggccatacttcccgggacaatcttcatcttcttacattgtcattggtgtctcccgaccagcctcttttgaagttgatcgcaagcaaagraaaagtacacatagaatgacttcttcagctgactgtcctccattctcacccagaagagaggggaagaggaaaagcccggttgggaaataaagatgaatgtgctcccacgatgctgggtggggctgttttgtgctggagcaggcaggcaaaggaatcccaccatggggctcttgagtcccaggttaatgtcaaatgctgggttttcttttagttactcaaggatcaaagggaaattattcaataaaaaggaacttaaaggggacttctgtgcccacataaaccttaatcaaaaacacttgttcaaatgtagcttccttgacctgccttttcatattgtcttttcagctcttatacatacacatttgtgattaaaataaagattttctccatcaccattcaacatttccttttcctctcagctggccagaatttcaccagggtgacatgacagtttgttgctaaggaac

SEQ ID NO: 292775 - DNA, 591 bp, Homo sapiens
tcccaggttaatgtcaaatgctgggttttcttttagttactcaaggatcaaagggaaattattcaataaaaaggaacttaaaggggacttctgtgcccacataaaccttaatcaaaaacacttgttcaaatgtagcttccttgacctgccttttcatattgtcttttcagctcttatacatacacatttgtgattaaaataaagattttctccatcaccattcaacatttccttttcctctcagctgrccagaatttcaccagggtgacatgacagtttgttgctaaggaactgaagactatgtcataagtgagcattctgatgaagaggagtgaacagtttgcagcagattggatattaagtataaatcagctctctgtgtatgtccttgtgtggtggtataactgacaacaggtgagaaaaagaaggctcagggcattcctgcttgaaatgtggattcttagccacctcctctgtaaaagctactactcatcccctcaattgcctcttgcttttaagaatgtcctcatgcattcgaacttttcacttcagcttgttttgcttctctctgctcagatccatattcctcca

SEQ ID NO: 292776 - DNA, 589 bp, Homo sapiens
atatgacatattgatgaatatagtgggacaaaaggatgctttttcctgattagggtggaaagattttagtctttattttatggatggaagtaatccaactcacaaacttcagctatctataatcttctatgggaaggcaataaaagaaaaagaagaaaaagaaaattctgaaaggagctctttcagctaagagcccaagcctgtggaacttgcccttctcacaactggctcctayggctgcctggtggacctcagaaccattgcagcccttggttctttgtcagacctgcgggtagggtacacatagtgactgtacggttgaggggcccatcctcctgggcaccggcatttgtctcttactcactcatggagataaacttggctgtctacttgaccagaagtagcagttggaatgtctatgggtgagaacagagaaagccagagactcctgcatttgattgttagaaagacaatcaaatggttctctctacagaaacattgtaagaacagtgcaacaaacaaccattgatccttctggtggatccactggctgttactattttgccacatttattttctctctctgtaa

SEQ ID NO: 292777 - DNA, 601 bp, Homo sapiens
tgcatatccttaattatttccttaaaatctattcctcaaaacgactgggccaactgttctgcatttttaaagtttcactacattttgtcaaaccgacctttagaaatgttatgtcatttcatactcccacctgcagaaaatgcagaagtctgttgccagaattccatccttaccaatcatgaatattagtctcctttttattcttttctgtttgtctatttttaaattggagtattcatctttttcttactgatttgtaagaacattgtatatgttcagtctattaattctttctcatgcattttgcaagcttttcccatttgtcaattgctttttacctttcaatttacatttaaaactgttgggcagtccatcacaaagcgtatccaccatgatcaagtctgcttcatccctgggatgcaaggctggttcaacatatgcaaatcaataaacataattcatcacataaacagaaccaaagacaaaaaccacatgattatctcaataaatgcagaaaaggycttcgataaaattcaacaccccttcatgctaaaaactctgaataaactaggtattgatggaacgtatctcaaaataataa

SEQ ID NO: 292778 - DNA, 609 bp, Homo sapiens
ctcctacttcagttccagggtcagtattttcatgatttccattccttgctaaaacatagctcaaggaaacattcagctactctgcagtaatttcagattctggcaatatgttaaaaatgatattaatgcatatcaacttgcaagaaataaatggaaatctcaagatgtctgaaattaagagctataagcttagaatctgatcccgaagcttccctatgggtggttatcaaattcagtaatagctagtagtttgggctttaacatacgatcaggccaagatatgaggatgtgggtcctatgagacactgactgggaactaataccccttcatgaagctgggatgctcaaagggatatagcctcagtaattaggggcatagggaaaaaatctgcccaccttaacaggcagaggatgaaatttggtgttcggaactacgaaaaagaaaaaaattcattcccagagaaataaaaatatcacgcctttgcctcatgctgtgttaaagttagaatgtaaacttctgtagtgatttagaaactgtcaagrtgataaatttacataaaaattaatcctaggacagtcatatcattggagtacctggtagaagtgaat

SEQ ID NO: 292779 - DNA, 578 bp, Homo sapiens
gattcagaataacagaggctctgctgccctcaaatcttggcttccaagttcaccccgggcattctccagccagcagaaagggaaatgtggaggatagagtacggactttttgaagttcagacctggaagtggtacacatcccttcttctacaccccactgcaacgaaaacagttccatggccacaccaaattaaagggatattggaaaagataggagaaacaagttatggtgaacaaataagaaattcctagcaatctgtagaccaagatggggaagcttccragaatagtcgtggcaaaagccagggaactctggcaagggcctctcttcatttattactggccatttctaattcattcatgcactatctattctacaagcatctattaagctcttattgtatataaaatactgtgctaaatgcttcaagggtatttgaggcatactagacttggtctctaccctcaaggaattcacagaataatgggagagatagtcagaagcaataccaaacaatgaagtaaatgctgttttagagaagtgtataaacaattacacaagcatatagcaagaaggt

SEQ ID NO: 292780 - DNA, 578 bp, Homo sapiens
gattcagaataacagaggctctgctgccctcaaatcttggcttccaagttcaccccgggcattctccagccagcagaaagggaaatgtggaggatagagtacggactttttgaagttcagacctggaagtggtacacatcccttcttctacaccccactgcaacgaaaacagttccatggccacaccaaattaaagggatattggaaaagataggagaaacaagttatggtgaacaaataagaaattcctagcaatctgtagaccaagatggggaagcttccgagaatagtcgtggcaaaagccagggaactctggcaagggcctctcttcatttattactggccatttctaattcattcatgcactatctattctacaagmatctattaagctcttattgtatataaaatactgtgctaaatgcttcaagggtatttgaggcatactagacttggtctctaccctcaaggaattcacagaataatgggagagatagtcagaagcaataccaaacaatgaagtaaatgctgttttagagaagtgtataaacaattacacaagcatatagcaagaaggt

SEQ ID NO: 292781 - DNA, 494 bp, Homo sapiens
gaagactaagttgattgtgttgtattttcaagtattttatatcgtacaaggatgtttattgcagcactgtttataacaaggaaaaattggaacctactcgaatgcttgctaataggggactcattaaactatggtacaagcttagatatgactctgtagtcattaagaattttgatgaggtattagaaagaaatgtattgatgttgaagtatatttattgatgaaggaaattgttcacaatatttcagccaataaacaatagtatatgcatttttttgtaataggaaaaaatgcacacagtaaaatagtggttatctttgtgtgcggtgaatatgtatgatacttgttttctttttcatgctcacctatcaattctaatcttagtgtcaataaatattaaaaatgkactatctgacattttcagcgagattaacttttacaatgaaagttaatggaaaatatatggctccacctctgggcctcacgggtagagt

SEQ ID NO: 292782 - DNA, 557 bp, Homo sapiens
acagtcccagttggcttcctttggctaggacacggagttctttgaccccttgcacttcctgggtgagatgatgacccaccttgcttcaccttgccctccttgggccgtatccactgtccagcctgtcccaatgagatgaaccaggtacctcagttagaaatgcagaaatcacccrccttctgtgtcaatctcgctgggagctgcagactggaactgttcctatccagccatcttgccagcagtaccccctgcatttatttttataacagattctttccttgacaaattacatgtctgaattcctgaggaaaatattttacatgaactcaaggaaacttttgttaagactatcccattattaatgactttttcactctttattaacttgaagggaagttttgtaggaaaaatagaagactgttctgagtacttattgattttgttttccctatcctttgtggaaaggagcacattatgaattaagctgcttgagttcaatataaagttccagtaaataatgcttggatcttgaatcttgtcactaatctaaaagtcca

SEQ ID NO: 292783 - DNA, 553 bp, Homo sapiens
gctaggacacggagttctttgaccccttgcacttcctgggtgagatgatgacccaccttgcttcaccttgccctccttgggccgtatccactgtccagcctgtcccaatgagatgaaccaggtacctcagttagaaatgcagaaatcacccaccttctgtgtcaatctcgctgggagctgcagactggaactgttcctatccagccatcttgccagcagtaccccctgcatttatttttataacagrttctttccttgacaaattacatgtctgaattcctgaggaaaatattttacatgaactcaaggaaacttttgttaagactatcccattattaatgactttttcactctttattaacttgaagggaagttttgtaggaaaaatagaagactgttctgagtacttattgattttgttttccctatcctttgtggaaaggagcacattatgaattaagctgcttgagttcaatataaagttccagtaaataatgcttggatcttgaatcttgtcactaatctaaaagtccaagttccacaaaaattgcct

SEQ ID NO: 292784 - DNA, 967 bp, Homo sapiens
gaaaatcatgtttcctgcattaaaaaaggtgatattttattctcagagaacagaaattgcctcagttgactgtttttgagaccaatttattatcaaataggtctaagtaacaatgtttctagaagtcattacttttgataatagacctttaaattttaattggttgttagctgagaaaatagcagctgcacaactctgartctatccacataaacttcaaatatcatgccttgagtatatatagaagacagaaacaaaataaacatcaaattacctctatatagaaaagtaaactccaatttccagaagagctatttccagaagagctatttccagaggtcttgctccaagacttacaaaggattagctgggtccatggaaggagtatgagtaaaaaaagagctaaaatcacccccagaaagagaaaacccatgctacgtgcaaaaataatgaagaagaatcttgcagatcatataacatttawgaaaatcatgtttcctgcattaaaaaaggtgatattttattctcagagaacagaaattgcctcagttgactgtttttgagaccaatttattatcaaataggtctaagtaacaatgtttctagaagtcattacttttgataatagacctttaaattttaattggttgttagctgagaaaatagcagctgcacaactctgagtctatccacataaacttcaaatatcatgccttgagtatatatagaagacagaaacaaaataaacatcaaattacctctatatagaaaagtaaactccaatttccagaagagctatttccagaagagctatttccagaggtcttgctccaagacttacaaaggwttagctgggtccatggaaggagtatgagtaaaaaaagagctaaaatcacccccagaaagagaaaacccatgctacgtgcaaaaataatgaagaagaatcttgcagatcatataacattta

SEQ ID NO: 292785 - DNA, 551 bp, Homo sapiens
acagacaaaccagactttaagccaaaaaagatcaaaaaaagacaaagaatggtattacataatgttaaaggrttcaactcaacaagaatacttaactattgtaaatatattttgcacccagcacagaaacacccagattcgtaaagcaagttcttaggagacctatgacaagacttagataaccacacaataacagtgggagagttcaacacccctctgacagtattagacagatcatagaggaagaaaactaacaaagatattcaagacctgaacttgacacttgactaaagaaacctaacagacaccttcagaacactccatgtgaaaacaacagaatagagattcttctcatctgaatatactctagaactgaccacacaatttcccataaaacaatccttagcaaattcaaaaaacccaaaatcataccaaccacaatcttgaaatacagtgcaataaaaatagaagtcaatactaagaaaatcacttaaaagcatacaattacatgaaaattaaagaacctgctcctgaatgattttggggaaaat

SEQ ID NO: 292786 - DNA, 402 bp, Homo sapiens
ctttaggccaatacctttgatgcacatatatgtaaaaatcctcaacaaaatgccagcaaattaaaatcagcagtgtatcaaaaaagatatccaatattatcaaataggctttatccctgggatgcaaggttggttcaacatatacaaatcaataaatgtgatgcattacataaacagaaaaaacaaaaatctcatgatcatcttaatagatacagaaaatactttcaataatattcaataataaatttcagtaatattcaacatctctttataataaaaaatttcaayaaactaggtctgaaggaacatacctcaaaatagtaagagtcatctatgacaaaccgacagctgacatcacactaaatgagcaaaagctagaagaattctccttgagcacaaaaa

SEQ ID NO: 292787 - DNA, 402 bp, Homo sapiens
ctttaggccaatacctttgatgcacatatatgtaaaaatcctcaacaaaatgccagcaaattaaaatcagcagtgtatcaaaaaagatatccaatattatcaaataggctttatccctgggatgcaaggttggttcaacatatacaaatcaataaatgtgatgcattacataaacagaaaaaacaaaaatctcatgatcatcttaatagatacagaaaatactttcaataatattcaataataaatttcagtaatattcaacatctctttataataaaaaatttcaacraactaggtctgaaggaacatacctcaaaatagtaagagtcatctatgacaaaccgacagctgacatcacactaaatgagcaaaagctagaagaattctccttgagcacaaaaa

SEQ ID NO: 292788 - DNA, 536 bp, Homo sapiens
tgctgggctttcaggcatgattaaaaagtcatgggtaaacaagaggtctccccaactacaagtaagggggaaaaatattgggttagaagctttcctgagacacccctcacagtcatgataagggaggaggggaggcccagactggagaggagaacagaaatggacactctggtattgaggcagatgtccactttcctccctgcaacctccagaatcagccaggctcctggatggtaatggcattctgaaccatcagagccagggagaggagctgcaggacccgtccatcctgctggatcmtttgggagactggctctggacctggtgacctgcatctctggggactgtctaccctctagtggtccccatcacagactggacaggatcaaggtggcttccacaggctgcctgggctgtcctaaagtgacctggcttgccacatttatagcagttaacaagtacctctcagggattctggggttcatgagcctacaaggcagctattagagcctctgcctttttcttgtgtctcctct

SEQ ID NO: 292789 - DNA, 536 bp, Homo sapiens
tgctgggctttcaggcatgattaaaaagtcatgggtaaacaagaggtctccccaactacaagtaagggggaaaaatattgggttagaagctttcctgagacacccctcacagtcatgataagggaggaggggaggcccagactggagaggagaacagaaatggacactctggtattgaggcagatgtccactttcctccctgcaacctccagaatcagccaggctcctggatggtaatggcattctgaaccatcagagccagggagaggagctgcaggacccgtccatcctgctggatcatttgggagactggctctggacctggtgacctgcatctctggggactgyctaccctctagtggtccccatcacagactggacaggatcaaggtggcttccacaggctgcctgggctgtcctaaagtgacctggcttgccacatttatagcagttaacaagtacctctcagggattctggggttcatgagcctacaaggcagctattagagcctctgcctttttcttgtgtctcctct

SEQ ID NO: 292790 - DNA, 631 bp, Homo sapiens
atcctttgcagccactcctgacatggccaccaggaggactgaaacaatcctacaatgttggtaaaggtccagtttatctttcaaggaaaagaaagcctgcacatgtgagaccttggatctttgccctcacatttacagaaaaggtccagctgcaggatagtattaaaactaacgtttccttctggacgccttccttcctgtagtacataatccatccaaacccttgtgcaaaggaatatgaggtggtttctgtttttccagagtctgagggtcaaaggagycccagtgattcaggatgctctcaagaggagtgcaggctgaaggtagtttgttattcatctgaaagagaggggaaaaggcatcccttagttcctggcttccagcaaaaacctggggtatgtgagggaaagaaaaaaaaaagtcgtctttttctttcttccctcctttccttccctgagtcctggtggctactaaaggcaccacccatggatgtgagtgtgatgtctacccatgaaatgggaaggacttgtcagtagggatagttgcacttaacctatgccatgccctagccttccactgtccttaatctgtgtgttcctaagcttcatctatgccatggatgagagcaaat

SEQ ID NO: 292791 - DNA, 599 bp, Homo sapiens
attaaatgacctcattttgttttttagatttaacttgatcccaataaattatctaaaaggttttatgtagtaattttcaagatgattttaaaatttgcatggaaattaggaggatctagaatagccaaagcaatttttaaaatgaggttggagaaataaagctgaagggcttaacctaccagatttcaaaacctattgaaaagctatagacctgaagactatgtggcaaaatatagatgtaaagattatctaaaatgaatataatctataaaacaatacataggtgaaagaagatgtttttcttaggcagatgaaagcggatggctttctgttagaaattgcactattttaaacagagtaaaattatttattacagcaaattttaaagttcagggctgtgatatattaatgaagtaaataggtttttattatcaatttatttatataattatcagatatatktctcattaaagataagaactatcaatcctcaaacttcaagttataaagtagcctttgtttgaattcatttaagagctaacagatcagcaaagtatgttctcatcaaaagataacatacaggaattatttgagattta

SEQ ID NO: 292792 - DNA, 561 bp, Homo sapiens
atgtagtttataaaatatctggtcaagtaccatgatctaagcaacttgaaccactagattaatattacaaatggcaaattgcaagaggcatgaatggttttaatgacagttgaatatgactgggtagtagagaaagctcagtagattatatgaggaaagagtaagctaattactttcatgaaacagcaaatttagctttgaatagctttggagctaaggcaaaaatagaaattctrtaagattattaataagaatcattcaagcatgtagagaaaattacattttctcgaataccaatctctaagagagatttgttaactgaattcttctaaaagagacactaaacagaataatcaacaataaattcaaaattattttacaaaaaaaatggaaataatcccagatctattttctttacattctcccatctctttatttaattagagagcgtgaattcttgattaagacacagactgctcctagaatgtggcttaaattaaccatagtgtctgtttccatggcctctagtatattacttacataacaccacagcagaccctg

SEQ ID NO: 292793 - DNA, 574 bp, Homo sapiens
actttaataattttattataataaaaatttagaaaaatgaattggatatttatttttcatcttaactagaagaggcaattgccttacaaataattaatttttaatcattaaatatttccagtaagggcatattcttgacacccttacgggaggaggtgataatacacagttttaagaaccttaactttatggtcaaattgcctgatgtaatgtttcacaaaacaaaatgtgtgggctttcagtatcagaattcacctgtagcacttataaaacttatttaaattatttcagagccctgttttacagccactgaatctatatttctggaagtgaatgtttgsactcatcatttttaccaaaatccccaggtaattctcatacacattatgtttgagaataaccaatccgagttcaaacaataagtaggttcccattttgtttggaaatattttacaattacatgtttctttagcagcaaaaaggtaagatcatttaattaaattacttaggctgatttgatgacttacataatgcagtaaacagtagctataatagcatttttatagactgttat

SEQ ID NO: 292794 - DNA, 574 bp, Homo sapiens
actttaataattttattataataaaaatttagaaaaatgaattggatatttatttttcatcttaactagaagaggcaattgccttacaaataattaatttttaatcattaaatatttccagtaagggcatattcttgacacccttacgggaggaggtgataatacacagttttaagaaccttaactttatggtcaaattgcctgatgtaatgtttcacaaaacaaaatgtgtgggctttcagtatcagaattcacctgtagcacttataaaacttatttaaattatttcagagccctgttttacagccactgaatctatatttctggaagtgaatgtttgcactcaycatttttaccaaaatccccaggtaattctcatacacattatgtttgagaataaccaatccgagttcaaacaataagtaggttcccattttgtttggaaatattttacaattacatgtttctttagcagcaaaaaggtaagatcatttaattaaattacttaggctgatttgatgacttacataatgcagtaaacagtagctataatagcatttttatagactgttat

SEQ ID NO: 292795 - DNA, 211 bp, Homo sapiens
gggaggtgatacagaacaaatgagtataccacttctaggcctatgaaatccatgggctatcctctctttcctattcttgtgattcgaatcaaaggtccscagtatggcacccttgttgaagtgccactaagcaacattggactgtgatatgagtgaaaaataaacttacattgtactaagccactaggacttgtttgtagaatagctggtt

SEQ ID NO: 292796 - DNA, 1108 bp, Homo sapiens
aacatcttcaagcgcaggaatcattaaccccacataactaatgtagattacaacctattcttgtgtcaatgcttttgattttaaaagtatctgtctgaacacagattatattattttgtgtcaaggggaatggggtggggttgaatctcaactgcttattatctctcttttaagatattgcttgctctttctctgaatctttcctattgcatactcttaaacttcataacttctatcaaacctttgaaaaaaattacctttaggtcctttagctcccatttttttccttctggtttgtttgtttgttcattttttttccatttagttgagaatcaagctcttggtcattatttaacaagactgatgttttaatgtgactgcattttcattgcttaatcattaccgttgtagaaaatcctgttagccctctaaatgtggatattcacccaggacagaacataaccactataaagttggtgaaatgcrttagcctagtgtacgagcttaggctaatcctctctctgttttgaacttcacctctcctccctactatcgagttgattgtcctccgttttawtaatcctccctattcttcaagtcttatatgtaccacagggatcaccatgagcgatccagccagcagtgtcatggtttcatgggctctatctatgccccataactcttctgtttcattgttgcatatgcgggtggtaatgcttttttcttatttacttatttctcagaaattatagaagctttaaaaatgcagatctttgagaaatgggaaaagcaaatcgaatattgcgactggcttaaagaggaagtagtttattaaagatggctgagttgaaaaatcttttatttttgagtttggatccttttaaatacctcccttgtttgccatttgccaatcttaaggcagaggatgaaggcaccttttaccaaattttgcttwaaaatccttaatgcttttgcatttgcattggattcaacacaattttaggccttgaaactctgacatcaacgtattgaggacaggtgttcatggctcctcataattattttgaagtttctgtggaagaacatttggtttgcttgatagatattt

SEQ ID NO: 292797 - DNA, 531 bp, Homo sapiens
taatcctccctattcttcaagtcttatatgtaccacagggatcaccatgagcgatccagccagcagtgtcatggtttcatgggctctatctatgccccataactcttctgtttcattgttgcatatgcgggtggtaatgcttttttcttatttacttatttctcagaaattatagaagctttaaaaatgcagatctttgagaaatgggaaaagcaaatcgaatattgcgactggcttaaagaggaagtagtttattaaagatggctgagttgaaaaatcttttatttttgagtttggatccttttaaatacctcccttgtttgccatttgccaatcttaaggcagaggatgaaggcaccttttaccaaattttgcttaaaaatccttaatgcttttgcatttgcattggattcaacacaattttaggccttgaaactctgacatcaacgtattgaggacasgtgttcatggctcctcataattattttgaagtttctgtggaagaacatttggtttgcttgatagatattt

SEQ ID NO: 292798 - DNA, 578 bp, Homo sapiens
gtgggaggttagaccattatacatacccctaggaaagaggctgaatctagggggctgagcagtgataatctgtaggcctcacttccacaacacctcacagaataagacccactagcttggaatttcagccagccactggtagcaatgttgcaccccactggatggagctcctggagtgaggggcaggccaccatctttgctgtttgggcaacttagcctttccagtcttcgggtttggagaatctgagcttacttgggtggaggcagtccctgagcacagcacagctgctstgggaagatgtagccagacagcttgtaaagtgagtcaccaatcccattccacctcactgggcaggacctcccaaatggggtcttcagccacccatgccagtgcactccaaccatagagactgaaaacttccctggtacagagctcccaggggaggggctggctgccatctttgctgtttgagtgatttaactatcctgggcattggggtttggagtctttgaggtaaccaggtgctgaagcggacccccagcacagcacagttgctctacaaaaatgtggccggact

SEQ ID NO: 292799 - DNA, 577 bp, Homo sapiens
atgtcccctggctttctgttttcttccctttattcagtattctagacatgaagtttccaaatacaaacggaactcatctctcatacttcctgcaacgctttgtgttttatatttctgaaaagtgagatcatgtacttatggcatgatgtctcttcttttctrtatatgaatgaaatagaatgcccctggtgagaatgagattgtgtgttttgatcaaattgtttaattcttgctgtacagtaggcaccattatagtggctaccttggagagagggcaaattaatggaagaatacaggatggggttccagtgtgttggaaatgctccatttcttgacagaggtggtgttcactttacattggttgtccccaaactttttggcaccagggaccagatttgtggaagacaactttgccacagatcaaaggagtgaagagatggttttgggggatgcaactgttccacctcagatcaaaggagtgaagacatggttttgggggatgcaactgttccacctcagatcatcaggctttagattctcataaggagcacacagtttagatccttcgcaggtgcag

SEQ ID NO: 292800 - DNA, 504 bp, Homo sapiens
tgccacagatcaaaggagtgaagagatggttttgggggatgcaactgttccacctcagatcaaaggagtgaagasatggttttgggggatgcaactgttccacctcagatcatcaggctttagattctcataaggagcacacagtttagatccttcgcaggtgcagttcacaatgagcttgcgctcctatgagaatctaatctgatctaacaggaggcagagctcagacagtaatactcctggccctccgctcacatcctgctgtgtggccaggctcctaacaggtcatggatcagtactggtctgcaacatgagggttggggaaccctgttttacgtaactcactgaactatacactactggtcttagctcaagatgctaatattttgccagtcacaaaattctgtttcaattggtccaaaaatgtgactgatctagttcaataggatttttatgtcttaattatatcaccaaagaagctattttcatatggcttcacatgaa

SEQ ID NO: 292801 - DNA, 567 bp, Homo sapiens
acttttctttcagccttcatttactgtacctccatgttttcctgttctcttcccttgatctagccaaataaggacccatatttcatgactttctacctttccagtggatttctgtggctatccaagtagatgaggccataaccctaggtactgtgaggattcttcaattttgtgagctctttaaaagtgtgctgctatcttatttgtatctgattcaaagttgatattataaaatcttttgctgcttaaataaaggtcaaattttcttcttttttttctacactttatttcccacattaccctttaattccacctggtatatatctttgtatgttgaatatgtgacagttttaaytgacaccccaccaacaaaagctgattaatttttccatcataacactatgtattgaatcaatcaatcttttctaaaagacttataatgcctcctttattacatattaagattttatatatactatgatctcttataaggctatgctttatatcaatctttatttttgcactaataccacatcatattaattattgaaaatatatttaaatatt

SEQ ID NO: 292802 - DNA, 567 bp, Homo sapiens
acttttctttcagccttcatttactgtacctccatgttttcctgttctcttcccttgatctagccaaataaggacccatatttcatgactttctacctttccagtggatttctgtggctatccaagtagatgaggccataaccctaggtactgtgaggattcttcaattttgtgagctctttaaaagtgtgctgctatcttatttgtatctgattcaaagttgatattataaaatcttttgctgcttaaataaaggtcaaattttcttcttttttttctacactttatttcccacattaccctttaattccacctggtatatatctttgtatgttgaatatgtgacagttttaattgacaccccaccaacaaaagctgattaatttttccatcataacactatgtattgaatcaatcaatcttttctaaaagacttataatgcctcctttattacatattaagatttyatatatactatgatctcttataaggctatgctttatatcaatctttatttttgcactaataccacatcatattaattattgaaaatatatttaaatatt

SEQ ID NO: 292803 - DNA, 474 bp, Homo sapiens
tttctttccttatttcagtgacgatggcatccagtacaacagtaagtaggtgtgttaagaactgacatccttgccttattcctgatgttagaaggaaaacatttactctttcaatatcattccacaatgtttacatgtatgaaaacatcacatttacctccaaatatatagaattattattttcaagcaaaaacgttttaaaactttaatgctagcaatagcttttttgtagatgcatttatccaataaaggaagttctttctagtcttagtttgctgaagttttatcagccagtaatgttaaactttgataaaggctttttctgcctctattatgatgatcatatgaaatttctttattttgtccatcgatacagtaaattgyattgactgagtgttgaatgttgaatgaacctcgtacttctgacacaaaccccacttttacatgatatatcagttgttctatatattgctt

SEQ ID NO: 292804 - DNA, 545 bp, Homo sapiens
acagtaaattgcattgactgagtgttgaatgttgaatgaacctcgtacttctgacacaaaccccacttttacatgatatatcagttgttctatatattgcttgattttaactgctaatatttttgagaattttgctgtttaagttcacacatcatattggtctgtggttttcttacaatatctttgtctctttttggtattagggtacttctgacctartaagatgggttttatggtgcttcctcttttgtatattctggagaaggatgaacagagtttgcatgattttattaacagtttttgataatatgccagtgaaaacttctgggtgcagagttttctctgtagaaggtgtttaactataagtgagtttctttaagggacatgagggtattcagattacatattttttcttaaatgagctctattttttgtgactttcaacaatttgggctattttatgtaagttaaatttatggtcatagtgttgttcataatgcccccttattttcctattaacatctgtgaaagctgtagtgatacct

SEQ ID NO: 292805 - DNA, 528 bp, Homo sapiens
gagacaaagggaaagagatggaacaaattaataatacctaattcttatttgaatcatcactgtattaagcacatcagttttctgaattcaatttgcagcagaacttcttattagccatgggaatgccaacatacctcacatactgtgtgctctattttactcacccctaacgtgggtttaagaatgcaattttatttttacatattctttggatggtcaaatgagataaaccgagtgcattactttggcaatacaatatattgtttacatggccttttttcatatgctatcattattctacacctgcttgggtatgttttgtaatggcagacaccagccaaaatatctatcaaatgtttccttttgcttgtatgaggatttaaaacatgaccacagagaatgcctgctgagacaatcaaaatgmatatttacttaggctagtaatgatcaatgtcttctgagtaatatggaaattgagttcaacacacggaataaagccgaggctccgaaactaagcaaaacagtatt

SEQ ID NO: 292806 - DNA, 569 bp, Homo sapiens
ctgaacgcctttaacaacaacgtaggctgagatcagatggtcttgaagcaaagtgatttaaaagggcatttatgccactccgtttttcaagtgaatagtgtgaagattaatataacttagaacacctacaacaaatgtctgaagtgatgcttaataacatgtgcttttgagtcagaagagcttgaattttgattttattgtttataaatttcattaatgaaaaaaattacttcccttcctgagcctcaatctcctcgcctataatatctaagtcataactaccttatatggctgttgctaatgttaaaacttaattaataggtagcagattactagactagatgtcagttttgtgatatctacctcaacttttgctaacagttgataatttagaagcaatgtaggagtctaacagtayagaaacatttatgcatgtcattattcattttccatatcttcaagatctatcatgtcattgtgatagatattctgtatcaaaaaataattccaaaaacacagttttatatccataatataaaaataggcaaaaattaaccttggatctatga

SEQ ID NO: 292807 - DNA, 569 bp, Homo sapiens
ctgaacgcctttaacaacaacgtaggctgagatcagatggtcttgaagcaaagtgatttaaaagggcatttatgccactccgtttttcaagtgaatagtgtgaagattaatataacttagaacacctacaacaaatgtctgaagtgatgcttaataacatgtgcttttgagtcagaagagcttgaattttgattttattgtttataaatttcattaatgaaaaaaattacttcccttcctgagcctcaatctcctcgcctataatatctaagtcataactaccttatatggctgttgctaatgttaaaacttaattaataggtagcagattactagactagatgtcagttttgtgatatctacctcaacttttgctaacagttgataatttagaagcaatgtaggagtctaacagtacagaaacatttmtgcatgtcattattcattttccatatcttcaagatctatcatgtcattgtgatagatattctgtatcaaaaaataattccaaaaacacagttttatatccataatataaaaataggcaaaaattaaccttggatctatga

SEQ ID NO: 292808 - DNA, 596 bp, Homo sapiens
atgcaagaatttgttaatctggtcataygtagcactttcttctgtaactataaggtggcagatgcttcacatgtctctaatggcctttttactatctcttcacctggtgccttccataaatacttcagttgagaaagattttgtgttttgtcattctatcagtggtagtaatctcttgtccttatacaggagccaggcttgttggtatgatggtaacgtgtgggaccagtagcattctataaccttctagttaaatttcagtcctgtattcctatgactcaaagtataatcttcagaagcagacttttgtttttgttttttagtagttttagttgcatgaaaaaactgatcacaaggtagaaagatttctcaaatacctcctttccccacacatgcacagcttctcccattatcaacatcctccagcacagtggtacatttcttgaaattgatgaacctacaatcaaatgtcattgtgacccaaatcctacagtttacattagcgatcacttttggtgttgtacagtctataggtttaaacaaatttataatgaccactatagtatcctacatgctaatttcactaacctgaaaaa

SEQ ID NO: 292809 - DNA, 542 bp, Homo sapiens
tttctcagtaaaaaaaaaaaaaatcaaataaaacaatcatcaagcttgatcttcaaggacttcaatggaactctttgccaatgattcaaaattgcacgtggattttaaggacttaaaattgttataagttctgaccacgtacaaggacataaaacagtctcaacaaatctaaaaatctgatatcatgcatcacattttccagtgtctatgcaatataattggaatttaattaaaatgtaacaaaatatataacgtaaaatagccacatgggactgacgttagaaacttcataccataaggcacacaaaatgcttagtaagattgttaacagtggacaacattatataagtggaggtgatgtgtgttgtttctgaactttcmtggcatttaagagctgatactctgccctcccttctgttctggcctttctgtaagaattagcaaagttcaggatggtggtacctcttttggtataagtaaaatcccaaggactgagtaaagccttagacgacatcaatcatgtaaaaaaagcaaggaaagca

SEQ ID NO: 292810 - DNA, 525 bp, Homo sapiens
gtcttctcattttgaatattgagtaaggacgtaagtgtggcaagtttgtgctgagaagaaatactgcccactgtactcactgagactggcctgacccctaattcagctattgtttggcaagaagatgtgacactgccattggattgatgcaatcttaagccaaataccatttgcagagattacagtagatacaggtcaaaccatgcactgacgcctcgacaagggcccaacgcagacactcaaattcacagatctcttgtgaaaggagttatagccagcttgctttaggcagacagtaagggaagagtccctggagaacctctgactcatgttttgtgcagataagggaacttgcacggggggcttgcctaaacatgccctcagcggacaaagggcctaatgtgcactgagggaacggggtcaaatcaccagaaatytgtgttttatacaattaggggacttacccacatcagcttatatataaaaacccttgtattcaactgttaaggggacaaccaacaacct

SEQ ID NO: 292811 - DNA, 574 bp, Homo sapiens
aattggaaccttctagtgtggcatatagatgctatcgttcacagatcgttcttttttttycattaaataagccatgtccgggcatcattactttttgtgctagggatataataatgcacaaacatgaattcctggtcttgtggactttatagtccagtgaggggtggcacacaagtgacaaataaacatgccaaatttgtagtatgtgctatgatcagagaaaaataaaggaagttagagggatgggaatggtagaaatgagacccttcttttttggactccctctcgttgataaggtaatatttgagtagagataggaagtaactgagggaataagaaaaaacagcatcaatgaaagtcctgatgctggaacttgcctacgatggtccaggaacagtgaccacacgagcaccagtagtagataaaataaaagggagagttggtaggacatgagctcaaacgtgtgatggatctgaagttgcagagaatgttagcagtggccacctcatgaagagccttaaaaattaaagcacttgctcttaatgatatggaaggtcattgaggagttttgaat

SEQ ID NO: 292812 - DNA, 528 bp, Homo sapiens
tgtgtgcaacatctgcagctttttggtgcaccagattctgtcttgactcacgtggagcactgatggagctgccaagttccaattcctggggatagctaacaacaaagaagagagacaggtggcttgttcaggcctgcatgacttgatgagatcgggagaaggtgcacaactcaaggctttttcctggaaggggtggcgggggaaaggtgctctgcagtgcaatagaccaatagggagcaagagattatgggcttctggaaaaaaaaaaaagaaagaaaaaaatcaataaatatttctaactaggaatctacacagacaagttcaggcaagacacaccatagaaaagagatgagaggctctgaaaatttctagattgattggtgaaggtcttttctgggcaaagtcagttagtaaagattgacagaaaatttttttaagaaaaaaatgcacagataccgacatgaagctgcagaaacacaaagaatcagggagacatgactaaatcaraagaacaaagtgaatttccaa

SEQ ID NO: 292813 - DNA, 437 bp, Homo sapiens
aaataacataggaagagtcttgccattaggatctaaactttaagctatatacattttttaagtcatataactttaagtcaaatccttttccactttttgattaacctattaaatctcacgtattttcagagaggagttaagtctattttgctcagtacaataaatttggcatagaatttgaagtcaatccctaatgtctcaattttcttctggacatatcttcctcagttctatcttcacccccacccctccctcacctatgagtttttccgtgtgtggtgcaagtgccaagacttatcacastgtcacatgtgaattagatgatttgcaatgacaagcagcaattgtccatagcttttcacactcagtccctatccttccctctggaattgagaaaatggagcatctataactcactaaaaatacgcacatatggg

SEQ ID NO: 292814 - DNA, 1194 bp, Homo sapiens
gtgtcaggagtagctatgcacaagttctaaaccttccttggaaccccatcatttgaacaagctaagcttacttgctgaaggagagagagcccagttgccctagtctaggccatcagagatcagccagccgcagtgccaaaatgcaagagatctcagctaagatcagcagaagtatctcttcaccccacatctgaccacagaggcatgagagaatccaacaagaccaaaagaccacatagatacataaaaactgacaaataataacaaagaattattgttgtaagccactgagttttggatcttttcttacacrgcactagctaactaacttacataaatagaaacaaaaaatgttacatgcacatgctcttgcataaacacacatacacatgcacacacacacacacacatttgcaaaaacatgaaaaaagttgaaatatttaaaacagagtgtccaatcttttggcttccctgagcgacaatggaagaagaattgtcttggaccacacattaaatacactaacactaatgacagctgatgagctttaaaaaaaaaatctcataaggttttaagaaagtttwcctgacaaagaatgatcaagtgagtaagaaataagaataaaattaccaagccattctaattgatatataaatggaattacatgtcttaaaatagagaatgcaacttctctacaaatttttatgggatgttttcactatcaatagaaaaacaaagcctcaataaattacaaaagtagaaattaaatagacaatacttgctgttgacaatgtawcaaaaatctataacaaattagaaaaccaaaacaccctgccatctgtaaaattttagttccccaaaataaactttgtgtcaaaaatgaaatcaaaaccaagaatacagtatttgcagaaaacagtgaaaatagaatgtcctctattggaatctctgtatacagccataatgggctgagaggaaaattcacagcctaaactacttatactagtaaataagaaaaaaatgcataattattttagaaaataaacattcaattcaagaaatgtaaggccaataaatgagataaacccttaaataaccaaaataaagaaaaaatataaaagtcagaatatagaaacaaccacagattattcacagactatataaatcataaaagccccttggcttaaaaatattat

SEQ ID NO: 292815 - DNA, 612 bp, Homo sapiens
cctgacaaagaatgatcaagtgagtaagaaataagaataaaattaccaagccattctaattgatatataaatggaattacatgtcttaaaatagagaatgcaacttctctacaaatttttatgggatgttttcactatcaatagaaaaacaaagcctcaataaattacaaaagtagaaattaaatagacaatacttgctgttgacaatgtatcaaaaatctataacaaattagaaaaccaaaacaccctgccatctgtaaaattttagttccccaaaataaactttgtgtcaaaaatgaaatcaaaaccaagaatacagtatttgcagaaaacagtgaaaatagaatgtcctctattggaatctctgtatacagccataatgggctgagaggaaaattcacagcctaaactacttatactagtaaataagaaaaaaatgcataattattttagaaaataaacattcaattcaagaaatgtaaggccaataaatgagataaacccttaaataaccaaaataaagaaaaaatataaaagtcagaatatagaaayaaccacagattattcacagactatataaatcataaaagccccttggcttaaaaatattat

SEQ ID NO: 292816 - DNA, 433 bp, Homo sapiens
caaaaggagcccagggcattggccttttgagagtctggggttgctttttgttcacacatcttgggtctaccaatctggggtgttgtagacttttaggcaggcccttctcatcctaaggaatagttaagaaatcctagagggctcagtctgagcccagtatggaataaataagagctccccaagggaagcaggttctgacttaygttgttggaaaatgacccatgagtcattttctaactaatgatagcaaatcattagtttcgagagggtctttgatcctgaattagatcacatgtgtgaagctcattccttccttttcataaaagtccctgtggcccttaagcattaaggtggggggtgggggcgcagagaggaggatacagagaacgttctccagtagtttgccaataaggtaaacttctaggagagagga

SEQ ID NO: 292817 - DNA, 553 bp, Homo sapiens
atctgtttggagtaggttgtttccaaatttttaagtcggtggcacagtagttaaactgggaggacaatcaacaatctcaatttagctttcaacaataacacactttgaaggcaggccagctagtgcagaagcagatatacaggatgtagcagccacatgtcttaagaaagaacaactcttttcttctattatggtactttgtgggagatgagatagcaagaggcataaccagaggtcttagattagctatcctgtgctaaaaatcttaaagagactgagatagagactsagagagagatagagaaacatgctcaactaactgcatttcagtttaccaggatgaaaatactggaagtattttctcagataaatttatcaaaagaaaggaatatttcaaaagactatcttttatttgatattgcagtagatgccatctttgaggtgactgcatttagaggcaggcacagccacaatagaacaggttttgactggtgaatctgtagagagttccaagaacaccttgagaatcagtgcttagtctctatgctcaaac

SEQ ID NO: 292818 - DNA, 585 bp, Homo sapiens
tcctggctggtatggttagaatgaaaaatcgtaagaattcaatacctagtgttggcgcgaatgcagagctactaaagctcacttacattgctggttggaatatgaactggtagaagcatttgggaaactctttggtaatatctactaaagccatacacacatataccctaagacccattgtcattgactgcttgatggcccaaattcttcacttcacsctgtgttcatgcccttggccataaaaccctgcagtttctcccacctccattgaagaaatgcatttccctgcctcttgactttggacccagccatggaatttgctttgaccagtgaaatgtcagcagatgtgtacttgcttgctttgttatgttctcttgtgcttcgaccatctccttatgaacaacatgccctgagaagtccactggtcccaggagaaagacagctgcgtagctgaccagtggacctgcacccgtggtacatccatacaatggaatactacacagcaataaaaaagagcaaactactgctgcactcaaccatgcagatgaatctcccaaacataatgttaatccaaggaagcccaag

SEQ ID NO: 292819 - DNA, 585 bp, Homo sapiens
tcctggctggtatggttagaatgaaaaatcgtaagaattcaatacctagtgttggcgcgaatgcagagctactaaagctcacttacattgctggttggaatatgaactggtagaagcatttgggaaactctttggtaatatctactaaagccatacacacatataccctaagacccattgtcattgactgcttgatggcccaaattcttcacttcaccctgtgttcatgcccttggccataaaaccctgcagtttctcccacctccattgaagaaatgcatttccctgcctcttgactttggacccagccatggaatttgctttgaccagtgaaatgtcagcagatgtgtacttgcttgctttgttatgttctcttgtgcttcgaccatctccttatgaacaacatgccctgagaagtccactggtcccaggagaaagacagctgcrtagctgaccagtggacctgcacccgtggtacatccatacaatggaatactacacagcaataaaaaagagcaaactactgctgcactcaaccatgcagatgaatctcccaaacataatgttaatccaaggaagcccaag

SEQ ID NO: 292820 - DNA, 516 bp, Homo sapiens
tgaaacttcctctgtcttgatctgggtggtggtgacacaggtgtacatgtataaaagatttatcaagttatacagtttagatttatgcactttattctctgtgggtcattcctyaatgaaaaagtacatcactacaaatagattatataattcttagaatttataagggacagcagggagttatgagagctaattcctgctgcagtctgtgctgctcaaaactagtaagtagtgtgagagtcttgtctttccaggccctggtagccagtcacaaagctggaaagagcagaattgaggataaatgtgctcctgcctacctaaatccaaaaatcaatccaccttagaaacatagtatgtggttctacagaacaggcagggtaaatggcctccatgggcaagcctgagagccctgcattgtctctgtgagtgggaaaagtattgggatctacaaacaggtttaactcattacctgttagtgagttggaggtggccttttgtaacagtgtaatggtcagg

SEQ ID NO: 292821 - DNA, 516 bp, Homo sapiens
tgaaacttcctctgtcttgatctgggtggtggtgacacaggtgtacatgtataaaagatttatcaagttatacagtttagatttatgcactttattctctgtgggtcattccttaatgaaaaagtacatcactacaaatagattatataattcttagaatttataagggacagcagggagttatgagagctaattcctgctgcagtctgtgctgctcaaaaytagtaagtagtgtgagagtcttgtctttccaggccctggtagccagtcacaaagctggaaagagcagaattgaggataaatgtgctcctgcctacctaaatccaaaaatcaatccaccttagaaacatagtatgtggttctacagaacaggcagggtaaatggcctccatgggcaagcctgagagccctgcattgtctctgtgagtgggaaaagtattgggatctacaaacaggtttaactcattacctgttagtgagttggaggtggccttttgtaacagtgtaatggtcagg

SEQ ID NO: 292822 - DNA, 516 bp, Homo sapiens
tgaaacttcctctgtcttgatctgggtggtggtgacacaggtgtacatgtataaaagatttatcaagttatacagtttagatttatgcactttattctctgtgggtcattccttaatgaaaaagtacatcactacaaatagattatataattcttagaatttataagggacagcagggagttatgagagctaattcctgctgcagtctgtgctgctcaaaactagtaagtagtgtgagagtcttgtctttccaggccctggtagccagtcacaaagctggaaagagcagaattgaggataaatgtgctcctgcctacctaaatccaaaaatcaatccaccttagaaacatagtatgtggttctacagaacaggcagggtaaatggcctccatgggcaagcctgagagccctgcattgtctctgtgagtgggaaaagtattgggatctacaracaggtttaactcattacctgttagtgagttggaggtggccttttgtaacagtgtaatggtcagg

SEQ ID NO: 292823 - DNA, 516 bp, Homo sapiens
tgaaacttcctctgtcttgatctgggtggtggtgacacaggtgtacatgtataaaagatttatcaagttatacagtttagatttatgcactttattctctgtgggtcattccttaatgaaaaagtacatcactacaaatagattatataattcttagaatttataagggacagcagggagttatgagagctaattcctgctgcagtctgtgctgctcaaaactagtaagtagtgtgagagtcttgtctttccaggccctggtagccagtcacaaagctggaaagagcagaattgaggataaatgtgctcctgcctacctaaatccaaaaatcaatccaccttagaaacatagtatgtggttctacagaacaggcagggtaaatggcctccatgggcaagcctgagagccctgcattgtctctgtgagtgggaaaagtattgggatctacaaacaggtttaactcattacctgttagtgarttggaggtggccttttgtaacagtgtaatggtcagg

SEQ ID NO: 292824 - DNA, 605 bp, Homo sapiens
cctacctaaatccaaaaatcaatccaccttagaaacatagtatgtggttctacagaacaggcagggtaaatggcctccatgggcaagcctgagagccctgcattgtctctgtgagtgggaaaagtattgggatctacaaacaggtttaactcattacctgttagtgagttggaggtggccttttgtaacagtgtaatggtcaggtctgcggtacattcatggtttttatccggtattactaactctcctatagctagctcatcctctgaatttcctctcatgctcacctctctccatacaatcccatgccctccacctctattccctataccgaaggcttaggtaagttcctattttcaggactcccacagtgcccctgggcacatctttcatggtgcattttccacactggattataatttatgagcttttattctataagcttcttgagtccataacttatattaattctgaggaccagcttcaagagaacattgtggaaaaaaacgtggttccccatacytaaaatgctgttcctgcctctacacccattcagatcctaactatgataaatgaatcaactcaagtgcttcccactgcatgag

SEQ ID NO: 292825 - DNA, 603 bp, Homo sapiens
gcaattcaggtatgttaatgtgagcatgtctttcctcactctcaatgacactttatgctgtttcattggatattgtcccagttttgtaccaatcctttgctgcaatatttaataataatatggtcattaattgcttaatgatgaggatatcttctgaaaaatgtgtcattaagtgatttcgtccttgtrcaaacatcagagtgtacttacacaaacttaaatggtatagcctactacacacctaggttatatggtataggctattgttcctaaactacaagcctatacaatatattactgtactgaatactgtaggcaatggaaacaaaattgtatgtgtgtatctaaaatagaaaagctacagtaaaaatacagtattatgctcttatggaaccaccatagtctatgttgtccatcgttgatggaaaccttgctaggtagtgcatactgtaattattttattgtcatacaaattaatatgctctacattttgctaaatgtttaactgctaaaaacatgttattgaccatgcaaaacgcagtgaactatttgaaaagaaatcaataaaacaatcctatttacaatagctacaaaaaaacttag

SEQ ID NO: 292826 - DNA, 603 bp, Homo sapiens
gcaattcaggtatgttaatgtgagcatgtctttcctcactctcaatgacactttatgctgtttcattggatattgtcccagttttgtaccaatcctttgctgcaatatttaataataatatggtcattaattgcttaatgatgaggatatcttctgaaaaatgtgtcattaagtgatttcgtccttgtacaaacatcagagtgtacttacacaaacttaaatggtatagcctactacacacctaggttatatggtatagsctattgttcctaaactacaagcctatacaatatattactgtactgaatactgtaggcaatggaaacaaaattgtatgtgtgtatctaaaatagaaaagctacagtaaaaatacagtattatgctcttatggaaccaccatagtctatgttgtccatcgttgatggaaaccttgctaggtagtgcatactgtaattattttattgtcatacaaattaatatgctctacattttgctaaatgtttaactgctaaaaacatgttattgaccatgcaaaacgcagtgaactatttgaaaagaaatcaataaaacaatcctatttacaatagctacaaaaaaacttag

SEQ ID NO: 292827 - DNA, 633 bp, Homo sapiens
ctgaaatccaatgaaattgggaggttagactccaattctcaaagaattcaaatctcaatgagaaaaacaagtgaaactaaggtgttaggctcactgcagcgtgttttcctcacacacacctgcttcctgataactgctctttgcccttctctgtcctcatcttcctctgagcaccaaggaaatacaacatggtaatacttgcttgtgaaagtgcttgaggatatacatcaagcatcactggtgagttcttgcatacatggttttaagctcctttattcagagtgctggaagggaagttatggtgatatgtgctgatctacccggacttcatgaggaccaaatgcagagaccaggtcaggaaggcatggycattttggaagctaactcctatgggggataaagatggccactctctttaaaagaagggccagactccagaagtggagtctatttccccttctcttgaatctgagttgggcctctgtctagctttacacaaaagaatgcagtagatggtgaaccacgtcacttccaaggctatgccttaagagatttgtaattttcactttcatggtcttggaacccagctatcacagtgaaaagcggcagccacatggagggagaactgacaca

SEQ ID NO: 292828 - DNA, 605 bp, Homo sapiens
tctctgttttgaaccctattcttttatgtctacttaacttcagcctaccagataacattaattacacattattctgcttttccttaagatgtcattcttaatattttatattctacctgtctgttcaaagaacctgaatctgtttcacgataaattttaggcctattttccagggcatttgtagatttatgtgtattatgttattatgtgattatacacaaaaagtttaagaatatgtaagaatactagytcagtagtattattgagagtaactgttgggaatacttctgcatccactatgtagttgaacacagcaaagaagaaaatcagccaaaatttaactgcaaaagaacatcacatgataaagaaagcctggttaagtggaaataacattcagattagaactaataggttcaaccaaagttttcataccagtgaagttttgttttacttgtatctgttctccataaatggagcccattagagcttaaatgcttaagttaacaaaatattaataaaatcaattgtgtaacatttctaatgaataaaattgatttaagtgtggtacaagtcattttaccaacttgcctttttagaaaaaagac

SEQ ID NO: 292829 - DNA, 473 bp, Homo sapiens
cagtttcccccatgctgttcttgtgatagtgagtgagttctcatgagatctgatgggttaaaagtgtgtggcttcctccactatctctctcttctgccaccagtaaggasgtgccttgcttcccttttgccttctgccatgattgtaagtttcctgagacctcccccgtcatgtggaactgtgagtcaattaaacctcttttcttcataaattacccagtctcaggtaattctttatagcagtgtgagaacagaataatacgtactctgactcaaatatttggtgttcttagctgtctgttcaccctctgagatgaagatttggatggatagctttggcaacactgctttgcagcccagggaagaagagctacctgcacacagatcacacagggccaggctttggtagctgtactggatgggtgtgggagagggaagagggcagagcctggcatcgggagcttgtgagccttg

SEQ ID NO: 292830 - DNA, 563 bp, Homo sapiens
ctccacggccccaaagcccctgtgcagcggtgatgaagagctaactccactgctgtaataagatgtttctctccatggttcctcttgcccacagctgatgccccttctgaggtccagcagttgccatgaatatccctgtttgatgggtccataagcaagatttttaaatgcccagctcaccatgacmgatgcattaaactcccttctctgtacatattagagcaaacattttccccatttgtaatatgagaaaaagataatttctcccgtaaaagccatgttgcatgtagaaaactcaacaatatgaaaagttgcaagaaaatttagtgactgctcacttatttttggaaaagaaatagaaactttatcacagcactttggaggctgaggcaggtggatcgcttgaggtcaggagttcgagaccagcctagcaaacatggttgaaaactccgtctttacaaaaattaactgggcgtggtggtggatgcctgtaatcccagctactagggaggctgaggcagaagaatggcttgaaccccggaggtggaggttgcaatgggccg

SEQ ID NO: 292831 - DNA, 583 bp, Homo sapiens
gggcttaaggtacttatggaaacatatttttgttatgaacaaaaaatttacctgaaatatttaatatttaaatatttaagtaatgctacctcactggaatctcatccaaatgggtattccccattcattcatttgtgaggatttgaggggataaaggtggcataagaaacaagtattaygggagcttctggcttcttctgtcccagtgagggctcctgaaaagaatcccacagtcactgtgggtggggcctccagactaggtaagcagctaatggtgttctgttttgaaagaggaggaaatttgtccaggaagaagtggtgggtaaaaggattcttagtgggagaaagaggaggggatgccgcagagacacaggttgagtgatgtcaaactgctgggccctgggcacttaattgctgtgtgcgtctgtgggtaccatgtagatcacaaacacatgcattcatgcctaggtttttaaaatttatttttaattgtttgaaaatttttttctcctgaatccacttccttgtggaaatggggttaattaaacgaggacaaatttactacttcttggctatgtgaaac

SEQ ID NO: 292832 - DNA, 533 bp, Homo sapiens
gtgcgtctgtgggtaccatgtagatcacaaacacatgcattcatgcctaggtttttaaaatttatttttaattgtttgaaaatttttttctcctgaatccacttccttgtggaaatggggttaattaaackaggacaaatttactacttcttggctatgtgaaacagaacatttatctgagcctcatatttctgcttttgtgaaacagaaagacttcaacctgcctcacagggttgtggtgaggatagatgagatgacctacgtaaggtgtctaggacagtgcttggcatagagtagttgtctagtaatttatttcctgagtggttcttcgtgcactcctgtcccttatgcctgtagtaaacatacacatttccaaaaactgtcttgctcctcaaagcccaggtgtcttggaaacactcttatggtcattttttttcagtctggaagcataatacattaattacatgaatagatagatgataatagatagggaaagagagagagataaatagatacagatggacagacagata

SEQ ID NO: 292833 - DNA, 576 bp, Homo sapiens
aacaatgatcaattatatttaaatatcagcagcaaaaggttgaaaagtgaaattacaraaacaatactacatgaacaacaaaaatcataaatgacttaagactaattttttaaaaagataatctacaaactgttgttagataaaattcaaaaagaactagattagatttatttttttaaaagttggcatgttcttgttaaatgatcctccaaacctcttcttccttgtttctactcttttgatgtacacactcactttttaagcttaataaacccattttctttgtaaaaagaggaaaagaaaagaaaaatatagatgtgaacattaaaaaaggaatgcacacctattagaaatgggtttactaatggaaatttttcaaggaagatgatcaaatttccaagaaatacgacccacttatttctaagaaagaaatatgaatttgggttatgacaactatgaatcaggtcctgtcacatcagccacatggcagaaatttgatactgtatggagatatatttagtgtttcaaatttttatagaatcattataacccataaaagagagggagaaaaagggt

SEQ ID NO: 292834 - DNA, 533 bp, Homo sapiens
gtgcgtctgtgggtaccatgtagatcacaaacacatgcattcatgcctaggtttttaaaatttatttttaattgtttgaaaatttttttctcctgaatccacttccttgtggaaatggggttaattaaacgaggacaaatttactacttcttggctatgtgaaacagaacatttatctgagcctcatatttctgcttttgtgaaacagaaagacttcaacctgcctcacagggttgtggtgaggatagatgagatgacctacgtmaggtgtctaggacagtgcttggcatagagtagttgtctagtaatttatttcctgagtggttcttcgtgcactcctgtcccttatgcctgtagtaaacatacacatttccaaaaactgtcttgctcctcaaagcccaggtgtcttggaaacactcttatggtcattttttttcagtctggaagcataatacattaattacatgaatagatagatgataatagatagggaaagagagagagataaatagatacagatggacagacagata

SEQ ID NO: 292835 - DNA, 592 bp, Homo sapiens
gctaaaggagcttatttaaactctcaacaggctattgctgttttcaaccttgcttttggagcagaattttcattgaaagcaatgaccttctcacttgaaatatttcagttcatgtaggccaatgcaatttctcctggtagtcagaacaacactgttagtaattagggaccatagcatgaggcagattagcccttgcatgaaatttatgcagaatcttttacaaagtggcttctcttagctacagggaggcagcatactatgttgggacaagcagagagctgtgaattggcactgctaccaagcaagtaattcttctcataaggacctcaatgttctttataaaatgacatttggtatatcttagaayaattgtatgttgatgcctccatgcattggtctccttccttaattggggttctgaggaatgaaacaatggctataagatcataaggtggctgagtcagtaacagaaaaaacacaacccattaagctgagttgaacgtgcagtgtctgctactacatggaactgggctttgcctcagttcttggttaaagtcacactgtaagatgacactgatacgtacaggaggca

SEQ ID NO: 292836 - DNA, 1115 bp, Homo sapiens
attagtgtaacatacaagtgaagtctcatttaaggaatatgtttttctcttggttctctagaaaaactgggcaaattatattcagattttttaaaatttagaaaattttataatatatacaattttaaaggtcccctttaaatcacaaaaatcataatgcaaagagttttgggttagggcagtgagacatcatgtagtgtctatattcataaaattgttttgcacaaataaattattaaaaggagaccggatacaatgctggagactgaccagtccacctacttttgcatttttgcactgctgacttacaggctgctactcatgagcaaagagcagcatcttcatatatgaagggcatgatcacaatataacacaacaaaaacataaaaaatggatatttatttgaattagaaggtattcaggtttcttttaaatatgttttttagaaatgatctggtccaaactcctattttagagaaactgaggacaaaggtaagatgattyacccaaggtcaaacacctaatggccaacataataaaaattatwtggggtagtgagtgaaagaggcagagatcatctgacatagaaagaaaggaaagagaattgagaattaagataaatcattttctgattagcatggtgctccccaattccatgaggcaacatgccaagaatgtatcatataaatgccactaattaaaaacaaaataatttactagaaaatgttggcagataaactaatttttaatttttaacacatgawttattttgtactttattccaagttataatactttgcatctggaattaagcttaagttcttaactgcaaagccccgatttaatacttctcattgttataacagctacttctttatgccctgcatagacattttataaagaagaactgactgcttataatgatagggaaaaactatgagtatatggtggttctaaattcgctagggcaaaaaagctaaaagatactatattctttctccagtctttggtcctgtgtacagcatttcaaatatttcaaagtttctcatgcaatgggacacacagggttaagattctaatgagtgctgacatgaaatcagttcaccctatgaact

SEQ ID NO: 292837 - DNA, 585 bp, Homo sapiens
ctcttactgttttttgtaatggctgtgctaatttacattcccaccaacagggtgtaagagttcccttttctctgggcaacatatgttattttttgtcttttcaagatagtcattctaactgaggtgaaatgatatttcattgtggttttgatttgcatttttctgaccacagcccatttgaatccacagaatatttcatgtctccccctacatgattataactgtagctaatgttttcagaagacctatcaagtgccaagccccacttaagtcctttctgtgtactgattctattactgtttatcccacccctatgaggtaaataatatcatgctgttttacagatgagataccaaggcacggggaagttaaagtgactcccccaacatcacacagctggtaagggggaattgaggtgtgcaccaggcaggccrgctccacaatccctgctgttcctcctcatgataggagtgttttcactgaagaatgagtcacacagaacagaaggtttccacacatctagtacacttttaaattcatctcatacagatgaaaaataatatgcctgtggatttagctattcaa

SEQ ID NO: 292838 - DNA, 600 bp, Homo sapiens
ctgtagttcatgccatttgcatgaaactgacataagctgacactctgctgtatatcttggcacaatattgctttcatctctggagtcgggtgtcttacaaatttaacaktgtcagttgggaccgtccaaagatatttacaggtatgtaagattgtagaatggctggaaatgttttctgtcatcttctcatgattagcagtgtttgtttggttatattggcattgctcaggaaagcttttcccagaataaagcgtgtctttcatttctttctatcaagcagtatattaaaataaaccatttttaaaataatcattacaatgggaacaaattctttattgttaagtcaattgttttatattgaattagctatgccaaatttaatttaacttaaagatgttcacataatatttattttagagttattttatattcttattatgccttaagtaaattatatttcaaacaacttgttggctcagcgatattttatttctacattgagttttagcaactctaaaaaggctttgtaaaaattaactgtaggatggaataagatatttgcaatacccttcttgagtttgttttcaggtatttcaagaa

SEQ ID NO: 292839 - DNA, 600 bp, Homo sapiens
ctgtagttcatgccatttgcatgaaactgacataagctgacactctgctgtatatcttggcacaatattgctttcatctctggagtcgggtgtcttacaaatttaacattgtcagttgggaccgtccaaagatatttacaggtatgtaagattgtagaatggctggaaatgttttctgtcatcttctcatgattagcagtgtttgtttggttatattggcattgctcaggaaagcttttcccagaataaagcgtgtctttcatttctttctatcaagcagtatattaaaataaaccayttttaaaataatcattacaatgggaacaaattctttattgttaagtcaattgttttatattgaattagctatgccaaatttaatttaacttaaagatgttcacataatatttattttagagttattttatattcttattatgccttaagtaaattatatttcaaacaacttgttggctcagcgatattttatttctacattgagttttagcaactctaaaaaggctttgtaaaaattaactgtaggatggaataagatatttgcaatacccttcttgagtttgttttcaggtatttcaagaa

SEQ ID NO: 292840 - DNA, 620 bp, Homo sapiens
ctgtttctcccgctatgagataaactgttccaccctgttycttcctcactagctgctgtttggagccctgagagaagagatactagaaggaaaggtaaggaagtagttattttcctggtaaagttgtaatgtggtcgtgtttccatgtggtgtggtatcttcaaaatgttgacttttttctctcgttgcatgcatccttgtccctgcaaactctggaagttcaggtcattacctgcccagtcccaccttactcttgtcacgtttagataggtgggaatcaggaagtcatcctcttgtcttctaaattctaaggtatacagccaacctttccatggagttctcttaaaaccttcttcgactggcttccaggaaagggaaaacagcaaatcagagcactgtctgcagagaaggtccttatgactggacttttcaaaaacccaaggaattctgtcttctgttttgcaagctagagggaaataaaagggccacacctgcaaagctgtttcacagtttcttggctaggactcatggctgctttagactcttgctattcaaagtgtagtctttggaccaagggcaatggctttacctgggagcttgttagatacacaaacattgca

SEQ ID NO: 292841 - DNA, 620 bp, Homo sapiens
ctgtttctcccgctatgagataaactgttccaccctgttccttcctcactagctgctgtttggagccctgagagaagagakactagaaggaaaggtaaggaagtagttattttcctggtaaagttgtaatgtggtcgtgtttccatgtggtgtggtatcttcaaaatgttgacttttttctctcgttgcatgcatccttgtccctgcaaactctggaagttcaggtcattacctgcccagtcccaccttactcttgtcacgtttagataggtgggaatcaggaagtcatcctcttgtcttctaaattctaaggtatacagccaacctttccatggagttctcttaaaaccttcttcgactggcttccaggaaagggaaaacagcaaatcagagcactgtctgcagagaaggtccttatgactggacttttcaaaaacccaaggaattctgtcttctgttttgcaagctagagggaaataaaagggccacacctgcaaagctgtttcacagtttcttggctaggactcatggctgctttagactcttgctattcaaagtgtagtctttggaccaagggcaatggctttacctgggagcttgttagatacacaaacattgca

SEQ ID NO: 292842 - DNA, 620 bp, Homo sapiens
ctgtttctcccgctatgagataaactgttccaccctgttccttcctcactagctgctgtttggagccctgagagaagagatactagaaggaaaggtaaggaagtagttattttcctggtaaagttgtaatgtggtcgtgtttccatgtggtgtggtatcttcaaaatgttgacttttttctctcgttgcatgcatccttgtccctgcaaactctggaagttcaggtcattacctgcccagtcccaccttactcttktcacgtttagataggtgggaatcaggaagtcatcctcttgtcttctaaattctaaggtatacagccaacctttccatggagttctcttaaaaccttcttcgactggcttccaggaaagggaaaacagcaaatcagagcactgtctgcagagaaggtccttatgactggacttttcaaaaacccaaggaattctgtcttctgttttgcaagctagagggaaataaaagggccacacctgcaaagctgtttcacagtttcttggctaggactcatggctgctttagactcttgctattcaaagtgtagtctttggaccaagggcaatggctttacctgggagcttgttagatacacaaacattgca

SEQ ID NO: 292843 - DNA, 1208 bp, Homo sapiens
ctgtttctcccgctatgagataaactgttccaccctgttccttcctcactagctgctgtttggagccctgagagaagagatactagaaggaaaggtaaggaagtagttattttcctggtaaagttgtaatgtggtcgtgtttccatgtggtgtggtatcttcaaaatgttgacttttttctctcgttgcatgcatccttgtccctgcaaactctggaagttcaggtcattacctgcccagtcccaccttactcttgtcacgtttagataggtgggaatcaggaagtcatcctcttgtcttctaaattctaaggtatacagccarcctttccatggagttctcttaaaaccttcttcgactggcttccaggaaagggaaaacagcaaatcagagcactgtctgcagagaaggtccttatgactggacttttcaaaaacccaaggaattctgtcttctgttttgcaagctagagggaaataaaagggccacacctgcaaagctgtttcacagtttcttggctaggactcatggctgctttagactcttgctattcaaagtgtagtctttggaccaagggcaatggctttacctgggagcttgttagatacacaaacattgcawcttgttttttgttagtatggaatatctttttccatcccttcactttgtgtgtgtccttgcaggtgaagtgagtttcttttaggcagtatatgttgggttatgttttttttaatccattcagccagtctatgatttttaagtggggaattgaattcacttatattcaagattattattgatatgtgtgtacttacttctgtggttttgttagttgctttgtgtatcctgtgttttcttcttcctctcttttgttwatcattgcagtttgttggttttcttttgtgataaagtttgatttttttgtctttctcctttgtgtatctgctctattagtgagcattctacttttgtgcattttcttgatagttattattgtcattcatttctagatataggactcccttgagcatttcttgtaaggctggcctagtgatgatgaatttcctcaggttttgcttgtctgggaaagactatttttccttcatttctgaagaacagctattcttggctggaaatttttttctttcagcacttttgaatatattatcacattctctcttggcctataaagtttctgttagcctact

SEQ ID NO: 292844 - DNA, 554 bp, Homo sapiens
gtttttttccccgaatttgacttatgttttcataggccttcaatcttccatatttaatgtggaataaatttcttgcatyaaaaaacataccctgcaactctgattgaaatttaactgattttatgggctaatttgggaagaagtgactttacaaaaaaaatcttgtcttactgtagagcacaaaatgtctgtccatttactcaggtcattattactatgtgtttaatgaatatttaaaagttttttctatcaaaatcttgagtattctgtggaactaaactttttgttgctcttctgatagatattttaaaagcaagatttaagaaatttcaggagagaaaagatagtgacttttataagttcatcttttatccggtaacctattattgtcaaagagtgatagttttatctttcattccaatgtttagatcttttctttctttcttgttgtcatgaccgaaaccttatatgaaatagtggtggagacattgggcatttaaaaaataattctgttctcaaaggcattgatgaaatcaagttttcccattaagaat

SEQ ID NO: 292845 - DNA, 554 bp, Homo sapiens
gtttttttccccgaatttgacttatgttttcataggccttcaatcttccatatttaatgtggaataaatttcttgcattaaaaaacataccctgcaactctgattgaaatttaactgattttatgggctaatttgggaagaagtgactttacaaaaaaaatcttgtcttactgtagagcacaaaatgtctgtccatttactcaggtcattattactatgtgtttaatgaatatttaaaagttttttctatcaaaatcttgagtattctgtggaactaaactttttgttgctcttctgatagatattttaaaagcaagatttaagaaatttcaggagagaaaagatagtgacttttataagttcatcttttatccggtaacctattattgtcaaagagtgatagttttatctttcattccaatgtttagatcttttctttctttcttgttgtcatgaccraaaccttatatgaaatagtggtggagacattgggcatttaaaaaataattctgttctcaaaggcattgatgaaatcaagttttcccattaagaat

SEQ ID NO: 292846 - DNA, 509 bp, Homo sapiens
aataccttaattatgcagaacaaattcattgcatgtcatctcccctttagctttgatgcccattttccttacagatatttacatgaaaatagcatcattgtttattaagaatttgtttttattcttctttctgagggcaacactccctttaaaaacagtgactttggtcaccaaaccctgagggatagacccacattgtcctgattstaacaatgctgattagttgacagggaaacatggaacttcacagctaacatcaaagtgagttaaaatagacaagcttttagcataattggaagttataatattcatgaaaaataacttctgctgataaattttgtgttaattctccataatgggcgactgttggccttctcagataggctgatggtttcaaaaaagatcgggtaaacagacttctttaaaggatcttgcactctgacaaataattaaatatactttagaagatttctttaagggatcttggattctgacacattatttaagaa

SEQ ID NO: 292847 - DNA, 605 bp, Homo sapiens
gatttcctggcattgtaggtagttagtccaccacatgtttcccagcctctcctagacaaaccagtgtttcagcaccaaatagcaaggagcttgggcttaattccaggtatagtagagacctgccaaagggccctaaagtggtggatggcagtaagtctcactagctgaactgtagaatctcctttgtttttgtaaaattcatattttactctgatttcctttaggctctaagtgaagtgtacagatcttaactgtataggtctgtgagttttgtcaaatgacggatgcgtacctgtgtgtaatccacaccatgaggatatgggacatttccatcagcccagatatatccacagtgcccctttgcagtcttcctagtcaaccactgttctgattcctgagccagcctttgtaactgctcatgaaaatgacacatgtgcattgttattacagtgtctagcaccttattctttcttattgcaaaatatagcytaatattgagtattttagtggcttttcagcaggtggagagtttgtaaaataattgtttccaatggtacacatcttaaattatgtgtactgttgatcattttgatgttcagacatgg

SEQ ID NO: 292848 - DNA, 1083 bp, Homo sapiens
aaatatataaatatataaggcaataagacaattaacagagtatgtggaccatctgggtttgtgttgaaggggtccagaaagaaagtgttcaaagagataagttttgaagggagaacatttagcccccagatgcagatttgtggtatgcagagtgagcacatgccagggcagtggaaccaaagaatggcgaaaagtcatgaggcaaaaatgagcagaatggggatttctaaagtaattctttcttacactctttcctttgtgttactctgttaataatctctctttgatgtaatcaatggcattagttaacatttgctcagcacacgtttcaggcttggcaccaagtgtctggttttgtccttgccatgagataggcactatttatratctattttaatatctattttagtgaagctactgagatttagaaaagagtttatttaacttgctgtaacagttagctttgctgtgtaacaaatcaccccaatttcagtagctaaaawgtgccctgcactctactaaaggcacttggcaatgttattgagactttgaacatawgtttttagaaaataatactgagcaaactataaagctccagtggactggaaaagtgtttgcattttctttatattagcctctagtgtaattcaggacttcattgctatggacgagtctaatttcccttgctaattgtttatgttttcatatgaacaccacatattcttagaggaaagagcgcatctcagcatcttttaaatgctcctgatacaaagtcttaatgtaaaacacttgttctagtatgtttctttccagtacatagcctatgtagttagttcttggtgtttcagaaaaaaaatgaagttaggttagtgggtgtgagcgtggacgcctcttgggtccagtgcggttgcggggttggtgccctacagccactgctgtgcttccctcctggcgtctgtactctaatctaatgcacgagggcagtcctactgctcattaatcacgtttagtgttctcactcctaacccaaaatcgggctcctccttggagcagcatacttggtgccaggcttgggtggacgtc

SEQ ID NO: 292849 - DNA, 604 bp, Homo sapiens
cacataagtgtgctccaggcttttctatcttataaacaaacaaacaaacaaaaaatctcaccttaatatcctgcttcaattattaatttatattcctctttctccttacatgcaagcttctcaaaaaaaaatagatctcttcttattttcactagtcattgtatacactcctcaacctacagaaattaggccattacccacytccattactccagtgaagtcactccctggacatctcctaattcaacaatcataccagttttgtccttacttcacttctctatggtcacattatcatggactttcttgatatcctatttcttcatattctctctttcttgctaacagctccctttcaagtttatctttctgtttccttcataactgttggtgtttcctgggaatgctacaaacccttctcttattttacgcactctttccaagcaattttttctgtactcatggcttttattgactgcttgtatgtcagtaattcccaggtccagatttctttttagaattttttgtctgtttatgacaatgtctactaaatggcatttaacatgcattaaaagatgtcagttacatagtcagaaaatatcac

SEQ ID NO: 292850 - DNA, 604 bp, Homo sapiens
cacataagtgtgctccaggcttttctatcttataaacaaacaaacaaacaaaaaatctcaccttaatatcctgcttcaattattaatttatattcctctttctccttacatgcaagcttctcaaaaaaaaatagatctcttcttattttcactagtcattgtatacactcctcaacctacagaaattaggccattacccacctccattactccagtgaagtcactccctggacatctcctaattcaacaatcataccagttttgtccttacttcacttctctatggtcacattatcatggactttcttgatatcctatttcttcatattctctctttcttgctaacagytccctttcaagtttatctttctgtttccttcataactgttggtgtttcctgggaatgctacaaacccttctcttattttacgcactctttccaagcaattttttctgtactcatggcttttattgactgcttgtatgtcagtaattcccaggtccagatttctttttagaattttttgtctgtttatgacaatgtctactaaatggcatttaacatgcattaaaagatgtcagttacatagtcagaaaatatcac

SEQ ID NO: 292851 - DNA, 615 bp, Homo sapiens
cgggtcatgctagcaatctcaaagtacaggatctttggacaatgtgcagaggtctctttattacagagtaatctgcaaatgtctcacatcagataagcatgtggcccttcttaatctagtgacttatggtctcaaaaggaaagttagttgaattaaaccatgagggaataagtgtaagattgcactcatattcagagaaggaaaaagtgtgacccccacagaagtcacaggcccatagaaattcagaaatccccttcacagatgtgatgagtattccctactatgacaatgggaggttccccttgaatgggcyctggttctattttcactgagagcagctccccatttgcttgttctccatggttccaggaagtcctctcttcctccagatttcccctggactcatgtgataaggcataagtgaaaatgtctccaaggaatctgagaatctttttcagcttacttcttgtctataagccatgaggacccaagattcattttatgtcttgaaagttacggtatattttggtctaagctggtgatactttggaggatatgattctcaaaccttaactgcctactacttatcaatttcattatcatcatatcaatatg

SEQ ID NO: 292852 - DNA, 615 bp, Homo sapiens
cgggtcatgctagcaatctcaaagtacaggatctttggacaatgtgcagaggtctctttattacagagtaatctgcaaatgtctcacatcagataagcatgtggcccttcttaatctagtgacttatggtctcaaaaggaaagttagttgaattaaaccatgagggaataagtgtaagattgcactcatattcagagaaggaaaaagtgtgacccccacagaagtcacaggcccatagaaattcagaaatccccttcacagatgtgatgagtattccctactatgacaatgggaggttccccttgaatgggctctggttctattttcactgagagcagctccccatttgcttgttctccatggttccaggaagtcctctcttcctccagatttcccctggactcatgtgataaggcataagtgaaaatgtctccaaggaatctgagaatctttttcagcttacttcttgtctataagccatgaggacccaagattcattttatgtcttgaaagttacggtatattttggtctaagctggtgatactttggaggatatgattctcaaaccttaamtgcctactacttatcaatttcattatcatcatatcaatatg

SEQ ID NO: 292853 - DNA, 516 bp, Homo sapiens
tgagctattctggtttgattcatccatccatacctagactcactcacagccttaccttacccaatgagttatttgcgaaatagataataagacactggccractcttgactttcaacaaggctgggcttatgttctagagtagcagcaaatgctgaccttcacagcaggtagcagacaactctactttgtaagggtccagaagggacgcagctaagcatgtttcactacagtgcacaggtagatggagcaagtctgtataacttcattttctgcctctctgctgtgattttcctgggccacacgcctgcagggctgctgaaaataattagatacggggtagggtgagttctctcctttatctcttcaccaaattcagtgaaagtcaaaccatatttgtgaggaagactcacaagcattgtagttttaaaacattatgaattcacactgaatttcagtttatatgtaaaacatatttaatgagatttacacatttatattcgggctaagcggaagtg

SEQ ID NO: 292854 - DNA, 626 bp, Homo sapiens
ataaatgcatgagatgatggtcatgctaaatgctgtgattttatcattttataacacatgtgtattcaaacactaaattgtaccccataaatatgtacaattacaatgtgtcaaatttttaaaatatcactactttcatgacaaaaaaggaattcatttaaaatgcatttaaaatttaaaatgcttttaaaatgcatttctttgtatattctttcctacttacatcatcttccttctcaccagatacaagcactctttgatatttatattattatttagcattttttatagttttattacatatgtacatagctgtaaacaatacatcgtgaagttcttttccatttcttttgattaacacaaatgagatctttgtatttttcagaaattttcttttctcaattgttttttttttgagactyattcatgattgtgtgtgtagttttatttcatttacaatgttgtataacagtggttaatcaacatcaatgtacatttgaatcaactgggaagattttcaaaactattaatgcctggttctaccaaatagcaatgaaattcttatctcttgttgtagggcctagtcatgggtatttttaaaagcctcctacccacttccaatgtgt

SEQ ID NO: 292855 - DNA, 367 bp, Homo sapiens
tttaggttaaacagaaatcttcattttaatgtagtcataattataatctttttctttgataagttaacttttaaacatgttttgttgaagaaatctttccttamcctaaagtcatgggcttatttacctatgtttttcttacatatttaagaccacaatgcatctgaaatctgtgtgtgtgtgtgtgtgtgtgtgtgtgtgtgtgtgtgtgtgtgtgtgtgtgtgtagcataacctagaggtttcctttcatttttattccctatagataagcacttgtcccagttctgagtttattttgttccattgatctgtttatcttttgctgtgccaacattatattgttttactaacaatagattatttta

SEQ ID NO: 292856 - DNA, 423 bp, Homo sapiens
agaaggaacaaaactcaaaataataagagctatctaagatacacccacaaacaacattacactaaacagacaaagctgcaagcattctccctaagaactggaaaagacaaggatkcccactcttataaaagcatccacttggaaaagaaaagtcaaattatttcttttagttgatgatatgaatgtatacctcgaaagacctaaagactcaatcaaaaggcttccagggctgataaatgacttcagtaaggtttcaggatacaaaataaatgatatggtttggctctgtgtccctacccaaatctcatctccaactgtaatcccatgtgttggaggaggggcctgatgagaggtgattagatcatggttttttttcccatgctgttctcataatagtaagttatcacaagatctgatggttta

SEQ ID NO: 292857 - DNA, 484 bp, Homo sapiens
aattttacttttggagtattagtaagtgtcagactactaacaaaaattcattagccagattgtattccttcagggcggaagttggtaaatattcaagggtatgtttaattttgaattcttctaagtttctctttaaactatgaagtttttctgaaaacactttatgcatacgcacagagagtgatgagtagagccatatttgaatttcatgtgcttctgrcttgaattagacttctaatccttggtattttaatataatttgcaatttcttttttattttcaaaattaaagttttccaataagttaggttttaaaatgttatgtgccttatgttttcttctagaaatgtcagcctttgccaataggttttatgccacaatatgtgtgatagttcaggtaaaccgtagtaattttaatgcacattaaatgttcttctaatgtgttggcagaggctccctcaaactgtactttattgtctatctac

SEQ ID NO: 292858 - DNA, 569 bp, Homo sapiens
aaatcatttgctcattgtaaataaaacacttcgtgcttgcttctccctagaactggactatcaaaactacctaaaatttcaaagaattattcataagagacatggtaggcagaatattgccccccctcaatgatgttcatgtcctaatcctcagaacctataaataagttatgtggaaagtgaggaattaaagttgcagatagaattaagattgctaaccagctgatgtcaaaatagagtgattatctagcattatttgagtgggtccaaatataaacacaaagtccttaaaaggggaagaaagaactacagacagtattttgagaagaatttggccctatgttgctggctttgaagataaaggaaggggctgtgggccagggaatgagggcagcccttaggagatggaaaaggcaaggacacagatttttccctgggcttccagaaaggaatgcaccygccaacatcttgattatagcctagtgaaaaccatttcagacatttgactaccagaactgtaagatctacatttgtgttgttacaaaccagaaaagactgtgataatttgt

SEQ ID NO: 292859 - DNA, 605 bp, Homo sapiens
atcgtgcggtggtccaggtgagaatattaaagggaagcaatagaggtgtagttaactgtaagccaagcaagatttcagactattgggggtgtcatgttcaggttgggtcagactgaaaggacagttatcagtgttacagttttttcacagaagggcaaggaagctcacccatcatttatttaattctttgaaaacactgaatagaaagtgtcagctaggacctaatcattagactttagagtaccttttttatttgaagaaaagcatagacctgagatctctgcaaagaggtacagaataattgatgtgcagctaaccacagaaaaggtaaagagtaaaatccccaccctggcagtcgatggataatccttaaactaagttccttcagatattgagtgaaagtgascctggaaaaaaagggtcaccataaagcaaagtttataggagtaatgtgctaatatttcctgggttcaaagttattctttttgctgtctaaagccaataagaaaaacatagtagacatatttttcctagtgtttttgtagtaggctatgttgacaataaattcacagcttgagtatggtagagagagacccactcccatc

SEQ ID NO: 292860 - DNA, 642 bp, Homo sapiens
cctcggctgcctctttccccacctgctctgtaggtttcctggtcttactagagttggtcaaatttcacttcctctgagactatttccagaaaaacagaattatggatttgtgtaatcatctataccytaagagtataagcctcacattcatctccagcattcatcatactgctctgtaatggctggttttgtgatctgtccctagggagccaggactgtgtctttgtcaccagaatagagaaataaaatagtatggagaggaaaagtatgtattttggagtctgatgaaccttcagtttcagtcctgcttgaatatttccaaaatgtacaacaataggcaggttcctttatttcctgagtcttagatatattagctttattttaaagagatgacttaatgtttgcttctcaaggaatttgtatatatacacgaaatactgtatataaaccacttaatatggttcctggtgcatatttcctgtgattgtaaaacattcatttgccaaataaatgaataacttctaattactaaagtctaagaatcaaagtttgcagagaacttcaattttatttccattgagatgtggcttctgtaataccattttaacatctattaaaataatgttcttaaagtcatcaatg

SEQ ID NO: 292861 - DNA, 642 bp, Homo sapiens
cctcggctgcctctttccccacctgctctgtaggtttcctggtcttactagagttggtcaaatttcacttcctctgagactatttccagaaaaacagaattatggatttgtgtaatcatctataccttaagagtataagcctcacattcatctccagcattcatcatactgctctgtaatggctggttttgtgatctgtccctagggagccaggactgtgtctttgtcaccagaatagagaaataaaatagtatggagaggaaaagtatgtattttggagtctgatgaaccttcagtttcagtcctgcttgaatatttccaaaatgtacaacaataggcaggttcctttatttcctgagtcttagatatattagctttattttaaagagatgacttaatgtytgcttctcaaggaatttgtatatatacacgaaatactgtatataaaccacttaatatggttcctggtgcatatttcctgtgattgtaaaacattcatttgccaaataaatgaataacttctaattactaaagtctaagaatcaaagtttgcagagaacttcaattttatttccattgagatgtggcttctgtaataccattttaacatctattaaaataatgttcttaaagtcatcaatg

SEQ ID NO: 292862 - DNA, 602 bp, Homo sapiens
gccattttaatgatattgattcctcctatctatgagcatggaatgttttgagctcttggtgaagccactgtgggacaatacccttaagagtcttgaaagcagcattgtctatccmagaaggataaagagacatatggttaaagttcttaggggcatttttgttttattgagttggtatgtgggacactgccttacatagttctgagatgttaacaaagtaccttaaaggcatcccccagatttcctggggccatgtatttctggaagttgttagatttaaatttgctctatgacagtggtccttaatggatggaggcagcatttgtcaatgtcaagatacatttttagttttcacaaatggagaggtgctgctgtttactgaaatgctgtgggttagttctaggtcccattgctcaatgcacagaaagccaatcactgagacagtgccaaggaagaaggcttttttgggtgctgcagccaaggagaatgaaaggtctggctcaagatcatcacctcaaccaagtaaaattaggctttcttatagcaggaaaaaaaatgtaactatgtgtggaaaacaggaatttgggaaaggtaagaaagag

SEQ ID NO: 292863 - DNA, 545 bp, Homo sapiens
gtactttcatctctaaaatttttcattttgtttatttttatagtttcagtttctctgttagattccttattggtttgctcattaatacaatattttcctttagttcttttaacrtattgataaagtctgtcctgaagtctttgctgtatctaacagttggatacagtattagtctgttttcatagcttgtggtattttcctgaatatggataatgcttttgtgttttttgaatgtctagtcatttactaatttttgattgaaaactgggctgtgtagaaaacacattgcagtaattgaattcagtggtgctctttggaggagtttttgattttctagaagaaagccatcttattttgatgcacgttgtaaaagctcttcctcttcacccccttcccctatctgtagaagggttggtctctgctcagtgttcttagtttccttgtcctgctctgctagcctgctccctgggggatctcttctgtgtctggatgcttcaggggtgagccataaattggtcagagttcatatttaacatattgaagct

SEQ ID NO: 292864 - DNA, 460 bp, Homo sapiens
atctcattattgaatatatactaaaaggaatataaatcgttcttyaataaagactcatgcctgtgtatattcatcataacagcaaagacatggaatcaacctaagtgcccatcaatagtagactagataaagaaaatgcagtacgtatacaccactgaatactacatagccataagaaagaatgaaattatatcccttgcaacaacatggataaagctggaggccataatcctaagtgaattaacccaggaacagaaattcaaatatcacattttcacttataaatcagtgctgaacattgagcatccatggacataaagatggaaataatcaacactgggcactggggactaagacggggggagagtgagagggtgagcggggtttgagggttgaaaaagtacctatcagggactatgctcagtatctgggtgacagaatcatttgtacaccaaacctc

SEQ ID NO: 292865 - DNA, 460 bp, Homo sapiens
atctcattattgaatatatactaaaaggaatataaatcgttcttcaataaagactcatgcctgtgtataktcatcataacagcaaagacatggaatcaacctaagtgcccatcaatagtagactagataaagaaaatgcagtacgtatacaccactgaatactacatagccataagaaagaatgaaattatatcccttgcaacaacatggataaagctggaggccataatcctaagtgaattaacccaggaacagaaattcaaatatcacattttcacttataaatcagtgctgaacattgagcatccatggacataaagatggaaataatcaacactgggcactggggactaagacggggggagagtgagagggtgagcggggtttgagggttgaaaaagtacctatcagggactatgctcagtatctgggtgacagaatcatttgtacaccaaacctc

SEQ ID NO: 292866 - DNA, 528 bp, Homo sapiens
aagagattaatatgtagaacatgcaagaactcaaacaactcaacagcaataaaacaaataatctaattcaacaatgtacaaagcatctgaatagayatttctcaaaggaaaacatacaaatggccaacaagcattttttcatatgctttttggctacttgattcagggaaatgcaaatcaataccacagtgatatattatctcatgtcagttggcatggctattatcaaaaagacaaaaagtagcaaatgctggcagggatgcagagaagagaacacatacactattggtggaagtatacattggtacaatcagggaagacaatgtggaggtgcctcaaaaagctaaaagtagaactaccatatgatctaccaatctcatggatgggtatatattcccctttccctaccaaaaaaggaaatcgttttgcacagagatgtgtgcaatttcatgtttgttgtgagactattcacagtagccagatatggaagcaacctaagtgtctctcaacagatgaataaagaaagaa

SEQ ID NO: 292867 - DNA, 527 bp, Homo sapiens
caagtatgagaaataactaaatttttatgaatatgtaattaagcatagaccatgccttaaatgcttaaagtcactttggaggtaaaagtaggctgggatgaggagatatcagggtaaagrgctgaatgtctgaggacatggagcaggttatgaatgcctgcttcataattgcttccaaatcaccttcccagggtgacttggaaagtcccactacattcaataagaaaaactttcaacatgttagacaaggcttagaaatgctcaggagccctgacaacatgctgatttaaatcagtatggaattgagatgaggtctgattgtttttttaaaaaagttggttttgttggagattgatcctgagtaagtatggggctggtcctgtgaagggaagatctaataatatacatagcggaggtgacttataggtgagatgatgggctccagctgcaccgtattacctacctcagattattactttctttggtttattacctatctctattacctgtctggcatgactatgcca

SEQ ID NO: 292868 - DNA, 527 bp, Homo sapiens
caagtatgagaaataactaaatttttatgaatatgtaattaagcatagaccatgccttaaatgcttaaagtcactttggaggtaaaagtaggctgggatgaggagatatcagggtaaagggctgaatgtctgaggacatggagcaggttatgaatgcctgcttcataattgcttccaaatcaccttcccagggtgacttggaaagtcccactacattcaataagaaaaactttcaacatgttagacaaggcttagaaatgctcaggagccctgacaacatgctgatttaaatcagtatggaattgagatgaggtctgattgtttttttaaaaaagttggttttgttggagattgatcctgagtaagtatggggctggtcctgtgaagggaagatctaataatatacatagcggaggtgacttataggtgagatgatgggctccagctgcaccgtattacctacctcagatkattactttctttggtttattacctatctctattacctgtctggcatgactatgcca

SEQ ID NO: 292869 - DNA, 455 bp, Homo sapiens
gtctgattgtttttttaaaaaagttggttttgttggagattgatcctgagtaagtatggggctggtcctgtgaagggaagatctaataatatacatagcggaggtgacttataggtgagatgatgggctccagctgcaccgtattacctacctcagattattactttctttggtttattacctatctctattacctgtctggcatgactatgccaggactgaaatatgagatgtatttgtgaggttaaaattctttcagaaaacttgctaaaggaaaggaagtattataactgtctattgttataatatactggcattatgatttgaaagtcaaacctctctagcataggcagctaaatgatatttgtcaaatactgataattcactgaaaaaatacatttttatggttgtagaaatgactgaggtgctsagccccttacattagatactagcca

SEQ ID NO: 292870 - DNA, 521 bp, Homo sapiens
tctggacagatctactcagaaacccatgagacctacttctatgcaacacagcctcacacacctgctctatgtggttggaactgtcacctgactggttgtaatagaaaccaaacaactttatttttcacaaacttttctatcaggtcttagagtcaaagaatgacaaagataaagaggagatgaatactttgtgaggaagcacagcagtattgctggaaattcaatcctcattgttcattaagaattttttttctaagatgttcactaacacaggattttgctaaaaagaaaagaaaaatgttgacagcataacaaaaaatgtgaggcaaacagtataagaacagrgtaaaaactatgcttaaaagtttcctctttaacaaaataagcaaatattcctttttaaataagtatcaaatatcattttgtgaatactgtctattttattggaagacactgttttaatttaagcttctggttctgtactttctatttctgagcaacaaattgctacaaacttagca

SEQ ID NO: 292871 - DNA, 430 bp, Homo sapiens
agcccttcaatagtttctcattgtacttagcaagaaacccaagcccctttgcacatgaggacagcatcaccaagcttcccccatgccctgactcccgaccctcagaagacsttggccctgtttttaattcacctaggctgctcttctcttaggtttttgcatgtctggctcctgtttatttagatttcagctcaaatatcttatcctcttcttgtctcccactttctccaccattgagaccattatccgtctaatattaccattcactggttcatatcatgtatcaacgtataccatcatatcattttgtattttttattttaaatttcctcctcttctctatcttggccttaattgtagcttcttcagatcagggactttgactctttcaatcagttgtattcctagcacttagagcagtacctagcat

SEQ ID NO: 292872 - DNA, 430 bp, Homo sapiens
agcccttcaatagtttctcattgtacttagcaagaaacccaagcccctttgcacatgaggacagcatcaccaagcttcccccatgccctgactcccgaccctcagaagaccttggccctgtttttaattcacctaggctgctcttctcttakgtttttgcatgtctggctcctgtttatttagatttcagctcaaatatcttatcctcttcttgtctcccactttctccaccattgagaccattatccgtctaatattaccattcactggttcatatcatgtatcaacgtataccatcatatcattttgtattttttattttaaatttcctcctcttctctatcttggccttaattgtagcttcttcagatcagggactttgactctttcaatcagttgtattcctagcacttagagcagtacctagcat

SEQ ID NO: 292873 - DNA, 430 bp, Homo sapiens
agcccttcaatagtttctcattgtacttagcaagaaacccaagcccctttgcacatgaggacagcatcaccaagcttcccccatgccctgactcccgaccctcagaagaccttggccctgtttttaattcacctaggctgctcttctcttaggtttttgcatgtctggctcctrtttatttagatttcagctcaaatatcttatcctcttcttgtctcccactttctccaccattgagaccattatccgtctaatattaccattcactggttcatatcatgtatcaacgtataccatcatatcattttgtattttttattttaaatttcctcctcttctctatcttggccttaattgtagcttcttcagatcagggactttgactctttcaatcagttgtattcctagcacttagagcagtacctagcat

SEQ ID NO: 292874 - DNA, 588 bp, Homo sapiens
aaggccaaaaccagcctgggcaacatggtgaaaccctgtctctacaaaaaaattagtcaggcatagtggcacacacctgtagtcccagctacttgggcggctgaggcaggaggattacttgagcccaggaggtcgaggctgcagtgagccaagatggtaccactgcactccggcctgggtgacaagtgagaytctgtgtcaataaaaaaaaaatatatagcactttagccatgtcaattatttgcattttaacgtgaatgaataataaaagtaaggggaaagagatgcctaaagaaccgcactgagaagtggaaatggcagaacatgctaagaaagaaaaattgtttacctaggagacttaacataaactttctcctcctcaaaacacttgctaggattggtcctcctgtctcttccttgctgctactaggtttgctttattttccctaacaatgaaatgtagaagatctggacttttattccataaaatagacatttattgaatgcctaccaagtggcaagcactgtgataggtgtggggaatctaacaaacagacttgtcaactgcccctttggagctcacagtcc

SEQ ID NO: 292875 - DNA, 592 bp, Homo sapiens
aatgcctaccaagtggcaagcactgtgataggtgtggggaatctaacaaacagacttgtcaactgcccctttggagctcacagtccatggaatctgacttggcgaagaaagcccaagacaaagccttgagattttcctctattaaggactgggtaaatgtaacaaagaggaagaaggtgaagatgttcatagctaagcaagaggaggcaggaggagatgagattcagagaagaagcagagatgagtcttaggtcagagaaggatggcctctccattgatacaaaggaaccacctagttattcaacaaatagaaacttgcactcagtctttatgtgaaactaggctagktcctaacgatttagttatcaaaaagacttatcaataggtattccaggaagccaactctaagttggaggtcagcatgcgggaggtttttttaaagggatttattaagatcaatagcccgataaaaggagaggataaaagcaggatcaagcagaagaaagggtcaaactgcaatgcaagtccaaggacagcttcagcaaaccccacagggagctctggagctaggatgttccttagagttctcccc

SEQ ID NO: 292876 - DNA, 592 bp, Homo sapiens
aatgcctaccaagtggcaagcactgtgataggtgtggggaatctaacaaacagacttgtcaactgcccctttggagctcacagtccatggaatctgacttggcgaagaaagcccaagacaaagccttgagattttcctctattaaggactgggtaaatgtaacaaagaggaagaaggtgaagatgttcatagctaagcaagaggaggcaggaggagatgagattcagagaagaagcagagatgagtcttaggtcagagaaggatggcctctccattgatacaaaggaaccacctagttattcaacaaatagaaacttgcactcagtctttatgtgaaactaggctaggtcctaacgatttagttatcaaaaagacttatcaataggtattccaggaagccaactctaagttggaggtcagcatgcrggaggtttttttaaagggatttattaagatcaatagcccgataaaaggagaggataaaagcaggatcaagcagaagaaagggtcaaactgcaatgcaagtccaaggacagcttcagcaaaccccacagggagctctggagctaggatgttccttagagttctcccc

SEQ ID NO: 292877 - DNA, 592 bp, Homo sapiens
aatgcctaccaagtggcaagcactgtgataggtgtggggaatctaacaaacagacttgtcaactgcccctttggagctcacagtccatggaatctgacttggcgaagaaagcccaagacaaagccttgagattttcctctattaaggactgggtaaatgtaacaaagaggaagaaggtgaagatgttcatagctaagcaagaggaggcaggaggagatgagattcagagaagaagcagagatgagtcttaggtcagagaaggatggcctctccattgatacaaaggaaccacctagttattcaacaaatagaaacttgcactcagtctttatgtgaaactaggctaggtcctaacgatttagttatcaaaaagacttatcaataggtattccaggaagccaactctaagttggaggtcagcatgcgggaggtttttttaaagggatttattaagatcaatagcccgakaaaaggagaggataaaagcaggatcaagcagaagaaagggtcaaactgcaatgcaagtccaaggacagcttcagcaaaccccacagggagctctggagctaggatgttccttagagttctcccc

SEQ ID NO: 292878 - DNA, 633 bp, Homo sapiens
actcgttacctaaagcttaaagggacttttgggagggcatagaccagatcaggaaagtgacaagaaggaccaagtaccaagctcaaaaatgtgtagaaatagcaaatagaggtttgacatccagaacctcaaccaagatcctgctatagaagcagtctggattgagtatctcttctgaccctaggaaacactgggtgccaccacctcaaaaaatacatattttgttgaatgaaaatttacatttttcacatttctttgttaagaaaaagaaagcaaacctagtaggcacatggaagatttggaagaaccaagcctagctagtgttttgaggaggaaaaagtacatgttaagcctcctaggtggcctgtttttctctttcttagcacagtctaccatttccacttcccagcacccttcttccrtcatctcttccgctttactttcatttcttctttcactttaaatgcaaatgattgacacaactaaagtgttattctcaaaggaaaaagtgttttcataaataatagcaacaaagatgaaaggtataacaaataattatgatagccatcgtcatgttaatctggcacattatttttggctttgcaaaagaaaattacctacactgtctcattt

SEQ ID NO: 292879 - DNA, 590 bp, Homo sapiens
acctgctgccttcctagttggaagggaatgttggtgttttgctagcagtgccccaactccagacttcaagggaagccctgttctgttcattcttggtccctagggtggtcttaacagctcagacttcctttctcaaccctttcctggctcctaagtgattaacctattccctcccttccagatgctatgagttaaccttcctcttttatgggtttacctgaacaaacataacgctctctcacatctgccatttaaataagaggagatatattacttacatgttgcaatgaaaatgttataagcatcaggaagaaatgtgtaacagcttgtggctgccttagctgtatgttggggtttaccaagcaacctctttaattgccattgctgcaatattcacagatctggcatgtagttttaaaaacacacctaaataaataaatyagagaactgctctgatggggacaaggtctacagctctgtcatttctgattaacaagcttctttgtttctcacagttttatagctgctgcggaattggaaaggaggcccttgagatggccatgggccacttattccatgatcagtccaag

SEQ ID NO: 292880 - DNA, 511 bp, Homo sapiens
tggtgtcaaacactgctgagaactcaagaaaatatgaacagaaaaattctcattggattaagtgtcatgaaggtcacttgtgacccaagagsgctatgttggaggagtgatagggcagaagccagttaaaggtggactgaggagtgggcaaaggatgagggaatgaagaccacaagagcagacacattttttgagaggtttggctctaaacattggaaaggattagaagaatattggaaaaagaatggttaggagaagttgtaaaaggagccaggtattgtgtaaagggaattttctggagattaaagagagttcagtgtatttaactatttatggaaaaatctgcttgaggagatgcattgatagtgtaagatccctttgcagacagaagaatgaagaagctaaaccacaggagaagagttggccttaggaggagggacaccctgatgatgtgtcctacaggtaaacacttcagaaagcatcagaagttccaatccaatggcttcaattg

SEQ ID NO: 292881 - DNA, 522 bp, Homo sapiens
aagtgtggggggagatggattttggaagacctagccattggcaaagaccctgggaagcayaaatacaaagttaatttatattatattgtgttaaataaggtaatattgtgcctttttcctccccatgaaaagcatttacaacaccttgttcttatgcattcatccatgcctctgacgtttatcaagttcttggcagacactgagtgacatataacagaggctgagtcaaatagtttataattcagcctgggaggaaacagcagcaaacaactaactataaaataatgagataaacaatgtctcttacttgaatagattggcatgggggcacaaagatggatgggagcaaataattttgactttggaacaaactgttggtgaaggttgcatgaagagttctacattggaattgagtagaccaagatattcagagatcagaggtggagctgggggaagttcagaacatttcgactcaaaatcaaaaggttttcatcactgtactagacctgaggaattattcaa

SEQ ID NO: 292882 - DNA, 522 bp, Homo sapiens
aagtgtggggggagatggattttggaagacctagccattggcaaagaccctgggaagcataaatacaaagttaatttatattatattgtgttaaataaggtaatattgtgcctttttcctccccatgaaaagcatttacaacaccttgttcttatgcattcatccatgcctctgacgtttatcaagttcttggcagacactgagtgacatataacagaggctgagtcaaatagtttataattcagcctgggaggaaacagyagcaaacaactaactataaaataatgagataaacaatgtctcttacttgaatagattggcatgggggcacaaagatggatgggagcaaataattttgactttggaacaaactgttggtgaaggttgcatgaagagttctacattggaattgagtagaccaagatattcagagatcagaggtggagctgggggaagttcagaacatttcgactcaaaatcaaaaggttttcatcactgtactagacctgaggaattattcaa

SEQ ID NO: 292883 - DNA, 549 bp, Homo sapiens
acagcagagcctagacttgaacccatgtctgatttcaaagtccagaatctttcctcatgttgcagattcaagctgtttatgggaaggggacatcacagagactggattcatttgacaaagtgggtagctgagttttagcacaatggggaaataggacaaaaaagcttcaggtctcctgctggggtgtttccatggcccagagagggtgtcatcagcacacagaaaagaggccattctcatttcaggaagacaagcggtaagatggggtttctggagcaccattttgtcttcatctcagcctaatgattttcacccataatgacattaactatctcaaagggtgaaaagagaatcaggttggtcagccactcaactaccactaggtggaaattaaatttgtgccaggcgctatacaaagttctctgaagataataatgaamaagaaaaggcccaccacttttaagacgagggagaaaagtatatcaaagtgcaacactagttggagttattactgagatgacaaagccataagggagaaaagagccaaaa

SEQ ID NO: 292884 - DNA, 488 bp, Homo sapiens
tcaaaatcccagtaggcacttttctaaaagttaattagggttctagacttcatatggaaatgcaaasgatccacaataaagaaaattaccaaaaaagaacaaagttgaagagctaatactacctgacttttaaaatgtttaaagttatagtaattaaaacagtgtggtgttggtataaaataagtcaaatagatcaataaaacagaataaagggcctaaaaataaacccacacctacctgcacaactgatttatgacaaaggtaaaaaaagatacatggaaaaatatagccttttttaaaaagggtgctgaaaaaatggatattcatatgcgaaaaagagagtttatatgcataccttgtaccacacacaaaattaacacaaaaatgaatcataaacctaaaggtaaaacctaaaagtttaaaggatctagaataaaacaaaggagaaaaattttatgaccccaagctaagcagatttcttagacact

SEQ ID NO: 292885 - DNA, 513 bp, Homo sapiens
tgctggtctgcatctgtaatcccagctactactcaggaagctgaggcagaaaaattgcttgaacccaggagacagaggttgcagtgagctagtgagytgagatggtgccactgtactccagcctgggtgacagagccagactccacctccaaaaagaaaaaaaaaaaaaaaaaagactgctagcaaactacagccattacccacgtgtgagctgaccattcttcctgctaatgcctcttttcctggcatgattatttgtgcttgctctcaatctcaaaagtctcccagtttgcaaaataaatttaaagggtcaccctagtcacgtatcttctctcataaaaaggaagacaactgttaacacttcctctcctcccttcccctccactatgtgactgaaaacagcagttatgtccaggtttttcttccactttcaggcagaaagactagaaaaggaagcagaaatagcataaaccataaaatagttacttaatacctgcaaattcatcccaaaac

SEQ ID NO: 292886 - DNA, 374 bp, Homo sapiens
accaactctttttgttgtgaaaacccagcaagatatgcaaatgcagagggcaggcatggctgcagggaagttggaagcccaccgctggggcaattattcatcttgggggaaactcctttgaaatggtgcatttgtggccaggygcggtggctcaagttgggaggctgaggcaggtggataaccagaggtcaggagttccagaccagcctggccaacatggtgaaaccccgtctctactaaaaatacaaaaattagccaggcatggtcgtgggcccctgtaatcctggctacttgggaggctgaggcaggagaattgcttgaacctgtgaggaggaggttgcagtgagctgagccagtaccatcgcactccaccc

SEQ ID NO: 292887 - DNA, 374 bp, Homo sapiens
accaactctttttgttgtgaaaacccagcaagatatgcaaatgcagagggcaggcatggctgcagggaagttggaagcccaccgctggggcaattattcatcttgggggaaactcctttgaaatggtgcatttgtggccaggcgcggtggctcaagttgggaggctgaggcaggtggataaccagaggtcaggagttccagaccagcctggccaacatggtgaaaccccgtctctactaaaaatacaaaaattagccaggcatggtcgtgggcccctgtaatcctggctacttgggaggstgaggcaggagaattgcttgaacctgtgaggaggaggttgcagtgagctgagccagtaccatcgcactccaccc

SEQ ID NO: 292888 - DNA, 564 bp, Homo sapiens
ccactctcatgacctaatcactttccaaagtcccccacctcctaataccatcaacttagggtttaagatttcaacgtaagagtttttgggggacaaaaacattcagaccatatcaggggttattcctactcataccccttcatttctagtcctatgtattttaactactcaggacactaaccacataatgtctgttgattcaatgtttatatcttatcttgaaggactacacctcaactgggtgacattcccaagctggaacaatagctgtgtctttaacaggttattccaatgttctatcacactggcagccttctgggtggagtggtaaatgatagcaccagtggatcctgtgaacatgtgcccattgttgcattgttataaagtgggtcccttagtccaagtagatgttatataggacctcttactggtaagtcacatactctatgaaccctccaataatcatgttgatataggcagtataggcaaagaaggcaaatgttacytggactacacatccgtcccagtaaagatgaatcactgcttctctagtgtgtaaggaaa

SEQ ID NO: 292889 - DNA, 553 bp, Homo sapiens
agctcagactgccattacagcacaggatctccgggtgattctggaaattgaaggaaggaaggtagatctctttctgaatactggagctagtctctctcttctcctcttgaatctaggcctcccctcttcccayagcgcggctgtaagtggtgtctcaggaaaaactctaatccaatatttttctcaaccccttagctgcagatgaggggggtacctattatttacacatgtctttttaatcatgcctgaaagtcccactcctttatcaggtagagatattctagctcgcatgggggccagcatccgtatagccccaggacaaactctttgtctctccctgatggaagctaatattaatcaagaagtgtgggcaactcaaggaagaataggttgagctataacctctaggccagtccagatccatcttcttttcctaaccagagacaatatcccctaaggccagaggctaggaaagggctagaagccattattaataacctaaagatgcaggacctcctcaaaccctgtaatagcccatgcaacaccccaacgt

SEQ ID NO: 292890 - DNA, 590 bp, Homo sapiens
aactctttgtctctccctgatggaagctaatattaatcaagaagtgtgggcaactcaaggaagaataggttgagctataacctctaggccagtccagatccatcttcttttcctaaccagagacaatatcccctaaggccagaggctaggaaagggctagaagccattattaataacctaaagatgcaggacctcctcaaaccctgtaatagcccatgcaacaccccaacgttaggagtacagaaacccaatgggggatggagactagttcaggacctctgctttattaatgaagctgtagttccaatccatccagtggtccctaatccctatacctgttaactgaaatacctgagggaactaaatggtttacagtgctagatttaaaggatgtctttttctgcataccattatatcctgattttcaatayctgtttgccttcaaaaatccctccggccaaactgccaagttaacatggatggtgctgcctcaggcagtttgagatagtcctcatctgtttggacaagcactgtcgaaagatctctctgaattttcccactctcaagttatggtcttgcagtacatttat

SEQ ID NO: 292891 - DNA, 590 bp, Homo sapiens
aactctttgtctctccctgatggaagctaatattaatcaagaagtgtgggcaactcaaggaagaataggttgagctataacctctaggccagtccagatccatcttcttttcctaaccagagacaatatcccctaaggccagaggctaggaaagggctagaagccattattaataacctaaagatgcaggacctcctcaaaccctgtaatagcccatgcaacaccccaacgttaggagtacagaaacccaatgggggatggagactagttcaggacctctgctttattaatgaagctgtagttccaatccatccagtggtccctaatccctatacctgttaactgaaatacctgagggaactaaatggtttacagtgctagatttaaaggatgtctttttctgcataccattatatcctgattttcaatatctgtttgccttcaaaaatccctccggccaaactgccaagttaacatggatggtgctgcctcaggcagtttgagatagtcctcatctgtttggacaagcactgtcgaaagatctctctgarttttcccactctcaagttatggtcttgcagtacatttat

SEQ ID NO: 292892 - DNA, 545 bp, Homo sapiens
aaatggcccatgaagatgacttctgatcaccaggctccttgtcaattcatctgcattaccactttacaagtttcctttgaaaatgcttaagtctactaaagctactgaaaagatggagaatttctcattttcccagttagctatggagtagtccccattatctgtggcttcactttccacaaytgaagttactcatggtctgcagtctggaaataagtggaaaaatccagaaataaaaaattcatacgttttaaattgcttgccattctaagtagcgagatgaaatcttctgtcattcctctttgtcccacccaggactgaatcatccctttgtccagcatttccactctgtagacactacacacccttggtcacttaggagccatctctgtaatcagatcaactgttgaggtattacagtgcttatattcaagtaacccttattttacataataatggctccaaagagcaagattagtgatgccggcaattcagatataccaaagaaaagttgtaaagtgcttcccttaagtaaaaaggtgaca

SEQ ID NO: 292893 - DNA, 593 bp, Homo sapiens
agaaggtgaaactacctctttacagatgatactagaaaatccaaacaatcaatgagaaaacaaacacagtaaaataattcaaataagatagcagaatataaaattaacatacaaaagtcaaaagccaggtgtagtggtgtgtatctgtagtcccaaactactcgttagactgaggtaggaggatctcttgatcgcaagagtttgagtctacctgggtgagatagcaagaccccgtctcttaaaaaattaaggaaacccttaaacttctcctggagggcccacaagtagacttgaacaaatggatagttataatttgttctttgataggacaactcattatcataaaaatatcagctatcttcaaattaataaatttaattcaatactaataaaagtgacaaagttttactttgagcttgatgatttgattctaatatccacatataaaataaacstacaaaaataggaagacctgacagtagaagagtaatggggaaattgctttttccaatatgcacactctagagcctctgtaatgaaatagtgggtgctggcatacgaattggtcatcagagaaaaaaaatcaggacata

SEQ ID NO: 292894 - DNA, 652 bp, Homo sapiens
tttttgttgttgttgtcatctaagtgatttttggaagcccccaagtgaaaaaacaagtgcaccactctgttgagaaatgaaagataaacatagcataattggctaagactaggatcatgacgtgatgtgtgcctgtgtcgtattgctgacgtttatgtggttgaagaattacatctaagtaatatttgaatatatgcgatttttgacttcataataattgacgcagtgtgggtagartctatgtaatgttaccgttggttaaatgggtgtaggttttgccccccataatttaccctgcaggtacaaacataaccttttattttttactcctcggattcgtagctctttttttctcactccagagataaagtagcatatctttcctgctgtccaaggaagacgagtgttcctgtgtccctgcgtcttatgcatattcataacacactgaaccctggtggttgtgagcgatggatggagcttcagggattgtattataggcagtctccaaaccgtgtgtttgccaatatttctttgttcatctctatttcatcaaatctgtgaactagaaacaagattgacagcatggaattcaattttccctttccgtgttttctggcactcccttggataattagagccatgtgatgaagtg

SEQ ID NO: 292895 - DNA, 652 bp, Homo sapiens
tttttgttgttgttgtcatctaagtgatttttggaagcccccaagtgaaaaaacaagtgcaccactctgttgagaaatgaaagataaacatagcataattggctaagactaggatcatgacgtgatgtgtgcctgtgtcgtattgctgacgtttatgtggttgaagaattacatctaagtaatatttgaatatatgcgatttttgacttcataataattgacgcagtgtgggtagaatctatgtaatgttaccgttggttaaatgggtgtaggttttgccccccataatttaccctgcaggtacaaacataaccttttattttttactcctcggattcgtrgctctttttttctcactccagagataaagtagcatatctttcctgctgtccaaggaagacgagtgttcctgtgtccctgcgtcttatgcatattcataacacactgaaccctggtggttgtgagcgatggatggagcttcagggattgtattataggcagtctccaaaccgtgtgtttgccaatatttctttgttcatctctatttcatcaaatctgtgaactagaaacaagattgacagcatggaattcaattttccctttccgtgttttctggcactcccttggataattagagccatgtgatgaagtg

SEQ ID NO: 292896 - DNA, 582 bp, Homo sapiens
aagatttgaaacaatgtgcttacccaagctgtatcttgaaatacagtttgaatcaacttggaagaaaacctaaactaaattgggttttagtaaaataatcctgcttcgtaaatattacaaagaaaatgttatcagtctttttgggtattgttggcggagtccttagatcagagatttttgttttcrttagggccttccttctttaatgttttaaaaacattatttcagttgtgcaggtagtttgcattttaaatcatctcacacaacttgctggaaactgaaatggatgctgaggacatggtgactttttaagggaaagatgaataacatccgctgtgcgagagcccttgttccagagcacaccacatgaacaccagggcttaaactcaccaggagcccactgagagcccatgtatttagatggaaacaaaaatggacataaaaattaagtttgaaacaggtagtctaaaacatcaccgggagttcactaatgtcaggacagaataaacattgactactcaggacaagttttcagaagttccccaagccccttctcacttggttgggttctgctgacgctgg

SEQ ID NO: 292897 - DNA, 577 bp, Homo sapiens
tatgatcattattatgcttatgatgataggcacacgattataaacgtaatcacaggagtggcacatcatcatagtcacgagttctacaggatgtgggatctggggtgggtaagtgcatttttaaaattccacccaccaccagggtcatctcagaatgcctccaagtgcccctgcccctgtctgaaccctgctggaacaagcccaagcttgtactgttatttgctggcctgatgaacatcctatttcagtagtgatggctaatttyatttcatattaagggatttgtggaaagaaattttaactaaagtatgatcattgtatcttgatgccccgaagggtgtgagagattcttaaagatgatagtaaacgtattagaaaaggagcaattactgttctagctttgtagaactatttatatccagactcttaatgtgtattataggtgagacaaagacataatatggattagttcattgcttattttattgtgagaaggagtctatggaactgggtcactggaatttttacaaatataattgagattatggatcataagttagaaggttgattgtatgaa

SEQ ID NO: 292898 - DNA, 434 bp, Homo sapiens
tttctatcacttatgttatagaaaggatgaaatcaaaggaataataatagtggtcaagaaaatcacctctaacttttattgaactgggttcaaatccttagccttttgttagctgatgaccttgggtaagttacccaaattctctaaacattccatcttctctgctgtataattttaataagtggtacttcttagagttgttgcaagggttaaataagataatggaaataagagkgtatcagttcatcagtcaatggcaatacgtctaaccctttaagccaacccttttgctaagaacaatcagaaaacaggaccatatatctggccagctatttgaagtcatgagaggacttctaaagaggagttccatgatccagaaggtccagtgcagtgattcctgcatttggggccacttttttcctcaagactgagtg

SEQ ID NO: 292899 - DNA, 530 bp, Homo sapiens
gacggggttttaccatgttggctgggctggtcttgaactcctgaccccgtgatccacctgcctcggcctcccaaagtgctgggattacaggcatgagccacagtgcccggccaactctggaatttttaaacggaaacttttttgtctttaaatgttgccagtgaatttgaaacccgtatgtaatcttccgtctacctgtttgtttttcctctgctccatgtaataaggtgtagtttgttcccatagattagacagactccagggcttgtattcaaccagtgtgcatctggctactaaagtgttaaaatacctgtggactgrctggtaagtagccactgcctagtgctagtggtcctggggaatgttgtgtgttcagtgctggggcctgtgccagcccctggtctcctggcctgtctatggcagtttcctgtactagccctgtcttctgtacctttggaccaatgtgggcccaagtcacgatgagaatctggcattctcagcataggggcaatgagacacgctgaaaacca

SEQ ID NO: 292900 - DNA, 579 bp, Homo sapiens
aagactttatggtccttaattttcccccaagttttgttcttactggtaataatcaatatcagtttagtactatagcaatggagaagtattcttaggatgcaatggtataaaatagtatcttatccttgaaaatagacgtgctcaattgaaataagcttggttggtattkcaagtattaatttggagtactttcagacattttaagaggtatcgttttagggccatagaatagtagagttaggagggcacctgaagatctaatttaatcctttagtttgcagctaaggaaactgggctctaagggtacatgactgtcataacaaggccatctaagttatctgcaatagtgctgggataaacatgcaggatttctgactcctggaatagcttttctttgatcctaccatgtatctttatgtacagattctatgtggattctctgaaactcatgtcttatcagtatcttttaggattaagggagaggggaaagataaccatggcacgaaataatataacagacccttaaaacttgataccatcaattttgagttacaagaggaaataaatggggaaagtaag

SEQ ID NO: 292901 - DNA, 523 bp, Homo sapiens
gcatgatgtctcatagagctaggtggctaaggcactgctaggtgcacatgaatagcacaaagaagccatgtcaggttttagacataccctgttctgtgcttctgtgcttcggttcaacctcaaactgacaagatccacccagcacctctgygccactgctgctctgatggcatcatttcatgcctcattcatacactgtgcagtggcacttaatgttcactcttcaaagagctagaccatccagacccaatttctccatcataagccagtgcactttgaacaagtattgctgtcaaagaaaaaaaaaaaaaactttccaagtctcagttttcaacattcactggtgaagttggcaagtagatattttaaattccagactgattacacagctctcctgtgctgctttgtagagttttattttcacacactgccatgacaatccatcatactctgtcccctagggaagagaaagagtccatctttttataaatagctgcaggagattcctggagcagctcatgcc

SEQ ID NO: 292902 - DNA, 417 bp, Homo sapiens
catttttcccacacaactctaatgaagagcttcctccaaagagggtgttggctaagataaaagggaaataattttgccctggaggagggaagtgaataacttgcaaaatccctaggctgccctgacccagggagtgtgaggttaaggacagacaccaccttccctgtgtaccatctgccttgcggagctttcttttctggayggaaacattttttcttctttcaaagctcaaatagagaggtctgtagcctcattcccttccagcttccgggagtcttactccaagcggagaccagcagtcagactaagacagcacacaggaacacgacaggctgccttggatctgcacatcccaagacttctgagaatcacatggtgcaaacgcaactccagttttacaatctgaccccaattatc

SEQ ID NO: 292903 - DNA, 581 bp, Homo sapiens
ttagccaacaggcagtaggtggtgggctaggcaatcatgttgggtgaggggtgtggtgtctcactgtcctgatgctgtgatctggaaagtttcagttccttgatactatctgggaggactgatggttggtttcctgaaaaaggaactcagataagataaatgtaactttctcaagatttaagactgggaggactgatgattggtttcctgaaaaaggaactcagataagataaatgtaactttctcaagatttaagactgggagggtaaatttctgtacttatttaaaagaaaccataaacatcagttttctgggacaattccgtcagtttcaaaacagaagtataaaatgtggatatttcgctaatgactaagacaagtgtggcagacatgagaaaagacaaaagaggacaggtttgagggacattctagaggaggaaaatccaggaactgctaactttctggatgaagggaaggaagaagcagctggggccactccccartttctggcttaagcaactattcagatggatggtggtgctcaacacatataagagcccaactgacttcatttgctattta

SEQ ID NO: 292904 - DNA, 572 bp, Homo sapiens
taacacctgaaactgtttggcatcattatcagtcaagtaactgtgcttaatttcctctcagctgggcagagttggtccctagtattgtttactgaaaatctgcttcaatacaaaacaattactgtgcacctgaaacatggcctggagtggcacactcccagcatcctcccaggccagccctaaaataagatcatcagtccctgcttttgacttcctcttaatacctcccacctaccccctgccaaatccctagttctctcaagaagtctgctgattttcttggaacctccaagtaaaataaggtttacaacccttttgtaaactgctatgcaaattgtttacattggatatagtgggaaaaatgttgcttgaaggggataaataaaaacaaaaatgyttagacaaaaacagcagggccttagtctgaagactgtattcctgatatactgactaagaactggaaagatcaggagaggacaatgtgttgggtttccagaagacagcctagaactgttggaggtggaattaaatctatataattgcccctagtgttgggacaaagtactgtgaag

SEQ ID NO: 292905 - DNA, 523 bp, Homo sapiens
tcttaggtgatggctctcaccccaaaaccttaagaatacaagtagcaatcttgaaggatcttgaaatcaatttagtggatctagaacctccttttagaacagaatgataaatatttgtatatctcagtagagataaatttggtttttaaagtgtacaratgatttacgtttactgggtcaagatgtcatgactatgagtcacaataaaaaaaacaatttttaatatactgctttaaatggtagactctatttcttgtcaatttgttttccgttgttttgtctccaggcctgaagcttcagtaggatgtagaatggtcacataaggtttcctttggggtgaaaatgggccattttctttatagcttatgacttaatgatttcatactactcttggatcaactgaatcatcctcagctgttccaaagaaataaaaaagataaatatcctccattatgcaagtgacaatattttattttcataaatcaagaatgacctttatcaacaactagccttgctgtctaat

SEQ ID NO: 292906 - DNA, 650 bp, Homo sapiens
tacaggttccccttagactgtgtggcagtgctctcacacagtagtgttggttgataacttcaagctaaataaacagtcttaggtgatggctctcaccccaaaaccttaagaatacaagtagcaatcttgaaggatcttgaaatcaatttagtggatctagaacctccttttagaacagaatgataaatatttgtatatctcagtagagataaatttggtttttaaagtgtacagatgatttacgtktactgggtcaagatgtcatgactatgagtcacaataaaaaaaacaatttttaatatactgctttaaatggtagactctatttcttgtcaatttgttttccgttgttttgtctccaggcctgaagcttcagtaggatgtagaatggtcacataaggtttcctttggggtgaaaatgggccattttctttatagcttatgacttaatgatttcatactactcttggatcaactgaatcatcctcagctgttccaaagaaataaaaaagataaatatcctccattatgcaagtgacaatattttattttcataaatcaagaatgacctttatcaacaactagccttgctgtctaataattgccaggaaaaaaaaagaaagagaattcaacttttgtaagtcaaaagc

SEQ ID NO: 292907 - DNA, 650 bp, Homo sapiens
tacaggttccccttagactgtgtggcagtgctctcacacagtagtgttggttgataacttcaagctaaataaacagtcttaggtgatggctctcaccccaaaaccttaagaatacaagtagcaatcttgaaggatcttgaaatcaatttagtggatctagaacctccttttagaacagaatgataaatatttgtatatctcagtagagataaatttggtttttaaagtgtacagatgatttacgtttactgggtcaagatgtcatgactatgagtcacaataaaaaaaacaatttttaatatactgctttaaatggtagactctatttcttgtcaatttgttttccgttgttttgtctccaggcctgaagcttcagtaggatgtagaatggtcacataaggtttcctttggggtgaaaatgggccattttctttatagcttatgacttaatgatttcatactactcttggatcaactgaatcatcctyagctgttccaaagaaataaaaaagataaatatcctccattatgcaagtgacaatattttattttcataaatcaagaatgacctttatcaacaactagccttgctgtctaataattgccaggaaaaaaaaagaaagagaattcaacttttgtaagtcaaaagc

SEQ ID NO: 292908 - DNA, 524 bp, Homo sapiens
tgtgcagggaaatgtatcttcactgggaaatatgaaattcatagttgatcccattttccagtagttcartaatcattcataagtccggaaagaaccatatcatactttatttgtttcatttcaagtgataagaacagctttgtgtaatgggaaaattataacctggcaccagtgttgtattagtcttctgggtttgctctcagccacacgtgcatgcttttgctttatatgtggttctattttagtgcaatagtggttttgtaaaccgggtctgtagccagccttaagttgttttgtggatgcttatcactatttctcactgttttaagatcgcactgtaggactttcatctgagtgctatctgtttccactgggggaccttctctgtcaaaattgaggatttcattctttttgaatgttattagtgctgttgccatttgagcttattgctagaatactgaagctgttttctacatcaaaattagggtttgcaaccgagagacaatacttctcgtaaatgtttg

SEQ ID NO: 292909 - DNA, 535 bp, Homo sapiens
gatttgtctaaaatcaccaagctaacagtggaagaattggggatatgcgtgtgtttgactcagaacctatacattttgctattacctaaagctgtcctgaaaactgaaagcttagttgttctttctttacttggttattttaattctgatgtcatttactttaactcatcttattttagctcaataaaccatctttgttattttgggggggtcccacatctgttgaatgaaggctaggggtggatctgaaaattggtgtgcagggaaatgtatcttcactgggaaatatgaaattcatagttgatcccattttccagtagttcaataatcattcataagyccggaaagaaccatatcatactttatttgtttcatttcaagtgataagaacagctttgtgtaatgggaaaattataacctggcaccagtgttgtattagtcttctgggtttgctctcagccacacgtgcatgcttttgctttatatgtggttctattttagtgcaatagtggttttgtaaaccgggtctgtagcc

SEQ ID NO: 292910 - DNA, 665 bp, Homo sapiens
actgttgcacttcctctggggcttcggatcacgggcactgtaccctaaaccctgctgcagggccagtacagagttcgctcttgctcctccccaaaagcgctcgccccagctcctgcacctgttcacatgcactccccctcctgtgaggtttggagcagtcagtgagtagaattcgcccctgccagcaccagcacgagtgcactccatttcccgcctgtgaaggggtcagggaaataatctgcttctgtggtacttgtggatttgagttacatttctctaacgactaatgatgagcatctttttttgttcatggtggtcatttacatatcttctttcaaaaacgttttcagatcttttcagatcctttgctyatttttaattgggtcatttcttgttgagttttaagatttctttatagattctggttaaaagtcgcttatcagataatatgatttacaaatacattctcctatcctgtgcgttgttaataatatcattttatatttaattttttaagctctcatagaaggattactaatcttttacttgcacacttctggtacccagaaggtcttcagtagaggtttatgaataaatgagtggtgtatctttacctcccttctcaactactaaccaaactaaatatgcttagttcctcagttgag

SEQ ID NO: 292911 - DNA, 447 bp, Homo sapiens
cattaaagaaactgaattccaaaagggtgagtgctcaattatcgtaatgtagacattgaaaagaattgtggccacattttgtatctcagtctgtgggaggcctgaacatccttgctacatagcggggaaatattaacttctctagccatttgctcacagtartatattcttggacaaattgtctaacttctgagaccttctatttgctcatccccagaatgagggaattgaacaaggtggttttatggttttttccagagatataatcttttaggtcatgattttgaataccagctacctaatgcattgggtggatagatgctagatttgaagatagccttgtcattcaagtttagaaagcacttcaataacctgagtctacacatgcggcagaaatctccaatttgtacatttgaatcaattcaagtatgagcaagtctaatatat

SEQ ID NO: 292912 - DNA, 478 bp, Homo sapiens
tggggagggagagcatcagcataaatagctaatgcatgtggggcttaatacctaggtgatgggttgataggtgcagcaaaccaccacggcacgtgtttacctatgtaacaaacctgcatgtcctgcgcttgtatcctggaacttaaaatacaatacaataaaatttttttaaaaaaagctcaataaacacttttaagtaaacaatgagtgctctcaaactttccgttctgctgatcttttttccagctttatggaagtatggccgataaattaaaaattgtattacagttttaaaaataaataaattattttataccttttatttttttaaccccattaattctattatgactgcctcagtgctcaggaatgggaacaaaatcctattataccatcacaaatgataatgataaagaaaagagggatgtagrtacctttaaaaataagcacacctatagagagaattccaaaataaaat

SEQ ID NO: 292913 - DNA, 547 bp, Homo sapiens
ttctccaatgcctgatttcctgctttagttcccacttagatgccccaggtcccttaggaataggtccttgtgcccctgagtccatttggagatttgcccactcaccagtcctgtggcttcctgctgcctagtgacagcctccttgggccacatgccacatgcccactcacctgcctgcctgcatctgcacctaaggtcgactgccagacagctctccttcccacagaatgggaagaacagatggaatagtcttgacaaagtggtgtaaagagagaaaatgccagctacactgcaataggaaatgagagttaaactcctttatgagaaaagggagttgctaaaaatggaggccatggaaagggggaggctgccctccttccatcctgatggttgctgtcagtgggactrcagaacacagccattgagggcttgtgtcctgggatgagacctgacttacagcccagcgcaccactcactaacagctaagagaggacaaacacatcacccaccaggttcaggtccccatctgtaaagtaggagtaatagc

SEQ ID NO: 292914 - DNA, 535 bp, Homo sapiens
aaccaccatgcctggcccacttcagcaacatctaaatgaataaacacaaatccaatcttctgcctctttcctgtacttatttgatttcaaataataatttccrttttcaaacgctttaaaaatttttggtggtcaatggattatttgaaactcattagatacatgagcaccctctgaaacacacatagaaaaatatatataccctcatgtatccatgcaacttgaagaggtttcccaaaccttaagggccctgggttccagagtaagtttatattgtaatttacaatttaaaaagggcattttgtatcttgcttaacacacaactctgtaagtaaagcaatattaacttcatcttacatatgaagaaattggaacttagaagcgtttaccattcatctttttccaggaaggtaagagaaaacactgaggctgctttttttcccagagtgctgatagcctcccatggcaagggagaaggaaatcaaagccaatctccatccaaaatagaatctcgaaggagggaccccttcactcc

SEQ ID NO: 292915 - DNA, 535 bp, Homo sapiens
aaccaccatgcctggcccacttcagcaacatctaaatgaataaacacaaatccaatcttctgcctctttcctgtacttatttgatttcaaataataatttccgttttcaaacgctttaaaaatttttggtggtcaatggattatttgaaactcattagatacatgagcaccctctgaaacacacatagaaaaatatatataccctcatgtatccatgcaacttgaagaggtttcccaaaccttaagggccctgggttccagagtaagtttatattgtaatttacaatttaaaaagggcattttgtatcttgcttaacacacaactctgtaagtaaagcaatattaacttcatcttacatatgaagaaattggaacttagaagcgtttaccattcatctttttccaggaaggtaagagaaaacactgaggctgctttttttcccagagtgctgatagcctcccatggcaagggagaaggaaatcaaagccaatctccatccmaaatagaatctcgaaggagggaccccttcactcc

SEQ ID NO: 292916 - DNA, 586 bp, Homo sapiens
caactagaactttcagcagaaagtctcactatggaaggccttacatttccaggaaggtacttgtgttggcagaaagaggggctagaagaataaataagaattcagacctcaacattcattgagggtgtgttacatgtcctgaaggctctcatacttttaccttcacaacagtctcatgagagttcgtttgttcctattttatagatagaaaaagtgcttttttttttttttttgagacagtgtctcactctgtcacccaggctggagtgcaatggcatgatcrtagctcactgcagcctcaacctcctggactcaagcaatcctcccacttcagcctccagagtagctgagacttctggcatgcaccatcatgctggctaatttttaaattttttgtacagatgagatcccactatgttgcccaggctggtcttgaactgggctcaagcgatcctcccacctcgaactcccaaagtgctactactgcaggcatgagccactgtgcctggcgaaaaattgcttttagcagaggctgagggacttgcccaaggtctcataactagtagatggtaaaatggatatgtta

SEQ ID NO: 292917 - DNA, 1167 bp, Homo sapiens
ggttgtatttcccttacaactagtttttcagttttcaaacacacattttataatatgtacagtatgggaacaacttaaagatgtttgagatgaatatttgtgggaactcactttttttaatgcttcatagggaagattttcctgtatcccactaggaaaggacataacartgatttagggcttagtcctaggaacttaaaatcatttatcctgaaaacaatgcatgctatagagtagttgtccttaccttgcaggtggggaggtcagttcagctgatcatactactgtttagaagactagctagaattcaagcccaggtttgtgttcctttccctctccatacctgtttacctctctaaattgccagttttcctgcattcttcaggagaaatcttgctcctacctgggtcattctcagcatacagctttctaaggaaatttgaagtgttctaatctcccatcaataagtgttaggttaaatgacttaaacattttctggtggttttgatatataggtgatataatgaggaagtagaaaaagcataatctggataaatgggagcatatattatatataatgtatgwtcctgcagtaccttttctgtctctatcttggcaaatctcatgctatcgtagtacttggtttgtctctttcccacttaaactagagctctggggctgtcttacttgttgcatctcaagtattttgtgtggtgcccagtatttatttgaagaatcaaagaaatgcttaagaatattttctgaagctgggtctggtggctcacgcctataatcctagcactttgggaagccaaggcttgatccaggagttcgagaccaacctgggcaacatggtgaaacccaatccatttwaaaaaaaaattaacagagcatggtggtgtgtgcctgtagtcccagctactcaggaggctaaggcaggaagatcacttgagcctgggagatcaaggctgcagtgaaccatgattgtgccactgcactccagcctgggtgagtgagcaagatcctgtctcgaaaaaaaagaatattttctgaaaatcaagcagcttcatataattgactctaacctttttatagcacattttccattattttaaaacctggtgtatgaaggaaagattgatagcattaggtagtactcttattgta

SEQ ID NO: 292918 - DNA, 478 bp, Homo sapiens
aattcgaatacatgccacagcatggatgaaccttgaagacattatgctaagtgaaataagccagttgcaaaaggacaaatattgtttgtttctacttatatgaggttcctagagtagacaaatttayagagacagaaagaatgatagttgccagaggctggagggagggagaaatgggagttattgtgtaatgggtatgaagtttcagtttgggaagatgaaaaagttctggagatggagtggtggtgactgttgaaagacaatgtgaatatacttaatacactcaacagtacacttagtggttaaagtggtaagtttaatgttatgtatattttaccacaataaagaatagtgaaagctaacgtttattgagtgcttacaatgtactaggaacagtatgctaagagatataaacacattgtgtcatttaatcctcacaacaacacttcttttgagagcaatgctactaagggcacca

SEQ ID NO: 292919 - DNA, 591 bp, Homo sapiens
gcttcctctccagtctactgtctagtatcttgtgcactgagtttttaggttttaatgaccgtagtcctgatttacatactttgcagttgatttttttttagccatcttttaattctgccttttcaatttatactttcttattttttaattagcttttttaaaaagcaccctaaatatactgatttttgttggttttaaaaatcaccttaaatatattttgttgggattattttagtgtcttaagtatrctttgttaggattttttagcatctaaatatacctatttgttggactgattaacttcatctgaagtgaatttgtgatctaatgtctgatattgttagttgcatttatttcttcatgtactttagaactttggttaaatgacatgttttgaatgaggttttaaaaacttttcactcattcagtcatttttcgcctctttctccctctctgcacactctcccctgtgtagcctcattctgcttgtctctgtctggcttccatggagcctgggtgcagaactagctttcacagtgggggcttagttacctgggcattcatggctgcttcacgcagtgcctggtcctg

SEQ ID NO: 292920 - DNA, 509 bp, Homo sapiens
gtttttattgattggacaagatcaagcagaaagctttcatttaccccaactgtctacttccyttgtcatattccttaaaagataattcacttaattattttagccctgataagaagtgtgtggtaataacattttttaaattgcctattcttaaacaattctttcacagaagaataatcaattcctgaagcccctggatcacacctcaccttcagctacagcctttgctcagcacatgactttttcttttctttttaacgtcacaggtttcaactccaaagagcactgccaaatctctctcttctctatcataatctcctcttactgctttgaatgaacatttcctcctggggcctattataaataacacaagagagcagctgggaaagagaaatgggcactttacaggtgatttggaaatgcagagaaacacaaaaattctgggcagagagagatgcaggcacagaagtgaggttaggaaatataggacagggctcactatatatggc

SEQ ID NO: 292921 - DNA, 560 bp, Homo sapiens
ctttggggatatagcttgagtctgcctcttattagctgtgkgaacttgggagtgtttcttcaccactcccagctttaattttcttatctgtaaaatgggggttaaacatgtgtatgtcagagagcatcatgaatattaaatgagataatgtatgtaaatcctctggcacagagctggcacacggaggtacttgataatctgggcatttcattccttctaccaaataaaaactccatggagttgcaggcatcagtgagctgggaagaaaggtacttttggaggagagaggctgtctgggtgctagctctctcccaagcctcattctctgctctttcccccaaatcacattgtatcaggaatctcagataagtacaggaagcacattttgccagcagtgaagattgctagtcattgtaggacacatggaccagataattgcccttgtttctccttccttgaagttgcaaatttcaaatgtaaagttctcagatccctcagtttggaatatgagtgtattttggggtgaaactcagtgtcattttttttcctatttttttcca

SEQ ID NO: 292922 - DNA, 597 bp, Homo sapiens
tatatcacttatattctccaggagctcaacattagtttattctcatgatacttaagagataagtgtcatatcaagtcatgatttgtatatgtttcaagtttgtaagtgttctccactgcttttttttttcagtagctgtttcattttttatcaccaggacttctatttaattttgtttactgctctctttatggacttggaacatataaagacttytgtttaacaaaatgtgcaacagctcaaagagacctacagggtcctttgtccacgttcctcggaattagaggtttgtaacggagatacagcagcaagggataaacaaggacgttgcttcatgaatggcagagttgtcctgagttctagctgtttctacccttgagaggttatccaggaggcttcacaaaaacatctaccaccaaactttcccaccaccattccagcccctcaagtggcgagagtgtgagcattagcttgggaatgggtgccagcatgctgccctggaagatgcctgagtgagtaacagggtgcacaccaagaagcaggacaccctgatggggcatgtgtctctggtgacagccacagggacccttcgttgcc

SEQ ID NO: 292923 - DNA, 597 bp, Homo sapiens
tatatcacttatattctccaggagctcaacattagtttattctcatgatacttaagagataagtgtcatatcaagtcatgatttgtatatgtttcaagtttgtaagtgttctccactgcttttttttttcagtagctgtttcattttttatcaccaggacttctatttaattttgtttactgctctctttatggacttggaacatataaagacttttgtttaacaaaatgtgcaacagctcaaagagacctacagggtcctttgtccacgttcctcggaattagaggtttgtaacggagatacagcagcaagggataaacaaggacgttgcttcatgaatggcagagttgtcctgagttctagctgtttctacccttgagaggttatccaggaggcttcacaaaaacatctaccaccaaactttcccaccaccattccagcccctcaagtggcgagagtgtgagcattagcttgggaatgggtgccagcatgctgccctggaagatgcctgagtgagtaacagsgtgcacaccaagaagcaggacaccctgatggggcatgtgtctctggtgacagccacagggacccttcgttgcc

SEQ ID NO: 292924 - DNA, 565 bp, Homo sapiens
aatcttttccaagtgtgaatcatatataatcaccatcttgttgccaattacaatagaatccattctcttttcatgacctstgcacacactgagattatttcaatcttggagactgtggcaaacgatggctagttagttgctcactaaactgtttgtctgttactcccagccacacacatttccttgctcccctcacaggtgagtatttaagttgtagccaatagagtctgagcagaaatgacacacattatttccaggtccggtccataaaactgtcaagcttaagttccttctccctctttctttatttactacttgaatgcagaggaggatgaggacttaaagatgatgaatccacattgtggaaggagtctcagtctctgattgatcctgaggagcaagacatccctccctacactcctgaggcctgcaatgaactgcgcttcagtccaggtgagacatatactcacattgtgttatgctattgacattaggggctgtttgttacaactgttaacaaagctcttgcactttctcctcctcttttttgaattctcttttccaa

SEQ ID NO: 292925 - DNA, 588 bp, Homo sapiens
tttacattgttcctaagaggagttcatccttgatttcattctttctcttaatggaacatcatttccccagggacattggctgaagatcctgagtcctagaatggagtgctgagctatatccaatcatactgcagtttaataagcatgtactgactacatttggcggtgctgggttataggctttttcatcgaagagctcatcgtctagtggattagaatgagaacaccacatagccagggctgcagcaaacaggtacacatgctctggcagcccagagtagggagggaggggaagacgatgaatattcatgaaggacctgctaggtgccagtttttgcactaggctttccatatatatcatctcagtggaagcttatgaccctctgaggtagatattttacagccaaggcaaggtaagctcaatggggtcaaggtcaaatgactgcataataaatgctggaatcaggattcaaagttgaatctgttatttttccagagcactacattgccccctatgctgttacaaaagagggtamacatgtgttaatcatttaaggatgaactttttttggtagttaatatgcagaa

SEQ ID NO: 292926 - DNA, 492 bp, Homo sapiens
aaatcaatatgttgaagggatatctctactcccctgtttattgcagcgttatttaccaaggtatggaagcaacctaagtgtccatcagtggatgaatctataaagaaaatgttatayattttacacacattacatgcatttacatacgttgtacacaatggaatgctatttagccttaaaaagggggaaattctgtctttttttttttttttacaacatggatgaatctggagaacattatgttaagtgaaataagccaggcatagaaagacaaatacagcatgatctcacttatatgtagaatctaatacagttgaactcatagaagtgaagagtagaacaatggttaccaggggcaaggagggcaaagggagttgttgatcgaagggtacaaagtttcagctagatcagaggaatatgttttgagatctgctgcacagcagggtgactatagtcaataataatgtattataaatttcaagataactaaga

SEQ ID NO: 292927 - DNA, 523 bp, Homo sapiens
atagtcaataataatgtattataaatttcaagataactaagagggcaaatttcaaaagtcacatcataaaaatgaaaggtaaacgaggagacacataagttaactagcttgatgtaatcatgccacattgtagacatgtatcaaaacatcacattttagcctataaatttatacaactatgatttgttaattaaaaagagataggaaactagaaatttaaatctgcatgttttcagtgtcaatgtaagggattggagttgtggaggtggtaaaattatctaggtagactgtattgtgccaaaaaaaaaaaatgagcragatgttaccaaggaccaggagattgagagggagcttccagagagagggaagcaggagagagcagatgatgaaaaccagagaagaatttcaagaaggtcaagatcaacaacagggtttccaaagagataatttggggtcaagactaaaaatgacaattgaatcaggcaactaggaggtcactggagaatttgttgagaacagttct

SEQ ID NO: 292928 - DNA, 588 bp, Homo sapiens
ttatctttggtcaaaggtttagattgcacatgttgagcagatcccttagacacatcacactgacaccattaggtcagagaagcaagaggtacaatggtcttgcccaaggtgaggtgctgttggctgacgcctgtgggagactggtggaagctttcataatatggggtgatgatgagagggtttgaagccatgcacaagaggtatctgaatacaggatgatcccaattacatgaattacattatyggacagacaaaaagtctgaaaggaaatttagcaatatgttagtggtgggttatagaattatagataatttttgcttcttttttaatatgttcttatactttgaagttttgcacaataagtatatattgtttctgtagtcacaaaatgcaaccaaaattacatttaaggagctacgccctatggtttaaggatgaaagttgatacgaagacccaggatttggatataggattcttctactggatgggaaaagggaccaaatgacctctcagatcacaggctaggattctatgaaaatcaatttggcagaaatgcccagaggagtaccaggcacaaaataggccct

SEQ ID NO: 292929 - DNA, 566 bp, Homo sapiens
agaatctctggcctctaccagttagaggggagtatgtactccttcctgcagttgtgataaccaaaaatatttctttaaaccaggtcatatgctgccacagggtatggaggaaaatcccccctggttgggaatagctgagttagatcataaaattcatggtggctactgccttgttttctctccaatcactcatgctgggggaagccagatgcggtggtgggatgacactgaagtagcctcattgagaggcccatatggcaaagaactgaagcctcctattaacagccatgggagtgtaccaccgtggaagcagatccttcagccccagtcaagccttcagatgactgcaaccccagccaacatcttgactgtaatcccatgagataycctgagccagcacctcccagctaagcctctcctgaatgccaattgttagatgataaactcctgttgttttaagctaattttgtggataatttgttaggcaacaatagataatttcagaacaagcatgatttcatgcaatttataccttagggtctttctggctgctgtgtggaaaatag

SEQ ID NO: 292930 - DNA, 552 bp, Homo sapiens
cacaaacgccctgaaacttgccctagttgtgtttgggggaagagctgtgcgcctggagcaatgtgagcaaaggatsgagtggaaggagctgaggtcagcagaaagtctgctcaggtggcgccttatgggcaaagtaagaaatttagattttattctaattgcctctttcaaccaacaccaataaggcactgggtttagaaaagcaatgttaatcataacctcatgcagccagagggaatgtccgtgttggtcacgtgtcccaggtgtacatcaggttcacactagagagtggccaaatcagtgtgcacacccaggcctgtctgcctccagagcgtgtgccttcccagcgcctctctgacttccttcctacctgatactgaagacggattgtgtattacaggggacatggttctggaggcaccatgtggcatccactacctgtgaccacataacactctgagactcagcatcttcatcccacaaaaaggcctcaggtaaagctcagcatacagctctcatctgggcattacatgggaggaaagattttatagc

SEQ ID NO: 292931 - DNA, 552 bp, Homo sapiens
cacaaacgccctgaaacttgccctagttgtgtttgggggaagagctgtgcgcctggagcaatgtgagcaaaggatcgagtggaaggagytgaggtcagcagaaagtctgctcaggtggcgccttatgggcaaagtaagaaatttagattttattctaattgcctctttcaaccaacaccaataaggcactgggtttagaaaagcaatgttaatcataacctcatgcagccagagggaatgtccgtgttggtcacgtgtcccaggtgtacatcaggttcacactagagagtggccaaatcagtgtgcacacccaggcctgtctgcctccagagcgtgtgccttcccagcgcctctctgacttccttcctacctgatactgaagacggattgtgtattacaggggacatggttctggaggcaccatgtggcatccactacctgtgaccacataacactctgagactcagcatcttcatcccacaaaaaggcctcaggtaaagctcagcatacagctctcatctgggcattacatgggaggaaagattttatagc

SEQ ID NO: 292932 - DNA, 1694 bp, Homo sapiens
cacaaacgccctgaaacttgccctagttgtgtttgggggaagagctgtgcgcctggagcaatgtgagcaaaggatcgagtggaaggagctgaggtcagcagaaagtctgctcaggtggcgccttatgggcaaagtaagaaatttagattttattctaattgcctctttcaaccaacaccaataaggcactgggtttagaaaagcaatgttaatcataacctcatgcagccagagggaatgtccgtgttggtcacgtgtcccaggtgtacatcaggttcacactagagagtggccaaatcagtgtgcacacccaggcctgtctgcctccagagcgtgtgccttcccagcgcctctctgacttccttcctacctgatactgaagacggrttgtgtattacaggggacatggttctggaggcaccatgtggcatccactacctgtgaccacataacactctgagactcagcatcttcatcccacaaaaaggcctcaggtaaagctcagcatacagctctcatctgggcattacatgggaggaaagattttatagcwccaaattctgatagtaaattcaaattgggtaaggtttccatcactggtccagccagcaatcgccagagatggagggacacaaagtgcacacatggccactctggtatccttgtagcacttcatgttgcttaggtgctcaataaatgaattttatagctattactacccaaaatgccaggataaataaatactgtccagttcatcctataaccttgccttctcatgcatgtgagatttatatcccaaagatwattacaggaaatcccagggaaatgagttgtttatcatgttctgcaatacattattgaattccaagaagttattccttaggatggaatcagaagaccaggattgttcaaataaattgcaaattcaaactcatccaaaacctcttcagccaccagacctgcagcaaatgcagttgttgaatgggaggtgaatttgcctcaccaggatccctggaaggaataggcagtcagtgagaggttgtcaatatggcatgtcttcatgctatttgttgaaaggttttctttgataaactacttatttacaggagcacactgtggagaaaaatctttatagatgctgttgggctgcttaaacaagagtgaataaactcagcgggaaaggcwtgcctcaccaggatccctggaaggaataggcagtcagtgagwggttgtcaatatggcatgtcttcatgctatttgttgaaaggttttctttgataaactacttatttacaggagcacactgtggagaaaaatctttatagatgctgttgggctgcttaaacaagagtgaataaactcagcgggaaaggcttgcaacacgagttcaatgttttctggtatcccttggaacagtcagaacttgtggtcctggtgtcacccgtccagagaacaccatctgctcattccagatatcaatgtcagaaatcaagactttttcaagactcacatggcacctgtcccagatcagctcctaagagctgcagcttcacagccagatgtgcaatgtatacatggtgaacgtgttgtggaaacagcgtagggtttttttgttttaactcaagtaaatattgttttgaatcttgactctatcacttacaagtttgtgtaatgttggacaaattacttcatct

SEQ ID NO: 292933 - DNA, 509 bp, Homo sapiens
tgcctcaccaggatccctggaaggaataggcagtcagtgagaggttgtcaatatggcatgtcttcatgctatttgttgaaaggttttctttgataaactacttatttacaggagcacactgtggagaaaaatctttatagatgctgttgggctgcttaaacaagagtgaataaactcagcgggaaaggcttgcaacacgagttcaatgttttctggtatcccttggaacagtcagaacttgtggtcctggtgtcacccgtccagagaacaccatctgctcattccagatatcaatgtcagaaatcaagactttttcaagactcacatggcacctgtcccagatcagctcctaagagctgcagcttcacagccagatgtgcaatgtatacatggtgaaygtgttgtggaaacagcgtagggtttttttgttttaactcaagtaaatattgttttgaatcttgactctatcacttacaagtttgtgtaatgttggacaaattacttcatct

SEQ ID NO: 292934 - DNA, 1098 bp, Homo sapiens
aattctcctttaatgtattcagtactacataaaaacctgccataaattcattaatttgtttctgaagctcttcatatgtctgtctaaaattatctctttgagagagttttgaatacggaggattctgaacacatggaagacatacaattgctctttcaatattttaaaggaaaaagtagacttatcacacctgaygtcaaaaggtagacattagggtaataacatttggcttaactgacagcaggtctttgaacagccagtgaagcccagtagtggcagaagctgtcttagggagtagtgacctaagtgttcaaactcaggcccagcaaatgcccagcaaggatcatctaggagcctggcctgcaggctttgcaggcctcttgcacacctgagagtcccttctatgagatcccagaattgctttatcaaggaagagggactggagctgggttgtgaccatcgaggagtaggtaggaatgaatggacaaaattcctgggacaaaggcatgagaaagagcatagcagtcaagtccatctagagtatggagggwagttattttcatatacccatgtaataagacctaggcacatgtcacctatttattttgatttgaagactcttgcagtcttaaaataccacctcttaccacttgtgtttgctagttattatcagcctctgtcagaataagactgtgtgttatgcagtagcggcacaaagattcagcctaagctatagacttccctggacttgttaactcttaacagtttgttagatcagctggaataaaatatggacctggaacacagaatggctaagttwtgataaaagttagggaaaatggagaactcttttatattgctcctcagtgtagagtgagcgtaaaggaaggcaattctgtgggggctgaaaccctttattgagctggtcctctgaccaagctggagtgtgctgtcacagcagagccggtctggaaaaaaacacctcaggtaggggtaacttgagagccaggagaaagaaggatgaggggaggagtctgcaaatatttcaaatcttaccaggtattcttctgggaaatgtataagatgaggcaagttaga

SEQ ID NO: 292935 - DNA, 547 bp, Homo sapiens
agttattttcatatacccatgtaataagacctaggcacatgtcacctatttattttgatttgaagactcttgcagtcttaaaataccacctcttaccacttgtgtttgctagttattatcagcctctgtcagaataagactgtgtgttatgcagtagcggcacaaagattcagcctaagctatagacttccctggacttgttaactcttaacagtttgttagatcagctggaataaaatatggacctggaacacagaatggctaagttttgayaaaagttagggaaaatggagaactcttttatattgctcctcagtgtagagtgagcgtaaaggaaggcaattctgtgggggctgaaaccctttattgagctggtcctctgaccaagctggagtgtgctgtcacagcagagccggtctggaaaaaaacacctcaggtaggggtaacttgagagccaggagaaagaaggatgaggggaggagtctgcaaatatttcaaatcttaccaggtattcttctgggaaatgtataagatgaggcaagttaga

SEQ ID NO: 292936 - DNA, 619 bp, Homo sapiens
actttaattgtttcccttacttcactgtgagctcaaccatgctttacaaatatatattgaagtattttatccagcatttttatctgytctatacctagaggggtttatctgcccatctagtatcatactgctggagatgaaatccatttctttataatctaacttttataacacatttctgtactatccatcagtctgcccttgcagttcatttgaattgagcaggccatttctccatttgcaaagactgtgaagtgtctcaaaggagcacaagcttttcccggaccgcttaagagggctgtagagagctggtctcatgcctctcggcccctccccaccaattgggctggcactctaacgccaatgtgtctgcatgacactgctgctcctccccgtcatgccaacccctcccctggcagagctccacttgactggggtatgtgcttggtattccaaaacagcagtaaagccaaccaattgcagtattttcaaagattaattatcactctcttctaaaaagtcaattttctttaaactaggggtgcaaatgagaaaacaaacgaaaaatggatttccagaagaaccacattttctgctattcagcaggaatcatcccctc

SEQ ID NO: 292937 - DNA, 619 bp, Homo sapiens
actttaattgtttcccttacttcactgtgagctcaaccatgctttacaaatatatattgaagtattttatccagcatttttatctgctctatacctagaggggtttatctgcccatctagtatcatactgctggagatgaaatccatttctttataatctaacttttataacacatttctgtactatccatcagtctgcccttgcagttcatttgaattgagcaggccatttctccatttgcaaagactgtgaagtgtctcaaaggagcacaagcttttcccggaccgcttaagagggctgtagagagctggtctcatgcctctcggcccctccccaccaattgggctggcactctaacgccaatgtgtctgcatgacactgctgctcctccccgtcatgccaacccctcccctggcagagctccacttgactggggtatgtgcttggtattccaaaacagcagtaaagccaaccaattgcagtattttcaaagattaattatcactctcttctaaaaagtcaattttctttaaactaggggtgcaaatgagaaaacaaaygaaaaatggatttccagaagaaccacattttctgctattcagcaggaatcatcccctc

SEQ ID NO: 292938 - DNA, 596 bp, Homo sapiens
caagtcattagggcataaaattccaccgtcattttggatgaagcctctctctctttctctttctctctctcaaattagtttatctatctttctcyaactccccttctatggagagcagattacacaaaatcaaggggaaatgggtggttaactaaaggcacactgggactttggtttcaagcagtgggaaatgaaggtattcaaaaatctgcagaatatgaaataaaggaggctacccaactgtgggcctctgtcctggaagtagggagaagatagcagttcagatctcattatccaagaggaataataaacttggacttgaacaaggcgtgtgcccacatgaatgaggatctgatctatgaggtgagacacaacaatgggaatcttcctgtggtggatcacatggaggcagaaaaaaagcagttgtccacacagcttggaagagaatgccagcccagtgcatacagcacatgtcaccagaggacaaggactaagcagaatgtcagggtccctgcaagtctggggtccaggccaatacagcttctttgcctgtcttggttgaggtggagccacaaattcctagggatactcctcta

SEQ ID NO: 292939 - DNA, 1193 bp, Homo sapiens
caagtcattagggcataaaattccaccgtcattttggatgaagcctctctctctttctctttctctctctcaaattagtttatctatctttctccaactccccttctatggagagcagattacacaaaatcaaggggaaatgggtggttaactaaaggcacactgggactttggtttcaagcagtgggaaatgaaggtattcaaaaatctgcagaatatgaaataaaggaggctacccaactgtgggcctctgtcctggaagtagggagaagatagcagttcagatctcattatccaagaggaataataaacttggacttgaacaaggcgtgtgcccacatsaatgaggatctgatctatgaggtgagacacaacaatgggaatcttcctgtggtggatcacatggaggcagaaaaaaagcagttgtccacacagcttggaagagaatgccagcccagtgcatacagcacatgtcaccagaggacaaggactaagcagaatgtcagggtccctgcaagtctggggtccaggccaatacagcttctttgcctgtcttggttgaggtggagccacaaattcctagggatactcctctawcaagtcattagggcataaaattccaccgtcattttggatgaagcctctctctctttctctttctctctctcaaattagtttatctatctttctccaactccccttctatggagagcagattacacaaaatcaaggggaaatgggtggttaactaaaggcacactgggactttggtttcaagcagtgggaaatgaaggtattcaaaaatctgcagaatatgaaataaaggaggctacccaactgtgggcctctgtcctggaagtagggagaagatagcagttcagatctcattatccaagaggaataataaacttggacttgaacaaggcgtgtgcccacatgaatgaggatctgatctatgaggtgagacacaacaatgggaatcttcctgtggtggatcacwtggaggcagaaaaaaagcagttgtccacacagcttggaagagaatgccagcccagtgcatacagcacatgtcaccagaggacaaggactaagcagaatgtcagggtccctgcaagtctggggtccaggccaatacagcttctttgcctgtcttggttgaggtggagccacaaattcctagggatactcctcta

SEQ ID NO: 292940 - DNA, 590 bp, Homo sapiens
aggctcctatcagctggagttgtggtagtagcagcttgtctttttttttcctcattattcttttttttttaatgaactgtttctctatactccctcctgcctccttcctttcactcctgttctatgaaccttgtcaagaacaaatagagagtgatagtaaaagcagcaggaggacattctaaaaataaagacaaataccacgggttgttaggaagtagcctgtgtttgtcatggtccattaatatgtgttgttatttctccccatctttttatttaggaataaaaaaaattgccagatatagcttccaagagttttaccagatggaactccgtgaccaacttggggatttggagagtgtacaaaaagactggcaaaaatccatagtggggagggaaggactgccttccacagaakggagtgggttaagagggctgccaagtgggggagtttttaaaaaggatttagcagcaagcatgctggacaagaaaatagaaatcagggagctctgaagataggacgaagagttgggagatgtgagttgctaaactggataacagaagtagagagtctacatgaaagccgagacaaa

SEQ ID NO: 292941 - DNA, 521 bp, Homo sapiens
taatgatcttccatggtgcatactggcactttttgattgggaaagtaccagatggaaagtggatgttctccttctacgtggtgtgctcagaagtcctgacctaaaccagtttaacagcctcctttcaaagactcagaccatattttacttagctatcacacttcaacatatggataaaaaagccaacattttaaattgtgagactacacttttagaatgagaaataatcttgtccagtatttccctaactgacttccataagcattcatgtaagtgtggctaactctttattctatacatgtttcatggagagtcacagtgcatattagccattaaagactctaagaagttctgctaaaatgaaagctgttgaagtctgtttagtctaagtattctccaaatacaattgtccaccatttttattggtataaatgtttgggagacatgactatagcrgaaagccccctcccttccttccttccttgcatagttctgggtttgtagaagacacacaaaatagt

SEQ ID NO: 292942 - DNA, 611 bp, Homo sapiens
ctctcatgttacaagtataccacagagtgacacaatttaccctcaaattggtttcactaagtcagaaaaaaaagctaacgttcaaaacatttttaaaagcacaagtaacacttcagaaagttattccaaaaaaataaaagtggcagctttcaacctatagmttccccacctcctttaagaataagaaaactgttataataatacctaaaaatttcacacactcctacttgatagtacttgtccttttaatatctattgattagaaaaatgtaaatgatgaaaagtttctataaattcagtgaccctctaaatagctttatattatgtaaatcataacagtactctacacacacttgagatagagctaagcatgtatcagggataaaagaaaatgttttaaattatatggcattcaatctttcctccttctctctgacatccccaaaccacggcccctccagagagcaaggactctaacctactggtccaggcctgtgctctcctctggcaaattcctagtcaggactaagcagcgggcggcagagctgactcagtccaaagaagtgagagaggctgagttgatgcacacaataataagccggtcagcagag

SEQ ID NO: 292943 - DNA, 500 bp, Homo sapiens
catagctgttaggaacagataaagatgttctagaggtattgactgggcccaggaatcatacagcagctttttttttttttttttttagtgccggtcatgggtcaggcactctcctaggcacagagttgcaaagatagatacctaagagcctactgggatgctatagagttctcataatttgggaacaaatatatctttataaaaatgaaaattatcctcaggcaaaatgaatgtttcctggcacgttgtattgattggttttagcttctctttaacataacagctttttctttctcattttcctcttctcatttaaaaccaaggaacatactccctgctggcttgtgtagtcctccatctccaaaacctctcacagtgcttgccacacatgcatcctgcagctcttgctttccagtccyccctcccacgtccagacagaatctccatctgtgcactccctcccaacacgagcagtggaagaggcctttcatctcctatcc

SEQ ID NO: 292944 - DNA, 611 bp, Homo sapiens
gcctgctttatagtattatgattttatcacatgtaaattcttttgatataccttagttaacaacatggccaatgaaatgattttatttgagttggtagaaacttcacttggtttttgattgatgttatctgtaaaaattatcattttgtaagaaccatttggtgagccccataaatgcagatataaagatgtaggtatatcgctatgcactccagagaacagttaccgagtaagtgtgtttttatgtcaaatcgaagaactttgagaaagcagaaagatagtaacctaaacagagtgctctgtcgaggagttttctccccctagcagtgacraatttctgtccaccctttccttaaatgatttaatattggggccttgcttttttacctcctctttaacacaggaaatatttctgatacttatcttcatgtgtgtgtttgctcatgtctgtgcagtcttctgcagtgaggatatgaaaagaaaggtagtgagttctatgacccttgaaaaacaccagaactctcttttcctaatgaaagtacaagtgtgttcttatgcatacttttgtataacaggatttatacttaaaatagtttggatacttattacta

SEQ ID NO: 292945 - DNA, 609 bp, Homo sapiens
aagcaaggtaaaaatggaaaaataggtatatgaaaatcctgtataacycaggagtctagaaaagttctgtaaataagaaagttaacagaaagtcctgccccaagcccagttactagagtaagaggcatgacagaataagctgccaccttgagcttttccttcctgtctctcttcaggcagtgccagcagttacccctgtggacgaggagagctcagacggggagccagaccaggaagctgtgcagaggtaatgtgacatctggcagtgcttgcagaagcccctgggcaggctcccctgcaaccagcgaaaggtcacctctgcccaaggaggtggtagagtgcagcttcaacatttgtgtggtctctttgctcaagccagatggcatgttccaccccacatggaagtaacagaagactacccagaaaatgtcatttctgtaagcaccattggaagtcccctaagtgacagcaataaccataagaactttttctttcctccctccttcttccttgtcccctgccttcatattgcaactctgatagtattcacaaggcacaaagcctgctcgtacctgccaagaactgtttactgaaaaggaattggagatg

SEQ ID NO: 292946 - DNA, 532 bp, Homo sapiens
ttttttttttttttttgagatggagtctcactctgtcgcccaggctagagtgcaatgccaccattttgggtcactgcagcctccacctcctgggttcaagcaattctcctgtttcagcctcccaagtagctgggactacaggcatgtgccaccacasctggctgatttttgtatttttagtagagacaaggtttcaccatgttggccaggctggtctcgaactcctgacctcaggtaatccgcccaggtcccaaagtgctgggattacaagcatgagccaccacgcccggcctgcctcctcaattttttgatggaccacaaatgtattctcagtacaaggtgaacaagacagacatggtccctgccctcatgtagcagattagtccagtgggggagatacacatgaaacaagcacacatgtaactatataattataaccactggatgagttttaaggaaaagttccagaggggcaattggtatattctagagaaatggggctttcctgaagaaggttctatcaacagttcag

SEQ ID NO: 292947 - DNA, 601 bp, Homo sapiens
atcataaatacatggtgtcttactaaggttctatgagaactttcacaggggctttacacatctcaccagatgcttgtagaactcaataataataataatagtagcagtgatggtggtggcagcagcagtagcagcagctaccatatacgaaatgtttactatgggccaggcataactcttagtggtttggaagtactaactcatttaaacctcctaacacccaccttatcattaaccttgctttagaaatacagaaactgaggcacacagagattaagtaattaacccaagattaagtaayttacacctagtatgtggcaggtgcaggattgaagcctaggtagcttggctttagaatcaaattcttaataagaatgttataagaatctgaagatctttctttagcatacatgcactgcatcataaaacatatctttccaatgtgcccccttttaataagatactcatcagcaaatacattttaatgaagaatgaacgatgaaggacttttaaaaatttactaaatctaaacttcctcagtgaaatacttaaaatatttgtgttgctccaaaatatgtctatatctcagtttcaattatgt

SEQ ID NO: 292948 - DNA, 586 bp, Homo sapiens
gcaacttgttccaccgcctttaaaataggctgcagctgttctagtgttttgaccgctagggtcttatatgtatggtgaccttaaacttcctcagtgaaatgttctctatcatagtcatattttacactattcaaaaagttaaatcagacagcattttcctggactactttgccaggagatgaccacttttgtgctttccttgtctgaggaaatttgcaatttgccaatattttaaaagggaagacaaagccataagacagaatagtaggagatatgaaactagcttagggaaaaaaacaaactttggtaagattttactcacacttcctatcagtattccaacaaaccccagcatgaattaagtcttctcttccttattggctgtctttatttactatctctctttcttccaagaagtatttattcagtacttgctgtgtgccagaagtggtactaaggactagttaagatgtaatccctgcaaatcctgtcaggagattgacttcaatttaratgagcaagtgagtctcacttcttcccattcagatgccctttttcttcccttcttcacctttttcttcactcc

SEQ ID NO: 292949 - DNA, 597 bp, Homo sapiens
ccaggctggagtgcagtggtgcaaactcggctcactgcaagctccgcctcccaggttcatgccattctcctgcctcagcctcccgagtagctgggactacaggcgcctgccaccatgcctggctaaatttgtgtatttttttagtagagatggggtttcaccgtgttagcyaagatggcctcgatctcctgacctcgtaatccgcctgcctcggcctcccaaagtgctgggattacaggcgtgagctactgtgcccggccacaataattctttttctaatcatggtaaagtgttcagcaaacatgccaggtttcccagtgtttcaacatgcaggactaatcttgtagttaatgtatattccttttcttcctgagccttttaacaggagatgtttttgcctagttgttgttatttttctaattgcccaattttcttttctctgttaaacactaattaaagaatgatctcaggactgccacctttttggagaaaacattaatctgctgccctcgctacattttaatgggcctaatttatccctattatctactcccttcaccaccccaactgagcaaggaaaacattcttatcccctgc

SEQ ID NO: 292950 - DNA, 597 bp, Homo sapiens
ccaggctggagtgcagtggtgcaaactcggctcactgcaagctccgcctcccaggttcatgccattctcctgcctcagcctcccgagtagctgggactacaggcgcctgccaccatgcctggctaaatttgtgtatttttttagtagagatggggtttcaccgtgttagccargatggcctcgatctcctgacctcgtaatccgcctgcctcggcctcccaaagtgctgggattacaggcgtgagctactgtgcccggccacaataattctttttctaatcatggtaaagtgttcagcaaacatgccaggtttcccagtgtttcaacatgcaggactaatcttgtagttaatgtatattccttttcttcctgagccttttaacaggagatgtttttgcctagttgttgttatttttctaattgcccaattttcttttctctgttaaacactaattaaagaatgatctcaggactgccacctttttggagaaaacattaatctgctgccctcgctacattttaatgggcctaatttatccctattatctactcccttcaccaccccaactgagcaaggaaaacattcttatcccctgc

SEQ ID NO: 292951 - DNA, 597 bp, Homo sapiens
ccaggctggagtgcagtggtgcaaactcggctcactgcaagctccgcctcccaggttcatgccattctcctgcctcagcctcccgagtagctgggactacaggcgcctgccaccatgcctggctaaatttgtgtatttttttagtagagatggggtttcaccgtgttagccaagatggcctcgatctcctgacctcgtaatccgcctgcctcggcctcccaaagtgctgggattacaggcgtgagcyactgtgcccggccacaataattctttttctaatcatggtaaagtgttcagcaaacatgccaggtttcccagtgtttcaacatgcaggactaatcttgtagttaatgtatattccttttcttcctgagccttttaacaggagatgtttttgcctagttgttgttatttttctaattgcccaattttcttttctctgttaaacactaattaaagaatgatctcaggactgccacctttttggagaaaacattaatctgctgccctcgctacattttaatgggcctaatttatccctattatctactcccttcaccaccccaactgagcaaggaaaacattcttatcccctgc

SEQ ID NO: 292952 - DNA, 597 bp, Homo sapiens
ccaggctggagtgcagtggtgcaaactcggctcactgcaagctccgcctcccaggttcatgccattctcctgcctcagcctcccgagtagctgggactacaggcgcctgccaccatgcctggctaaatttgtgtatttttttagtagagatggggtttcaccgtgttagccaagatggcctcgatctcctgacctcgtaatccgcctgcctcggcctcccaaagtgctgggattacaggcgtgagctacygtgcccggccacaataattctttttctaatcatggtaaagtgttcagcaaacatgccaggtttcccagtgtttcaacatgcaggactaatcttgtagttaatgtatattccttttcttcctgagccttttaacaggagatgtttttgcctagttgttgttatttttctaattgcccaattttcttttctctgttaaacactaattaaagaatgatctcaggactgccacctttttggagaaaacattaatctgctgccctcgctacattttaatgggcctaatttatccctattatctactcccttcaccaccccaactgagcaaggaaaacattcttatcccctgc

SEQ ID NO: 292953 - DNA, 610 bp, Homo sapiens
tagtttgtatatatttttaaatccactgaaataaatctggtcatttattcttttcttgaacaaagattaattacagatgtattggacattatgtctataggaagggtaggaggtgtggtacartagaaattccagacagagagaaatggagatgatgatagctatattgagcctagcagggccattggcctccttgctagaaagtttgaatttatgctgaaggcaaaataaggagatatgattttatgtactttaaagatccaactaaaaccgcatggagactggagtagagagagaggtgaaatggaggcagagagcatccttaaaaataatccagtgaagagatggtgagtgtctgaactagggcttatggcattagggatgaggaagtgtggagacagatgaggaataactaagggatagagttggcattgcttggaacataattaatgtgggaggtgagcaaccctggggaagatgctaagttcagtctgggacaagttgagtttgagggcatgcaggcagagtgaatggttttatataagtgtttggagtgtgggagagggtttagggatatagctatagatctggagtgcagcagcacaccata

SEQ ID NO: 292954 - DNA, 610 bp, Homo sapiens
tagtttgtatatatttttaaatccactgaaataaatctggtcatttattcttttcttgaacaaagattaattacagatgtattggacattatgtctataggaagggtaggaggtgtggtacaatagaaattccagacagagagaaatggagatgatgatagctatattgagcctagcagggccattggcctccttgctagaaagtttgaatttatgctgaaggcaaaataaggagatatgattttatgtactttaaagatccaactaaaaccgcatggagactggagtagagagagaggtgaaatggaggcagagagcatccttaaaaataatccagtgaagagatggtgagtgtctraactagggcttatggcattagggatgaggaagtgtggagacagatgaggaataactaagggatagagttggcattgcttggaacataattaatgtgggaggtgagcaaccctggggaagatgctaagttcagtctgggacaagttgagtttgagggcatgcaggcagagtgaatggttttatataagtgtttggagtgtgggagagggtttagggatatagctatagatctggagtgcagcagcacaccata

SEQ ID NO: 292955 - DNA, 558 bp, Homo sapiens
gtttattctagaagtggaattggtgttcaaaggatgaggattttaaaaaaactattaatacataatgccaaattgtcatcctgraagatttcacacttttcatcctcaatagttgctttgctgctttctctttgccttgagaaacccccatgataccataaattaaaacatgttttggggcccctctccttcatctggctggggcccgacctgtatttctgtctgcctttgtttattatgccttggaatcattcttcctcttcacacccatttcctcattccatcctatgaaggcaattcccacttcagaaagagggctggcttggggccttcaagattccttctgggagtttacgtggacttaattcctgcatcttattaagtagctggccagccaaattattttcacaaagccattaatatctgaaaatggattaatccagcattacttaaaatgctctacgagggtaaaagtatttaaatgcatttgtgaaatgcacaaggctttgttctgttgttcctgtttcactctcataagaaatctcagtctcacaatct

SEQ ID NO: 292956 - DNA, 559 bp, Homo sapiens
aatactgaagtacccaaacttccttgaccttctcatttcttccccagtgattaccgtgggtaagaaaaaaaacagcagaaagtaaaagcgtcatgaaacctcaccatggtgaggttggtgaggctcccgtgatgcttttactttttgctgtttttttctcccacatggtaatcattatctagctcagtgtttcccagccattttttttcattctcccactgcccccttgaaaatactatttagacattttttttcctaattactccccctccctgmaatcttaataccacagatatgttgtatatctttttatgtactatatgtatatctgtggtttaccccaaaaattagtacaatttatttcacccacataagaaacaatgtttgctccctcagtgccattttgctcttgttgtgaatgcctggtgtagctcataactatgaattcggtaaaaagaaaagaaggaaggaaggatggagggagggaaagaaaaaatgaagggagagtagaaaacaaacaaacaataaaacaagccagcaatgacgtaaaacactaaac

SEQ ID NO: 292957 - DNA, 510 bp, Homo sapiens
tcacttgtgttgtttcatttaaggggaacaaggtgggatgtcctggccaaatgtatgctacccgtctgtttaagtgcctgaaattccagcattagagtgatttcctttggttatttcccccaaagatccttgtttaagttgcaaaaatccccggagtagaattatcaccactccaccgatcagtgtcctactaggatttatgtttacattcttggaagagctggtggcaaatctgyggatgcagtggactgagtggaaagggaatattttggtgttaggggtatttggaaagaattgatgcctatttggttgtctcttgggtgtcgtggagtctcctttggcaaagaaaagagtgtcaggcttgggattggggtggagacacagaggggcagtggtgaaactatgatgtcaaactttgtaactgcaggacttcagtgggaggaggtgtaggagcctgtgtgcaatgggttttccaggaatcctcctaaagaagttattgatttgtatatt

SEQ ID NO: 292958 - DNA, 588 bp, Homo sapiens
gcgtcttaagaaaactaggtagatatggaactgactttatacttggaagtggctgcagtctgctctggtaaacaggaagtaggccaggggctatgcaggggctgtaagcccacagagttcagctcttgcttttctggaaacttcyaccagcctgagagttggaatggcagctgctgccctaaaggttgtgctcatgccagacatggctgtgctcatagccctggaccccagatgcaagcacaggctggcactattttaaagcaaaattataacccgagaatagaaagggggtgggtaccggctggacgggtgtagagtgctatcagacctaaagaggtctctgcttccttttgtagtgttttgaaatttgcaaacctgtcctacatctatttttatttcatttgatatccacaggacatctctattttacaggtgacaaaaccatattacagagaagttaaatgattgcccaagttcacagaccatattcttttttagttttccttattggttttcatttaggagtaaccctctaattagagccctcatttttcatttggagacaaatgacaagaaaactgagaccag

SEQ ID NO: 292959 - DNA, 553 bp, Homo sapiens
ctaatttctgctctaattattatttcttttattatttttactttaaatttaatttgctcttcttttactaattccccatggtaaaagtttagattattgattttagatctttcttttttctgataatgcatttaataccataaatttcccccaagaactacttttgcttcatcctgtgaattttgataagttgtgtttttattttcatttagtccaaaatattttaatatttctcttcaggcttgtttggcccatgtattatttataatttgtttaatcaccaaatattttgggattttctccaatctttctggtgagaatctggtatgtctcctagaagtaaaactcatgagaatgtggggcccactaagccaggttctaggagtttagctctcaagctggtctacagtcaatcttagtcagctaccctttaagtgttcttagaaggttctggcrgggaaaggaaggtgatttcagctataaatttcaatacccatctgtcactgtaattttcaaagtggcagtttgtcctgtggcttcaattccctgatgg

SEQ ID NO: 292960 - DNA, 607 bp, Homo sapiens
tctctattggagaaagaccatgtaccaaaaaaaaccccttacagctaaaattatacttaatgcttagttgaataataataataacactgaatagttcccctctaagtttgggaataaggtgaaaatatccactcttacttttattcaacatrgtagggaagtcctagccattacaataaggtaataaaaggaaataaaatgtatacaaatcaaaaaggagctaaaaatgttcctatttgcatatatgattgtctatacagaaaatcccaagaaatatacaaaaaaaatagaactaataagtgcatttatcaaggacatagaaagatgaacaacatacaaaaatcaattttatttctttatactattaatacatgtggatgctgaaacttaaaatacagtgctatttatgatcactaaaaaaaagacaaagaaataggcataaatgtcataaaatgcttacaggacttgtatgctaaaaactacaaaatactcatgatagaattcagagaagctctaattaaatcaagggacatactaagttcatggattggaagactcaatgtagtaaagatgcctatgctctccaaattatttattggctaaatgt

SEQ ID NO: 292961 - DNA, 542 bp, Homo sapiens
gaaacaaacatttacggcgtgggaagaagttcagcataaaatagatgcaaataaaagacttaaaagggaagaaaaagaatggcacatccttgaccagaatcggactcagatatttgcccctccacctacatctctaagccagagaaacagaagttctcargccgtatcagaacttttctgtagcaataacagtcctgctgaggtggcccgaggagctgaaacagacgagctttgacgagtttagcagaaataaggaagagatgagctgattgttggcaagtgcacctcttctctctgtctgaagcgagatctttgagacattcttcatccattccccggggacctaggaaatgagcagagtccccctctatgtgtgtgctttcatagaagtgcccgttacacttctcccgcaatttacgggaccacatctggttggctatcttggtcagctttaggatattggctcgaaaaagggtcataaattttattttcaattttgtttctgtggcttttatactttaatatgcccttgcagacgtgcc

SEQ ID NO: 292962 - DNA, 542 bp, Homo sapiens
gaaacaaacatttacggcgtgggaagaagttcagcataaaatagatgcaaataaaagacttaaaagggaagaaaaagaatggcacatccttgaccagaatcggactcagatatttgcccctccacctacatctctaagccagagaaacagaagttctcaggccgtatcagaacttttctgtagcaataacagtcctgctgaggtggcccgaggagctgaaacagacgagctttgacgagtttagcagaaataargaagagatgagctgattgttggcaagtgcacctcttctctctgtctgaagcgagatctttgagacattcttcatccattccccggggacctaggaaatgagcagagtccccctctatgtgtgtgctttcatagaagtgcccgttacacttctcccgcaatttacgggaccacatctggttggctatcttggtcagctttaggatattggctcgaaaaagggtcataaattttattttcaattttgtttctgtggcttttatactttaatatgcccttgcagacgtgcc

SEQ ID NO: 292963 - DNA, 542 bp, Homo sapiens
gaaacaaacatttacggcgtgggaagaagttcagcataaaatagatgcaaataaaagacttaaaagggaagaaaaagaatggcacatccttgaccagaatcggactcagatatttgcccctccacctacatctctaagccagagaaacagaagttctcaggccgtatcagaacttttctgtagcaataacagtcctgctgaggtggcccgaggagctgaaacagacgagctttgacgagtttagcagaaataaggaagagatgagctgattgttggcaagtgcacctcttctctctgtctgaagcgagatctttgagacattcttcatccattccccggggacctargaaatgagcagagtccccctctatgtgtgtgctttcatagaagtgcccgttacacttctcccgcaatttacgggaccacatctggttggctatcttggtcagctttaggatattggctcgaaaaagggtcataaattttattttcaattttgtttctgtggcttttatactttaatatgcccttgcagacgtgcc

SEQ ID NO: 292964 - DNA, 542 bp, Homo sapiens
gaaacaaacatttacggcgtgggaagaagttcagcataaaatagatgcaaataaaagacttaaaagggaagaaaaagaatggcacatccttgaccagaatcggactcagatatttgcccctccacctacatctctaagccagagaaacagaagttctcaggccgtatcagaacttttctgtagcaataacagtcctgctgaggtggcccgaggagctgaaacagacgagctttgacgagtttagcagaaataaggaagagatgagctgattgttggcaagtgcacctcttctctctgtctgaagcgagatctttgagacattcttcatccattccccggggacctaggaaatgagcagagtccccctctatgtgtgtgctttcatagaagtgcccgttacacttctcccgcaatttacgggaccacatctggttggctatcttggtcagctttargatattggctcgaaaaagggtcataaattttattttcaattttgtttctgtggcttttatactttaatatgcccttgcagacgtgcc

SEQ ID NO: 292965 - DNA, 583 bp, Homo sapiens
aacggaactgagcctcctgctctgtgcagggaagtgagtccatccctatctcctgccttcaaggaggttaaaascatgatcaagaagtggggaggggggcagggggtcagctgctggctccccacgcacagcccctttgtgggctctttgtctttctctctctctctgtctctctctatcactgcgtgtgtgtgtctctctctcccccctggcacagtcacacagaccctctacacaaggggacacacatgcacacacatatgtaccccacacacatatacatatatacacgttcctgggagatatgatcaaagttatttatgggttcaaaggagtgagtcctggcaggggtgggcactgcggtgagtgtggcagatgttggaccaccgcccctccactccagcatccttggggatatcctctggggggctggaaagttcaagcccacgtttctcagaaccacttgcctctgggctgtcagtaagggcctgacagccagatgcatgtcacctggacagggaggtgaggctgaggtcttgctccgattgctttcattctgctctgaccacagagatggtggcga

SEQ ID NO: 292966 - DNA, 583 bp, Homo sapiens
aacggaactgagcctcctgctctgtgcagggaagtgagtccatccctatctcctgccttcaaggaggttaaaaccatgatcaagaagtggggaggggggcagggggtcagctgctggctccccacgcacagcccctttgtgggctctttgtctttctctctctctctgtctctctctatcactgygtgtgtgtgtctctctctcccccctggcacagtcacacagaccctctacacaaggggacacacatgcacacacatatgtaccccacacacatatacatatatacacgttcctgggagatatgatcaaagttatttatgggttcaaaggagtgagtcctggcaggggtgggcactgcggtgagtgtggcagatgttggaccaccgcccctccactccagcatccttggggatatcctctggggggctggaaagttcaagcccacgtttctcagaaccacttgcctctgggctgtcagtaagggcctgacagccagatgcatgtcacctggacagggaggtgaggctgaggtcttgctccgattgctttcattctgctctgaccacagagatggtggcga

SEQ ID NO: 292967 - DNA, 583 bp, Homo sapiens
aacggaactgagcctcctgctctgtgcagggaagtgagtccatccctatctcctgccttcaaggaggttaaaaccatgatcaagaagtggggaggggggcagggggtcagctgctggctccccacgcacagcccctttgtgggctctttgtctttctctctctctctgtctctctctatcactgcgtgtgtgtgtctctctctcccccctggcacagtcacacagaccctctacacaaggggacacacatgcacacacatatgtaccccacacacatatacatatatacacgttcctgggagatatgatcaaagttatttatgggttcaaaggagtgagtcctggcaggggtgggcactgcggtgagtgtggcagatgttggaccaccgcccctccactccagcatccttgsggatatcctctggggggctggaaagttcaagcccacgtttctcagaaccacttgcctctgggctgtcagtaagggcctgacagccagatgcatgtcacctggacagggaggtgaggctgaggtcttgctccgattgctttcattctgctctgaccacagagatggtggcga

SEQ ID NO: 292968 - DNA, 482 bp, Homo sapiens
cagccaagcacctgggccattctacttgctgaaagtctgatctccctgagtgttgccaccaccctggggtgctcatttccaactcccaagtctgcaggtgtctctgcctggtgggacccaggtcacatgtgaaaccttctctgcaagggagtctgggaaatgcagactgaggcttcccatcctctagattcccgggaagacactgggtaggttgtgagggtaccagtctgtggggcmtgacatagcagcatcctggaggacccctcagaatctgtgggcagtgtggggctgggccttaggggcagagctgggcactgggcactgtggggaggtgaggacgtcatctctacctccttgtttcctctgcctctctctgcctggctgctgccttggagtaacacagcttccgggagcactagagttttacatgttagaatccaggtcccacaggggtctaagtcccagttccaacctccttggga

SEQ ID NO: 292969 - DNA, 482 bp, Homo sapiens
cagccaagcacctgggccattctacttgctgaaagtctgatctccctgagtgttgccaccaccctggggtgctcatttccaactcccaagtctgcaggtgtctctgcctggtgggacccaggtcacatgtgaaaccttctctgcaagggagtctgggaaatgcagactgaggcttcccatcctctagattcccgggaagacactgggtaggttgtgagggtaccagtctgtggggcatgacatagcagcatcctggaggacccctcagaatctgtgggcagtgtggggctgggcctyaggggcagagctgggcactgggcactgtggggaggtgaggacgtcatctctacctccttgtttcctctgcctctctctgcctggctgctgccttggagtaacacagcttccgggagcactagagttttacatgttagaatccaggtcccacaggggtctaagtcccagttccaacctccttggga

SEQ ID NO: 292970 - DNA, 569 bp, Homo sapiens
ttcgttgatctttggttttggttttctagtctctattttatgtacttctgctctaatctctattatttctttcttctaatcttgggcttagtttgctctttttctatttgcttgaagtgtaacatkaagtttttaatttgcaaacattttttcttttttggtgtaggcatttattgctaaaaactttcctcttagaactgcatatgctgcatcgcataagttttggtatattgtgtttccattttcatttgcttaagatatttctaaatttcccttttaagttcttcattgacccattagttgttcaggaccatgttgtccaattttcatgtacctgtgaaatttccaaaatctattttggtattgatttctagtccaaaaaattaagaagaaagaatacttacaaattctttttatgggggcaccattactttgataccaaaccagagaaggacatcacaagaaaagaaaattacaggccaatatcctcagtgaacatagttgcaaaaatcctcaacaaagttgcagcaaacagaattaaataacacattaaaaggttcatttaccac

SEQ ID NO: 292971 - DNA, 624 bp, Homo sapiens
aaataattcatggatcagaaagaaatcaaaagagaactaaatcgaaagagaactaaatcaaaatgaaaattcagcctaccaaaatgcgtgggatgcagctaaagcagtatgcagaggaaaatatatagtcctacaggctcatattagaaaaaaagaaaggttttatatatgcaacttcagtttctaacataagaaaaaataggagcaaattaaactattaaacttaaagcagaagaaaggaaacaaggtaagagtataaataaataaaatagaaaacagaaatacaatataaaaatcaaggaaaccaactttactatttgataaaatcattaaaattgataagcttcttgacaggaaaatcagaaaaaagagagaagatacaaactatcaacaagaatgagatgtgacatcattacagactctacagatatgaaaaggaagataagaaaatattatagataacattatgccaataaattcagcaacttagacagatttcttgaatgacacaagctatcaaagctcacccaaaaagaaatcaagatccataaaaagraataaagtttggatacatgccgcaacgtggataaaccttgaaaactttatgctaagtaagccagacac

SEQ ID NO: 292972 - DNA, 601 bp, Homo sapiens
aggaaacagttcaataaaatattcatgggcaccatttaacccatgactcaggcagactccttacaatcttgacactgatagtctgaacattgtcattcttctacatgtcttcagaagggctggtaaatattgaactacagttaataggttcttggataagccagattcgcaggcccttaacctcacgccttctccctttacctccatgacatgatgtttgaacctrgaagacagggttgtcgacatcttctccaccgtgcggaccctcggtgccaagagtggtgggtgtccccgtggcctcccgcctggggtctgagctgccgcacgatccatttgtcacctctgaagtgtatctcaccgtgggcactgggagcagcaaatggttgttctgttcttacctgctcgatccacacaaagctgggaaggttcatgggtgcctaatctcacaggacagacatgacgacactgtgaattcacactgggtctcatcagggatttcactgttcttccagagagagcaagtgtcttactgaccaccagaaaacatttttgggggagggggaaaataactagaaagtggaggaaaggtaaaatagaaaat

SEQ ID NO: 292973 - DNA, 583 bp, Homo sapiens
ccagactctggtgtcttctgctttcttctgcttcagttttctgtctcctcactgagctgctccaactcatactttccagcccctcattctcagrctgtttctgcaaatccagggctgccccctatcctagaacccctaggcttcattcttactgggcctggggtccaggaagccccacctgatcccaggtcccttttgctatcccacccctagcctcccacagctgacctgagggcagagaggccagaggatgccagtctcaaatcatggtttaaaagctcacttatagccacacacatctaattggtagatttctatttttctctgtgggcattttccctttctgatggactcttacaaacgttttactgttatatttcttgtaatactgcctggaatcattatttagacatcattaaaaaattattatctttttaaaaggaaggctgagaagttcctacaaaagagaatacagaaaactcaagcacactcgagccaatccccgcagaaatacacgtgcgcgcaagtttcgtctgatggaaaagagtttaccgtcacacaactgtgcaaaataaaagtgaat

SEQ ID NO: 292974 - DNA, 583 bp, Homo sapiens
ccagactctggtgtcttctgctttcttctgcttcagttttctgtctcctcactgagctgctccaactcatactttccagcccctcattctcaggctgtttctgcaaatccagggctgccccctatcctagaacccctaggcttcattcttactgggcctggggtccaggaagccccacctgatcccaggtcccttttgctatcccacccctagcctcccacagctgacctgagggcagagaggccagaggatgccagtctcaaatcatggtttaaaagctcacttatagccacacacatctaattggtasatttctatttttctctgtgggcattttccctttctgatggactcttacaaacgttttactgttatatttcttgtaatactgcctggaatcattatttagacatcattaaaaaattattatctttttaaaaggaaggctgagaagttcctacaaaagagaatacagaaaactcaagcacactcgagccaatccccgcagaaatacacgtgcgcgcaagtttcgtctgatggaaaagagtttaccgtcacacaactgtgcaaaataaaagtgaat

SEQ ID NO: 292975 - DNA, 1153 bp, Homo sapiens
tgccctgctgctgcctgcaatgctgtgccacctgatccataaataatgtatcaaggtgtgcgtatagatgtgagcatgaggtcacctagagcttccagaccctttctttattttattttttttttgagatggactcttactctgtcatccaggctggagtgcagtggcgckttcttggctcactgcaacctccgcctcctgggttcaggcaattctcttgcctcagcctcctgagtagctggctgggattacaggtgcccatcactatgcccaactaatttttgtatttttagtagagacggggtttcaccatgttggccaggctggtctcgagctgcagacctcaggtgatctgcctgcctcggcctccctaagtgctgggattacaggtgagagccaccgcgcccagcagaccagaccctttctaataccttctgaccccagcagtggggcccaggcccacctaacatggcagcctggatgcacctctctgttcctaggcctggtgcctggctcagtaaacgtttttttttttaatgattgaaagctcatctttatggtacttaaagtctgtttwtgccctgctgctgcctgcaatgctgtgccacctgatccataaataatgtatcaaggtgtgcgtatagatgtgagcatgaggtcacctagagcttccagaccctttctttattttattttttttttgagatggactcttactctgtcatccaggctggagtgcagtggcgctttcttggctcactgcaacctccgcctcctgggttcaggcaattctcttgcctcagcctcctgagtagctggctgggattacaggtgcccatcactatgcccaactaatttttgtatttttagtagagacggggtttcaccatgttggccaggctggtctcgagctgcagacctcaggtgatctgcctgcctcggcctccctaagtgctgggattacaggtgagagccaccgcgcccagcagaccagaccctttctaataccttctgwccccagcagtggggcccaggcccacctaacatggcagcctggatgcacctctctgttcctaggcctggtgcctggctcagtaaacgtttttttttttaatgattgaaagctcatctttatggtacttaaagtctgttt

SEQ ID NO: 292976 - DNA, 576 bp, Homo sapiens
tgccctgctgctgcctgcaatgctgtgccacctgatccataaataatgtatcaaggtgtgcgtatagatgtgagcatgaggtcacctagagcttccagaccctttctttattttattttttttttgagatggactcttactctgtcatccaggctggagtgcagtggcgctttcttggctcactgcaacctccgcctcctgggttcaggcaattctcttgcctcagcctcctgagtagctggctgggattacaggtgcccatcactatgcccaactaatttttgtatttttagtagagacggggtttcaccatgttggccaggctggtctcgagctgcagacctcaggtgatctgcctgcctcggcctccctaagtgctgggattacaggtgagagccaccgcgcccagcagaccagaccctttctaataccttctgaccccagcagtggggcccaggcccacctaacatggcagcctggatgcacctctctgttcctaggcctggtgcctggctcagtaaaygtttttttttttaatgattgaaagctcatctttatggtacttaaagtctgttt

SEQ ID NO: 292977 - DNA, 614 bp, Homo sapiens
gagcaagtgaacctcccaggagttgggttttcaggtatcttgaaagaagcccactcaggagactcacctgctgggtaggagaggtcccccagggaaaggctggttgggaggggtgaaccactgggtaccagagggggcatgccacagaagaccagctagagagtgcaccgtcacatcgaggaactccttgtggagtgcagagatcatcatggggagggggctcctcaaaatccaccctagaggccaagatagaatgggtatgtgtgatggatcacccacgtccggccctctaagactttgccccatcctctaatcaactcttccccacccgaacttggackgagggtggcagcgagggagaaaaggaacagacctgcccctcctcctgcccactgggtgggcactgagctggggaggaaagtggcttttgtgagactgagttttgattgagacaaatctgtacttttcatgcttgaaaatatgaccacagttatgacatagctcaaagtgactgaaaagctatgggacagccccagctgtcatccaagggctgaaagaggagagctgaccagccagcactgaaaaacagtgatgggggaaaaagaaaaagaaag

SEQ ID NO: 292978 - DNA, 526 bp, Homo sapiens
ggaatgttgatatttgtgagtgctttaggaagaggaaggaacatgggcacatccactgaatgtgatctttctgggggcaggtatttttgcctgctttgttcactttattctttctttctgttttttttttcttttttcttttttytttttgacttggagttttgctcttattgcccaggctggagtatactgacgagacctcggttcactgcaacctctgcctcccggattcaagcgattctcctgccttagcctcccgagtagctgggattacaggcacctgccaccatgcccagcacatttttgtatttttagcagagacggggtttcaccatgttggccaggctggtctcgaactcctgacctcaggtgatctgcccacctcagcctcttaaagtgctgggattacaggcgtgagccaccgtacccggcctgttcactttattccaagaacctagaaaaacaccaggcacacagcaggtggccgtaatgtgccagcaggaggtagtctgaggaaagttgacta

SEQ ID NO: 292979 - DNA, 526 bp, Homo sapiens
ggaatgttgatatttgtgagtgctttaggaagaggaaggaacatgggcacatccactgaatgtgatctttctgggggcaggtatttttgcctgctttgttcactttattctttctttctgttttttttttcttttttcttttttctttttgacttggagttttgctcttattgcccaggctggagtatactgacgagacctcggttcactgcaacctctgcctcccggattcaagcgattctcctgccttagcctcccgagtagctgggattacaggcacctgccaccatgcccagcacatttttgtatttttagcagagacggggtttcaccatgttggccaggctggtctcraactcctgacctcaggtgatctgcccacctcagcctcttaaagtgctgggattacaggcgtgagccaccgtacccggcctgttcactttattccaagaacctagaaaaacaccaggcacacagcaggtggccgtaatgtgccagcaggaggtagtctgaggaaagttgacta

SEQ ID NO: 292980 - DNA, 526 bp, Homo sapiens
ggaatgttgatatttgtgagtgctttaggaagaggaaggaacatgggcacatccactgaatgtgatctttctgggggcaggtatttttgcctgctttgttcactttattctttctttctgttttttttttcttttttcttttttctttttgacttggagttttgctcttattgcccaggctggagtatactgacgagacctcggttcactgcaacctctgcctcccggattcaagcgattctcctgccttagcctcccgagtagctgggattacaggcacctgccaccatgcccagcacatttttgtatttttagcagagacggggtttcaccatgttggccaggctggtctcgaactcctgacctcaggtgatctgcccacctcagcctcttaaagtgctgggattacaggcgtgagccacygtacccggcctgttcactttattccaagaacctagaaaaacaccaggcacacagcaggtggccgtaatgtgccagcaggaggtagtctgaggaaagttgacta

SEQ ID NO: 292981 - DNA, 514 bp, Homo sapiens
cctgaagcagagttatacagtggtgctcaataaatgtttgataaataaagtggaaaatacaaagtggcaccaggccaacagggctaatgcagcacatgattttggcatcctgaaccacttcccctcagtgcccctctggtttcagcagcagcagggacaggtcccaggcagcccagactcatgcagacaatgcatcgcttgcagcacaagcagctctctccctttcccagcctcagggcctgccctgaaggrgagtccattcagcctgccagcccatgtggcagggagcatatggattaaagtcccggtttccagcatggaatagacaattctgaggggcactttgtacagttctcagaggtcccagtggaccctgctcctgctgcctcaatagctctccttcatgttgccttttcctccatccccatctcccacttgcccaactccttgattcctgtttcctctgggatcacttctccaagacatttcctgcacttaagttttttcttaggct

SEQ ID NO: 292982 - DNA, 608 bp, Homo sapiens
ggggatgccttcaaaccatagcagagacacttttctgcctgcccaaagtcacatagctcattagaggccaggttgggcctggagtctctggcaggaataatagctgaactttcattcattccctaacccacctgtgttgtgagggccctgaggccagcatgttcatggctgcagcctccaaccaactgagctaattgacaagaaatctgctctgcctgatgctrtgggggatactcagattttctgtgcccctaagatgacccaaagcgtggacatgcttattagtgggattctatcccctcagtgaagtttttggttcttgcttttaataatggagcaagagaagccagtgggaagtctgttgacaagggaatgactgccacgtaggcactggcaggctttgggtgaggagctcagcttcctggtgtggcctgtggcaagctcaccctgggaggggcttggagtcttgtggatttcattcctgacattccatctgctgtgcctgctaccagctgccctgccaacctgtctgtgccagaagagtgtggaaataagctagaacccttacacagggaggtcctgttgtagtcacttagttatcagccctc

SEQ ID NO: 292983 - DNA, 612 bp, Homo sapiens
attttaattaacccgtaagaacctagtgcaggacaaatgagagttagcttcaaagcaatagccttaggtgggtgcactgttgttccagagatgctgatgctacaccaaacactgacaccagcccttagattctccccccaggacaggcctggtgtgattcccatgttgggggtgctagggcaggaggcggccttttaaggaaactgagtctcagggacaggaaccacctggcaaaatcacacagctactcagggcaagagcagaagctggggctttgatttctccgctggaagtctctcccacacyggcgggcctctcatccttccttagcctcacatgctacattggagatagactattctgctctcatctgaggccatggtttattcaagactggctcagaatggctttggactatttggactattttctaaaataactaaacccatctcaggaggaggaagctggggatgtccaagggaatgtgcccatgcatctgcctggcagtggccgggcttggagtagaagctgagtgcaccatgatcactgccaagtgccggcatcaagcatttggtttctacaccagcttcacgcagaggacaagggccagcc

SEQ ID NO: 292984 - DNA, 612 bp, Homo sapiens
attttaattaacccgtaagaacctagtgcaggacaaatgagagttagcttcaaagcaatagccttaggtgggtgcactgttgttccagagatgctgatgctacaccaaacactgacaccagcccttagattctccccccaggacaggcctggtgtgattcccatgttgggggtgctagggcaggaggcggccttttaaggaaactgagtctcagggacaggaaccacctggcaaaatcacacagctactcagggcaagagcagaagctggggctttgatttctccgctggaagtctctcccacaccggcgggcctctcatccttccttagcctcacatgctacattggagatagactattctgctctcatctgaggccatggtttattcaagactggctcagaatggctttggactatttggactattttctaaaataactaaacccatctcaggaggaggaagctggggatgtccaagggaatgtgcccatgcatctgcctggcagtggccgggcttggagtagaagctgagtgcaccatgatcactgccaagtgcyggcatcaagcatttggtttctacaccagcttcacgcagaggacaagggccagcc

SEQ ID NO: 292985 - DNA, 579 bp, Homo sapiens
caattgcatcaaaaagaataaaataccaatgcattaacttaccaatgaggcaaatgtcttgtacactgaaaactacaaagcatgctaaaaggaattaaagaatagttcaataaaaaggcatcacatgttaatggattgaaaggcttaaaattgttaaaatgacaatactacccaaagccatctacagattctaagcaatctttatcaaaatcccaatgacsttgtgtgcagaaatataaaagttcattctaaaatttgtatgacatcacaagaatctccaattctgcgaagaaagtcattggaagtcaatgcctgcttccttctaacttaccaattctgtgaagaaagtcattggtagcttgatggggatggcattgaatctataaattaccttgggcagtatagccattttcacaatattgattcttcctatggatgagcatggaatgttcttccatttgtttgtatcctcttttatttcattgagcagtggtttgtagttctccttgaagaggtccttcacgtcccctgtaagttggattcctaggtattttattctctttgaagcccaagtttctt

SEQ ID NO: 292986 - DNA, 579 bp, Homo sapiens
caattgcatcaaaaagaataaaataccaatgcattaacttaccaatgaggcaaatgtcttgtacactgaaaactacaaagcatgctaaaaggaattaaagaatagttcaataaaaaggcatcacatgttaatggattgaaaggcttaaaattgttaaaatgacaatactacccaaagccatctacagattctaagcaatctttatcaaaatcccaatgacgttgtgtgcagaaatataaaagttcattctaaaatttgtatgacatcacaagaatctccaattctgcgaagaaagtcattggaagtcaatgcctgcttccttctaacttaccaattctgtgaagaaagtcattggtagcttgatggggatggcattgaatctataaattaccytgggcagtatagccattttcacaatattgattcttcctatggatgagcatggaatgttcttccatttgtttgtatcctcttttatttcattgagcagtggtttgtagttctccttgaagaggtccttcacgtcccctgtaagttggattcctaggtattttattctctttgaagcccaagtttctt

SEQ ID NO: 292987 - DNA, 579 bp, Homo sapiens
caattgcatcaaaaagaataaaataccaatgcattaacttaccaatgaggcaaatgtcttgtacactgaaaactacaaagcatgctaaaaggaattaaagaatagttcaataaaaaggcatcacatgttaatggattgaaaggcttaaaattgttaaaatgacaatactacccaaagccatctacagattctaagcaatctttatcaaaatcccaatgacgttgtgtgcagaaatataaaagttcattctaaaatttgtatgacatcacaagaatctccaattctgcgaagaaagtcattggaagtcaatgcctgcttccttctaacttaccaattctgtgaagaaagtcattggtagcttgatggggatggcattgaatctataaattaccttgggcagtatagccattttcacaatattgattcttcctatggatgagcatggaatgttcttccatttgtttgtatcctcttttatttcattgagcagtggtttgtagttctccttgaagaggtccttcacgtcccytgtaagttggattcctaggtattttattctctttgaagcccaagtttctt

SEQ ID NO: 292988 - DNA, 590 bp, Homo sapiens
agctattttaaagtgctgtttgctaattccaaaatttgtgtcaactgaaggtatgtttctattgattgctttttcttttaatatgagtcatattattctgcctctttgtatgtttagtaattttttattgtatgctgggcattgttaatgctattttgtagggcattttggattatgttgtcttctgttttaggttctaacagacagttaaattactagtggatcctctggatattgtcaggcttgttattatgcttttcaggatgagtttattttgatttccactttagtctaggatatagttcttactctagggcatggtccttattcctaaratataacccaatattctcagtgaggtgtcttcactttggttaaaatggagtttcaagatctctcagcattgcataacctcatgaacctccattaagctttcaacccttcagcagccacttcctaggctatggtacagcatcccaacctgtatatatgcagcacagacctcagccaagaacctgagagaaaccctcatgtagactttgcccttagaaggtccctcccctctggtaccctgcctttcaaatttcaga

SEQ ID NO: 292989 - DNA, 644 bp, Homo sapiens
cctgcctttcaaatttcagatactttcgtgaccccaaactttaatttctgcctcctcagttcaatgaaaccactgcttttactcttttcatgggcttcatttcactgtaacaaggttagaaaaaggatcctaggcagaaagtcagggcaagtcatgggacacatcttttgtgttttccttctctcaagaatcaaaatcctatgcttcctgttgtccaatgcttgacattggacgttgcattttgtgggaaggtaaatccaaaaccagatacttaaacagctagaactatttctggaagtagaagtctgggaaatacatttgaaaatgaaaaggaaaagagaaagaacagggctacaaggctacagttaaaacattgtttggggcctttgtggaaattagaaaaaagttcttccctgcrtgattggaatacaaatgggctcctcttctgggcacagaaattaacaatacatttctttttcttaggactaactccccataagggttgacacagggatatttctgcctcctttgagacaatgagacatgtcttataagcaaggctttcatggtctcagccacttcacattcaagcttcccaattttatggtaaaaggtgtcctcacttctgaagacaatattatgac

SEQ ID NO: 292990 - DNA, 477 bp, Homo sapiens
agggatccttaaaatttgcaagatttcatgattctatagtagactggcagagtttcccacccttctccctgaatttgctggacctccagacctgaggaaggagagagcaattgcttttgctctctccttccttcaggaaggggcaattttctagctccatctgggagacatgtgttgtaagctcactgcttaacagaacttgagacttatttgacagctcctccttcccagttctctccctgcctctytccacatcatcacatgtctcttctcagttttcacattctcttctcctctcatatactctttccatttactcatttactcatatctgttgaccccttgcctcgttttttttttccttccatcttctatgcctgcttccttctaacttatttttccctcctcactcctcactcattctcttcccatctctcttcttctgccccctctttactcctggtgtactgtcactgg

SEQ ID NO: 292991 - DNA, 477 bp, Homo sapiens
agggatccttaaaatttgcaagatttcatgattctatagtagactggcagagtttcccacccttctccctgaatttgctggacctccagacctgaggaaggagagagcaattgcttttgctctctccttccttcaggaaggggcaattttctagctccatctgggagacatgtgttgtaagctcactgcttaacagaacttgagacttatttgacagctcctccttcccagttctctccctgcctctctccacatcatcacatgtctcttctcagttttcacattctcttctcctctcatatactctttccatttactcatttactcatatctrttgaccccttgcctcgttttttttttccttccatcttctatgcctgcttccttctaacttatttttccctcctcactcctcactcattctcttcccatctctcttcttctgccccctctttactcctggtgtactgtcactgg

SEQ ID NO: 292992 - DNA, 563 bp, Homo sapiens
aggagtccgaaaggtttggtattgggaaatggcagctcaaatccattagctctcactgtgtrccaaggactgtgctaagtgcagtgcctgcattatcttgcttttcttcactgcctggaaaataggtattgttatctccattgtaaaggtgagggaactgctgtttacttgaggtgacacagctattacagtaatggatggagctggagtttaaacccaagtcttgcttattccaaagcccatactctttctataacactgttctgtctcttgtgtcctcatcctgcctctgactttctaattccctgacagcagccacttgcttctgatagtgacttctttgaccccaatcaacaaccaaagcaggtcaacggaagatcacttattatttctttgctgtttgatgctcctgtagccctaggtcatgttatcacggcatcacagtgtgttgtatttggctgaatatgggtttctcactttagctaaactttgagttcctttggggcaggggatttatgctgattatatagtagatgctcattaagggcctactgaacgaaact

SEQ ID NO: 292993 - DNA, 563 bp, Homo sapiens
aggagtccgaaaggtttggtattgggaaatggcagctcaaatccattagctctcactgtgtaccaaggactgtgctaagtgcagtgcctgcattatcttgcttttcttcactgcctggaaaataggtattgttatctccattgtaaaggtgagggaactgctgtttacttgaggtgacacagctattacagtaatggatggagctggagtttaaacccaagtcttgctkattccaaagcccatactctttctataacactgttctgtctcttgtgtcctcatcctgcctctgactttctaattccctgacagcagccacttgcttctgatagtgacttctttgaccccaatcaacaaccaaagcaggtcaacggaagatcacttattatttctttgctgtttgatgctcctgtagccctaggtcatgttatcacggcatcacagtgtgttgtatttggctgaatatgggtttctcactttagctaaactttgagttcctttggggcaggggatttatgctgattatatagtagatgctcattaagggcctactgaacgaaact

SEQ ID NO: 292994 - DNA, 608 bp, Homo sapiens
gtgttctctttccctcactgggtctctgtcatccctacatgccacttgcagcactggcccctctgactgatattattggtctgttaaaagggatttattattcaaccaactaactcattgagcctcctttatgcacagctttatgctgacagcatatgcacatatgactagcttgttcctgtactcaaggcacacaamgtctgctgtgaaaacataatgagcacatgtgacacagagagtgagcaagtgataccaaactgcatgaggggtcagggcaagtatagtagatgtttgttatgggagggaggaaagtgagccttgaagaatgaacaggatttagataaaaagatggtaatgtaaacattctaggtagggcaataatgtgctttacccctagatgtgggcttgtgtgtgtgtgtgtgtgtgtgtgtgtgtgtgtgtgtttgaaggtgggggaagtagaggggagaaatgagggcactggcagtctgaaacagggatacatttttcaattagttggggctaaaattttaaggggctagggacaatggaggatgatggaaagttttggaagcagacagtagtttggacctgacttggtaggaagt

SEQ ID NO: 292995 - DNA, 1109 bp, Homo sapiens
tcagggcaagtatagtagatgtttgttatgggagggaggaaagtgagccttgaagaatgaacaggatttagataaaaagatggtaatgtaaacattctaggtagggcaataatgtgctttacccctagatgtgggcttgtgtgtgtgtgtgtgtgtgtgtgtgtgtgtgtgtgtttgaaggtgggggaagtagaggggagaaatgagggcactggcagtctgaaacagggatacatttttcaattagttggggctaaaattttaaggggctagggacaatggaggatgatggaaagttttggaagcagacagtagtttggacctgacttrgtaggaagtgggaaattaccaaaatgctctgacttggaaagtgacaagatcaaattgtgctttagaaacatcctgtcagcagcatatgggggcaatgaaagggctgatcccaggggcagttacacagtcagaaagctatttgcaggagtcagagctgaggaggtaaggccctggattcagaaagtggcagtggagaaaggacaagaaacatccatggtgaacacccatatgwgtcttgcggatggagcagtggcgagagcacaccggaaaagggaggggaagggcttcttaccctaacgcagctagtccctactgctgtgtctttcccctattggctaggattggaccacacawtccaagctaattctgactggctattttaaagagagcaggaatatgagccagagtggcagggtgagtagttcggcaggaagggcggttacagagcaggtgactcaggatgactaagaacagagcaggtgaccaaggatgactaagttcagagcaggtgatagaggctaggagggggttgtttactgaggctaggggcaaggagacacaaagaatgaggaagttaaactttaaaatggagaacaaagaacggggaagctgaacatattgacacattggttctttggagaggaactcagaactcacggtacttcacaattttctccctcttgaattttaaagaaagttaacaggctaaactttgaaggggaaactgatctattctacacctccatccagaaagaggccaaggagcacactgaatggca

SEQ ID NO: 292996 - DNA, 547 bp, Homo sapiens
gtcttgcggatggagcagtggcgagagcacaccggaaaagggaggggaagggcttcttaccctaacgcagctagtccctactgctgtgtctttcccctattggctaggattggaccacacattccaagctaattctgactggctattttaaagagagcaggaatatgagccagagtggcagggtgagtagttcggcaggaagggyggttacagagcaggtgactcaggatgactaagaacagagcaggtgaccaaggatgactaagttcagagcaggtgatagaggctaggagggggttgtttactgaggctaggggcaaggagacacaaagaatgaggaagttaaactttaaaatggagaacaaagaacggggaagctgaacatattgacacattggttctttggagaggaactcagaactcacggtacttcacaattttctccctcttgaattttaaagaaagttaacaggctaaactttgaaggggaaactgatctattctacacctccatccagaaagaggccaaggagcacactgaatggca

SEQ ID NO: 292997 - DNA, 547 bp, Homo sapiens
gtcttgcggatggagcagtggcgagagcacaccggaaaagggaggggaagggcttcttaccctaacgcagctagtccctactgctgtgtctttcccctattggctaggattggaccacacattccaagctaattctgactggctattttaaagagagcaggaatatgagccagagtggcagggtgagtagttcggcaggaagggcggttacagagcaggtgactcaggatgactaagaacagagcaggtgaccaaggatgactaagttyagagcaggtgatagaggctaggagggggttgtttactgaggctaggggcaaggagacacaaagaatgaggaagttaaactttaaaatggagaacaaagaacggggaagctgaacatattgacacattggttctttggagaggaactcagaactcacggtacttcacaattttctccctcttgaattttaaagaaagttaacaggctaaactttgaaggggaaactgatctattctacacctccatccagaaagaggccaaggagcacactgaatggca

SEQ ID NO: 292998 - DNA, 547 bp, Homo sapiens
gtcttgcggatggagcagtggcgagagcacaccggaaaagggaggggaagggcttcttaccctaacgcagctagtccctactgctgtgtctttcccctattggctaggattggaccacacattccaagctaattctgactggctattttaaagagagcaggaatatgagccagagtggcagggtgagtagttcggcaggaagggcggttacagagcaggtgactcaggatgactaagaacagagcaggtgaccaaggatgactaagttcagagcaggtgatagaggctaggagggggttgtttactgaggctaggggcaaggagacacaaagaatgaggaagttaaactttaaaatggagaacaaagaacggggaagctgaacatattgacacattggttctttggagaggarctcagaactcacggtacttcacaattttctccctcttgaattttaaagaaagttaacaggctaaactttgaaggggaaactgatctattctacacctccatccagaaagaggccaaggagcacactgaatggca

SEQ ID NO: 292999 - DNA, 555 bp, Homo sapiens
ctagttggttgcagccagggttggagagttcaagaaacagtctgaagtccgttgagggaacttataatcaactatgtgatcttgggtgggtcctggccccttgcctggcctaaggatcctctgtaaaatcaagcatgtatccaccaggaggattttcagctgcaagtaataaaacactaacaagcagtggcttaagcaataaatatattaattatctctcataacaagaaatccagagttagactgctttggtcttggtgcagtggcccagtgacatcatcaaagattccaacctctttctactttcctgctctgccaccatgggcgtgttggcttgcacccaggatcacacaacgtctgctgcagctctagaacatccaatgygctcaaggcaggacacggattcgaagacagcaccaggctcatctgaactttctattaggacagtaaaactctcgtagagtcctccaggagacatgctttgttcttcattggccatgattaagtctcacgtccccaaccccagctagaggagcatctgggaaaacggaaaca

SEQ ID NO: 293000 - DNA, 302 bp, Homo sapiens
tatcattaatttattttatataatttatgcatattattatctattatacttataaaaattgttgttattatttataacaaccctgtgtgctgggcttcataggtgcaactgtacaggtttgaaagttgagtctcctggtgtatacacaacaggatrcaggcaatgtcacccacactgtccacgctaagattggaacataaattattctcaatacaaagacagtcttacattgtggctggaataatgtgtcccattgatatggtttggctgtgtccccacccaaatctcaccttgaattgtag

SEQ ID NO: 293001 - DNA, 562 bp, Homo sapiens
ttcttcagttttcgaactcaggctggctctccttactcctcagtctgcagatggcctattgtggaaacttgtgatcaagtgagttaatacttaataaactcccctttatatatataactattctattaattctgtccctctygggaaccctgactaatacatcatcttttaaaaataacttgttattggtataaaatgttttctgtaagcctcatggtaaccacaatgcagaaacctaaaatagatacactgaaaataaaaagcaacatattaaaacatactaaaataacataaccacaaaggaaaacactaagaaagtagaaaagatttacagcaatcagcaaagaagcaacaaaatggcattgtgttatcatttatctataataacactaaatgtaaatggactaaattattcagttaaaagacattgagtagctgaatggagacaagagccaactatatgctacctacaataaacccacttcatctataaagacacataaactaaagtgaagtgacaaaaaaatcatgaaaatggaaaccaatgaagactaagtgtagc

SEQ ID NO: 293002 - DNA, 601 bp, Homo sapiens
tgtggtcataaaacatactttgtatgatttcaattctttgaaatttgtttgatttgttttgtgatgcagatatggcctttcttgatgaatatttcatgttcacttgaaaamagtttgtgttatctttttgttgagtagattgtcctataaccgtcaattaaatccagtttattgatttagtttagttcttccatatccttgctgctttttgcctgtttcttatactgaaggtgaaatgttaaaaatctcaaatgtcactgtgcatgtgtttgtttctctcttaaattctatcatttttttcttttgatgcattttaggtttctattatactgtggttgtgtgtatataaactttaaactgtatttcttttagggaaatttactgtttatgatagtgtaatttacttatgtatctttagtaattttccttactttgatgtctaatttgtctcatattaatatagccactcttaccttagtttaatttgctttctgcataatatttttaatagtttgacttttgtcctaccttatcagattatttgaaggtaatttcttatgggtagcaagtagttggattataacatcataatcattgtgac

SEQ ID NO: 293003 - DNA, 601 bp, Homo sapiens
tgtggtcataaaacatactttgtatgatttcaattctttgaaatttgtttgatttgttttgtgatgcagatatggcctttcttgatgaatatttcatgttcacttgaaaacagtttgtgttatctttttgttgagtagattgtcctataaccgtcaattaaatccagtttattgatttagtttagttcttccatatccttgctgctttttscctgtttcttatactgaaggtgaaatgttaaaaatctcaaatgtcactgtgcatgtgtttgtttctctcttaaattctatcatttttttcttttgatgcattttaggtttctattatactgtggttgtgtgtatataaactttaaactgtatttcttttagggaaatttactgtttatgatagtgtaatttacttatgtatctttagtaattttccttactttgatgtctaatttgtctcatattaatatagccactcttaccttagtttaatttgctttctgcataatatttttaatagtttgacttttgtcctaccttatcagattatttgaaggtaatttcttatgggtagcaagtagttggattataacatcataatcattgtgac

SEQ ID NO: 293004 - DNA, 595 bp, Homo sapiens
aacagtcttcagaaattcttacaataatctgctgtcattattgccaaatatgaggagactttcatttattatttttttaaaaaaataatttcatttctccctttcccctccccttctgaaaccccaattacataaaagtcaaatcttttgctattgtcacaaagattttttatattattattatactttaagttctagggtacatgtgcacaatgtgcaggtttgatacataggtatacatgtgccatgttggtttgctgcacctatcaactcatcatttacattaggtatttctcctagtgctctccctccrccaaccccccaccccgcgacaggccctggtgtgtgatgttccccaccgtgtgtccaagtgttctcattgttcaattcccacctatgagtgagaacatgcggtgtttaatttcctgtccttatgttacacacagattcttagagctggttttatctttgaaattctttttctctgacgtgtccattaatctatcaactacattcagtgcgttttcattataatactgcatttttctattcttaaaaatttcagtcggttcctcttaacagcttcttttaaaag

SEQ ID NO: 293005 - DNA, 595 bp, Homo sapiens
aacagtcttcagaaattcttacaataatctgctgtcattattgccaaatatgaggagactttcatttattatttttttaaaaaaataatttcatttctccctttcccctccccttctgaaaccccaattacataaaagtcaaatcttttgctattgtcacaaagattttttatattattattatactttaagttctagggtacatgtgcacaatgtgcaggtttgatacataggtatacatgtgccatgttggtttgctgcacctatcaactcatcatttacattaggtatttctcctagtgctctccctccaccaaccccccaccccgcgacaggccctggtgtgtgatgttccccaccgtgtgtccaagtgttctcattgttcaattcccacctatgagtgagaacatgcggtgtttaatttcctgtmcttatgttacacacagattcttagagctggttttatctttgaaattctttttctctgacgtgtccattaatctatcaactacattcagtgcgttttcattataatactgcatttttctattcttaaaaatttcagtcggttcctcttaacagcttcttttaaaag

SEQ ID NO: 293006 - DNA, 563 bp, Homo sapiens
tgactttgctttgacttaatttttaaacagcctttaaaaaaattaaggcatagttagcttcaacatataaagggcttggaagtaatcactctattataagaagaaaaaacactgaacgaactgaaaactgataggttttcttggactcatgagagaaatgagattagagcagacagtgtattagtccatttttacactgctataaagaattgcctgagactgggtaatttagaaaggaaaggtgtttgatttacagtttcayatggcggggtggcgggggggtctcaggaaacttacaatcatggtggaaggtgaaggggaagcaaggtgccttcttcacaaagcggcaggagggagaatgaatgcaggaggaactaccaatcacataaaaccatcagaccttgtgagaactcactatcacaagaacagctaggggaaaccacccacatgattcaattacttccacctggtctctccttgacacatgaggattacagggatgatggaggttatatttcaagaagagattttgggaggggacatggccctaccatataaaacag

SEQ ID NO: 293007 - DNA, 596 bp, Homo sapiens
cgtgattacagtaaaatttatagcactgaatatatatattagaaaagaaaaatatcaaataattaatactcttttttktttttttttttttttttgagacggagtctcgctctgtcacccaggctggagtgcagtggcgcgatctcggctcactgcaagctccgcctctcgggttcacgccattctcctgcctcagcctcctgagtagctcagactacaggcgcccgccactacgcccggctaatttttttctattttttagaagagacggggtttcaccgtgttagccaggatggtctcgatctgctgacctcgtgatcctgctcgcctcagcctcccaaagtgctggaattacagcgtgagccaccacgcccggccataattaatgatcttagcttccattttgggaagctagaggaagaagaccaattaaagactaaagcaagtggaaaaaaagcaataataaaatttagagaagaaatcaatagaactaagaacgggaaatggagaaaaatcaatgaaaccaaaaacttgttctttttaaaaatcaatcagatagatagacctccagtcaagcaaaacaagaaaaaaaaaag

SEQ ID NO: 293008 - DNA, 408 bp, Homo sapiens
tgaactggagctactgccttgattcatggtaagatgccagcagttacatgcactgttgcttttgcatctacagtaaaagcgccaacaaagtttaaaaaggcaaataatgtcttagtgttattatgaaaatagttttgacctcatagcctcccagaaagaatcttaggaaccrtgagaggtccacagagtatacttgacatggctaatcatttttgctattttcacccacaaccataagaagaccccaattttatgaaatttaacagaatgtcttcaggtccaatgggagttatggagagtcacctgcctgtgtcttcctccctcactctcctttctcctgtgaccccatcatgatctcaaggctcacagtcttggcaagccaaagtcctcacaagtgtgctgtgtgtc

SEQ ID NO: 293009 - DNA, 556 bp, Homo sapiens
tacactgaaaaatatcaaatattggtgacagagattgaaggggtcccacagaaatggagaagtgtcttttttttagttaatgtgtcagttgattgcatattgatcaataggttmaatgtgattacaatgaaaatcattgcagctttttatttatagaaattaacgagctgattctataacaaataatgaaaatgcataggctattaactaaccaaaacaattttgtaaaagcagacaaatttggagacaaaaagaaacactacttaagacaattaagtatatggtaataaagacagtgttattaacaaaatgatagatgactagatcaatgtgcagaatatagagtctagaagaagatcaatatgtgcatattggtaaaaaacaacagatttccccagaagagaaacaaatttaggatgtccgcttgcactacttctgttcaacattgtactggaggttctagccagggaagcaaggcaagaaatgtaaaaagaaaaaaaaaaagacatccaagtggaaatagagaaacagttctgcctttattggcagatgacat

SEQ ID NO: 293010 - DNA, 544 bp, Homo sapiens
cccctgtcagagacttctgcctagacatccaggtatttctatatatcctctgaaatctagatggaggcaggcccaacaccacatgcaagctgccaaggcttggrgtttgcatcctctgaagcaatggccagagctgtaccttggccccttttagtcatggctggggctgaagctgaagcagctgggacacagggcaccatgtcccaaggctgcacagagcagaagagctggcctagagaaccatttttccctcctaggcctatgggcttgtgatgggaggggctgctgtgaaggtctctgaaatgccctggagacattttccccattgtctttgttattaactttcagctccttgttacttataaaaatttttgcagctggcttgaatttctcccccagaaaatgggtttttcttttctacctcattgtcaggctgcacattttccaaatttttatgctttgcttctcttttaaacataagttccaatttcaaatcatctcttggtgaattcacatgactgtacactttcagtaaaagctaggt

SEQ ID NO: 293011 - DNA, 591 bp, Homo sapiens
tgacttgcatggataaagagaaataaatataactgcactggaaagatggccaggagatatgsgaaaagcaaccaaggaaagcatgaaaagaggtaaggagatgacgtttacatgtggtaatttaaaataataatattgtctagcgatgtaaggcaaaaaacgaaagaactaaaagagcaaaaatgggctctatttagggtttgggaaaagagggttagatcagggagcagagggatagtatttgttattgaaaatattttgtttctcatatttagtcataagcatatattatttttatcaacatattaagacatgatgtttagtcaataaaacttggtatacttgatttctaataatagacaaaataaactcacattgaaaaataaattctaacagaacatctagactcccttcaaagaaaggaaaagagatcttaaaatattaatgaagagtcttcaagaatgatgcaggcatctgccaatttatgagaaactcaattgtaaattgaatgactgatttcaaacatttagcgagactggctggctgtttgctcctttttccacactcatcctgggctcatggttagactct

SEQ ID NO: 293012 - DNA, 591 bp, Homo sapiens
tgacttgcatggataaagagaaataaatataactgcactggaaagatggccaggagatatgggaaaagcaaccaaggaaagcatgaaaagaggtaaggagatgacgtttacatgtggtaatttaaaataataatattgtctagcgatgtaaggcaaaaaacgaaagaactaaaagagcaaaartgggctctatttagggtttgggaaaagagggttagatcagggagcagagggatagtatttgttattgaaaatattttgtttctcatatttagtcataagcatatattatttttatcaacatattaagacatgatgtttagtcaataaaacttggtatacttgatttctaataatagacaaaataaactcacattgaaaaataaattctaacagaacatctagactcccttcaaagaaaggaaaagagatcttaaaatattaatgaagagtcttcaagaatgatgcaggcatctgccaatttatgagaaactcaattgtaaattgaatgactgatttcaaacatttagcgagactggctggctgtttgctcctttttccacactcatcctgggctcatggttagactct

SEQ ID NO: 293013 - DNA, 591 bp, Homo sapiens
tgacttgcatggataaagagaaataaatataactgcactggaaagatggccaggagatatgggaaaagcaaccaaggaaagcatgaaaagaggtaaggagatgacgtttacatgtggtaatttaaaataataatattgtctagcgatgtaaggcaaaaaacgaaagaactaaaagagcaaaaatgggctctatttagggtttgggaaaagagggttagatcagggagcagagggatagtatttgttattgaaaatattttgtttctcatatttagtcataagcatatattatttttatcarcatattaagacatgatgtttagtcaataaaacttggtatacttgatttctaataatagacaaaataaactcacattgaaaaataaattctaacagaacatctagactcccttcaaagaaaggaaaagagatcttaaaatattaatgaagagtcttcaagaatgatgcaggcatctgccaatttatgagaaactcaattgtaaattgaatgactgatttcaaacatttagcgagactggctggctgtttgctcctttttccacactcatcctgggctcatggttagactct

SEQ ID NO: 293014 - DNA, 613 bp, Homo sapiens
gtaaattgaatgactgatttcaaacatttagcgagactggctggctgtttgctcctttttccacactcatcctgggctcatggttagactctattttcagcatcccctgcagtgagttgtagccatgtgaacaaatggacrttgacagaactgatgtactccatttctgcattagccacaaataccttccccttctctctcatcttcaatagctagatgtcagtgcttgagggaaacttggagatctagtgttgaagatggcagagcctcctcatcaatgggtctctgaacagagccatggcagacacagcaatggattgctcagacccccttcatgaaaggacaccctacccagcttggaggagtatgactgtctgacagttccccagctgagtctgcctcagcttcccagccaaagccatcatcttctcagagtaccccctgtccacataataatcaagaggttggtcactgagggaccctcttcttggggcatcagccacatagtgactgaacaaggagaaggtataagggcctggtcatttctgcatggtgcaagactcctccaatgggcatctggtgttacattaataaagaaagaacactaaatgga

SEQ ID NO: 293015 - DNA, 622 bp, Homo sapiens
gttctaattgttgattacattggaatgtagatgccgaaaatgttaggttggtgcaaaagtaattgcagttttcaccattactttcaatggcaaaaaatgtaattacacttgcaccaacctaatatattctggatatttttcatactttcaagacattgagcacatagcctaatgccctccattatgtggagaagactaaaggattrtcatgtatttctacatcacaacatagccaagaagagaaaatgagctcaagaacttcaggttctttgttctttgatgacaaacattgaagacttagttttaagcttttaggtgcaattcttacatctccaccaaacaaatggatgcagggctgtaatataattttttagtattcccacagtgtctttgcataacagatgttcaatcaattaataaataagaaatgatctgtctcacctctactcaatcctcatctccagctgacaccagcttccacttccatcctcatgtcatagaccttctgattaacaatgcctgcatctcctctaaaatccattgcaagtcctgctctctctgatcaccatcccttgttcctgcactccatttgctctagtatttccctggagaattgagcctc

SEQ ID NO: 293016 - DNA, 565 bp, Homo sapiens
cctctgctttcatcctaattgcccttgaaggaatactcaacacacttgaccttccttgcttaattgaaagagcttgctttgtttggtttggtttgcttttttttatgaaactcataataccaagctgttcttgacctcaccttaccttatgggccacttcttgtcagcattaactgttgtttttcttttctttctttytcttggctggatggtccagagctctctttcagcccattgcttctattttctacccattttctatccagtcctatgacaattgagatagtcaatatgctaattgtgttcagcttcatgtccttattttggctttttctgatggcatgcagatctgctactatactgcttctttaatacctccatgacagttcaaaaaaggcacttcaaactcaagaagcacattttcaaaaccaaattttgattcaattctttctatacaaggtacctaaagtgttcttctccaagactttccagttgcagtaaatggctcaccattttcccagttcaccaaaacatcagctacaatagcagattatttcttgaattt

SEQ ID NO: 293017 - DNA, 565 bp, Homo sapiens
cctctgctttcatcctaattgcccttgaaggaatactcaacacacttgaccttccttgcttaattgaaagagcttgctttgtttggtttggtttgcttttttttatgaaactcataataccaagctgttcttgacctcaccttaccttatgggccacttcttgtcagcattaactgttgtttttcttttctttctttctcttggctggatggtccagagctctctttcagcccattgcttctattttctacccattttctatccagtcctatgacaattgagatagtcaatatgctaattgtgttcagcttcatgtccttattttggctttttctgatggcatgcagatctgctactatactgcttctttaatacctccatgacagttcaaaaamggcacttcaaactcaagaagcacattttcaaaaccaaattttgattcaattctttctatacaaggtacctaaagtgttcttctccaagactttccagttgcagtaaatggctcaccattttcccagttcaccaaaacatcagctacaatagcagattatttcttgaattt

SEQ ID NO: 293018 - DNA, 586 bp, Homo sapiens
aaaacttttaaattctttattcattaattaatgtcaaagtaataatgatatttctattgtgtacaaacatagcatttggggggataaaaacctgtatttttcaaaagaaaaattactgaaaagattgacattattcatcttagcaaatctctttaacatctggctccataaatgacagctggattatcatatatgcttgttgattcaatccattttcacatgttgatttgtgtaaagtatataagaaaatccagttttacacaattatgtacttggaaaagggagtgatttttaaacagrctttcagatgtttgtgaatattctacttaaatacaaatcaaacttcaagaagtggtagtttttaaaatgttacttgcaatgtgaaatctgaagccatgtaaattaagattttatactatgctactttatagtatctcagcttaattttcagtctgaacagataacttatctatcatgcagtgatcatttgtaacatcagttattggtcattggaaaatattaatttatatagatcatgcaaatgttgatacatttcattgtataacatctagaaatcacatgcatt

SEQ ID NO: 293019 - DNA, 518 bp, Homo sapiens
atactccttgggctccataactataaatgcaaaggatttcaccagtgtctttattagtcattattccccgctgtgacaaaacctctctgtctacctccagcagaaaasgcatttatcaaaggctgttaaaaggcattaggtgtacagatttgttgcctctaggttcagccttggaagcccaaatgctctctcctcagcctccactcccaccccaatggcctcattgctgtggctgaaagctaaaagccagggctctacctggctgcagccacaccaccagtgtctacgccacctctgcaccagaaacttaaaatcacaacctactggcaatccaccttgccccagccctgccactatttctggatactcccaagtttgtcccaacagaagaggcggaaacttccccaaatggttcgcacagctggctgagcatgggaatcacccatccagttctctagccgggggtcctgtctcctcagggtctctgatcattagtcagatttggaaccactgcacag

SEQ ID NO: 293020 - DNA, 518 bp, Homo sapiens
atactccttgggctccataactataaatgcaaaggatttcaccagtgtctttattagtcattattccccgctgtgacaaaacctctctgtctacctccagcagaaaaggcatttatcaaaggctgttaaaaggcattaggtgtacagatttgttgcctctaggttcagccttggaagcccaaatgctctctcctcagcctccactcccaccccaatggcctcattgctgtggctgaaagmtaaaagccagggctctacctggctgcagccacaccaccagtgtctacgccacctctgcaccagaaacttaaaatcacaacctactggcaatccaccttgccccagccctgccactatttctggatactcccaagtttgtcccaacagaagaggcggaaacttccccaaatggttcgcacagctggctgagcatgggaatcacccatccagttctctagccgggggtcctgtctcctcagggtctctgatcattagtcagatttggaaccactgcacag

SEQ ID NO: 293021 - DNA, 509 bp, Homo sapiens
ccagaaacttaaaatcacaacctactggcaatccaccttgccccagccctgccactatttctggatactcccaagtttgtcccaacagaagaggcggaaacttccccaaatggttckcacagctggctgagcatgggaatcacccatccagttctctagccgggggtcctgtctcctcagggtctctgatcattagtcagatttggaaccactgcacaggtgctacccttgaggttccttgcagcgatgaaaatcatctgggctgccagaaaaccaggagctaacaccgatctccaattccatggctcctgtgaagcatggctcatattagcattcatttttaaggtaaaggagctgtgaaacagttcagttggaaaaaagacccatgtagcaatcactgcagagcccctgctgctctacttcctgcaaagctgaacatgcatgcttaaaaaacaggaaggactggtcaggcatgaagacactgcagaaatctgagcaacacagaaaca

SEQ ID NO: 293022 - DNA, 590 bp, Homo sapiens
gtgctgcttctaacaacagatgccacccttgaacaggcagaagcccatctttctccaccatttggtatayaaaattttctgaaatcagctttgattttgggcctcccatgaatagagtcagtttccacaactgtggggcctcttaggcgatatagtaaaataagtaatcaacagacctgacattattctttaacttttaactctaagttatgtattgtaacaaaatggcatggtggaaggaggaagttctctagtggaaagatgtatgtttaaattctcttgttaatattttgtcaaagatgctatactaggtaggataacaggcccccatgatgttcttttcctattctctggaagatgaatatgtcaggttacggaacaaaggggaatgaaggctgcagatggaactcaggctgctaatcaccacctctctgacttagaaagaatatctggaaaatggaggcagaacattcagtgtcagaggatgtgacgtagaagactcaaatggttccttttggctttgaagataggagggccctgagccaagggatgaagtagcctttagaatctgaaaaaagccgggaggagat

SEQ ID NO: 293023 - DNA, 590 bp, Homo sapiens
gtgctgcttctaacaacagatgccacccttgaacaggcagaagcccatctttctccaccatttggtatataaaattttctgaaatcagctttgattttgggcctcccatgaatagagtcagtttccacaactgtggggcctcttaggcgatatagtaaaataagtaatcaacagacctgacattattctttaacttttaactctaagttatgtattgtaacaaaatggcatggtggaaggaggaagttctctagtggaaagatgtatgtttaaattctcttgttaatattttgtcaaagatgctatactaggtaggataacakgcccccatgatgttcttttcctattctctggaagatgaatatgtcaggttacggaacaaaggggaatgaaggctgcagatggaactcaggctgctaatcaccacctctctgacttagaaagaatatctggaaaatggaggcagaacattcagtgtcagaggatgtgacgtagaagactcaaatggttccttttggctttgaagataggagggccctgagccaagggatgaagtagcctttagaatctgaaaaaagccgggaggagat

SEQ ID NO: 293024 - DNA, 416 bp, Homo sapiens
gtttttaaatatgtaaggatgcaggtgactatgccctcacccagagaatcagaatgcttggaagatgggcacttgtaattttcaaagcagcttcaagggacttagagtttgtatgatgccgtgtgcttaagagccctgtatcatttcctattttgtggggatatgcaaatgacggaatgagaaaaaaatatgcaaataaggacccagagaagtttagtaatctaagaagtagcctaaggaccactgacttctaacgcaggatttttccttctataacacaccmgctcttttaaaaaagaccattgcataaggaatttaattgcttccttttactattcactttcactaaagttgtattcttctcagccaaggaattataaatagcttcggaaaagattgtttttaaacgagacctg

SEQ ID NO: 293025 - DNA, 606 bp, Homo sapiens
tactcacccaacatattgactttagcccagtgagacctgtctcagatttctcatctatgtgcctgtaggataatctgtttccctgccgtttcccagcagcagtaggaaattaagacactgagatacatggatactgaaattgtttgaaatatcaaacacaacaaaatacacccattaaaattagttttacttcagtgaaaacaattttaattcagtgaaaacaattcagtttagatttttcactggagcacatgtcacaacaagaggaaaaagaaacctatttgcagtatatttaacaattatgtgtcactatgaaaattcccrcaaagtctgccctttgcaacaactttctatcttgacttctttgatttggcaccttttatagcctcctacttctaattatatttcttctcattcccctgtttttccacatttcatttctatatccattcttttcactggtgacattttccattttcaaggctttaacaacccctgccatcttgatggggttaaccatattccacaagccctgatatgtgtctcaagctgaattcccacctttcacctgtgtatgtggtaacctctcccccactatacccagtc

SEQ ID NO: 293026 - DNA, 551 bp, Homo sapiens
catgtcacaacaagaggaaaaagaaacctatttgcagtatatttaacaattatgtgtcactatgaaaattcccgcaaagtctgccctttgcaacaactttctatcttgacttctttgatttggcaccttttatagcctcctacttctaattatatttcttctcattcccctgtttttccacatttcatttctatatccattcttttcactggtgacattttccattttcaaggctttaacaacccctgccatcttgatggggttaaccatattccacaagccctgatatgtgtctcaagctgaattcccacctttcacctgtgtatgtggtaacctctcccccactayacccagtctaccttgcatgtctctggaaacaacactccaacacaccctaaactaaaacctcaaccccacctctacctgcatcctgcttattcagagtttcaggagcaacacctctttcctctaagtggctgcaccaagaatctcaatgttttgcaatcactctttccacatctaatcagctgtaaattctaattcttgcaaat

SEQ ID NO: 293027 - DNA, 1113 bp, Homo sapiens
catgtcacaacaagaggaaaaagaaacctatttgcagtatatttaacaattatgtgtcactatgaaaattcccgcaaagtctgccctttgcaacaactttctatcttgacttctttgatttggcaccttttatagcctcctacttctaattatatttcttctcattcccctgtttttccacatttcatttctatatccattcttttcactggtgacattttccattttcaaggctttaacaacccctgccatcttgatggggttaaccatattccacaagccctgatatgtgtctcaagctgaattcccacctttcacctgtgtatgtggtaacctctcccccactatacccagtctaccttgcatgtctctggaaacaacactccaacacaccctaaactaaaacctcaaccccamctctacctgcatcctgcttattcagagtttcaggagcaacacctctttcctctaagtggctgcaccaagaatctcaatgttttgcaatcactctttccacatctaatcagctgtaaattctaattcttgcaaatwcctctcttgccatgtgacacatcttctagccattcgccttcctctatgattgaaagcttcttgtggcctcatcaagagcagatgccagcatcacacttcctgtacagtctgaaaaatcacaagccaattaaatctctttatagattaccagtctcaggtatttcattataataatgcccctggactaatacagaaaattggtaccaaggagcaagacattgctataaagatacctgaaaatgtggaagcagctttggawctgggtaatgggcagaggttggaagagtttggaggtctataaagaagataagaacacgagggaagctttgaaacttcttagaaacttgttaagtgcctgtgaccaaaatgctgatagaaatgtgaagagtgaaggccaggctgaggaggtttcagatggaagtgtggaacttactgagaactggagtaaaagtcacccgtgttacaccctagcattataccttggctgcattgcattcatgctctagggttgtgtggagttttgaacttaaaagtgatgactaagaatatcttgtggaagac

SEQ ID NO: 293028 - DNA, 1117 bp, Homo sapiens
ttctacaacctgcataattagaaaagcaattttttttggccccagaaccttcagatattggtcattgtcccaaaataaagtgtgagtccctaacagtgatgttccacatttccatagtacagggctagaatatttttccatatatgtttcctattatttttttctctcaggattcattcatactgtaaaaaaatattgaggacacaaaaaagctcctatttatgtgtgttagatttataggtrgtgttttaatccattttcacactgctataaagaactacataagactgagtaatttatgaagaaaaaaagtttaattgactcacagttctacatggctgggaaagcctcaggaaacttacaatcatggcagaaggtaaaggggaaacaaggtatatgttacatggtggcgagagagagagcaagtggggaagtgccacgctttaaaaccatcagatcttgtaagaactcactcattatcacaagaacggcatgggggtaactgcccccatgattcaagcacctcccaccaggtccctcccttgacacttggggattatgggaactgtwttcacaatattccacatttataaagcaaagacctatactgatctcacaacaggtctttgtgttaatacaaacgaaggcaggggcatcaaactacattactcatgctttcccaccatgcacttgaagtatttaaaataggaagaaaaatcacagcttcaattaggaatawccttggtaaagcagtaaaaatgaatcgtgacccactttttagtaccctatgttatgaaacacgcaaagcacttctgctgcatacacaagcatgatggctgctgcaggaaaagcacttgagctacaagctgaactagctgttctttctatagaacaaactatggttaattcagacatgggtactaagttttttaaaaatgaagttaagtctgttccttgaagtaaaagaacagtatttgggttttttgttttgagacagggtcttgctctgttgcccagatttgagtgctgtggtgcaatcactgctcactgcagcctcaatctccaggactcaagtgatcctctagcctcagcctcccaagtaggtgggactataggc

SEQ ID NO: 293029 - DNA, 506 bp, Homo sapiens
tggggaaaacgaggctcagagaggtgaagaaacttacttcagatcacacaactaacacatggctgaactgatgaaactctggtctgccttattccaaagccagggcttttacatgaaccgtcatgcagagacctcttagcaaatccaaatatttctggtaacacttttcatagaggataatggtttggaactaagcaatggaacacttggagtgaagaaggataacaaacytaaacgacttgacatttgacatgtaaacagcattttaaaataagcttttcaatagctttacaggccctagcatcagtgaaaactagctgtagtttttatacactgctttccttcctattacatacaaatcttaaaatatgctcagagacaggaagtagaatggtggttgccagggacctgggggaaggagggcaatagggaattactattcaaaggggacagggttttagttttacaagctgtaagagttaaggagctggatagtggtgatggtt

SEQ ID NO: 293030 - DNA, 454 bp, Homo sapiens
ctggcaatgatgggaccaccctgggatgtcccaaggctacacaggctggacaggggaaggcgagggcaagagagtggccagaagcccagaaacaaactgacccctgaagtgccacagagcctggtgccagggtgagagtggggctgcgggagggggcgccaggcatccaggcctcttcccaccccacccagtggggccaggagctcctgggggatgggggacagcctgaggactgaggcacccctgggaaaggcttacctgagagtccagggttcctcaccacggscgccccatcctgagcccgcacacctgcccaagctgatgccaacaccactgacactggcgggcgggcagggcgggcttcctgccagccactgaatcatccgtacatccgccgcactgccggacaggctcagctatgaagagggcggtggggggaagggaggggagacgg

SEQ ID NO: 293031 - DNA, 457 bp, Homo sapiens
tgatgaacaaagggattggaacacgcacatcatattccattccttctcttctttgctttcatgaaactagattacctcctagaaaataattaaaaaaaagaatatgactgtagctactaattcttgaaactatttttagtagacctttataaagatattatttctgtatttgccaaccacctaaatatgaaatatttcatatctttcacatattcaggtatagagtaagcatgttagtkcaaatgaaaattgacttatacttaccaacagctacaatagtggctggcatgggacttcatgccatgcatgaatgtggatatggcttgggaaatctacccaggagtaacagttgttgtcttggctcacccctatcaaccaatcagaactcatcttggaccttaaaacctcagcaaagctttccttgatacatttgtctggcctttgcctagcatggcag

SEQ ID NO: 293032 - DNA, 600 bp, Homo sapiens
tctgtgttaggcaaagaagaaaattcaacgtacacagccatattctgccatttgtttagtgacaagccctaaaaggttttgtttacagaaaccacttgggcagactgcaaagctccacaaataatggaacctgcctttagtaagagttttagttttgtttatttgtttgatgctatgtcaaatggagaggaaaaattcttttctagcagcttatttatttctaagccatgaaaataaatggctttaaaacaagctaaatggactgaagtgactagaactggattttgtggtttattgattagttcccaaacttatatgagaattgaaatatcttggattttcatgtgttgaagtcttatccagaagtgcagtagagcaaagatgttcattttgtcaagaaaaatgttcgttgctcaagaagttgcaggaaaataatatttaagcagacacagaattsagaatataagaagacaaaatgagaatatgatagctggtgtcacttcttggctatgcatagacctgaaagcacaacatatctatggcccaagaaaaattcacagttctgatgcagacaaacttagaaagcctcgagacagccca

SEQ ID NO: 293033 - DNA, 502 bp, Homo sapiens
tgggccttcttgattttatacagcagattcaaattcatgcttcttcagattccagccacatgctctcataagaggaatatacttcctttcataaaattagcagaaatggtatttaccactcactcatttcaaatttgaactctggtttttgggtacttctcctttgataaaataagaattttttgaaaaaaagtttctgggttgtcaaaatgaatatcaggtcccttatatgctctttactttacagataaaggaattactgatgttttcttccttggcaggttccggccaaggctgcaccattataaggaatagtattagatttggcttaagagaaaaagcacttcttgtttttctccatgtgttccaaaactgmtgagtaggacgcatttcactaagcccaaattctttctgcaagtaaaatttagaagaaaggaaaataatttgtgagatattaaatgcattactaagagatagcatggtgcccttttgcaatggctgt

SEQ ID NO: 293034 - DNA, 556 bp, Homo sapiens
gtaccaggttcgttccttgctcctgcacctgccaacctgcaagcttcccctcctgtaaggagtttgagtgcggtggccgagcaaaggagacacccctgttgcaagtcccatgagggggtcaagggaactctcccgtctcaatattcctcactgataatgagagcaaagaacaccatagaatgagacttcatgaattgccatcaagttttgcacacagttactttcatcccagattaaagtctctctttttagcttttccaacagttgtcatctcagaccactcaactgctgctctcacttctctcttctccttcctctgcagagctggccatactctttttttttttttgtcactctttttttgttacrtttttgcttgctttcttgtcatttcctttaaaattcatcaacaaaattagtttattaaactttgatatccatcccagtactcatatataatttgatagtgacaatccttccacttattgtgagtttagaataactttgttctataatattgattaggttcagggcacactaacccaaaatatggcac

SEQ ID NO: 293035 - DNA, 591 bp, Homo sapiens
atatcaagatacaaataggtatgtttcataaaacacattatcatacctcagtagatttatgatttacaaaattgcatracatggtcattgttaattgtgctgaaagtgtaagacatacacatatgctttacacgaatggtttcgtgtcagtttacatgaatagggctctgtttttcatctgtggaatttttggaccctgccacaagaaaaaacttcaaggtcacggctaaaggtgattcaaagaagggaaccttttcaagatgtgaactgaagggcaataggaaagtttgaagggcaataggaaagttttttcttattttgtcaggcagtttataattttagccttcagtaacacacacacacacacacacacacacacacacacacacacacacaccatacacagtcattcacaatgccattttatgaaacttatatatgaacttatcatgtatctgaaacatatgatctttaaatgttttaatctatggaaaaacaattattttacaacacatattctaaaaatttcaaatgctagttagggacttaactgggatattttaacaggcaggattctaagatgctccccat

SEQ ID NO: 293036 - DNA, 591 bp, Homo sapiens
atatcaagatacaaataggtatgtttcataaaacacattatcatacctcagtagatttatgatttacaaaattgcatgacatggtcattgttaattgtgctgaaagtgtaagacatacacatatgctttacacgaatggtttcgtgtcagtttacatgaatagggctctgtttttcatctgtggaatttttggaccctgccacaagaaaaaacttcaaggtcacggctaaaggtgattcaaagaagggaascttttcaagatgtgaactgaagggcaataggaaagtttgaagggcaataggaaagttttttcttattttgtcaggcagtttataattttagccttcagtaacacacacacacacacacacacacacacacacacacacacacacaccatacacagtcattcacaatgccattttatgaaacttatatatgaacttatcatgtatctgaaacatatgatctttaaatgttttaatctatggaaaaacaattattttacaacacatattctaaaaatttcaaatgctagttagggacttaactgggatattttaacaggcaggattctaagatgctccccat

SEQ ID NO: 293037 - DNA, 563 bp, Homo sapiens
acaccataacttaccaggtatctgttatgtaccagatgctgaaattgatttgatgtatatttcatgtgatttaattctcatatcaatactcaagatatttttatcttttttataaatgaggacaacaagatcaacagatctgcrtaacatcctcaaggtcataaagttattgctgttgcaactgaggcaaagtctcttgctgcaaatttgggatcgttcaaagatttatattttctttcttccattttattatttaactatataatattttagattttgatagcacctcacatgttgcagtctcaggtaacaacacagtttgtgacaaaaccaaaaaacgtttctcataatatcaatgcttttgcaatattctaccaagatccctaagtaaatggttggtacacatttgggcctgatgaatcagtgagctgtattatccagaaaagaagaaaaatatcactcatggctaattagggctatcgatttcttcatgaaggatgaactgaggcttgagcgatgaataaagttttttgagatagagtcatgaggacaaaaaagcagaa

SEQ ID NO: 293038 - DNA, 563 bp, Homo sapiens
acaccataacttaccaggtatctgttatgtaccagatgctgaaattgatttgatgtatatttcatgtgatttaattctcatatcaatactcaagatatttttatcttttttataaatgaggacaacaagatcaacagatctgcataacatcctcaaggtcataaagttattgctgttgcaactgaggcaaagtctcttgctgcaaatttgggatcgttmaaagatttatattttctttcttccattttattatttaactatataatattttagattttgatagcacctcacatgttgcagtctcaggtaacaacacagtttgtgacaaaaccaaaaaacgtttctcataatatcaatgcttttgcaatattctaccaagatccctaagtaaatggttggtacacatttgggcctgatgaatcagtgagctgtattatccagaaaagaagaaaaatatcactcatggctaattagggctatcgatttcttcatgaaggatgaactgaggcttgagcgatgaataaagttttttgagatagagtcatgaggacaaaaaagcagaa

SEQ ID NO: 293039 - DNA, 563 bp, Homo sapiens
acaccataacttaccaggtatctgttatgtaccagatgctgaaattgatttgatgtatatttcatgtgatttaattctcatatcaatactcaagatatttttatcttttttataaatgaggacaacaagatcaacagatctgcataacatcctcaaggtcataaagttattgctgttgcaactgaggcaaagtctcttgctgcaaatttgggatcgttcaaagatttatattttctttcttccattttattatttaactatataatattttagattttgatagcacctcacatgttrcagtctcaggtaacaacacagtttgtgacaaaaccaaaaaacgtttctcataatatcaatgcttttgcaatattctaccaagatccctaagtaaatggttggtacacatttgggcctgatgaatcagtgagctgtattatccagaaaagaagaaaaatatcactcatggctaattagggctatcgatttcttcatgaaggatgaactgaggcttgagcgatgaataaagttttttgagatagagtcatgaggacaaaaaagcagaa

SEQ ID NO: 293040 - DNA, 509 bp, Homo sapiens
cactcatggctaattagggctatcgatttcttcatgaaggatgaactgaggcttgagcgatgaataaagttttttgagatagagtcatgaggacaaaaaagcagaagtaaacattctgtaagtgagggggatgcatcaaaggtagcagttgtgaggtaagctgagatgggaaatactgagatgattagagtaggtacggttcaagaactctgaggtagctcaagcagtgatgtttatactgaatctggcagttattaagcaacaattacattgtaaatatcctgcagtaacatgtctatktttctaagaagtcaatgcgttctctgtgttggaatctaaagagatttatgaacagcactctacagcgatcattacatacaatacttgttcaaacatgtcatcagtatgactcttcctccagcgaaagaattgtaatctatatgatttttataagcatccctctctcacttccagagcttgtcaaggcagcaccatttttcttctctcat

SEQ ID NO: 293041 - DNA, 382 bp, Homo sapiens
gagcaggcaacctatagaatgggagaaaatttttgcaatctattcatctgacaaagggctaatatccagaatctaaaaagaacttaaacaaagttacagaaaaaaacaacttcatcaaaaagtggccaaaggatatgaacaaacacttctctaaagttcctttttaaaatgrctcagtctctctgtgcctaaaacctacactacatgtaatcagagtataattaacttcccatcccaaaaatataattttattactttaatgataatgaatctcaacccaagggataataaaccttcagagttttccctttacatgtactcaccacagacaacaacaaggacaataccttttgtagttttaattgccatatgtaggttcaat

SEQ ID NO: 293042 - DNA, 382 bp, Homo sapiens
gagcaggcaacctatagaatgggagaaaatttttgcaatctattcatctgacaaagggctaatatccagaatctaaaaagaacttaaacaaagttacagaaaaaaacaacttcatcaaaaagtggccaaaggatatgaacaaacacttctctaaagttcctttttaaaatgactcagtctctctgtgcctaaaacctacactacatgtaatcagagtataattaacttcccatcccaaaaatataattttattactttaatgataatgaatctcaacccaagggataataaaccttcagrgttttccctttacatgtactcaccacagacaacaacaaggacaataccttttgtagttttaattgccatatgtaggttcaat

SEQ ID NO: 293043 - DNA, 592 bp, Homo sapiens
ttaatgttataggcaattatgacagcagcaggcaatgttaataaggttcattcacttggcccttaataaagatgtaccaggtgatgactgtgtgccaggtgctttgtgggaccyaggtacatggtagagaacaacccagagacaatgcatgaccaaaatcatcattgactacaagaacatttggctctttcaagcagctttcccatagtttaagatgcatattttggtatcaaatatttaagaaagaattcactaagtgaattgtgttttgtaggaagtcagaacatgtttctcttttttactatgcctgtcaatgttatctccaaacaaagcactgatttagagattggtctgagtagttggttatgattatggttttaaatgctaacatattaaacctcaatatctagagattttgagatttttatctttcagatgaacattagaaattcgcgaagtcacaaatgtcaacaaatggagaattaagacatactatcaaatgtttcaagggccatcatgctgggagaagggctaggcatattctgttccttgagtgacgtgcctaggataagagagagagcagattgggaaa

SEQ ID NO: 293044 - DNA, 592 bp, Homo sapiens
ttaatgttataggcaattatgacagcagcaggcaatgttaataaggttcattcacttggcccttaataaagatgtaccaggtgatgactgtgtgccaggtgctttgtgggacctaggtacatggtagagaacaacccagagacaatgcatgaccaaaatcatcattgactacaagaacatttggctctttcaagcagctttcccatagtttaagatgyatattttggtatcaaatatttaagaaagaattcactaagtgaattgtgttttgtaggaagtcagaacatgtttctcttttttactatgcctgtcaatgttatctccaaacaaagcactgatttagagattggtctgagtagttggttatgattatggttttaaatgctaacatattaaacctcaatatctagagattttgagatttttatctttcagatgaacattagaaattcgcgaagtcacaaatgtcaacaaatggagaattaagacatactatcaaatgtttcaagggccatcatgctgggagaagggctaggcatattctgttccttgagtgacgtgcctaggataagagagagagcagattgggaaa

SEQ ID NO: 293045 - DNA, 592 bp, Homo sapiens
ttaatgttataggcaattatgacagcagcaggcaatgttaataaggttcattcacttggcccttaataaagatgtaccaggtgatgactgtgtgccaggtgctttgtgggacctaggtacatggtagagaacaacccagagacaatgcatgaccaaaatcatcattgactacaagaacatttggctctttcaagcagctttcccatagtttaagatgcatattttggtmtcaaatatttaagaaagaattcactaagtgaattgtgttttgtaggaagtcagaacatgtttctcttttttactatgcctgtcaatgttatctccaaacaaagcactgatttagagattggtctgagtagttggttatgattatggttttaaatgctaacatattaaacctcaatatctagagattttgagatttttatctttcagatgaacattagaaattcgcgaagtcacaaatgtcaacaaatggagaattaagacatactatcaaatgtttcaagggccatcatgctgggagaagggctaggcatattctgttccttgagtgacgtgcctaggataagagagagagcagattgggaaa

SEQ ID NO: 293046 - DNA, 592 bp, Homo sapiens
ttaatgttataggcaattatgacagcagcaggcaatgttaataaggttcattcacttggcccttaataaagatgtaccaggtgatgactgtgtgccaggtgctttgtgggacctaggtacatggtagagaacaacccagagacaatgcatgaccaaaatcatcattgactacaagaacatttggctctttcaagcagctttcccatagtttaagatgcatattttggtatcaaatatttaagaaagaattcactaagtgaattgtgttttgtaggaagtcagaacatgtttctcttttttactatgcctgtcaatgttatctccaaacaaagcactgatttagagattggtctgagtagttggttatgattayggttttaaatgctaacatattaaacctcaatatctagagattttgagatttttatctttcagatgaacattagaaattcgcgaagtcacaaatgtcaacaaatggagaattaagacatactatcaaatgtttcaagggccatcatgctgggagaagggctaggcatattctgttccttgagtgacgtgcctaggataagagagagagcagattgggaaa

SEQ ID NO: 293047 - DNA, 620 bp, Homo sapiens
aacaaagcactgatttagagattggtctgagtagttggttatgattatggttttaaatgctaacatattaaacctcaatatctagagattttgagatttttatctttcagatgaacattagaaattcgcgaagtcacaaatgtcaacaaatggagaattaagacatactatcaaatgtttcaagggccatcatgctgggagaagggctaggcatattctgttccttgagtgacgtgcctaggataagagagagagcagattgggamaatggaaagaacatgtcttaaattgagagacagtccaaaatcaaatgaactggaaatgttgatattaagccaaaacagccacaatcttaggctattttcatgaaatggatgggttcggtcacctctgagacctacaccaaatttgaaattccatgagattttatgaaatagagtaggtatgctaatttagttttcaagtttcacaagttaagtatatcttctaatgcttgacaataatgctttatttttttaagtctacatgagaagttgctgaaaatttgaatagttaaaaaaagaagtttacatgctgctcatgttttttaagagtcatcattaacacataaagaaagagat

SEQ ID NO: 293048 - DNA, 620 bp, Homo sapiens
aacaaagcactgatttagagattggtctgagtagttggttatgattatggttttaaatgctaacatattaaacctcaatatctagagattttgagatttttatctttcagatgaacattagaaattcgcgaagtcacaaatgtcaacaaatggagaattaagacatactatcaaatgtttcaagggccatcatgctgggagaagggctaggcatattctgttccttgagtgacgtgcctaggataagagagagagcagattgggaaaatggaaagaacatgtcttaaattgagagacagtccaaaatcaaatgaactggaaatgttgatattaagccaaaacagccacaatcttaggctattttcatgaaatggatgggttcggtcacctctgagacctacaccaaatttgaaattccatgagattttaygaaatagagtaggtatgctaatttagttttcaagtttcacaagttaagtatatcttctaatgcttgacaataatgctttatttttttaagtctacatgagaagttgctgaaaatttgaatagttaaaaaaagaagtttacatgctgctcatgttttttaagagtcatcattaacacataaagaaagagat

SEQ ID NO: 293049 - DNA, 620 bp, Homo sapiens
aacaaagcactgatttagagattggtctgagtagttggttatgattatggttttaaatgctaacatattaaacctcaatatctagagattttgagatttttatctttcagatgaacattagaaattcgcgaagtcacaaatgtcaacaaatggagaattaagacatactatcaaatgtttcaagggccatcatgctgggagaagggctaggcatattctgttccttgagtgacgtgcctaggataagagagagagcagattgggaaaatggaaagaacatgtcttaaattgagagacagtccaaaatcaaatgaactggaaatgttgatattaagccaaaacagccacaatcttaggctattttcatgaaatggatgggttcggtcacctctgagacctacaccaaatttgaaattccatgagattttatgaaatagagtaggtatgctaatttagttttcaagtttcacaagttaagtatatcttctaatgcttgacaataatgctttatttttttaagtctacatgagaagttgytgaaaatttgaatagttaaaaaaagaagtttacatgctgctcatgttttttaagagtcatcattaacacataaagaaagagat

SEQ ID NO: 293050 - DNA, 589 bp, Homo sapiens
ttgtggggttaaataaagacaaagaacctggaataaagctcctgatacacattacatgttcaataaatcatatgtatttttatcattgtggacyactctctgaaattatgtatttaacaaatggtggttaatgattaatgtggtccattcagttttggaagaaatgtggttctacattaacttactcagatgcatttgcattaatgcaatgccatccacatgacactgaataaaatggtatgatcaaattacacaaaatataaataagaattaaaatgataaactatttttcttataaaacatatcaataaacaaaaactatacatttactgttggctataacatgctgaagcagactcctctctcttctctttccctttctgtcttttacaatgctggtgtgaagatatattcacacagatattttggaaaatattgtattaagatggataaatggctttaaatattttcacaattcagtgtacagacatccctcaatatcagctggagatttcttccatcatcccacacagataccaaaatccatggatgctcaagtcccttaaataaaatgatgttatatttatat

SEQ ID NO: 293051 - DNA, 642 bp, Homo sapiens
gagatctaaggagaaacacagctgggtctgtaaattataaagtgggataagccacaaatacatctattaaaatgattaaacactgcctctcagatacacrtattcaccaacacctctagaataacctgtttgtttctgtgatttctggcaataaactgccaactgacacaatattattatatgatcacaaaagcaatcacggtaacaacaaaagtatgtagctaagacaaaccttggtaattacataatctctgtgtgtgcaaaagaacacacaatcacagcgtagtgcagaagactctaatcctgtgatgtctctagtcattactgggagtcccacagtaaggcaggaagaataagctttggagtcatgtacaaatgaatttgagtcccaactctatttcctactatttgtgataatgtgggtaagttcatgaacattgaagctcctggactttgatatcttattggaaaataaaattagacaccactaacaatgaaattgccaatgttaaattttgacattggagaatataaatcaacaaaaaatagattactatatttcagcaatatttcagataaaaattttaatttgaaaaatagacaaaggattcaatgacaacataaattatcctgagacggagg

SEQ ID NO: 293052 - DNA, 642 bp, Homo sapiens
gagatctaaggagaaacacagctgggtctgtaaattataaagtgggataagccacaaatacatctattaaaatgattaaacactgcctctcagatacacatattcaccaacacctctagaataacctgtttgtttctgtgatttctggcaataaactgccaactgacacaatattatyatatgatcacaaaagcaatcacggtaacaacaaaagtatgtagctaagacaaaccttggtaattacataatctctgtgtgtgcaaaagaacacacaatcacagcgtagtgcagaagactctaatcctgtgatgtctctagtcattactgggagtcccacagtaaggcaggaagaataagctttggagtcatgtacaaatgaatttgagtcccaactctatttcctactatttgtgataatgtgggtaagttcatgaacattgaagctcctggactttgatatcttattggaaaataaaattagacaccactaacaatgaaattgccaatgttaaattttgacattggagaatataaatcaacaaaaaatagattactatatttcagcaatatttcagataaaaattttaatttgaaaaatagacaaaggattcaatgacaacataaattatcctgagacggagg

SEQ ID NO: 293053 - DNA, 642 bp, Homo sapiens
gagatctaaggagaaacacagctgggtctgtaaattataaagtgggataagccacaaatacatctattaaaatgattaaacactgcctctcagatacacatattcaccaacacctctagaataacctgtttgtttctgtgatttctggcaataaactgccaactgacacaatattattatatgaycacaaaagcaatcacggtaacaacaaaagtatgtagctaagacaaaccttggtaattacataatctctgtgtgtgcaaaagaacacacaatcacagcgtagtgcagaagactctaatcctgtgatgtctctagtcattactgggagtcccacagtaaggcaggaagaataagctttggagtcatgtacaaatgaatttgagtcccaactctatttcctactatttgtgataatgtgggtaagttcatgaacattgaagctcctggactttgatatcttattggaaaataaaattagacaccactaacaatgaaattgccaatgttaaattttgacattggagaatataaatcaacaaaaaatagattactatatttcagcaatatttcagataaaaattttaatttgaaaaatagacaaaggattcaatgacaacataaattatcctgagacggagg

SEQ ID NO: 293054 - DNA, 642 bp, Homo sapiens
gagatctaaggagaaacacagctgggtctgtaaattataaagtgggataagccacaaatacatctattaaaatgattaaacactgcctctcagatacacatattcaccaacacctctagaataacctgtttgtttctgtgatttctggcaataaactgccaactgacacaatattattatatgatcacaaaagcaatcacggtaacaacaaaagtatgtagctragacaaaccttggtaattacataatctctgtgtgtgcaaaagaacacacaatcacagcgtagtgcagaagactctaatcctgtgatgtctctagtcattactgggagtcccacagtaaggcaggaagaataagctttggagtcatgtacaaatgaatttgagtcccaactctatttcctactatttgtgataatgtgggtaagttcatgaacattgaagctcctggactttgatatcttattggaaaataaaattagacaccactaacaatgaaattgccaatgttaaattttgacattggagaatataaatcaacaaaaaatagattactatatttcagcaatatttcagataaaaattttaatttgaaaaatagacaaaggattcaatgacaacataaattatcctgagacggagg

SEQ ID NO: 293055 - DNA, 631 bp, Homo sapiens
ataaaaaatgcttctaatgaagccaacctcttcagatgttctgatggaatgtagcccagaatgacagtgctgtgtggtctctcagtccaattacagcagggtatgacttgcctagaaaattatgttaaccaagcattggatctaccaacaactcatccaaaccatcaaatgccacaaaatgcatgttggatataatagcaaactagatttcttatatctcagccaaaattgtcttaacatgaaaaagctggcataattttctacttgcagctctagaatttattttctgcacattttctcttctcatttccctaggcaatatttttatgttgaatagactccctttggtaagggacttgcaagcagatgtaatggcaggaaattgagctagtgctcccggtgctaaacataagccatccttgtttttcatttcctcagcacagtaagaaaaattaaatgtttgctacttataggagtcagaaacattgcaaaacacgtttacattgaatattaactcttaattcctaaatraaaattaaaatacaatgttcaatgtctttaattcttgatatgctattaaacaatatgaggcacatttgcaagctgcaggaaaatgggatggagtagacac

SEQ ID NO: 293056 - DNA, 379 bp, Homo sapiens
cttacttagtatgtgctatatacatgttasaaaaattttctcgtacccaataaatttgtacaaataaaaagcaagtaatactcatcccatagaggtattgtgagatttaaatgtgctccctaaacacttcacagttgatataatttctacattatttaatcttcacagtaagtatatgaaatgaggaatataatattgttggcattacacagatgaagggaaaaaggctcaggaaagtgacttttgaaaggtgtattactggcttatcatagagcaaatatttaaatctaagtcttataaaacttaagtctctccagtctgtctttcagtctaagggagaaggacaggaatttctgcaagccatactaatacagtatgc

SEQ ID NO: 293057 - DNA, 379 bp, Homo sapiens
cttacttagtatgtgctatatacatgttagaaaaattttctcgtacccaataaatttgtacaaataaaaagcaagtaatactcatcccatagaggtattgtgagatttaaatgtgctccctaaacacttcacagttgatataatttctacattatttaatcttcacagtaagtatatgaaatgaggaatataatattgttggcattayacagatgaagggaaaaaggctcaggaaagtgacttttgaaaggtgtattactggcttatcatagagcaaatatttaaatctaagtcttataaaacttaagtctctccagtctgtctttcagtctaagggagaaggacaggaatttctgcaagccatactaatacagtatgc

SEQ ID NO: 293058 - DNA, 379 bp, Homo sapiens
cttacttagtatgtgctatatacatgttagaaaaattttctcgtacccaataaatttgtacaaataaaaagcaagtaatactcatcccatagaggtattgtgagatttaaatgtgctccctaaacacttcacagttgatataatttctacattatttaatcttcacagtaagtatatgaaatgaggaatataatattgttggcattacacrgatgaagggaaaaaggctcaggaaagtgacttttgaaaggtgtattactggcttatcatagagcaaatatttaaatctaagtcttataaaacttaagtctctccagtctgtctttcagtctaagggagaaggacaggaatttctgcaagccatactaatacagtatgc

SEQ ID NO: 293059 - DNA, 604 bp, Homo sapiens
catttgatttgctttgctaatagtttgtttaggatttttatgtttctgttgatcagggatattggcctgtagttttcatttttgttatgtccttacctgggtttggtatctaggataatgctgactttgtcaaataagtttgggagaattcccttctcttttatttttgaaaatagtttcaggaggcttgttattaattcttagttgtatttttggtataatttgtgaattcatctggtcctgggcttttctttgttgtgagactttttattgttctttcaactcactagtcattactgktttttttcatattttctatttattcttcatctaatcttggtaaattgtatgtttccaggaatggatccatgtcttctagattttccagttgtataattgttaataatagtctctcataatcttttgcatttctgaggtatcagttgtaatgtctcatttttcattttggattttattcggatctcctttgcttgccaagtctagtgaatgctttatcagtttgtttaatctttttgaaaaaccagcttttaattttattaatcttttgtcttgaatttactttatattttatatagttatgctc

SEQ ID NO: 293060 - DNA, 363 bp, Homo sapiens
cttgcctaccacattgaagggtgagatttaggctaggcagcattcatcacaagctgacttaacagactttgggccatgaaagaagatcagtggtagtctgtcagaattccmtgtgggcctgtggtggtggtggttatggagtgaggctcctctgcctttgggaaacggaggaaagatggagaaggactccatcttgtgatttaaatgctagttcagctgcagtacaacaaaacatcaggggtaattttaaggatttttactctagtctctagttcctggatggcacttcaggacccatgcaggggtgagggatctcatcaccctgaagtgaaggaaacagcctggctagatttgccagctgct

SEQ ID NO: 293061 - DNA, 595 bp, Homo sapiens
caataaccaagtacaagaaggttacagaacaccaagcagagttaacccggagaagactacttcaaggcatttaataataaaactctcaaaggtcaagaataaagaaaagattctaaaggcrgcaagagaaaagaaacaaataacatacaatggagcttcaatacatttggcagcagacttttcagtggaaaccttacaggccaggagacagtggcatgacatacttaagatgccaaaggaaaaaacttttaccctagaatagcatatatggacaaaatatccttcaaacatggagaaaaaaagactttaccagacaaacaaaagctgagggatttcataaacaccagacctgtcctacaagatatgctaaaagagagtacttcagtgagaaagaaaagatgttaatgagcaataagtaatcacaccaaaggtacaaaactcactggtaatagtaagtacacagaaaaacacagaatattataatactataactgtggtgtgtaaactactcttatcctaagtaaaaagagtaatcaatggaccatcaaaaatagtaactacaacaactttacaagatatacacaatacaataata

SEQ ID NO: 293062 - DNA, 595 bp, Homo sapiens
caataaccaagtacaagaaggttacagaacaccaagcagagttaacccggagaagactacttcaaggcatttaataataaaactctcaaaggtcaagaataaagaaaagattctaaaggcggcaagagaaaagaaacaaataacatacaatggagcttcaatacatttggcagcagacttttcagtggaaaccttacaggccaggagacagtggcatgacatacttaagatgccaaaggaaaaaacttttaccctagaatagcatatatggacaaaatatccttcaaacatggagaaaaaaagactttaccagacaaacaaaagctgagggatttcataaacaccagacctgtcctacaagatatgctaaaagagagtacttcagtgagaaagaaaagatgttaatgagcaataagtaatcacaccaaaggtacaaaactcactggtaatagtaagtacacagaaaaacacagaatattataatactataactgtggtgtgtaaactactcttatcctargtaaaaagagtaatcaatggaccatcaaaaatagtaactacaacaactttacaagatatacacaatacaataata

SEQ ID NO: 293063 - DNA, 520 bp, Homo sapiens
gtggcaattcttcaaatatctagaagcagaaataccatttggcccaggaatctcgctacttggtatatactcaaaggattataaatcattctattataaaaatacatgcacacatatgctcattgtagcaccattcacaatagcaaagacgtggaatcaatgcaaattctcatcaatgatagaatgcccatcaatgataaagaaaatgtgacatatatactcatgaaatactatgcagtcgtgaaaagcaataagatcgtggtttttttttccagtgacgtgaatggagctggacgccaatatcctcagcaaactaattcaggagmagaacaccaaacaatgcattcagtcacatgtaagtgcaaactgagcagtgagaagatatggccacagctgtgggtaacaacacacattgggtcctgctggggagggttggggtagagagagcatcaggtacaacagctaatgcatgctgggcttcatactgaggtgatgggttgatctgtgcagcaaaccacca

SEQ ID NO: 293064 - DNA, 211 bp, Homo sapiens
gatacatttgaggggtagtagtgagatattttatagagcattcccaatacagatctgtcaaatgggttttcatgcttggactggagytacagatttttgtaaataacacgacagaggtgtggtacatttgccaacatcccaccaggaatacatggtatctacatgtattcctaaatggagctgttaaaccttatctcttggttaaaatagt

SEQ ID NO: 293065 - DNA, 573 bp, Homo sapiens
ttaaagtgtaaacctataaaatacctagaaaataacataggagaaaatctagatgaccttgggtttggtgatgactttttggagatgacaacaaagacagaatccatggaagaaatatttataagctggatttcayttaaatcgaaattttcttctcttcaaaagacaatgtcaaacaaatcaaagacaagtcacgaactaagaaaatatttacaaaagatatataaacaactgttatccaaaatatgaaaaaaaaactctcctaaaattcaacaagataatctgattaaaaaatgggctgaagtccttaaaacacctcaccagagaaggtatacagatgacaaataagcatatgaaaagatgttccttgacatatgtcatcagaaaaatgaagattaaaacaatgagagaccactatgcaccatttagaaaggccaaaattcagaccagtgaaaatgccaaatgctgctaaggatgtggagtagcaggaattcttatttattactggtcagaatgcaaaatagtccggccactttggtagttaacttgatagtttcttacaaaagtaaacat

SEQ ID NO: 293066 - DNA, 573 bp, Homo sapiens
ttaaagtgtaaacctataaaatacctagaaaataacataggagaaaatctagatgaccttgggtttggtgatgactttttggagatgacaacaaagacagaatccatggaagaaatatttataagctggatttcatttaaatcgaaattttcttctcttcaaaagacaatgtcaaacaaatcaaagacaagtcacgaactaagaaaatatttacaaaagatatatraacaactgttatccaaaatatgaaaaaaaaactctcctaaaattcaacaagataatctgattaaaaaatgggctgaagtccttaaaacacctcaccagagaaggtatacagatgacaaataagcatatgaaaagatgttccttgacatatgtcatcagaaaaatgaagattaaaacaatgagagaccactatgcaccatttagaaaggccaaaattcagaccagtgaaaatgccaaatgctgctaaggatgtggagtagcaggaattcttatttattactggtcagaatgcaaaatagtccggccactttggtagttaacttgatagtttcttacaaaagtaaacat

SEQ ID NO: 293067 - DNA, 573 bp, Homo sapiens
ttaaagtgtaaacctataaaatacctagaaaataacataggagaaaatctagatgaccttgggtttggtgatgactttttggagatgacaacaaagacagaatccatggaagaaatatttataagctggatttcatttaaatcgaaattttcttctcttcaaaagacaatgtcaaacaaatcaaagacaagtcacgaactaagaaaatatttacaaaagatatataaacaactgttatccaaaatatgaaaaaaaaaytctcctaaaattcaacaagataatctgattaaaaaatgggctgaagtccttaaaacacctcaccagagaaggtatacagatgacaaataagcatatgaaaagatgttccttgacatatgtcatcagaaaaatgaagattaaaacaatgagagaccactatgcaccatttagaaaggccaaaattcagaccagtgaaaatgccaaatgctgctaaggatgtggagtagcaggaattcttatttattactggtcagaatgcaaaatagtccggccactttggtagttaacttgatagtttcttacaaaagtaaacat

SEQ ID NO: 293068 - DNA, 573 bp, Homo sapiens
ttaaagtgtaaacctataaaatacctagaaaataacataggagaaaatctagatgaccttgggtttggtgatgactttttggagatgacaacaaagacagaatccatggaagaaatatttataagctggatttcatttaaatcgaaattttcttctcttcaaaagacaatgtcaaacaaatcaaagacaagtcacgaactaagaaaatatttacaaaagatatataaacaactgttatccaaaatatgaaaaaaaaactctcctaaaattcaacaagataatctgattaaaaaatgggctgaagtccttaaaacacctcaccagagaaggtatacagatgacaaataagcatatgaaaagatgttccttgacatatgtcatcagaaaaatgaagattaaaacaatgagagaccactatgcaccatttagaaaggccaaaattcagaccartgaaaatgccaaatgctgctaaggatgtggagtagcaggaattcttatttattactggtcagaatgcaaaatagtccggccactttggtagttaacttgatagtttcttacaaaagtaaacat

SEQ ID NO: 293069 - DNA, 528 bp, Homo sapiens
aagccataatacacaggcaatcctgggaaatagatattgttgtccaacccactagaaaagaaataaattgatgaattatttcctggttacttcctaggttgtattgctatctggagcaattcaaatatgggtccaatattaggacatttttaatgtaaataaattcaaactaggcttaagcatatcaggggagttatttgagaaacaaacaaacaaataaaaacaacaaaaagggagttttgcatgaagtcatagcagaaataaacctcaaaaaagtgaagttagagaattagtgatgaaaaatatttctttttctctggacattgcatctcacagcaaatcagttttagacctgtttttctcatactcaggctagattgatttactttgctattctggcccacaggacaaatcagctstggagttttcaattcacagggaaaatgacacatcctctcttgggcctaattgcaatcacccagaagagagactgccattggcctaacttgactaaggatacatatctaa

SEQ ID NO: 293070 - DNA, 583 bp, Homo sapiens
ctgccctacccagtcccatttcagtagctgaatgagcttagctcattagatttgctgggaagttctgtcaatccaagcctgtgcttaaggagatcaggttagttactctttttctgaatctccaacttctcctcccagagctctttaaacaattctgtaaaaactaattcttataaataaatgtgtcattatgtaacattcacagtgaccctgtgatcctggttccctgactggagcatgactaaaacagttattattatagcaaaagaagtggtccccagaaaatagaactttaattattggaatctggaattggcgtcttgatttaactagattcaaagacataatggattctaagcatgccggatcaggattaataaaatcttagctcaaactartgttgttgatataattgcactaacaagtgtctgatttcagtgtctttgctcaagtagctgggtgacctatagcggttcgcttggttggctgctcaaacacagaaaaaattataattgatgacaaacgaagttgtgatgccagaactttcttactaatctgtatatctgtgcttttcaatgtgatg

SEQ ID NO: 293071 - DNA, 1023 bp, Homo sapiens
cttgggtatttctttatagcagcatgagaatggattaatacatgaatatattaggaaacatctgcttactcaacccctaactctgtgtcttggaggmggacaatcttttcactgaagctttaaagcatacagtggtaagtggagcactagcattcttaaagaactccgcaatagctgttctttacaggccaggagtgacagtagaaatgcttgtcatcaaatgaattcctggagttgaaggaggaaggtagcttgcatttaactgccaaatgcaaattttgtaatggttactgtaactggcagcatagaactacagagtttttttattctggctaatttattatggtgtccttgggactgaaatcagtggtcagtctgttaattatttttaacttggaaactcatggtctagtgaacacaaatcttatcttaatggccagagtagagacttctggccccttgattattttccaggcttgaatcagtttacatagtcgtacccttactaaaawcttgggtatttctttatagcagcatgagaatggattaatacatgaatatattaggaaacatctgcttactcaacccctaactctgtgtcttggaggcggacaatcttttcactgaagctttaaagcatacagtggtaagtggagcactagcattcttaaagaactccgcaatwgctgttctttacaggccaggagtgacagtagaaatgcttgtcatcaaatgaattcctggagttgaaggaggaaggtagcttgcatttaactgccaaatgcaaattttgtaatggttactgtaactggcagcatagaactacagagtttttttattctggctaatttattatggtgtccttgggactgaaatcagtggtcagtctgttaattatttttaacttggaaactcatggtctagtgaacacaaatcttatcttaatggccagagtagagacttctggccccttgattattttccaggcttgaatcagtttacatagtcgtacccttactaaaa

SEQ ID NO: 293072 - DNA, 557 bp, Homo sapiens
ggcagaaaccccacactggttatctgacagcaaaatataaaactgtatgtcaaaaaaggacatgttgttttcctagaaagactatgagattagttccacaatcacaaacttgaattatgtagggttagtgatttcaatcacaccccaattccacttgcttattttcttgtgccaaagataaatggatcttagagaaagtgggttattgtaaacttaatcctgtggtaacttcaatttcaactgctgctccagatgtaatttctttgatggagcaaatgagcacataccctggcacctgatattcagrtattgatctgggaatgtgttgtttattttctgcattttagtaaggacaccagaaacagtttgcatgtagctggcacatccagtaatacagcttcattttcttaccacagagctgtatcaactacatcataatctatcccacagggaaattgatcccttttccattcctcatattatatgtattcattagattgatcgtttcatatatattggagctgataaacagaagtaataactagcctagatatatt

SEQ ID NO: 293073 - DNA, 533 bp, Homo sapiens
tacacagtgataagttacgaattcaaacgttaatttgatagatacatgcatgtgagtatatttacaggtaaagaaagrtaaaggcaaagtagtaccgatgcacaatatttagataaaatagaaaaacaaagtatatttacagaaagggtttgaatttataatgcattttgtatattaaattattatttgtctgtctaaaaaatcattagcatatatatcacagtagtgcaaacttttgttgtcatctctatctctttttagctaagatcacctcaaaatgtaaccttaaaagtagttatatagatttacatcaaattatttcttcctatttaaggcagtttccagggataatgtcattttttatattagttacaaagttagaataaagtatactaaggatcaagaaagtcaaactggaaatatattgcttatttcaagaattctaccactaatatatttatcagacatatattgattaatttagataacaaaaggagccattttctcaaacttttgattagaaaaaatgctat

SEQ ID NO: 293074 - DNA, 488 bp, Homo sapiens
gaccttcaaggcagcccctctcaaaacaggcccaatggcctaagaggaaatttttttttttttttttttttttttttgccagacgcagggtcctgctgtcttgtgaaacctcaggacacagctccctgtgtccctgctgttccagctccagccatgactaaaagggccctaaattcctatcaggctgctgcctgagaaggtagaagccagaagtctgggcagctttcatgtggggttaagcctgtgggtrtgtagagggcaagaattgaggcttggaagactccacctagcttttagaggatgtaaggaaatgcctagatgtccaggcagcagtcttctgcagggatggagccctcatggaaaatctctgctagggcagtgtggacagccaatgtggggttggagcctccacacagagttcccactggggcacttcatagtggagctttgaggagagtgccaccattctccagaccccagaatcatat

SEQ ID NO: 293075 - DNA, 488 bp, Homo sapiens
gaccttcaaggcagcccctctcaaaacaggcccaatggcctaagaggaaatttttttttttttttttttttttttttgccagacgcagggtcctgctgtcttgtgaaacctcaggacacagctccctgtgtccctgctgttccagctccagccatgactaaaagggccctaaattcctatcaggctgctgcctgagaaggtagaagccagaagtctgggcagctttcatgtggggttaagcctgtgggtgtgtagagggcaagaattgaggcttggaagactccacctagcttttagaggatgtaaggaaatgcctagatgtccaggcagcagtcttctgcagggatggagccctcatggaaaatctctgctagggcagtgtggacagccaatgtggggttggagcctccacacagagttcccactggggcacttcatagtggagctttgaggagagygccaccattctccagaccccagaatcatat

SEQ ID NO: 293076 - DNA, 567 bp, Homo sapiens
aagaaacaaatgacatgtccatcagctgattaatggataaataaaatgtagtrtgggcccataaaatagaatattatttggccataaaaaggaatgaagtatggatgcattctacaacatggacaatccttgaaaatgttaagtcaaagaaaaccaatcataaaagattacatactgtatgattacctttatataaaatatcttcaataggaaaatctaaggggacagaaaataggtgtttgcttggagctgaagtacgagatgggggtgaaggggaaatgctaatagttaaaggaaataaagttctttgttttgttttttaaggagattaaatgttttaaaattgatgatgatgttactgctacatttatctaggaatataccaaaaaccattcaattacacagtttaaatggtgaattgcatgttatgtgaattatatcttggtgaatctgttaaaaacacaaaatttgacattagaaattacttcagaaatgcaaacatatacaactgaacaataagaagcacaacaatacttttcctattaaatcgtgagagtaaaatgaatt

SEQ ID NO: 293077 - DNA, 507 bp, Homo sapiens
agcagctgaagtcatgtgagttgttgaagcctgtaaaacttttgagtattacaataactatattattttttccacatatcacaggctgcagcaaagcacgacctcaggaggcttttacttttccacctccatcaggtttcttgccagtttatcctaattaaaatgatttaatcaaatgtagtaaatttattctgtaaaagatagacaaaataattctcctaaatagatccatgtccctgagaacatccctcctataaagagattatggaactcacaatgatccaagtacttcataataaaaatgtttttaatggacattataaaamttaaccacaccttgcattatacagatttcggttgcatccagcttttgtataagaataattaatgtcactttcctatcacaattagatttttgttggcataggttaaacattcttaatattttatcactcattgtcaaagcaaagaaagcataaagctacacaaagagtagaattgttttgt

SEQ ID NO: 293078 - DNA, 1141 bp, Homo sapiens
aactattcttggagtttagttttataaagatattgtttttgtaaaaatgttctcctgctaaagaacgtacttgcctgtgaaaaaccaggagaatgctgtgtagaaagtagcgcaggtaaaaatacctgggtgagatttgactactctctccagaccctgtcttagttttcctcgacccctaatggatagaaayctaatttcttcctctcctgtgaagcagtgtgatcaaagtctcagactcaggcaaattagcatttactagtttattttgtgtgccctaaaacagtaccctcagggattgaggagctgagtgaaacaccaatattcaaattagctcttcccaagaaacacatacacatttgaatggataatcttaaacctacctatagcggtatttctatacaacaattagggcatacccttctctgaccagaactaggaaacagctttttcttttcttttcttttctttattctcttcttttattttcaattgtgtttctagagagatgaattctagaataatatttagggtttctggaaatataaagcagagtttgawtctttgtctatgtttccctgtgtgcatttttctatctcttctcctccctctcattctttctcacctgcatgtgtacacacacacacacacacacacaacctgtgtgcacatgcatggacaataattttgtgtcctgcactacttwtaacagtttcttcctgatcttgtttttttgtgcatggctatttcttctacttcccaaaacatcctttttttttttctgacaaattcccaattatccttgaaaacaccatttgaatataacctggattaataagtctctgagagaatgcttgcccatcaagattttcttcaccttttgtgctttcatagattttgtcatggttatcatttatttttattggtttagttatattttccctactataataaaacctctttaacagttagaaactatttagctgcaagttatataagccccaactaagaagagcttgaacagaaggggtttatcatcttacatataaaatcttaatgtagaagagttctagagttgtttaattttgcaattcagtaatgtcaccagaatccaggaacttttcatctttctgttctgctg

SEQ ID NO: 293079 - DNA, 580 bp, Homo sapiens
tctttgtctatgtttccctgtgtgcatttttctatctcttctcctccctctcattctttctcacctgcatgtgtacacacacacacacacacacacaacctgtgtgcacatgcatggacaataattttgtgtcctgcactacttttaacagtttcttcctgatcttgtttttttgtgcatggctatttcttctacttcccaaaacatcctttttttttttctgacaaattcccaattatccttgaaaacaccatttgaatataacctggattaataagtctctgagagaatgcttgcccatcaagattttcttcaccttttgtgctttcatagattttgtcatggttatcatttatttttattggtttagttatattttccctactataataaaacctctttaacagttagaaactatttagctgcaagttatataagccccaactaagaagagcttgaacagaaggggtttatcaycttacatataaaatcttaatgtagaagagttctagagttgtttaattttgcaattcagtaatgtcaccagaatccaggaacttttcatctttctgttctgctg

SEQ ID NO: 293080 - DNA, 495 bp, Homo sapiens
aatgtacacaaatcagtagcaatgccatataccaacaaccaccaagctgaatatcaaatcaagaagtcaagaactcaatcctttttaaaacagctgcaaaaaaaaaaacaaaaaaaaaacagaaacaaaaaatcctacctagggatatacttaatcaagaaggtacaaaatctctacaaggagaactacaaaacaactctgaaagaaattatagatgacacaagcaaatggaaacacattcaatcctcatggatttgaagaatcattatcatgaagataaccatgctttmcaaaacaatttacagatgcagtgcaattcctatcaatctaccacatcatttttcacacgattaggaaaaacaatcctaaaattcacatggaacaaaaatagagccagaatagccaaagcaatactaagcaaaacacataacaacaacaacaacaacaataagcaaacttggaggtattgtgttacctgacttgaaattatgcaat

SEQ ID NO: 293081 - DNA, 615 bp, Homo sapiens
aaaaggggatgcttatacattgctggtgagaatgaaaattaatataacctctatgaaaaacrtgtgacgatttctcaaaaaactaaaagtagatctaccattcgatccagtaatctcactaccgtgtatctacccacaggaaaaaaaagtcatcatatgaaaaagacacatgcatatgtacgtttatagcagcacaatttacaattccaaagctatgaaaccaaactaagtgaacatcaactgataagtggataaagaaaatgtggtacacacagacacaaacacacacatatgtaacacgtgtgtttgtatatatatacacatactgcaccatatataggtacacccacaccatgatatgtatgtgtgtatatatatacatatatatgtatatataccatggaatactatgcagccttaaaaagaatggaataatatattttgcagcaacttgggtgaaactggaggtcattactctaagtgaagtaacccaggaatggaaaataaaataacttaggttctcaattgtagctgagagttaatctatgagtacacaaaggcatagagagtggtacaatgggcattacagactcagaagggggaaggttggaagaa

SEQ ID NO: 293082 - DNA, 615 bp, Homo sapiens
aaaaggggatgcttatacattgctggtgagaatgaaaattaatataacctctatgaaaaacgtgtgacgatttctcaaaaaactaaaagtagatctaccattcgatccagtaatctcactaccgtgtatctacccacaggaaaaaaaagtcatcatatgaaaaagacacatgcatatgtaygtttatagcagcacaatttacaattccaaagctatgaaaccaaactaagtgaacatcaactgataagtggataaagaaaatgtggtacacacagacacaaacacacacatatgtaacacgtgtgtttgtatatatatacacatactgcaccatatataggtacacccacaccatgatatgtatgtgtgtatatatatacatatatatgtatatataccatggaatactatgcagccttaaaaagaatggaataatatattttgcagcaacttgggtgaaactggaggtcattactctaagtgaagtaacccaggaatggaaaataaaataacttaggttctcaattgtagctgagagttaatctatgagtacacaaaggcatagagagtggtacaatgggcattacagactcagaagggggaaggttggaagaa

SEQ ID NO: 293083 - DNA, 615 bp, Homo sapiens
aaaaggggatgcttatacattgctggtgagaatgaaaattaatataacctctatgaaaaacgtgtgacgatttctcaaaaaactaaaagtagatctaccattcgatccagtaatctcactaccgtgtatctacccacaggaaaaaaaagtcatcatatgaaaaagacacatgcatatgtacgtttatagcagcacaatttacaattccaaagctatgaaaccaaactaagtgaacatcaactgataagtggataaagaaaatgtggtacacacagacacaaacacacacatatgtaacacgtgtgtttgtatatatatacacatactgcaccatatataggtacacccacaccatgatatgtatgtgtgtatatatatacatatatatgtatatataccatggaatactatgcagccttaaaaagaatggaataatatattttgcagcaacttgggtraaactggaggtcattactctaagtgaagtaacccaggaatggaaaataaaataacttaggttctcaattgtagctgagagttaatctatgagtacacaaaggcatagagagtggtacaatgggcattacagactcagaagggggaaggttggaagaa

SEQ ID NO: 293084 - DNA, 1238 bp, Homo sapiens
aaaaggggatgcttatacattgctggtgagaatgaaaattaatataacctctatgaaaaacgtgtgacgatttctcaaaaaactaaaagtagatctaccattcgatccagtaatctcactaccgtgtatctacccacaggaaaaaaaagtcatcatatgaaaaagacacatgcatatgtacgtttatagcagcacaatttacaattccaaagctatgaaaccaaactaagtgaacatcaactgataagtggataaagaaaatgtggtacacacagacacaaacacacacatatgtaacacgtgtgtttgtatatatatacacatactgcaccatatataggtacacccacaccatgatatgtatgtgtgtatatatatacatatatatgtatatataccatggaatactatgcagccttaaaaagaatggaataatatattttgcagcaacttgggtgaaactggaggtcattactctaagtgaagtaacccaggaatggaaaataaaatamcttaggttctcaattgtagctgagagttaatctatgagtacacaaaggcatagagagtggtacaatgggcattacagactcagaagggggaaggttggaagaawaaaaatcagatttttagaaatctttctgcttaatcctctactttccagaaatatttcacaagagttagtagttcagcttttttgaaatcctgtctacctatacccaacttaataggatttctgggctctctttcaggtattcaaacctggactttcagccaaagaattgcttccaggcataaaatcttgatgataaaagactcacctttcatttttttttgtttttggtttctttctctcagggatcacaatactgtcatgcatgcagtcgataactaaaaacagttacttcataaattttaaaactattttaaaatagtttaaaattttaaaactgtttttgtgtgaaatttgctgtctgttagaagtcatcaccaccattttccttcaggttattcctagttcaacaaatgwctttaatctcttaactgcctcatcatatataatgatctaatgcaacacatggtcattgagcccttatcacatttcatttaatgatgttcaaaatttcaatgttacatttcatttaatgatgttcaaaatttgaatgtctcatgcctaagaattttcactttctatagcctccaactctaattatgactaattacatttagttctttat

SEQ ID NO: 293085 - DNA, 625 bp, Homo sapiens
tctactttccagaaatatttcacaagagttagtagttcagcttttttgaaatcctgtctacctatacccaacttaataggatttctgggctctctttcaggtattcaaacctggactttcagccaaagaattgcttccaggcataaaatcttgatgataaaagactcacctttcatttttttttgtttttggtttctttctctcagggatcacaatactgtcatgcatgcagtcgataactaaaaacagttacttcataaattttaaaactattttaaaatagtttaaaattttaaaactgtttttgtgtgaaatttgctgtctgttagaagtcatcaccaccattttccttcaggttattcctagttcaacaaatgtctttaatctcttaactgcctcatcatatataatgatctaatgcaacacatggtcattgagcccytatcacatttcatttaatgatgttcaaaatttcaatgttacatttcatttaatgatgttcaaaatttgaatgtctcatgcctaagaattttcactttctatagcctccaactctaattatgactaattacatttagttctttattgaccttcaattatacttctaaaaaccagcagaaatgat

SEQ ID NO: 293086 - DNA, 511 bp, Homo sapiens
attttacagagtgctgattggtccgtttgtactgagtgctgattggtgcggttacaaacctttagctagacacaaagtgctgattggtgcatttttacagagtgctgatcggtgtgtttacaaacctttagctagacacagagtgctgattggtgcatttacaatactttagctagacagaaaagttctccaagtccccacctgacccagaagcccaagccggcttcacctctcaatcctccctctaaacaggacaccccaactgctgttgggaatttggctgatgacygctctagctacttcctgctggataggggcaaagaagggtccctgcagttgtagtgtcctccagaggggaactcttcaggccagggaaagggccagaggattggtccagggttccttggtagtagttgttagttgagctcatttggggttccatttataagaccacctgtagcttgatgccctcaattctggaggaaacaaatttgacaagcagtttaaaaat

SEQ ID NO: 293087 - DNA, 578 bp, Homo sapiens
ttgacctgggcaccctgagtccagttgttggatcatctggttgggggctgctgacccagagaaactttgtcttctggggcagtgcaccttccagtgattgcctcagcatagcggacatggacgagggggyggcttgtttctcactggacaatcttttttaaagtgtccttgtaaacaatactgctaacaagccctaccagatgattggcctgctccattttctgtcctctgaaccaccaaggtttgtttgcctgaaggctatgacaaaggctgcagcctttctctgatctcgcttttccttttgggtgtgttcctcttggtccatattatagaacactgtggttgccaggtttaataatgcctccagattttgttcagggcccagggcttgcttttggagctttctgctgatatccgcagctgattgagtaataaacttatcttttagaatcaattgaccctcgagtgattagggtgataggggagtatattgtcttaggcctcccatagccagtcgaggaaagtggaaggattttcttcctttccctgaattatggtggacatcattgaataactca

SEQ ID NO: 293088 - DNA, 578 bp, Homo sapiens
ttgacctgggcaccctgagtccagttgttggatcatctggttgggggctgctgacccagagaaactttgtcttctggggcagtgcaccttccagtgattgcctcagcatagcggacatggacgagggggtggcttgtttctcactggacaatcttttttaaagtgtccttgtaaacaatactgctaacaagccctaccagatgattggcctgctccattttctgtcctctgaaccaccaaggtttgtttgcctgaaggctatgacaaaggctgcagcctttctctgatctcgcttttccttttgggtgtgttcctcttggtccatattatagaacactgtggttgccaggtttaataatgcctccagattttgttcagggcccagggcttgcttttggagctttctgctgatatccgcagctgattgagtaataaacttatcttttagaatcaattgaccctcgagtgattagggtgataggggagtatattgtcttaggcytcccatagccagtcgaggaaagtggaaggattttcttcctttccctgaattatggtggacatcattgaataactca

SEQ ID NO: 293089 - DNA, 578 bp, Homo sapiens
aggaagggcaatgtttactattatatacatatgtatctactgcaaggtgtggacttaatcatgaatatataaaatattatggttattaaaattttgctgtgaaatatttaaaaagtactgtaagttagtactaacattggtcagaaattactataatttatgttgtaactaatatgccctaataattgcttgtgaacagaaacagttccttttgaatatccattgatgctgtataattaacaaaggtcttcaaatctataataatttaataaacgttcatttaaatagaaatgacacaggatcctttcggtgccactttgcaagatggaaatctgtgtgaccagtcgtgyccttacctgggcttggctcagttctgggttgactactgggcttgctctgcccactcggcctattgggctgcactcagctcatgctactggcctggattctgcatgtccacagggactctgtgttcagcccgtgctgagccagatgtgctggaggaggttttcatgttggtcaatggtgggtagatgagggaaaagtggtggaaccccaaatctgagagatggcagcaa

SEQ ID NO: 293090 - DNA, 630 bp, Homo sapiens
attctgcatgtccacagggactctgtgttcagcccgtgctgagccagrtgtgctggaggaggttttcatgttggtcaatggtgggtagatgagggaaaagtggtggaaccccaaatctgagagatggcagcaaccatggaggccaaaggtgtgttactgcttttgcttgggcagtcccaaggcctgagcccaacacccacagtgcagcgaatgggatggcagggggaattgagggggcgtgttccagcttgtttgtgttacagcttgtttgttcccatcacctgcagtgcagcgaataagggcctatcacggctcatttggttcctccatttgcagcttggtgaactggggcatgtgacaccccagcagctttttattccctgttgctcagcaagtgggagggagggttacaatgttacaggtcttttcccagctgcttttcctcaggctccaggttcctgtcctgggacaaagaagaatgaggttatgtggacacgagagtaagtaaggcagtgtagaagaagtttattgagtgagagaaaagctcgccaccatgagaggggaagccctcttatgagaggggtcccagaagcaggaggcccaatgtgtgactgagtccagggtatatat

SEQ ID NO: 293091 - DNA, 562 bp, Homo sapiens
ttccctgagatgtagaagccatagtttagcaagaaactgacagtctttaggaatgtgagatttgttccaccataatgagcaaaatacagtccaccaacatggaacctctcagatttcccactgcggggagcataattgactgaaagccccatttgctaaactgtgacttcccccgcatgtgatgcaacagggctagtaaggtagcccattcccataaaatatggggactcatctgatggatgacttttatacgatggcttcccattgacatttgccaaagttgtttttcttttctttttttttttttttaactgcacaggaatctaagcctttttatatctagatcctctttcttcyctcactgctccagaatgatcagatctgcactggggcctgatggctcttccggcctcctatggctgcctccctattttctctcacaggcatttttccaaataaacctcttgcaaatataattctgtgttgtgtcttcttggaggacacaacacaatacaaaaatcctagaagataaccttctaaaactccgatatccagcttcttg

SEQ ID NO: 293092 - DNA, 381 bp, Homo sapiens
attaacatatttacatttagctatgctcatcaattatctgcttgcattctccctttcctcttagcctatactccccacaaaaatacatatcacttttcaaatgtaattgcctaatttataaatttcattatgacatacttttatatccacactcagtctgtttctaggagctaatgcatttcatgatatattttgaacactgaaatacaaagatatgtcttattactttctcttgaactgacatgatttccaccatgatagtttgcaggaaaggaaatatactctaggttactctgatgtagaaaatatccttttttgaaagttaccatctttatttaacttttattttargtttggggacatgtatgaaggtttgttaaa

SEQ ID NO: 293093 - DNA, 623 bp, Homo sapiens
aaaactctcatttcctctgggccttgttaggtaacagcgtcaggggcgtttgaaccagagcaactccatcttgaatagaggctgggcttagacctactgggctgcattcccaggttaggcattcaaagtcacagggtgagataagaggtcaacacgagatataggtcataaagaccyttctgataaaacagattacagtcaagaaaccagccaaaacccccaaaacctagatggcaatgagggtgaccactggtcatcctcactgctcattatatactaattacaatgcattagcatgctaaaagacacccccaccagtaccatgacattttacaaatgctatgacaaggtcacaaagttaccctatatggtctaaaaatgggggaaaccctcaggtccgaattgcccaccccttacctactgcccattaagttcctctaacttaacagagcctattactcatactactcaggtttggcttgactcagttccatgagcaaaacccagaggatgattttacaccacgatggcattacatttttatttatactgttaggtgtcatttgttttcaactgcaggctactgtttactttgaagtttgctaaaacaagctgtcacctaa

SEQ ID NO: 293094 - DNA, 543 bp, Homo sapiens
tgatagtaaaatgcaagttscttaatgaaaatgccctgtttatcacaatatcctttgtgtatagaccctcaagcatcccaaactcatttccatattagagcctttacaaatgctgcttcctctgcttgcagaacccttcttccaaatacccatatagaaactgccacttaaaatgtatgtctcagctcacaaactattttcatgcaaacagcccctatcaccctttccaggaatggttctttcctaaagttgttattatattttctacctttatatcttatttagtccttaccatcatttcaaatcatcttgttgtttttatgtttaatgttcacttttaacaaacttttttgaaggctggtatcctatctgtggcatcatcagtttctaacacaacacacgcttgttatataaaaaattaagcaaaccctccagagaatataggttagtgttttgttacaagagaaaatgatgaaatatttatcattttatcttatatattagataagaaattatttcatatattaaaaaatactaccattt

SEQ ID NO: 293095 - DNA, 2267 bp, Homo sapiens
tgatagtaaaatgcaagttccttaatgaaaatgccctgtttatcacaatatcctttgtgtatagaccctcaagcatcccaaactcatttccatattagagcctttacaaatgctgcttcctctgcttgcagaacccttcttccaaatacccatatagaaactgccacttaaaatgtatgtctcagctcacaaactattttcatgcaaacagcccctatcaccctttccaggaatgsttctttcctaaagttgttattatattttctacctttatatcttatttagtccttaccatcatttcaaatcatcttgttgtttttatgtttaatgttcacttttaacaaacttttttgaaggctggtatcctatctgtggcatcatcagtttctaacacaacacacgcttgttatataaaaaattaagcaaaccctccagagaatataggttagtgttttgttacaagagaaaatgatgaaatatttatcattttatcttatatattagataagaaattatttcatatattaaaaaatactaccatttwtgatagtaaaatgcaagttccttaatgaaaatgccctgtttatcacaatatcctttgtgtatagaccctcaagcatcccaaactcatttccatattagagcctttacaaatgctgcttcctctgcttgcagaacccttcttccaaatacccatatagaaactgccacttaaaatgtatgtctcagctcacaaactattttcatgcaaacagcccctatcaccctttccaggaatggttctttcctaaagttgttattatattttctacctttatatcttatttagtccttaccatcatttcaaatcatcttgttgtttttatgtttaatgttcacttttaacaaacttttttgaaggctggtatcctwtctgtggcatcatcagtttctaacacaacacacgcttgttatataaaaaattaagcaaaccctccagagaatataggttagtgttttgttacaagagaaaatgatgaaatatttatcattttatcttatatattagataagaaattatttcatatattaaaaaatactaccatttwactctacataaatgaaactttacaagwtgtttttcatgttaccttaactcttttaaatgaagacaccaagtcctgaactgccagctttggaaagaccatgagagactgtgaggccaaacactttctccctaactttatttctgccatgaaatcagctcagagagcccgggaaagtcattcaatattttgagacctctgctccagtgatattcaggtcccatgtatgtgggatgactagaatgtttattcatttaggtcaggtctttatttttaattaagaagtatttattatattcctgctatgtgccagacactgtgtggttgcaaaaagatttctcattctgtattactcagtcattggagtctgtgtaggtcacttaccctacctatgtcatctgtaatatggatgtaataatgtatgctttcccgggtgtgagggacagatactatataaacatttttagtgtaaaagtttgagagatttttcttagcataaagcttcttttatattccagtagctgaggccaactatatataattcataagatactgccaaataaataactgatgggaaactcaaggctgattcwactctacataaatgaaactttacaagatgtttttcatgttaccttaactcttttaaatgaagacaccaagtcctgaactgccagctttggaaagaccatgagagactgtgaggccaaacactttctccctaactttatttctgccatgaaatcagctcagagagcccgggaaagtcattcaatattttgagacctctgctccagtgatattcaggtcccatgtatgtgggatgactagaatgtttattcatttaggtcaggtctttatttttaattaagaagtatttattatattcctgctatgtgccagacactgtgtggttgcaaaaagatttctcattctgtattactcagtcattggagtctgtgtaggtcacttaccctacctwtgtcatctgtaatatggatgtaataatgtatgctttcccgggtgtgagggacagatactatataaacatttttagtgtaaaagtttgagagatttttcttagcataaagcttcttttatattccagtagctgaggccaactatatataattcataagatactgccaaataaataactgatgggaaactcaaggctgattc

SEQ ID NO: 293096 - DNA, 589 bp, Homo sapiens
actctacataaatgaaactttacaagatgtttttcatgttaccttaactcttttaaatgaagacaccaagtcctgaactgccagctttggaaagaccatgagagactgtgaggccaaacactttctccctaactttatttctgccatgaaatcagctcagagagcccgggaaagtcattcaatattttgagacctctgctccagtgatattcaggtcccatgtatgtgggatgactagaatgtttattcatttaggtcaggtctttatttttaattaagaagtatttattatattcctgctatgtgccagacactgtgtggttgcaaaaagatttctcattctgtattactcagtcattggagtctgtgtaggtcacttaccctacctatgtcatctgtaatatggatgtaataatgtatgctttcccgggtgtgagggacagatactatayaaacatttttagtgtaaaagtttgagagatttttcttagcataaagcttcttttatattccagtagctgaggccaactatatataattcataagatactgccaaataaataactgatgggaaactcaaggctgattc

SEQ ID NO: 293097 - DNA, 461 bp, Homo sapiens
tcttaataagacaaattatacttgatctaattcacaaaatagggggcaagctcccctctattttatactaaaataactatggtacaaactgatggttagaaggtaagctcctttccttacaaaattgctaaaygtatacagtgtactattgcaaaataaatgaattattgcaaaataagtttataattgcaatcatcttacttgcttaattttcgcaaataaatggttactaagctgtgaccacaaaaatagaaagcccttgacatcagagtatttcctttaattaaaaaaaaaattaaaaacaatagaagcagatagagagaaacataataaatatcaagtaaatatctatctgaattaagtgttaaaagcaaaattttgataataaaatacatatatacttgttacatatatcattttctataatgttaaacatagtgtatatatacatacatattatg

SEQ ID NO: 293098 - DNA, 582 bp, Homo sapiens
ctgagagcaagaataataaaatgcatttaattttctataggaaagctgccattttattaggtgtcaacattcattcaataattttataattcagcaaatattactcatcttttaatataaatcaaaaaccattctctgaactaattgtagaataatgaagaaaaagaaatccttctctttaaaaagagacagaatatacatatayaaaatcagatagtgacagttgctatcaagaaagtgaagctagaaaacagaatagagcatgtgagaggttatattaatcaacatattaatattttaaatatttacaataaacccagcttacagtcaaactgctggtggataagcaagctggtggatctctagagtcatacttcagcccagccaagatcactgacccccaggcaactcacatatgcacattttccctatttattcattgatttaaaaatcatatgttttaccataataaataatgcacaacattattttctccttctcaatctttctttcctaccacttgccccttgctcaatatgctttggatatactggccttatttttacctcgaaagtgctaagt

SEQ ID NO: 293099 - DNA, 539 bp, Homo sapiens
tataagtacattttaaaatttacaaatatatggtggattttgttagattacgtgacaaagaacaactaaaattaccaatcagctgattttaaagtagaaataataccctagattttctgaatggaccctaagtaatgacaagggacctaaaaattggacagggagggcaaaaggagggcatcgtgactatggacagcatagagggttacaatgatgctgggtctgcaaatagaggaaagaagccataagccaaaggatrtgactaggctctaacagctggaagggccagggagtgtattcctccctagcgcctccagaaacacacatagtttctgggccaccttgattttagcccattgagattcatgtaagatgtccaaccaacagaactttaggataatgaatttgtgttgttttaaaccacttgtgtgttttcacagttgtgttataagttgttgcagcagcagtaggaaactaataacgctggtatgacaacaaatttagcaacaccatgattttggacaagtgacttaatcact

SEQ ID NO: 293100 - DNA, 539 bp, Homo sapiens
tataagtacattttaaaatttacaaatatatggtggattttgttagattacgtgacaaagaacaactaaaattaccaatcagctgattttaaagtagaaataataccctagattttctgaatggaccctaagtaatgacaagggacctaaaaattggacagggagggcaaaaggagggcatcgtgactatggacagcatagagggttacaatgatgctgggtctgcaaatagaggaaagaagccataagccaaaggatgtgactaggctctaacagctggaagggccagggagtgtattcctccctagcgcctccagaaacacacatagtttctgggccaccttgattttagcccattgagattcatgtaagatgtccaaccaacagaactttaggataatgaatttgtgttgttttaaaccacytgtgtgttttcacagttgtgttataagttgttgcagcagcagtaggaaactaataacgctggtatgacaacaaatttagcaacaccatgattttggacaagtgacttaatcact

SEQ ID NO: 293101 - DNA, 539 bp, Homo sapiens
tataagtacattttaaaatttacaaatatatggtggattttgttagattacgtgacaaagaacaactaaaattaccaatcagctgattttaaagtagaaataataccctagattttctgaatggaccctaagtaatgacaagggacctaaaaattggacagggagggcaaaaggagggcatcgtgactatggacagcatagagggttacaatgatgctgggtctgcaaatagaggaaagaagccataagccaaaggatgtgactaggctctaacagctggaagggccagggagtgtattcctccctagcgcctccagaaacacacatagtttctgggccaccttgattttagcccattgagattcatgtaagatgtccaaccaacagaactttaggataatgaatttgtgttgttttaaaccacttgtgtgttttcacagttgtgttataagttgttgcagcagcagtaggaaactaataacgctggtatgacamcaaatttagcaacaccatgattttggacaagtgacttaatcact

SEQ ID NO: 293102 - DNA, 634 bp, Homo sapiens
tgctcattgtttagaagaatcaatatcaaaaattgaccattatgcccaaaacaatgtacagattaaacactattcttatcaaactatcaacatctaaggacatttctgggagaatgggtattacagtaaaatatacatcaattttatatcttcatgtcaagaatactaaaatatgaaggaaaaaatgtactggtgagtcacatttattgatttacttatgttgaactagccttgcatcctaggartaaagcctacttgatgatggtatatttacttttttatctgctgctgcactcagtttgctaatattttgttgagtctttttacatctatgttcatgagggatattggcctacattttttgttgtcattgtgtctttgccagattttgatatcagatggatgttggcttcataggatgaattaggatggaggccctcctccccagctttttggaatagtttcagtaagattggtatccattcttctttgtatgtctgctaaaattcagctgtgaatacctctgatctgggacttttttgcctgatagattctttattgctgattcaattttataagttgatattggctattcatttatttagagtttcaatatctttctgattaaattatt

SEQ ID NO: 293103 - DNA, 511 bp, Homo sapiens
gagcttttcatagtctttgaggatgttttatatttctgtgggatgagttgtaatatctcctttgacatttctgattgtgcttattgcaatcttctctttctttttctttgttagtctagctagtggtctaccaatcatattcatttttttgaagaaccaactcggtttcattgatctcttatatggattgttgcatttgaatttcattcagttcttctctagttttagttatttcttttattctgctagctttggggttagtttgttctttttttttgtaattcctttaggtgcaaagttagattgctaatttgagattcttctaacatcttgatggaggcacttaagattaaactttcctcaacactactttgtctgcatcccagagrtctgagcaagttgtatcccaattttcattaatttcaaatatgttttttttcctgacctaatgtcagtattcactcaggtgttaatcaggagtacattgtttaattttcatgcgttgagagag

SEQ ID NO: 293104 - DNA, 511 bp, Homo sapiens
gagcttttcatagtctttgaggatgttttatatttctgtgggatgagttgtaatatctcctttgacatttctgattgtgcttattgcaatcttctctttctttttctttgttagtctagctagtggtctaccaatcatattcatttttttgaagaaccaactcggtttcattgatctcttatatggattgttgcatttgaatttcattcagttcttctctagttttagttatttcttttattctgctagctttggggttagtttgttctttttttttgtaattcctttaggtgcaaagttagattgctaatttgagattcttctaacatcttgatggaggcacttaagattaaactttcctcaacactactttgtctgcatcccagagatctgagcaagttgtrtcccaattttcattaatttcaaatatgttttttttcctgacctaatgtcagtattcactcaggtgttaatcaggagtacattgtttaattttcatgcgttgagagag

SEQ ID NO: 293105 - DNA, 511 bp, Homo sapiens
gagcttttcatagtctttgaggatgttttatatttctgtgggatgagttgtaatatctcctttgacatttctgattgtgcttattgcaatcttctctttctttttctttgttagtctagctagtggtctaccaatcatattcatttttttgaagaaccaactcggtttcattgatctcttatatggattgttgcatttgaatttcattcagttcttctctagttttagttatttcttttattctgctagctttggggttagtttgttctttttttttgtaattcctttaggtgcaaagttagattgctaatttgagattcttctaacatcttgatggaggcacttaagattaaactttcctcaacactactttgtctgcatcccagagatctgagcaagttgtatcccaattttcattaatttcaaatatgttttttttcctgmcctaatgtcagtattcactcaggtgttaatcaggagtacattgtttaattttcatgcgttgagagag

SEQ ID NO: 293106 - DNA, 1273 bp, Homo sapiens
ttgctaatttgagattcttctaacatcttgatggaggcacttaagattaaactttcctcaacactactttgtctgcatcccagagatctgagcaagttgtatcccaattttcattaatttcaaatatgttttttttcctgacctaatgtcagtattcactcaggtgttaatcaggagtacattgtttaattttcatgcgttgagagagatattcttkgtattgatttctattttattgcactggggtccaggagtgtgcttggtataatttcatttttaaaaaaaaatttcgaggcttgctttattattgaacatgttgtctctcttagaatatgttctgtattcacatgaggatgtatatcctatggttgttgagtggagtattgtgtagatgtctattaggtctaattagacaagcgtcaagttttagactagaatctcttttttagctttctgcctcgatgatctgtctaattctgttaatggagtgttgaagtctctcatgattgttgtgttttgtctacatctttttttaggccaagaagtatttcttttctaaatctgggtgcttcagtgttgggtgtgcatatatttaggatagttaaggcttcttgttggattgtatcctttagcattwttgctaatttgagattcttctaacatcttgatggaggcacttaagattaaactttcctcaacactactttgtctgcatcccagagatctgagcaagttgtatcccaattttcattaatttcaaatatgttttttttcctgacctaatgtcagtattcactcaggtgttaatcaggagtacattgtttaattttcatgcgttgagagagatattctttgtattgatttctattttattgcactggggtccaggagtgtgcttggtataatttcatttttwaaaaaaaatttcgaggcttgctttattattgaacatgttgtctctcttagaatatgttctgtattcacatgaggatgtatatcctatggttgttgagtggagtattgtgtagatgtctattaggtctaattagacaagcgtcaagttttagactagaatctcttttttagctttctgcctcgatgatctgtctaattctgttaatggagtgttgaagtctctcatgattgttgtgttttgtctacatctttttttaggccaagaagtatttcttttctaaatctgggtgcttcagtgttgggtgtgcatatatttaggatagttaaggcttcttgttggattgtatcctttagcatt

SEQ ID NO: 293107 - DNA, 546 bp, Homo sapiens
tttttttattttgtaatttttaaaattttttattgyagcaaatctctattccctgagaagagagaggcaggtagagcaaggacaagtattgtcctttaaaattttttttcaaactctgtaggtcatcttttttgaaaaattgtttttagatatcactacagacactttctctgatcacactttttctcgttttatatgcatgaattaaagtcaaagaaggcatgattttgggaggatcatgggtggaccaccctcacaccccctctatatgactttattttatctattaacaacctataaatatataaaaccaacagaaatttctagaagaccaaaattagtaaatcatagaagaataaaataatatatttggcaaacttaattcaataaatgcatatgagcatttgcatgctccaaacagaacttgattttcatgcccattaaatgtgtgttttattttctcaaagcaatgacttgcttggccataaagcaagctttaataaaattaaagtatatgttagcaaactatactgtatatgcatagtt

SEQ ID NO: 293108 - DNA, 1185 bp, Homo sapiens
tttttttattttgtaatttttaaaattttttattgcagcaaatctctattccctgagaagagagaggcaggtagagcaaggacaagtattgtcctttaaaattttttttcaaactctgtaggtcatcttttttgaaaaattgtttttagatatcactacagacactttctctgatcacactttttctcgttttatatgcatgaattaaagtcaaagaaggcatgattttgggaggatcatgggtggaccacmctcacaccccctctatatgactttattttatctattaacaacctataaatatataaaaccaacagaaatttctagaagaccaaaattagtaaatcatagaagaataaaataatatatttggcaaacttaattcaataaatgcatatgagcatttgcatgctccaaacagaacttgattttcatgcccattaaatgtgtgttttattttctcaaagcaatgacttgcttggccataaagcaagctttaataaaattaaagtatatgttagcaaactatactgtatatgcatagttwaaacgctatttgattctcctaactcagtggacctctcagtctgttttttcacccagaatatggagctaataatatctgtctcatagatttcagttgcaatatcccaagagttctgtgatgttttaagcatcttctttttgtcagccttaatgctcaatgtgatgagttgtagagatgaaaggggcattgtctttgcctttaaagaagttgatgatctcatttttgtcaggactctaggaaattaaatgaagtcagttaaacaaaatgactattccaatcatttcattcatctgcwtgatccttactatagcccctggtttgattcctggagagtccactgcatgtgtggactttggaagaattgtatcgctaccaaaattgatctttggtacccatcatttctcactgttttagctcttgactgccctcattctggcatctagtggctacaggctatgtgcccttcatttgtgtcctttctctctggaaccactgtccctcattacctgttgtcagttttcttaataccattgtttatattttgttcatttttttcatggtttcaagtggcacagaacagtagctttccttatctgcaggggatattttccaagaccttgactggatgcctgaaactg

SEQ ID NO: 293109 - DNA, 1097 bp, Homo sapiens
aggggagaatccattctatgcctctcacagcttctggtagttgtctggggatacctgggcttgtggctgtctatrtctgcccccattaccaccttgccttctattccatgtttctgtgtgaaatctccctcttcttctatcttataaagacacttgtgatagcatttagggctaacataataatccaggatcctatggagtgaaatctgttctcccaaaagtaatatgttgaagctataaccaccacggtatagggcctttgtgaaagtaattaatgttaaatgaagtcataatggtgggagcatgatctggtagaattagtgttattgtaagaaagtaaaccagagaacttgtttcctttgtgctgtgggaatagttctaagatggccatctgcaagctcggaggagagtcttcataagaaactgatcctgctggacctcgatttgcgatttctagctttcagaactgggagaaaatagatttctgttgttttaagccactcactctgatttttctgttgtagaccaagctgactaatacacagggtwaggggagaatccattctatgcctctcacagcttctggtagttgtctggggatacctgggcttgtggctgtctatatctgcccccattaccaccttgccttctattccwtgtttctgtgtgaaatctccctcttcttctatcttataaagacacttgtgatagcatttagggctaacataataatccaggatcctatggagtgaaatctgttctcccaaaagtaatatgttgaagctataaccaccacggtatagggcctttgtgaaagtaattaatgttaaatgaagtcataatggtgggagcatgatctggtagaattagtgttattgtaagaaagtaaaccagagaacttgtttcctttgtgctgtgggaatagttctaagatggccatctgcaagctcggaggagagtcttcataagaaactgatcctgctggacctcgatttgcgatttctagctttcagaactgggagaaaatagatttctgttgttttaagccactcactctgatttttctgttgtagaccaagctgactaatacacagggt

SEQ ID NO: 293110 - DNA, 665 bp, Homo sapiens
aaaaagctgccaacctggtattcattctcttttataatgacatcctaattttgtgggcagcaacaaagggttcagataaaaacaaacaagcaaacaaaactacattcacttgtatccgtcagtgatgaccaagattttgcaattctggccaagtagatataagcatagggtagctgagagagtgttctgaaaaactcctttaaagaaggtggactcagcaggttcatacccttttacttttcaccatctcctttactcgtatctgttgtgaatatgaaagctggtaatgcagcagccattaggaccattaatggaaagccaagagagtcacagaatcctggactcagatatttttcagccrcaggaccagtgcctacaagtttctgcctttggatatcttattgtgtgattgggctttaaaccctcaatgtgtttacatttacaggcagtcaagcagacaaattcaattcccaagaattacatggctacagggaaaaataaatacataaataaaagggaggtaaagtatctatattttaggaggtggtttataagagatgatgatttttcaaaactattttcatgactgcttcctgcacttttagttggaggttggcaagatttcattttctcattatcccctcaatcatgagagaagtagtaat

SEQ ID NO: 293111 - DNA, 542 bp, Homo sapiens
gcaaagttagttaaaagcactttgtctttatatattaggaaaaacagtatactattatgcccttgtcactcatcagctctcccattctccctccataatatattctaaagggagcttaatttttcaaatggcctacaaagtattttgctagttcattttattgatgacattttcctcattgtacctaatgggtaagaagaaatacatgtatacctgagagagggtgataaatacccctgaaattcagaggcctgatacataggtgaaatttctggaccctctgatctacggcatgttgggatctctattataaagtaaaagtcaactagtatatttactcccaccaattaataaaaaaaagaaatccaaggtggtgatactctggatttgggggtaattataacttattcagccttactgtttcaaggtctttactaagttaactgaaaggctcrtggttttgagtagtactttggagcaaaaaaagtctctgcagcaagtataggctggaatgcaagctgccctgtccctttaaacttatg

SEQ ID NO: 293112 - DNA, 1073 bp, Homo sapiens
atgcaatccagcacgggcagtttccgaatgcgtgggtaaactgcacaaagtgcttcggatttcagtgcccactcccactgctgcctcttaccccacttacagcctcatggaaggtgttccaaaaccaattaatgaaaaataaaacaggactgacctggctggtaaataaatctgtacaatgttctgccatgagttaaaataaaggaaagataaagacagtagtgaagggctatcttcccagtgcgttcattgctcacgtgaaatagagatggccaatggtaaagaccgacatcaacttacagccagtgctatatactggctggttagtcaaggacagaaaaaaaacaaaactgacaaactggtaacaacaaagrctgagactgaagtaaggtgatgaataccttggtgcagcatataaagatgatcatgtgccacataaatgcccaccagagggtatccacaacctaggaccttcttaagaattagacagacaataaaaaaaaaaaaaaaagaattagacagacaagatctttctcwatgcaatccagcacgggcagtttccgaatgcgtgggtaaactgcacaaagtgcttcggatttcagtgcccactcccactgctgcctcttaccccacttacagcctcatggaaggtgttccaaaaccaattaatgaaaaataaaacaggactgacctggctggtaaataaatctgtacaatgttctgccatgagttaaaataaaggaaagataaagacagtagtgaagggctatcttcccagtgcgttcattgctcacgtgaaatagagatggccaatggtaaagaccgacatcaacttacagccagtgctatatactggctggttagtcaaggacagaaaaaaaacaaaactgacaaactggtaacaacaaagactgagactgaagtaaggtgatgaataccttggtgcagcatataaagatgatcatgwgccacataaatgcccaccagagggtatccacaacctaggaccttcttaagaattagacagacaataaaaaaaaaaaaaaaagaattagacagacaagatctttctc

SEQ ID NO: 293113 - DNA, 1119 bp, Homo sapiens
tgtagttttttaaattattattttaaaatcttattatgcatgtaatttgcattagccatgaaaattgagaagcttttcatatgcttattgccatatggatatttcattttctaagtgtctgtccaaatattttggtcatttttaaaaagtatgttgctttgttattattgatttatagggtttatatatgctggatatacattctttgtcagctatatgctttatgaatagttttctgaatctgtggattttccttttatttccttaagtttatctttctgtgagcagaatattttaattttaagcctaacttttccactttttttaatggataggccttatttgccctgaagaaacacttgctacaccaggaaatttgggtatgttttcttctaaaagcttraaagtttttagctttgacatttagatttatgtcgaattaattttagtgtaaggaataatgtagatggtcaatgttaactgattttttaagcctttcttttttcattttgacatattttttctccagaaatatctgtattttaaattgaagaacacwggcctctattcacaggtgctaatagtaacccttcccacttgtgacagccaaaaatgttcacagtcacaagataccctctttctctatattgggaaccactgctgtagtttaagtagccagaataagcattttttttccttccacaagaggaataatgatatctaggcaatgaagttcctagagaaataaaagtgtagttaccagatttgtgacataaagatgttacatatacatatattaaaacatatatatatatatatatatatttgcaaagaaaagagagagagaaagttatgctttcaagtatctaacaagtggaagaggctgaagttataaaacccaaaaataaattaaccattatatctaagcwgatgtgccagagggtagtattttcagttagtggcaaatacaattaaatagacagtcagtttgaagcaaataaaattctccatatatctagtggcatctttacactgatataaattgcagtgaaaagcaatttgcataaatcactattattccagagagagatatatagaccaagcaaatctaaagtgaca

SEQ ID NO: 293114 - DNA, 640 bp, Homo sapiens
tggtgtgatttatgagtttttgattttacaatggtgcaaagtgatacacatcaagattctcctcaacttatgatgatatgtgtgaataaagccattgtaacttgaaaacatttcaagttactacgggtttactcagacatatttatctaaagtttctgtaccagtttagactcccaagacattgttttcaagttacaatttaagaaacacaatttccacctataaaattttcaatttatgagagatttatcaggatgtaacctcatcataaattaagaaggatctgtgtatactactttcttgcctatgacttattttgcttaatacagatgttcttcaacttgcagtgaggttgtgtcacaataaactcattttaaactgaaaatattgtaagttgaaaacacatttaatacatctaacctagcaaacattatcgcctagcctaycttaagtgtattcagaacacttacattatcctccaattgggcaaaatcacctaacacaaggcctattttgtaataaatcctgaatattttatgtaatttattgaatactgtactgaaagtaaaaaacagatggtgtgtgggtactcggagtatggtttctatagaaaacttactgctttcacaacatctaaagt

SEQ ID NO: 293115 - DNA, 615 bp, Homo sapiens
agagccatattgatggttcaaaagggtctaaattctcatgtgcagagattgtaagggctatctgtgaccaaatatgacaaattctttttaatcccttaaatgcaatagattatgtagagcagaatttaactgtctgtatgtttatgtctctaaggctctttcatgagaaatattatttccccttaagaccattcctaaaatayatatacactgctatctgttaaagaagagttggctatgtaattttaaaaaatatttttgtagttttttagatttaatttttgtggtgtacatatttatggggtacatgagatgttctaacagagacatgcaatgcataatatcacataatggaaaatggggtatccatgccctaaagcatttatcctttgtgttacaaacaatccaattatactcttttagttatttttgaatgtacaattaaactaatattgactacactcatcatgttgtgctatgaaatagtaggccatatttattctaactattttcatacctgttaaccatccagacatcccctctaaccctctactacccctcccagcttctggtaacctcccttctactctctatctccatgggttcaattgtttt

SEQ ID NO: 293116 - DNA, 615 bp, Homo sapiens
agagccatattgatggttcaaaagggtctaaattctcatgtgcagagattgtaagggctatctgtgaccaaatatgacaaattctttttaatcccttaaatgcaatagattatgtagagcagaatttaactgtctgtatgtttatgtctctaaggctctttcatgagaaatattatttccccttaagaccattcctaaaatatatatacactgctatctgttaaagragagttggctatgtaattttaaaaaatatttttgtagttttttagatttaatttttgtggtgtacatatttatggggtacatgagatgttctaacagagacatgcaatgcataatatcacataatggaaaatggggtatccatgccctaaagcatttatcctttgtgttacaaacaatccaattatactcttttagttatttttgaatgtacaattaaactaatattgactacactcatcatgttgtgctatgaaatagtaggccatatttattctaactattttcatacctgttaaccatccagacatcccctctaaccctctactacccctcccagcttctggtaacctcccttctactctctatctccatgggttcaattgtttt

SEQ ID NO: 293117 - DNA, 600 bp, Homo sapiens
taaagaaagtatgaaagaccaaaggtaagtacagcagaaaaattacaggccaaccttattctgaccatagaggcaaaatatgttttaaaatattarcaaaccaaattgaaatatttgttttaaaaaatatatcatggccatatcaagttgtcccaataatgtaaagacagtttatattttaaaataaacatgtaacttgctatatttagaaattaaagaaaaagaaataaaccattatgtcaaatatatgaaaagcatttgtaatattcattaatggtaacaattgatagcaaactaataatagatggcaactctttcagcctagtataagacatctaccaaaattttacatcagttattattaataatggaaacataggagaagtattgataatggagacatatgatatcagcaaaatggcagaagaggagttccctggtataactcaccccactaaagtacaactagcaattatcagtagacaagaataccaccctgaacttgccagaactctgaggagaagcagaaaacccctgtgggtttgaaaaatgacaaaagctgcaactaataagagggatggctatttcagacttcactac

SEQ ID NO: 293118 - DNA, 532 bp, Homo sapiens
aattaaaaaatatgttctataacctatgtaaattccaagattttctttcctattcccaagagccctcctcccactgaagtacgcctgctgtggagatccctggttgaaagaayggaaaccctccccctgccagcaccaacacagttggtagaaataggactgtgtggttattgccactaacaccgaaattatcaatttcacacctagatgctaattctggactgtgaattttgctttttaaaaatttctgtgtggattctttgtgttatttttcaagtcacagtgagaatttagctgcttcattcccagggacaatgtaggtctgactgttcgctactctgccttaggcccagagctttttgctagctacaaaactataaactataatgggttgacaattgtacttatccaaacgctagaacctttcaatgcaaccagtactatataaatggtgctttgtcaaattttctctaggctttgtctcatgtctcttttactatcttgaatttagcaaagtaagactagtatgtaa

SEQ ID NO: 293119 - DNA, 532 bp, Homo sapiens
aattaaaaaatatgttctataacctatgtaaattccaagattttctttcctattcccaagagccctcctcccactgaagtacgcctgctgtggagatccctggttgaaagaacggaaaccctccccctgccagcaccaacacagttggtagaaataggactgtgtggttattgccactaacaccgaaattatcaatttcacacctagatgctaattctggactgtgaattttgctttttaaaaatttctgtgtggattctttgtgttatttttcaagtcacagtgagaatttagctgcttcattcccrgggacaatgtaggtctgactgttcgctactctgccttaggcccagagctttttgctagctacaaaactataaactataatgggttgacaattgtacttatccaaacgctagaacctttcaatgcaaccagtactatataaatggtgctttgtcaaattttctctaggctttgtctcatgtctcttttactatcttgaatttagcaaagtaagactagtatgtaa

SEQ ID NO: 293120 - DNA, 553 bp, Homo sapiens
cacgccattctcctgcctcagcctcccaagtagctaggactacagatgcccgccacgacgcccggctaattttttttttttctttttttttttttttgkatttttggtagagacaggtttcaccacgttagccaggatggtctcgatctcctgaccttgtgatccacccgccttggcctcccaaagtgctgggattacaggcgtgagccacagcgcccggccaggtgttttctatcttttgggagactgcctttccctcgtgctcgctgcaaccaattattattttagagagacagtttaacagctgcctaaccatcacctgatggttgcctgacattcctggtgggggacccttctcctgccctgcttatgtcttcttagctacctactctaacatttagtggtcaatggtaaaaggtgatggagggatttcgcggctgtgatagcaagaacacttaattcaaagaagatatgtacataatccctgttgctttgcttctcagtaagaagggtgggttggagcaactaggcaaggatctgaaacaaatggaga

SEQ ID NO: 293121 - DNA, 553 bp, Homo sapiens
cacgccattctcctgcctcagcctcccaagtagctaggactacagatgcccgccacgacgcccggctaattttttttttttctttttttttttttttgtatttttggtagagacaggtttcaccacgttagccaggatggtctcgatctcctgaccttgtgatccacccgccttggcctcccaaagtgctgggattacaggcgtgagccacagcgcccggccaggtgttttctatcttttgggagactgcctttccctcgtgctcgctgcaaccaattattattttagagagacagtttaacagctgcctaaccatcacctgatggttgcctgacattcctggtgggggacccttctcctgccctgcttatgtcttcttagctacctactctaacatttagtggtcaatggtaaaaggkgatggagggatttcgcggctgtgatagcaagaacacttaattcaaagaagatatgtacataatccctgttgctttgcttctcagtaagaagggtgggttggagcaactaggcaaggatctgaaacaaatggaga

SEQ ID NO: 293122 - DNA, 359 bp, Homo sapiens
ttagttcttaaattttgttcttaaattttgaatggttaggttaaamtgaccagttggttgaaagaacctgtaagcacattttaaatagtagagcaagttgttttgctatattgaccagctatgagacaaaatttaactgatggtcatttgcaaaaaaaaaaaaccattttgtaaagtgactagttctgagaatttattaatctcagaaaataataactagtttatcatacagaatatatttaagttgatgaacggctcttgaaaccagacagaagtaaatgcagttgactcttgaacaatgtgaggaggactggggtgcctactccccacacagtcgaaaattcaagtataatttatga

SEQ ID NO: 293123 - DNA, 606 bp, Homo sapiens
ccaattttctgtgttaaataaactgcacattgtttgttgaagggcatggattgagtttttcgtatctgtttttcttcaaaacactaaacataagaygctgcacattattcattgtcagtaaatgtcatactcaaattgcaatctaccttttgccctccatcttcaactgctgacagaatatttattttatttttatctaaaattctgcttatttctaaagctgggctcatcttcccctgatcacaagattctccatttacaatttcttatttttgtcaaggtaggtcttttaactcattagccaagtgaaaaacaaacaagcaaaacaacaacaacaacaacaaaaacctcagtctttaattttatacttccttttcttcttttctttttaagtcttttgaatctttccttgaacgatctacacctgcattttatgttgacctcttaaccagtgtttctgccactcactttatttgaacactaataaaaattgctcacattgttttgaattcttcctatgtgctaggcagtacttaagcacttcctaatcagtaattctcttaatgctgaaaacaatcttattatcatgattcctggagagataaa

SEQ ID NO: 293124 - DNA, 586 bp, Homo sapiens
taaatgtcatactcaaattgcaatctaccttttgccctccatcttcaactgctgacagaatatttattttatttttatctaaaattctgcttatttctaaagctgggctcatcttcccctgatcacaagattctccatttacaatttcttatttttgtcaaggtaggtcttttaactcattagccaagtgaaaaacaaacaagcaaaacaacaacaacaacaacaaaaacctcagtctttaattttatacttccttttcttcttttctttttaagtcttttgaatctttccttraacgatctacacctgcattttatgttgacctcttaaccagtgtttctgccactcactttatttgaacactaataaaaattgctcacattgttttgaattcttcctatgtgctaggcagtacttaagcacttcctaatcagtaattctcttaatgctgaaaacaatcttattatcatgattcctggagagataaaatgactttgccacagaaacaaaattataaagtggtgagccagaagcaaacttaggcaacccgacaccaagtcttaaaacactaggcatactgttcccc

SEQ ID NO: 293125 - DNA, 606 bp, Homo sapiens
ccaattttctgtgttaaataaactgcacattgtttgttgaagggcatggattgagtttttcgtatctgtttttcttcaaaacactaaacataagacgctgcacattattcattgtcagtaaatgtcatactcaaattgcaatctaccttttgccctccatcttcaactgctgacagaatatttattttatttttatctaaaattctgcttatttctaaagctgggctcatcttcccctgatcacaagattctccatttacaatttcttatttttgtcaaggtaggtcttttaactcattagccaagtgaaaaacaaacaagcaaaacaacaacaacaacaacaaaaacctcagtctttaattttatacttccttttcttcttttctttttaagtcttttgaatctttccttgaacratctacacctgcattttatgttgacctcttaaccagtgtttctgccactcactttatttgaacactaataaaaattgctcacattgttttgaattcttcctatgtgctaggcagtacttaagcacttcctaatcagtaattctcttaatgctgaaaacaatcttattatcatgattcctggagagataaa

SEQ ID NO: 293126 - DNA, 606 bp, Homo sapiens
ccaattttctgtgttaaataaactgcacattgtttgttgaagggcatggattgagtttttcgtatctgtttttcttcaaaacactaaacataagacgctgcacattattcattgtcagtaaatgtcatactcaaattgcaatctaccttttgccctccatcttcaactgctgacagaatatttattttatttttatctaaaattctgcttatttctaaagctgggctcatcttcccctgatcacaagattctccatttacaatttcttatttttgtcaaggtaggtcttttaactcattagccaagtgaaaaacaaacaagcaaaacaacaacaacaacaacaaaaacctcagtctttaattttatacttccttttcttcttttctttttaagtcttttgaatctttccttgaacgatctacacctgyattttatgttgacctcttaaccagtgtttctgccactcactttatttgaacactaataaaaattgctcacattgttttgaattcttcctatgtgctaggcagtacttaagcacttcctaatcagtaattctcttaatgctgaaaacaatcttattatcatgattcctggagagataaa

SEQ ID NO: 293127 - DNA, 658 bp, Homo sapiens
tcttaatggcaaaaaagagtacaaggaagttcatctgaaattacagtaggagtcttctccctcccacctctcttggttttcttttttctgcgggaagggagcaaagaagaagagaggggtaagaaatgtagttgcttccaaaacagagattttggcagtctacctttaatgggcatttgctaaaggccactgggcaaggagaaattagacaatcctaagcattggggagttgagaatgcaaagccaggagaacggctagaggtggtcatatctctataaagagacaatactatcacctgggagacacgtcaacttggccagcctctatgatctaggcttggaatattctattcaaaatttacacaaatatgtttataccacttaccatgtttggaatcacggacactgtggccagcgggggctactaataggtaggccttggacctttgtgggccatgtggtgtgctgggratcattgggattaggacctcatttatcaagcatcttttcatattgtgcaacctcccaattgccagacaccaaaatcacagttacgaatacatgagatctgagaagttttatggctttgaatagatcagcctcctctcaaatattaatctctggaccactgaacatggtagtactttgccgaatagca

SEQ ID NO: 293128 - DNA, 610 bp, Homo sapiens
aatgacatagagtagcttttagggaacatttagagctcaaataatattagaaaaaaccgctgtaatcatgcaaacactgatatgtaaatgatgtgagagaaggaagaaaatggaaatgttagaaatgtgacacaacgaccagattaaaggatgttttcatttacactgtaacctctattaaccatttaacacctaggtaagccctccaactagctgattgtgtgcaatgatataccataattttaaaataagaaagcaaaaagagaatactttactttattttactagtatacttgagaaaacaattcccagaattgtgctttcaaaagttcactttagctaaagcatcagtagccttcttagtagtttaagaaaggctgctttggagatcaaaccatggctaggccctttattgcctgtgtgacccyggaccaggaatgtaacttttctgtgcctcagttgtttgacccacaaaatgaagataataaaattatgttcctctaaagttagacactaataataaatgtaaaatccttaatattcaccacatatcaaaagtgcaataaatattatccacaattaattagtattgtatattcagagttaggac

SEQ ID NO: 293129 - DNA, 610 bp, Homo sapiens
aatgacatagagtagcttttagggaacatttagagctcaaataatattagaaaaaaccgctgtaatcatgcaaacactgatatgtaaatgatgtgagagaaggaagaaaatggaaatgttagaaatgtgacacaacgaccagattaaaggatgttttcatttacactgtaacctctattaaccatttaacacctaggtaagccctccaactagctgattgtgtgcaatgatataccataattttaaaataagaaagcaaaaagagaatactttactttattttactagtatacttgagaaaacaattcccagaattgtgctttcaaaagttcactttagctaaagcatcagtagccttcttagtagtttaagaaaggctgctttggagatcaaaccatggctaggccctttattgcctgtgtgaccccggaccaggaatrtaacttttctgtgcctcagttgtttgacccacaaaatgaagataataaaattatgttcctctaaagttagacactaataataaatgtaaaatccttaatattcaccacatatcaaaagtgcaataaatattatccacaattaattagtattgtatattcagagttaggac

SEQ ID NO: 293130 - DNA, 1082 bp, Homo sapiens
ttaaagtgaatattttaatattttattattgcatataaagaatgctgttaaatttttttataaaacattttatcaagtgtattgttaacttttgctgcataacaagttactttaaaaattagtggcctaaaataacaataaacatatgtcagctcatattatctgtgagtaatgaacctaggagcaccttaggtatatgattctgtcttagggggtctctcatgaarctgtagtcaaaatgtcagccagggagacagtaagttatagtcaaattatcagccaagggtatagtcatctaaagattgactggaattggagtattggtttccaaaatggcctgctcatacaggtggcgagttgatgctggttgctggatggagactttagataggttccacatggacctgtctataagattgcttacatgccttcagaacatagtagctggcttccctcagagtgagcaatctaagagacagcaaggcggaagccaaaatgtttttatgacacwaaactacaaccagcttggatttgagaaagacaatgaaggactggaagtttggtagctggagaaaaagaaaaaaggctttatagcatacaatctatatttatgaagttaaaaaattaatatawtgaaaacaggtaataatttataggggaaaaatcaactagacactccaaaagggggaaaattggatgagaaaaatgcttcccagatatgaagtacaatgaaaaagagcacacttttaagcacttgataagagacagcatctgtcggactggatgcctagtgaataaaatttatattccaatatgctacctggactagtagagtgctatatttatttagtcattaaaaatatctgtggcataagggtgagggaaaaggagacaaatgttattattattgtaaaaaaaaaaagcggttcaaaagattattgaatatatggatgtttgtatatattttgaacttaaattatgtgagaatatttaaaataatgtaaatatgaaaaagaaaaactgtatttgcaagctcagtgctcatcattcatattgaaatcaattgctattttctaaagtta

SEQ ID NO: 293131 - DNA, 571 bp, Homo sapiens
aaactacaaccagcttggatttgagaaagacaatgaaggactggaagtttggtagctggagaaaaagaaaaaaggctttatagcatacaatctatatttatgaagttaaaaaattaatataatgaaaacaggtaataatttataggggaaaaatcaactagacactccaaaagggggaaaattggatgagaaaaatgcttcccagatatgaagtacaatgaaaaagagcacacttttaagcactygataagagacagcatctgtcggactggatgcctagtgaataaaatttatattccaatatgctacctggactagtagagtgctatatttatttagtcattaaaaatatctgtggcataagggtgagggaaaaggagacaaatgttattattattgtaaaaaaaaaaagcggttcaaaagattattgaatatatggatgtttgtatatattttgaacttaaattatgtgagaatatttaaaataatgtaaatatgaaaaagaaaaactgtatttgcaagctcagtgctcatcattcatattgaaatcaattgctattttctaaagtta

SEQ ID NO: 293132 - DNA, 532 bp, Homo sapiens
aggaaagatgtggctaccagagagagaaaacccatgcaggaagacttcatgatgtgcaaattggtcatcatcttcttccctgcstaaaactttatggacattttattactcatcaaacctttcaaggttggatatttgggatgatagggtaaagttaccacatgctaggtttaacctgaagatgggcaaaacacaagaacagacacgtggtacagtaagtaactaaatcatattttctttgttgatattgttttgttataaacaccatgaaattgctctttctaatcatgaattaggctgggtgaccacttctctattaattgaagcacactggtaagtgctagaagcagttttaacttgctttgacatatacttctaattaccatccaatatctattttctacttcctccataaaaacaaaactcagagttttaatttagagtgatgatgtaactagccttccacgactttctcaagccttcttttcagcaaggtatgggcatgtgaatacttaatgtcaataagacatat

SEQ ID NO: 293133 - DNA, 532 bp, Homo sapiens
aggaaagatgtggctaccagagagagaaaacccatgcaggaagacttcatgatgtgcaaattggtcatcatcttcttccctgcctaaaactttatggacattttattactcatcaaacctttcaaggttggatatttgggatgatagggtaaagttaccacatgctaggtttaacctgaagatgggcaaaacacaagaacagacacgtggtacagtaagtaactaaatcatattttctttgttgatattgttttgttataaacaccatgaaattgctctttctaatcatgaattrggctgggtgaccacttctctattaattgaagcacactggtaagtgctagaagcagttttaacttgctttgacatatacttctaattaccatccaatatctattttctacttcctccataaaaacaaaactcagagttttaatttagagtgatgatgtaactagccttccacgactttctcaagccttcttttcagcaaggtatgggcatgtgaatacttaatgtcaataagacatat

SEQ ID NO: 293134 - DNA, 600 bp, Homo sapiens
atgaaattttaaaatttaattttattgtggtaagaccacaacatgaaatctatcttcttaacaaaattttagctgtaccataaaatattaactataagtacrttgttgtatagtagatatccagcagctattaatcttgagtaactgagactttcaccagttgattagtaatgcccttataatgcttttacttttaattattttgaggacctctatactgtttcatcagaagctgcatcattatgcatttcctctaacagtgtacacaagtttctatttcttcatgtgttgtctaacaactgttctttggttttttgatattagctgttctaacagtattaggtgatgtcacattttggttttgaatctcattctttgatgattagtgacattaagcatctatttatatacttgttggccatttgtatgtcttctttgaggaaagatctgttcaagtctttagccattttaaaaatggattttaagggtatttttgctaatgaattttaggagtttttaaatatattttacaaattagtcccttaattgatatgtgctttgcaaattatccaattccataggtttttttttttttacaaa

SEQ ID NO: 293135 - DNA, 600 bp, Homo sapiens
atgaaattttaaaatttaattttattgtggtaagaccacaacatgaaatctatcttcttaacaaaattttagctgtaccataaaatattaactataagtacattgttgtatagtagatatccagcagctattaatcttgagtaactgagactttcaccagttgattagtaatgcccttataatgcttttacttttaattattttgaggacctctatactgtttcatcagaagctgcatcattatgcatttcctctaacagtgtacacaagtttctatttcttcaygtgttgtctaacaactgttctttggttttttgatattagctgttctaacagtattaggtgatgtcacattttggttttgaatctcattctttgatgattagtgacattaagcatctatttatatacttgttggccatttgtatgtcttctttgaggaaagatctgttcaagtctttagccattttaaaaatggattttaagggtatttttgctaatgaattttaggagtttttaaatatattttacaaattagtcccttaattgatatgtgctttgcaaattatccaattccataggtttttttttttttacaaa

SEQ ID NO: 293136 - DNA, 609 bp, Homo sapiens
aattatcaatactaattctttaaagctatctggtcctaggcttttgtggagattttggattactgaatcaatctccatgtcagttataggtctgctcagactttctatttatttatgatttagtcttggtggttgtatgtttctaggaatttatccattttttctagattatccagtttgttagtggacaattacttacagtaatctcttgtgacccttttcatttccatggcatcagttttaatgtctttgtttacatttttgttttatttatttgagtttttctctcttttttccttggttagtctaactaaagatttrtaatttttgttggtcttttcaaaaaaccaacccttaattttattgactttttattgtttttctattctctatgttgtttaattctgctgtatatttcattacttccttccttctgctaatttcatctttggtttattctttttctagttccttgcagtgtaaagttaggttatttatttgagagctttctttttttaatgtacacatttttcacattaaacttccttctcagtccttatttattttcctgcatctcataagttttggtgtctggtgtttccatttttg

SEQ ID NO: 293137 - DNA, 503 bp, Homo sapiens
aatgaaaggtacatgcgcaaccttgccaggtgtctactgttaaagtgagggcattgattgaaaaagaatggaaccctacagcttggaatggggatgtgtgggagaactctgatgaagctggggacattgagcttgtaaactctgattaaccttttttgccagaagaaacaacttccccattcccagtaggggcaacatcccttcctcgatcaatgctgccatcagcccttccacctttttctgggaagataaaccctacrctgcctgaggcaacagtgatggcctcccctgaggcagttgcaggcaagacagtgttgattctcctctggaccttcccccaacacccctgttttcttctagacctataactagactaaagtcctgatgggcctctaaaggtgaggttcagagtgtgacacaaaaggagatgcactagatttgaaaagaactgcttgagttttctaatttatataagcagaaatctggaaacaggcataggaatg

SEQ ID NO: 293138 - DNA, 535 bp, Homo sapiens
aatgaaacacaactttattggagaaatcactctttagtcaaatcactgtcctttcatgggaaagactttcctttactctgtgataataacctttccatatttcagtggggaagtatatcctttcttatataaattggtgacaatcatagaaaatgattgtcctttaattaccaaataaaaatttgtcagccaaaatttctttttataaaatcctaaactctattaggctgccaggaaagcagaggcgtctgattacacagagatctgtcctgttgctcaatcagcaaggaaccagaaagacacttcaacgccaacttcaggcactttgtgcttctgaataggccaaaagtacrtggagggccaacacagaaagccagctaggctagaaaataaataatgtggagataaaaatacaatcagcaacccatctaaagtgtataaaaaagcctgggctaaaaacaatcatggtcgtaacgatgggtcaagttgatgataccgtttattttttttcttgtcctctctgaaaccagcatct

SEQ ID NO: 293139 - DNA, 528 bp, Homo sapiens
cactatgaggttttccacaagaggaatctcagcagagccaacatggctgtggtgaggatttttttttttctttcagaaaaggcaattgctttgcctctgcaggcatgtggtggtttggttgtcagtattgaattcaatgctgtgacttaacatggttccatattttgtagcattatggaatgtctgctgctgcagggaatggcaagtagcggatcaatgtaactataccagtcctctggttttagacactgagcactgtggtgcctggaaaattactgagcagcggctgaacagctagagtgatttaactcccagtgtgcctcgaaaacatccctgaccagtcagtmgtagcattcattcttattcagacccatacagaaagtacctcacaagctcagatttctgaaataataaaaggcataaaagagccaaattctatcacagtatgattacattcttctctcaatggtaaattattctctgctacttatttttgttgtttcagtttatcatggcttaaatcaacat

SEQ ID NO: 293140 - DNA, 592 bp, Homo sapiens
gagcacttactatgctctccaacctatgcaaaaacctgttctaatctctaaaagaactttcagagtaaacatctagaaagaaaagggctcagggcagtctgaggaatgtgagatttgtaaaatttatcaggcccagagtgacacaagcatgggacttcattcatggttcctgcacccatgcttgggtgggggtggagaagtagttgtttaaaggcattttggttttcctttccttctyggaagtttcagactaggtgataaattacctaagtgttaccacaaggtgcacaacatgacccctgcccattatcttcatgtttgtggaatttgtgacacaaagatcaatgtatagccagtagatagcttatgttattttaatgaacgaatataaattcttgggaaacaacttaggaactgcccctaaacttcttattttttcctttaaaaacccactcataactgctgctaatgggagcatatgttcagggcaacttgaatctatgattcttgtgctttagtcctcaaccttagcccaataaactctttactcatattaagtttgcttcagtttcttcctttaggtcaacagcat

SEQ ID NO: 293141 - DNA, 586 bp, Homo sapiens
actcttttaataatgagataatgtatgcaaaatgcccagaacaaagaaacaccatttttaaaaattccttttacttagaagaatggtttcaaagacatacagtcatatgttacttaatgacgggkatatgttctgagaaatccatcattaggcaatttcatcattgtatgaatatcataaaatgtacttacacaaacctggatgggatagcctggtacacacctaggctatatgggatagtgtattactcctaggctacaaacctgtacagaatactgtatactaaatactatagataattacaacacaatggtatttctgtatctaaatacacctaaaaataaaaaaggtagagtaacatatggtataaaagatttaaaaaatggtacacctctataggtcacttagcacagatggagcctgcaggactggaagttgtgccaggtgagccagtgagtgagcagtgagtgaatatggaggcctaaggcactactgtacactatggtagactttataaacattgtacacttaggttacactccatttattttaaaatgttttccattcttcaataataaatttacct

SEQ ID NO: 293142 - DNA, 582 bp, Homo sapiens
ctttttacctgtttggtgagtttccatgttgccttctgtgcttgcaagatgtatgacttttaccagctgtccttcttaacctttctggcttacaataatctcatttttttgaccctacaataagatataaaggctgaaatatatttgactattttgtatagctctctgtttttgctacttgtattttggggttttttcttcactaagattctgagtcttttaaagattagaactatgtaatatatatcttcaaaagtattgagcaatttatgagctcccaaaaatatactatttaaygatttgaattacaatattaaataggtatatagttataaccttcacttgaagtttgtaataatattattttttaaagttttgtgtgattaataaatcattcatgattgatataaacatatatgtgtatatacatttattgattcatgtggaatgtgtacatatatctatacaagtatatttttaaaatgaaatttctcccaatgtacatccaacaaaaagggattaagtctataaaagatagtccattttctgtttaaaactgaaattttagtatttccaatacca

SEQ ID NO: 293143 - DNA, 587 bp, Homo sapiens
agttaaatgtttgaaatattaaatataaatattaaacatatttgtgctgcagatatttgcattctttttatttatttatttttgagacccagtttgagtatgcatatatcagattagtggattttttttttttttttttttttggtaagagataraatattgctatgttacccaggctggacttctaccccttggctcaagtgattctcctgtctcattctccatagtagctaggactgtaggcacatgtcactaagcctgtctagatttgtccttttcaaagcaggctgcattaaactcacctggagagataataaaataaagctatattgttgcccagactctttcccatacttgaactagaattttagaggttagtctttttaaaagcaccccaagtatacaatgagagttaagagttaatgctctgaataaacaataattttacttagtgttttataaaattgtgttttttaatgatatggagaattgatctgctttgaaatttagatgtgaataatacataaatattggggatggtaccaaattaaaaatgaaaaaatattaaggggtattgatgttgaaat

SEQ ID NO: 293144 - DNA, 585 bp, Homo sapiens
acatacaagaccttgtggatattattaaatgtgtagggtgttatttttattcctttacctatggtgagtaattttagctattaacagaaaatgtaaatagtttattataacctgggtaaattctcaaaagtaaccatggaagagagagtagcattcttgaaacagaatcctgtattttacactaatgattggtacaacatagtatttcttatattcttaggtcaattagtttaccgagtgccagtcatgatttttaattacrattatttctttggagaaatcttgtatgaaaaacttaacatttagtaagaaaggcttatgggtttttgtggtgactaaaaattctttatttatatttactaacttaatattgatgtcatttaaggtctcgttcaacccttggacactccagatctcattggagccagggttccagttctcatgcaagtcggccacaggagccacggaaccgcagtaggatttctactgttatacagcccttgaggcagaatgcagcagaagttgtggaccttaccgttgatgaagatggtaaattgaagtagtaacagtagaaaattatgaaag

SEQ ID NO: 293145 - DNA, 602 bp, Homo sapiens
ctaaacatacaagaccttgtggatattattaaatgtgtagggtgttatttttattcctttacctatggtgagtaattttagctattaacagaaaatgtaaatagtttattataacctgggtaaattctcaaaagtaaccatggaagagagagtagcattcttgaaacagaatcctgtattttacactaatgattggtacaacatagtatttcttatattcttaggtcaattagtttaccgagtgccagtcatgatttttaattacgattatttctttggagaaatcttgtatgaaaaacttaacatttagtaagaaaggcttatgggtttttgtggtgactaaaaattctttatttatatttactaacttaatattgatgtcatttaaggtctcgttcaacccttggacactccagatctcattggagccagggttcmagttctcatgcaagtcggccacaggagccacggaaccgcagtaggatttctactgttatacagcccttgaggcagaatgcagcagaagttgtggaccttaccgttgatgaagatggtaaattgaagtagtaacagtagaaaattatgaaaggagtttgataaaa

SEQ ID NO: 293146 - DNA, 587 bp, Homo sapiens
ttccagagactgcatatttataatgtatatttgggcaactttagggatttccaaggttatctttgactaaatgccatttttgctttccttggatcagtatattcagacagtgaagtgaaaattcttgttacaagaaacaaaaaacaccaagatattaaacaactctagaatactggtttggggaaaccaagaattcattatcctgcatactgatgtcagctactttatttaacaaaccttttatggtttgaatttttactgtacgtcactgatcaaggtgataaaaagatagtaaggtgctaccctttcctaacaaatttcatattctagataaaaatagtaaccttaatcctaatgtgaattcttgtacacgttaagtctcatctacacacatttacctatatacttttttgcaatcttcagaattttagtttcagtaaacctaaacagcaagttccttmtgttggagataataaaaagagacaactaaggatcagtaaagataattgggagagaaaagaaggagtattttaaattgaagcttgttaaaggaagataactaaaaacaaagttgagaccttaaaact

SEQ ID NO: 293147 - DNA, 481 bp, Homo sapiens
gggggcaagaggagggatagcattaggagaaatacccaatgtagatgacgggttgatgggtgcagcaaaccaccatggcacacgtatacctatgtggtaaacctgcacgttctgcacatgtgttccagaacttaaagtataattttaaaaaattgaaaaagaaaagaaaggctttctaaacaaaggagatccaagtagggttatttcatttccttcagagcaaacaaagcagatattttataagaaagtattcagtgacccttgcycaagtttcttcagaacattgataataatctcagtgtactcctttcctgtaagaaggatagatcactacatggcttaaggcatgtataaagaggtatttcctgacatcttctacagaaacacattgagagggcacaagatactatagcaagggaaattaggagctgggagtgtgatagaactcatcataatatccatcactttaacttctttacta

SEQ ID NO: 293148 - DNA, 614 bp, Homo sapiens
ttctgcgcatcaggctttttttgtgtgtggctgtgaggcagatggggaagctcacaagatgtggcttttaacattgtgattggttatcagtgatggtagttttctgagcaatgatattatagctccctgctttcagccttatttgaagggaactaggagggcataaacaaggcattccagtggaacagaaaacatcacatggctttcagtatggggcttgraagtcagttcagaagatggggagacatgatgaacagatgataacatataattgcaaaacagcaaaactgcaactgaaactgatgacaaagctgaaggaaaacaatttctgaacttccaagatgaaaaaggtgatgaattaccagtatgatgcaaagatttactgctcagagaagaattcttagtggtgatacagccttaacctcagagaaaataattgaaagatttgaaagtctcttgggaccagctgtcccttcgggatttccataaacattccattaatgtgctatccccaaatcactctgtctccagataagctaataatgctgaagatgattattatctgaaatgcccttttgagtaatctaaatctaaacgcctgaattaagtagaat

SEQ ID NO: 293149 - DNA, 614 bp, Homo sapiens
ttctgcgcatcaggctttttttgtgtgtggctgtgaggcagatggggaagctcacaagatgtggcttttaacattgtgattggttatcagtgatggtagttttctgagcaatgatattatagctccctgctttcagccttatttgaagggaactaggagggcataaacaaggcattccagtggaacagaaaacatcacatggctttcagtatggggcttgaaagtcagttcagaagatggggagacatgatgaacagatgataacatataattgcaaaacagcaaaactgcaactgaaactgatgacaaagctgaaggaaaacaatttctgaacttccaagatgaaaaaggtgatgaattaccagtatgatgcaaagatttactgctcagagaagaattcttagtggtgatacagccttaacctcagagaaaataattgaaagatttgaaagtctcttgggaccagctgtcccttcgggatttccataracattccattaatgtgctatccccaaatcactctgtctccagataagctaataatgctgaagatgattattatctgaaatgcccttttgagtaatctaaatctaaacgcctgaattaagtagaat

SEQ ID NO: 293150 - DNA, 618 bp, Homo sapiens
ttgctttcttataacttttccagacaactcgcattatgtatttgtagctgattccctgtggaaagaagtatgaaaataacctcattcttttcaagtctgagaaaagatgccaaatgaaggaggtcagtaacacacasgacatgggacagctgggaaacaggggacaggtgctttgtgagtcagtagtagctggattccgctcaagggttgcattcttcaagatgtctaaatatttgcatcaagatgagtgtatttaatttggaaaccatataaattaatacagatcacacatacaaattaatgcaaattcagtgctcattttgaacacttttaacaaacctcttaataaagtcaactaaaattctggataatttaaaaaacaaaacaaaaaaaccttatgaagcagcatgaaagcaagaaaactatgggtatcaaaaacaaagagaagtcagggatcctgggagttgttcaaacaccaaagttgtcttttctcctaagagcagaaactgggagattggagactttcattgtaatggctgcagagagcacagagatcaagagataagacttagggttgagattgttactctctactcccagactattactacagacaca

SEQ ID NO: 293151 - DNA, 607 bp, Homo sapiens
accataggcaaattgcagattttgcaggcccctagaaagttgtaattgcagattgattcctccatcctaagaggaggaagagtaaagctgctcactaggctcgaagctgggtagagagcctrgtcaaactgttggtgcctcatgactcaggagccaaacagcaaggcaccttgtgagaaaagattggaagcaccgccagagctctgaggacttcccagcaagcctaggagtgtgaatgcctaggagatggccagctggaaagcaatcttgggtctcaaaggatttctctgctctcttgtgaaaaacaataatcttcacttccagcaatcacctgattaaaaatctcacttccgtggtctctaaagttctttcaatatctaaaaaaaatttggcatagtcttttatcacaactatggctaagaggaagcaaataaagtctgggaatcttgataggtatttttttgttgttgttaattaaagagtttctaagattaaccttctctctacaacttacagcctcttaaagtggaaaagataaaagtgtcatctaaagaaaaatgccccaaactaaagctggcttaaatggagaaaactcatagagagagtt

SEQ ID NO: 293152 - DNA, 538 bp, Homo sapiens
aaatgtccattcagaaattaatttcatgtagtatttgttttaatgtgtcgtgtttaataatgttcttcttgttatgagagttcaaccattcatagctgtatgttctgctttccaactagactataatttctttgagagcagagtccattttgcatgtctctctacacatccacaacaccaaagaaaaatataataaatgctttaattcagagaggctttactctcagagaatgtatagtaaaatattgaggaagtgtttgatgattccattatttagtaatcaaatatccaaatagttcttactaggtgtcaaccactgatgtgttaatatatttgaaaaatagactaatataatmtttgtatgaatccaattagataagttctattactaacattcttattttacagaagaagaaactgaggcatgaggaagtattattgtcaacagataacaaataacagatccaggattcagacccaggaaatctggctctagaatctgcacttgtttcaaccactacactctgctttgtcagat

SEQ ID NO: 293153 - DNA, 612 bp, Homo sapiens
agagaggctttactctcagagaatgtatagtaaaatattgaggaagtgtttgatgattccattatttagtaatcaaatatccaaatagttcttactaggtgtcaaccactgatgtgttaatatatttgaaaaatagactaatataatctttgtatgaatccaattagataagttctattactaacattcttattttacagaagaagaaactgaggcatgaggaagtattattgtcaacagataacaaataacagatccaggattcagacccaggaaatctggctctagaatctgcacttgtttcaaccactacactctgctttgtcagatggccatgccctgatgactacaacagtcttggtgactgtcaatgtcttgtcatatatattttacctatggaattgactgtgagatgtcttagatcagtctgtttctcattcaatatggaacatatttgcaaaagcgtttcaaatgatatcttaccacctgtcatgccaacttcttgccacatatgccattgttactttgattctgytaaactattacagtgcaacttacatcaatactacctaccctcttcttttgaaattattgtttagtcattgaaggtaa

SEQ ID NO: 293154 - DNA, 521 bp, Homo sapiens
gatccattataattagtggcatttggggaaagcacacatcactgtaataaaactgaaatgtgctggcaagatctcactaaatatttaccttgtctgccagaaatgccacaatttagtgatcattatttagggcctttaattaatgtatttattttagcatttgctgtttrtttatttatttatttatttatttatttatttatttatttattttgagatgaagtgttgctctgtcgtcaggctggagtgcagtggtgtgatctcagctcactgcaacctccgcctccaggtttcaaatgattctcttgcctcagcatcctgagtaactgggattacaggcacctgccaccacacccagctaatttttgtatttttagtagagacagggttttaccatgttaggcaggctggtctcaaactcctgaccttgtaatctgcccaaatcggcctcccaaagtgctgggattacaggcatgagccaccgcgcccagccacatttgctgttattaataattataaca

SEQ ID NO: 293155 - DNA, 610 bp, Homo sapiens
ctaaaccagtccagagcagttcgtttccagtcaacttgcagatgtgtgagagagaataaataattgtgttttaagccactgagttttggattggtttgttaaacagaattattatggaaatagttgacctctactgtaaagccaaatcagactggagttgagtagatgtctgaaagaatcaacatgaagaatcaagtctccacaaagatatagatctaaacttatctgtctctccagcttcactgcctaataagctctatttagctttttgagtctgtcataatatcctacctccagtttttggatatgtcaagcccttccatacatcaaggtcaacaaagcataaacaaaaagcatatgcttaaaaaaaaaagtatctctgaacaacttacttcccattcccatccattgcttgaatgtcttaacatagccattaccttctcagctaatgggataccttggtccttaaggtgtgcctccagtggcactaagtgggagctcaaaaatctatggggcagyagatcaataaaaaatattctatcgatgacaacacaatttatgcaatttcctgtaagtttgaacaggttctaaatgaacatatatgcaacag

SEQ ID NO: 293156 - DNA, 542 bp, Homo sapiens
gtagtctgtgttttatattatctatgtattagacagtggcataatgtcgaggctgaatcactttaccaaagatgatgtgtagtttcagagtcagaacaaatacattyaaaacatccagtcactactgctaaggtgctgttcatctgctgaatcatctgaatggcttccttgaccattctggggatctattctttctatgagcaactctggcttctgtgttgctcccagaagcaggcatggatgaagtccgcagtgaccctggccttcctgcagcctgcaacagtcatcaatggaggaaggagaagggaaaatatggagaactggttgtggttaagtttatgtgtcaagttgactgggccacgggatgcccagacatcttattaaacattatttctggctgtgtctgtgtgagagtgttttcagaagagattgacatttgaattggtaggcccccaatgtgggtggacatcatctaattccttcaggatgcaaatagaatagaaaggtagaaggtggaagaagagtgaatttgttctttctgc

SEQ ID NO: 293157 - DNA, 615 bp, Homo sapiens
atgattattttgttatgaaataaacatacaaaygtgcagggaaaagaaagacacaaggacatgcaatgacctccaacccccactgtaagatatataaaaccgtcaatcagttacactttggagaaagcctgggaggtggggtgggcacaaaggaaaagaattttatttttttgacttgtacatttttgtatatttttagcctcatacattgctaattttataaaaataccaaaaagttatctgacaaggaaaattatccaactcttgttttctcctttgtacttctctgcactaaatattagctaatacattaatatatacatatagtttcctggctctttttcttgcatgttgaaaatcaaagttaaatttctctaccagttatataattaaagcctgtcagattcaaagagaaattatgaaaactgattttctaagaaagggaggacataaggatgcaccactgatgctcttacttttaataaatccttttctttaaacagcaataggttttctagccaatcttttaatgtgattcttctgctcatgccaattcatgtctggggatggtttcgctgcctttagttaaacactaaagagttgtcaggcaaaggc

SEQ ID NO: 293158 - DNA, 493 bp, Homo sapiens
agattcataaaaacatgtagttcctattaaatcatattaaccatgttctctttgaaagatagctcacgttaaaactacaaatgcccacctgtaaccaccaatttcagcgataaaatcattaatggccattgactttctaggaataaagcaatgtgttcaaagtagaccttataattasgagaatgtgctgtaatcaagtctccatatccagaaaactgaaggaaaaaaggatcatttggtggagaaagggtcttgactcttttgattttgcaggactttaataatgttggctcagtttgacttctcaaggctggaacatgaccaatacattagcaatgctgattggctttgatgagaggtttctgaaaagaaatacatgcatagaagtaaatgaaaaccttaagcaaaacttggttttcataggtcagctatctggatttgaaaacataatcctacctgatcattctctttgttcatttgtctgtgttttctt

SEQ ID NO: 293159 - DNA, 597 bp, Homo sapiens
cacagtgggcagggtgcagtagctcacacctggaatcccagcagtttggtaggccaaggtgtgcagatcgtctgagcccagcatggagaccatcctggacaacatagtgagcccctgtctctacaaaaaatacaaaaattagccaggcctggtggcatgcgccatagttccagctacttgggaggctgagatgggacaattgcttgaacgcaggatgcagagkttacagtgagttaagactgtgccactacacagtggcctaggtgataggtagagattctgtctcaaaataaaataaaataaatcacagtggtggactctaataatacacaaagtgtgaaattgctattgctactgaaattaatgacacatcaagccattaatgtattctaagaaagttctagtataagaaatttgttttgttttgtttttttagacagcatctcactctgttgcccaggctggagtgcagcagagcaatctcagctcactgcaacctccgcctcatgcctcagcctcccgagtagctgggattacaggtgcacattactatgcctggctaatttttgtatttttagtagagacagggtttcacca

SEQ ID NO: 293160 - DNA, 577 bp, Homo sapiens
gtcacagctacttgagaggctgaggcaggaggatcactttaacccaggagtttgaggcttcagtgtgctacgattacacctatgaatgcccattgcactccagcctggatgggcaatatagtgagaccaaatccctaaaataaataaataaataattgtagaaataaacattttatttcaaaaaaaaaaataaatgacaaattttttttaaaaagatccacccaaygaatgcctatgcttctactttagaggcagttaacttcccaaacaggaagtctaatagcagatctccttttaggcttacattcaatagaagacagagcttcaaacaaccctgtctctgaattgcctctgatcactatgcatctaataccctgagtaaagcaatacgttaatcaagtctcagccacctgtttaaatcccaccataataagataacatatgcaaagactagcacaggccaggaagtgttggccctcttccttttttcccagcaagcacacagagatgatgtaagttttgctatcaaaataaacttatgtatgtaaaagcacaagttttgctgtcaaaatgagct

SEQ ID NO: 293161 - DNA, 588 bp, Homo sapiens
  misc_feature (1)...(588): n = A,T,C or G
ttaatttatttgtcttgggtggactgttttcgtagcacctttcttgttgagaaaagcagtgatacatacatttcctagtaggtggtggtctttctttccatttttatttttatttttcatttttacttcccaatttaaacttggaancagcctttgaatacagactttctagagacagccccaatacttgctaccaagaaatgttggtagtgagaaattccaaggacatctttgaaaaatgcttcattttaataaaatattgtcatatacttgtttatcatatttgcttttcttgtcttaaagaaatcttatakaaagcacgtggccataaagactgagctgaccatgtcctggtgtgaacagaacataaggctctccatcagtgcttgctgcttctgcaggcatgggagttgggaggcatgtagacagtttgtggctacacagaaaacaaaccctagtgtatggggttaggcttggccccaagtgcttggcatggaaaaatgcttttaaagtaaggcattcagtatgagtgaagggacttcctgtcaacatgatgttatttcattaactaatgggttagtaaggaat

SEQ ID NO: 293162 - DNA, 1203 bp, Homo sapiens
tagacatcaaaaaagtgtcaattagaaataattacttcttatcaatcagtggggcaattaaagtgacaaagcttaaaaagatacttatcttaaaactaattcacaaggtagctaaattatctcctaattaacttgcattgtggagggtgggggggaaccatcttgaaacaaagatgaattgatgaaccccaatacctctttatgttcctcaaagttgcttccatcccctgaaaccttattttcaacccaggcaggaaacctgggaagaaaacagatcctttccaaatgcatttattccactttcctcaattctaaaaccaagagttaggaatggggctttagatctcacatcagggaagttagagacatcgtcctctgccttgtcttattttaccacttgaatgaactattttcrggactggtgggagtgggctgcgacaagttatttaagataacttttaatgacagccagcctgcttgcttttacaaaactctcttcctcattggtacagtattgttttcacttttatatatatggggcatttatcgtttcttctgcatctttgaatttttttawccctgtggtgacttccagggcatgttgagttagagtgagggctgacccaacccagggagcctttgctgtggcctgtgctgcataagcaggacccaaggaaatgaaggggcctccttcgcctgctgacagggactgggaagcccagtgacagctgctgagacatacagacacacacccatgcacactcacatgcatgcacacacatacacagcatatgtacaacactcacatccaaacatacagacaaccggggggattagggtgaagcaggaaggcactcaaggtgcaaaattccaggaggctctctctctcaggctcacgcaagggcagggttggccctgagagcaagtgcctccttagatcttatagcctggacacctggctgtcctcattctagtcccctgtatccatatgacacacacagtcatacccagttacacacacagaccacagtactcacagacatatacatgcacacatgaatacaatattccccatctcacacacawaaacatactaaaagtaagcctttaaaatgtagaagtatgtgcagaagactgtcctaggtctgtgggtaatttaaaaagaccagagaaggccctgctttcagagaccctgagaaatgc

SEQ ID NO: 293163 - DNA, 581 bp, Homo sapiens
ccttttctagagataagtcagaaagaatggcagttgcaggggatggggagtagtagttgaggctggtgacacttcccttccagtaaaagaaacagagtgagaggctaattgggtcttagtctttgcattttgtatatgtatatgtatgtgcatgcatgtgggttgttctttccatttrccatcttggaagtcttcaaagaattagtgtccaggaccactggtcaaacattataccttttgttggttgctttccccctggttggtattttcttttatggaaagggagctacagaggagggatcacagaactggagagagggccagcaaacattctgagtctctgaggactaaggctagtccacgagaagctggcctgggtttgtgaaggaggtctcaggtctcagctcttaagattttcttctgggattccaagacagtgtcctctgctgcttctttccgctggctggactctgcctgtaattcaggcaggagccaccaggtggagaaatgtgtagatgacatcctggggacacacacacacacacacacacacacacagacacacacacacacacacacag

SEQ ID NO: 293164 - DNA, 581 bp, Homo sapiens
ccttttctagagataagtcagaaagaatggcagttgcaggggatggggagtagtagttgaggctggtgacacttcccttccagtaaaagaaacagagtgagaggctaattgggtcttagtctttgcattttgtatatgtatatgtatgtgcatgcatgtgggttgttctttccatttaccatcttggaagtcttcaaagaattagtgtccaggaccactggtcaaacattataccttttgttggttgctttccccctggttggtattttcttttatggaaagggagctacagaggagggatcacagaactggagagagggccagcaaacattctgagtctctgaggactaaggctagtccacgagaagctggcctgggtttgtgaaggaggtctcaggtctcagctcttaagattttcttctgggattccaagacagtgtcctctgctgcttctttccrctggctggactctgcctgtaattcaggcaggagccaccaggtggagaaatgtgtagatgacatcctggggacacacacacacacacacacacacacacagacacacacacacacacacacag

SEQ ID NO: 293165 - DNA, 459 bp, Homo sapiens
tctggtgatgagcaagcccgcatgaagcacaagtggaaaagagcaagacactcaaaacctctgtctttttctcttcaaatatttgcagagggagtgtggcaggagytcaggaatgcggtgcttattgctcacactacattaaaattcagattggcttgtgcaatatccctggcataaccgctctgtgctgatatttttataactcttaatatcaaacaaattgcctcttcactgagacagtttaatgtgacgggggccgtgcccgccagcttcctcacgccggccccataaagatcaccgttctgttactggggacagaggagctatgaatttactgtcaaaaatatgactggattatgcagagtaaatcttggactgtattaaaaggatcatggtgttttaatttcttttctctccccatacacttgccaccacatctttttttactaataaaataag

SEQ ID NO: 293166 - DNA, 459 bp, Homo sapiens
tctggtgatgagcaagcccgcatgaagcacaagtggaaaagagcaagacactcaaaacctctgtctttttctcttcaaatatttgcagagggagtgtggcaggagctcaggaatgcggtgcttattgctcacactacattaaaattcagattggcttgtgcaatatccctggcataaccgctctgtgctgatatttttataactcttaatatcaaacaaattgcctcttcactgagacagtttaatgtgacgggggccgtgccygccagcttcctcacgccggccccataaagatcaccgttctgttactggggacagaggagctatgaatttactgtcaaaaatatgactggattatgcagagtaaatcttggactgtattaaaaggatcatggtgttttaatttcttttctctccccatacacttgccaccacatctttttttactaataaaataag

SEQ ID NO: 293167 - DNA, 459 bp, Homo sapiens
tctggtgatgagcaagcccgcatgaagcacaagtggaaaagagcaagacactcaaaacctctgtctttttctcttcaaatatttgcagagggagtgtggcaggagctcaggaatgcggtgcttattgctcacactacattaaaattcagattggcttgtgcaatatccctggcataaccgctctgtgctgatatttttataactcttaatatcaaacaaattgcctcttcactgagacagtttaatgtgacgggggccgtgcccgccagcttcctcacgccrgccccataaagatcaccgttctgttactggggacagaggagctatgaatttactgtcaaaaatatgactggattatgcagagtaaatcttggactgtattaaaaggatcatggtgttttaatttcttttctctccccatacacttgccaccacatctttttttactaataaaataag

SEQ ID NO: 293168 - DNA, 459 bp, Homo sapiens
tctggtgatgagcaagcccgcatgaagcacaagtggaaaagagcaagacactcaaaacctctgtctttttctcttcaaatatttgcagagggagtgtggcaggagctcaggaatgcggtgcttattgctcacactacattaaaattcagattggcttgtgcaatatccctggcataaccgctctgtgctgatatttttataactcttaatatcaaacaaattgcctcttcactgagacagtttaatgtgacgggggccgtgcccgccagcttcctcacgccggccccataaagatcaccrttctgttactggggacagaggagctatgaatttactgtcaaaaatatgactggattatgcagagtaaatcttggactgtattaaaaggatcatggtgttttaatttcttttctctccccatacacttgccaccacatctttttttactaataaaataag

SEQ ID NO: 293169 - DNA, 1007 bp, Homo sapiens
tttgaacaccagttccttcccctctcttctataaaaatgtcgtagcaatacctgcctggcagagttgtgagaattaaatgagatgatgaatacatctgctctcagcaccacaccacacctgtggcagtcctcagagagaagaatcacagctttcattcattgagagctcactaagtgccaggtatgctcagctcttgtgcagacgttctttttctttggatgtaaatgtgacatgggcagagcaggaggagctgtgaggctggcttggctgagccrcagggattgctggcatcttatatggcattcaggactatggagggtcacgggaagaaacacagaaacagaacccaacgtagtcttcggggactcttggactttcttccccttgatcttagacatgcctcagtaaacwtctgtcatctttctctgtgtttcatttgtaccacattatcatctctactcatgtgtagttttgaaataaatgtgcgtgtgtgtgtgtgtgtgtgtgtgtgtgtgtgtgtgtgtgtagtcttcttcttctttaagacagagtcttgctgtcacacccaggctggagtgcagtggcatgatcttggctcattgcaacctccacctcctgggctcaatcaatcttccaacctcagtctcccaagcagttgggactgcaggctcatgccaccacagccggctgatttttgwattttttgtagagacgaggtttcaccatgttgcctaggctggtctcaaactcctgggctgaagtgatccccatgcctcggcctcccaaagtgctgggattacagtgatgagccaccacacccggcctatcatctctttaattagtctgcaaagtccttttagccaaggaccatgtcttatttttcttataagttacctagagttcttagtaccattctatgaaggttgttaataaatgttagagtcttgctgaattaagtcattgttatgtgtttaaagtcttaattgatgtatatagtccaggccct

SEQ ID NO: 293170 - DNA, 568 bp, Homo sapiens
cttcctcttttggctcctcagtcccatgagattgtcaggaactcagtgctggtctcctgccttttagctgctgctttctgcttggtttcttagcctcctggctctgcaygccaataaagtggcaaacgcctctttatcgaaaagcttccctgagtgtcagactcactgccagtgaacctccctcctctcaggcatccttgctgctcatgtcttggctgtcttgtttgcttaatgatgagttcaaacagatttttttttttctttttggcattgtgtccagctttgaaaattcttcttagtgcgtgtgtcgttgaggggtgggtctgcaacaagctacttggccattactacttagccaggagttttaatcttgagtttaaaagcatatgaaactctttttaaaacagtggaaaagttaacccccttattttctggaaacttacctgttaattacttctagctcaataatgataagctagtaattagtcaaattacaactaatccttattttatcaatttaattctgaacattgctgaacattgtacatttgaacaaaagaaaagaaaa

SEQ ID NO: 293171 - DNA, 515 bp, Homo sapiens
tttgttgttgtcaaccaacttattttgaattgttatttacaggaagcaaaccaatgggtgttttcttcttgtaacttacctaaaaacacaactaataagcataaaaatcattgaaggatatgtggactttaagctcccaagaatgcttagaggcagtttatagcaataattacatcaactattgtaactgycaaggggattacaataaatatgtcgccctccaatgtgagtaataagaatgtctctgcctcaggcaatgatgttactataggtttgcacatctgctgacctaactaatttatcagaatgtccacttcaatcacctgcttgtcctcggcttttcagatgcagtatttattacaaacactggtaatctctgaatcttgtgaaatggtctttcacattctccacactgcaaaaagctcaccctgtctgtcataaccttagaaatagaagatgccattattgaaaggtaattggaaaccaacttagccaaattcttaatttttacatat

SEQ ID NO: 293172 - DNA, 514 bp, Homo sapiens
ctagacatacaagactctttgatgagcggctacaaataatgatttgcaggcacatgcagaggcagtgtttgatttttgtgtgatttagctgaatttgtttaactcctaaaagtgtaacatgtagttattgtaactctttccatcattgttatgcctcagacacgctttaacctttggatgtactctgctaatgtaattgccttgctgtcttttaaaggctgcttttaattgggttcccaagcagcagctgctgttaaggtgcaggctgcagcctttggatacattgggctagttcattaagtgtktcctctccccatactgggcatttgggtttggatggcagccagcagttactgaaatgccatcagttataagattgccctttaagccactgatttgttattgtattgagttttgactcttttcctctcaaatttaagtggagatttattgaatataatgttaacctcaatacttcccattcccagttgtcttttcgtaagcgttattttcc

SEQ ID NO: 293173 - DNA, 595 bp, Homo sapiens
tagatctatttgctctagctgcagtgaatatatgtagtttcttgaagagatacattgattttcttattcatgccttttttatgctcctatagcatggaaacgtattttctcctaattgtttggtataaaaccaaactaaatttgccttagtttttatttctataatctaagggaatgcactccattcaagtatataataatatttaataattttttgtccccttactttgtaaattactctacttttttggagtcttttttcagggactattttattattctttatatcctccaaacctagaactgttatcaaaataaacatgtgttaaatgaatgttaactaatatgtaagagtaaactctggccattttttctttctttctttctttcttttgttttttttttttttttttgagacggagtctcgctctgttgcccaggctggagtgcagtggcrccatctctgctcattgcaagctccgcctaccaggttcacgccattctcctacctcagcctcccgagtagctgggactgcaggtgaccgccaccacgcctggctaattgtgtgtgtgtgtgtgtgtgtgtgtgtattta

SEQ ID NO: 293174 - DNA, 595 bp, Homo sapiens
tagatctatttgctctagctgcagtgaatatatgtagtttcttgaagagatacattgattttcttattcatgccttttttatgctcctatagcatggaaacgtattttctcctaattgtttggtataaaaccaaactaaatttgccttagtttttatttctataatctaagggaatgcactccattcaagtatataataatatttaataattttttgtccccttactttgtaaattactctacttttttggagtcttttttcagggactattttattattctttatatcctccaaacctagaactgttatcaaaataaacatgtgttaaatgaatgttaactaatatgtaagagtaaactctggccattttttctttctttctttctttcttttgttttttttttttttttttgagacggagtctcgctctgttgcccaggctggagtgcagtggcgccatctctgctcattgcaagctccgcctaccaggttcacgccattctcctacctcagcctcccgagtagctgggactgcaggtgaccgccaccacgccyggctaattgtgtgtgtgtgtgtgtgtgtgtgtgtattta

SEQ ID NO: 293175 - DNA, 575 bp, Homo sapiens
ggatcataatcctcattttatagatagttctacccaagaacagagagattaaaatattgtctaacgatgatgattgaagaggatctaagtccccatttctgatcctcacacrctttctatttgtcaacttgtatatgttctttctctggtatacatttgatatcttggaaatgagagaaaatcgtctcccgtgggagcaaaatgacattgataaacttggcagagatttgactgccatttctgcaatttgaaagactttttcttcctgacacagaaaatgaggtagctacaaatgaaaaaaaaaaaaaaaacttaaaaggatatttcttcaaagtgaaataatgttttattttaaaaattagaagaaccctaagaaacatagggtcatcaaaattactaagaagaaaagagaattttctttttttactctcttttttaaaacagtaaacaaatgtgagttgtctctaaaggtataattaactgagatggaaaaagtaacactgaaccaaactaaaagtaggtcagctcatttgaggttcttggctgcacaagctctgacagctggctgaatattt

SEQ ID NO: 293176 - DNA, 575 bp, Homo sapiens
ggatcataatcctcattttatagatagttctacccaagaacagagagattaaaatattgtctaacgatgatgattgaagaggatctaagtccccatttctgatcctcacacgctttctatttgtcaacttgtatatgttctttctctggtatacatytgatatcttggaaatgagagaaaatcgtctcccgtgggagcaaaatgacattgataaacttggcagagatttgactgccatttctgcaatttgaaagactttttcttcctgacacagaaaatgaggtagctacaaatgaaaaaaaaaaaaaaaacttaaaaggatatttcttcaaagtgaaataatgttttattttaaaaattagaagaaccctaagaaacatagggtcatcaaaattactaagaagaaaagagaattttctttttttactctcttttttaaaacagtaaacaaatgtgagttgtctctaaaggtataattaactgagatggaaaaagtaacactgaaccaaactaaaagtaggtcagctcatttgaggttcttggctgcacaagctctgacagctggctgaatattt

SEQ ID NO: 293177 - DNA, 575 bp, Homo sapiens
ggatcataatcctcattttatagatagttctacccaagaacagagagattaaaatattgtctaacgatgatgattgaagaggatctaagtccccatttctgatcctcacacgctttctatttgtcaacttgtatatgttctttctctggtatacatttgatatcttggaaatgagagaaaatcgtctcccgtgggagcaaaatgacattgataaacttggcagagatttgactgccatttctgcaatttgaaagactttttcttcctgacacagaaaatgargtagctacaaatgaaaaaaaaaaaaaaaacttaaaaggatatttcttcaaagtgaaataatgttttattttaaaaattagaagaaccctaagaaacatagggtcatcaaaattactaagaagaaaagagaattttctttttttactctcttttttaaaacagtaaacaaatgtgagttgtctctaaaggtataattaactgagatggaaaaagtaacactgaaccaaactaaaagtaggtcagctcatttgaggttcttggctgcacaagctctgacagctggctgaatattt

SEQ ID NO: 293178 - DNA, 670 bp, Homo sapiens
attttctttttttactctcttttttaaaacagtaaacaaatgtgagttgtctctaaaggtataattaactgagatggaaaaagtaacactgaaccaaactaaaagtaggtcagctcatttgaggttcttggctgcacaagctctgacagctggctgaatatttctatatatagagaagatacacgggttctagtgatttattggtctttcttttccttatgcatgttatataaaaacatagaaaagaaaacctatagtttttcctttttgctcrggaaaaacctacattggggacttgagtgtaattatgaaatggagttagctatacccaactgcacaaaacacattgctaattacattcaaacacagaggaactatgattgatgaaataagcttttggtactttctggccctacagatattttatgtaaattttacttcatattcatatatcaattaattcttatactttaaaaattaaatatatattttctcctcactacacacccataaacaaacaagtaaatatttacattctttcatttaaaaaattcttttaaaattttgcaagcaatgaaattctagaaaaatcaaaatgcccctctttcagacactagaaaaccttaccatacttgattcatgagactcatttgtcccatttcaaggacat

SEQ ID NO: 293179 - DNA, 585 bp, Homo sapiens
gattttttttttcacatttcctaacacttgctgaaagttgtaagtgaaaactataggctggtgactattaaatttatgtatttaaatatacacacatacacaaacttagtccttaaccatcattaccttatatacatatctagctcaacatgttaatacttgagtttacattttaaaaggacctataagagaaaaatatttgttaaaaaaactaaaatttttcatagtgaagttgttaagtgtatgaacttcatgatcagtcacaccagatttaaattctagctttgccactaatgagtataatcccataataactgcttcatactgtcgcaattttatgaaaattaaagaagtacataccagacagcatataggaaatgcttaaatatgttattgttgttaatataatttttaaacaaattatatcctgtttaattttcctctaatgtctttgaaatctatcccattttgtcagtctcactaacattgctttagtctaagtccttataatttcttgctagtattgctgaaatasacctctaataggttcctaaccttaccaattcagttcttcaaataccatta

SEQ ID NO: 293180 - DNA, 656 bp, Homo sapiens
atatggttcattacttgtttttataaataaattctactagattacagacatgcccatttatttgcattgtttgtggttgctttcrcactatgatcaaaagatgagtgcttgctacagagatcataggacccccaaagcctgaaaaacattttcagtggaagtactatctggtatgtagaagaaaaaaaatgtgctgagccctgctgaaactcttccaataatttatatctgatcaaattataaaaaagtcttcccaaaccacaacactcagctactattgatgtacaaacattttgaaatggacacacacatatacattaaatatatatatatatatgcacacacacaaatatgtatataatatttttaaatatagacacatctagcaatttttaccatgaaataacaaatattcatgtttctttgtacaatactgagaaaagccacatgagatattcaggaactgatacccttttggataggtgacatgacagggctgtcttagcttataaaattaagaaactaatatttgtttggtcagtgcaagaaaagcattagataatttagcacattaattttttaaaatagatatggaataagttaatttaggaggctaggaaaagggaaaatgagataggggacaataacagaccaag

SEQ ID NO: 293181 - DNA, 499 bp, Homo sapiens
ttgagaacagctagaaggggtacaataagggcattttctgattagtatatgtagtcagagtattcaaactgataatgtaagttcacaaaatgcatcgcttttagaaatgattatgtttagaaacacacaaaaaaaattaaaaagtgaaaattggaaacctttattacttaaatataaagtcaggaatacctgtttgtctcaggtgtaaaatggtataagagaatgtcttccactttagtaatgagaacaagccagataatctacagattcataactttctgagtccgacaggcatctgaggtctctagataaccataatttactgaattctaaaggttgaggaagtcctctattgaagattggattcataaactattayacatttgccaaggtatggaaagaagaggggtccaccataaaagatagtgaaataaaaaaagctgattagaaaaaaaaatctggagtgaaatagcatgatactttagaatcactggaagcc

SEQ ID NO: 293182 - DNA, 636 bp, Homo sapiens
taaatttactgtcataaaaattatttatgcccgattacactattcttttacatacaatatctggttttcaataataataatataacagacctctggtctcagcttcaacatgttgagtttggaaattatcactcttgtcctaacaacaagaaagagctgaacagattgaaaayaaaggactctcctttaaccccttagaaaatttcgttcaatgggaaaaccactgcccccaagttggaagaaacaggtgaatgcagagttacaagcaagatctgcttactggagcagaagctgctggagccaataacctgtaggaacactgaggtggtaattttggcgagttgctgtaggcaaagaaagaatgaaatagcaagagagaaaattttctggtagtttttggaatgagcaagtctgcatatttgcatgggttttatttctaggagccccattgagttcatatgatgaaaagccaagaaagatattctaatagctgtcctacatcaagggaaaaattaacacttgtgaaataccctcaaggccttcaaacaaagaactactcttcaggagaaaagattgctcccaagccttatcccaccaggggaaagggtatttctttcattctagctcacatataac

SEQ ID NO: 293183 - DNA, 636 bp, Homo sapiens
taaatttactgtcataaaaattatttatgcccgattacactattcttttacatacaatatctggttttcaataataataatataacagacctctggtctcagcttcaacatgttgagtttggaaattatcactcttgtcctaacaacaagaaagagctgaacagattgaaaataaaggactctcctttaaccccttagaaaatttcgttcaatgggaaaaccactgcccccaagttggaagaaacaggtgaatgcagagttacaagcaagatctgcttactggagcagaagctgctggagccaataacctgtaggaacactgaggtggtaattttggcgasttgctgtaggcaaagaaagaatgaaatagcaagagagaaaattttctggtagtttttggaatgagcaagtctgcatatttgcatgggttttatttctaggagccccattgagttcatatgatgaaaagccaagaaagatattctaatagctgtcctacatcaagggaaaaattaacacttgtgaaataccctcaaggccttcaaacaaagaactactcttcaggagaaaagattgctcccaagccttatcccaccaggggaaagggtatttctttcattctagctcacatataac

SEQ ID NO: 293184 - DNA, 636 bp, Homo sapiens
taaatttactgtcataaaaattatttatgcccgattacactattcttttacatacaatatctggttttcaataataataatataacagacctctggtctcagcttcaacatgttgagtttggaaattatcactcttgtcctaacaacaagaaagagctgaacagattgaaaataaaggactctcctttaaccccttagaaaatttcgttcaatgggaaaaccactgcccccaagttggaagaaacaggtgaatgcagagttacaagcaagatctgcttactggagcagaagctgctggagccaataacctgtaggaacactgaggtggtaattttggcgagttgctgtaggcaaagaaagaatgaaatagcaagagagaaaattttctggtagtttttggaatgagcaagtctgcatatttgcatgggttttatttctaggagccccattgagttcatatgatgaaaagccaagaaagatattctaatagctstcctacatcaagggaaaaattaacacttgtgaaataccctcaaggccttcaaacaaagaactactcttcaggagaaaagattgctcccaagccttatcccaccaggggaaagggtatttctttcattctagctcacatataac

SEQ ID NO: 293185 - DNA, 194 bp, Homo sapiens
gtagaaaagaaaaactgcattttccatcactttctagaaatcyaatgtgtttattatctgcaaatatagtaggcactgaatagacattttcagaatgtgcagaaattttcatcactaagataacatttcatgggtctatgtcttgcattctatggttatccaacacttaatttcctaaaatctgtttggtttac

SEQ ID NO: 293186 - DNA, 613 bp, Homo sapiens
aatagggttaaacaaaacccatctgatgagaatttgtacggcatgactcctcagacctcttagataggaatttgggaaagacaaaaaatcagagcttagtcctcacatccaaaaattgtatttttccttcccaatgtacccacataataattttatagatttaaattaaaaatagaaaagaatccataggaaatttcttggaaaatcctaaggatcattaacaaattgaaacccctatctttaatctcaggaatgaatggtgaaataaagcaggaaatacacatgcctcacatgaggtgaccgattttggagataaattacctaatttggccaagtcatttaattttatggaagagataagttaccgtgaaaagtgccttgccctatttccggaaaaaagaacactttgttcttstagccataacctgatgctcacatctgacaacaactaaaagaaatggcacaacttagcctcttgaactgcagcaaccacaagagagcaaagaattggagaaataactgtgaaatgattgagtacaaatgaaccattgtatgaagcaattcagataagtattttgagtccagtataagaaataatgttttcagggaacat

SEQ ID NO: 293187 - DNA, 553 bp, Homo sapiens
aataatgttttcagggaacattactttgactagtaattatgtaacttgtaacttatggtgctactgactctgacttttcagattttgtgagtaattttaacttagaaatatattgttgggaaaacayacagtttttagtaagtcaattagaaataatgaggaggttctcctaatagaattgcaacttatcatgtcttttctcagtatttttgattcaagtaatatctattataggctaggcaagcattatcagtgttgaaatttttctcagcccattttttaactctagagaactaatactgccgaagatttctcagaatatgtgtctgcaattcccttacatgactcctgggtcactgagaaattattaacatttagtgaactttacacaattagctctgtcctttgggttttcaaacacatttcccttatccttacactgtgtatgggaaaggaaaatttacagtggaaatagagtcttacagccttcttcattaaagtctcccatggcactttacaatcattaaaagttataattagcactgaagtacat

SEQ ID NO: 293188 - DNA, 1259 bp, Homo sapiens
aatacattttaaaaaaatacaaattgtgtctggtaaagatataattgaatattgttctgtggatatagaccaaagttttgtaaattcatttcattcctgacagcatgtaaatgtatattttagaattatttgaattggttgtaacaccttactagtgatgtcattaattgataagtcaatacaatcttggaaaatgagaaaaatatttttagcagttaaaatcatttaggcctggtgctttctttcaagaagcattgtcagttattggtttatttgtttaaataaatataggctgatttagagtatttatycttgtgtaattctgacagtttgtatcttttaatatatttatccatttcacctaagttatcagatttatgggcatagatttggccatagtattgctttatcctttaatatctatgaggccataataattacccttccttttttcctgatattggtgatttgtgtcttccatttttttctcacttagcctggctagaagtttatcaattttaccgatcatagactggattgtgacttccatttttatgaaattctccactttttaattttttaaaatattttttctattattcctattgtttgtgwatagcaaaagagggcctggaacaaaatgtttttcattgatatcacagacaaagctttaaaatcctcaccacatagcatgctctgaaaagtagagagagagagagaaaaaaagaataaactaacaacaaaaaaggacaaagtgcagtgaatggggaaaaatggaaaataatcctcatggaaatgaattatgtttaactcagcaactataaaatcaacacctaaaactacwtagtgatatcaaagtatctcttatcaaattgacaaattccgaaagactgacaatacactctgttgtctgggttgtagaaaaccaggaatttatatatgctgtgaaggcttgcaaaatattacctctatgcagaggaatttgattcacttctatgaacacaaaacaacataatgcagaagtgtatggttgtactatgattcataacaacgattggagacagtctcactctgtcgcccaggctgaagtgcagtgatgcgatcttggctcactacaacctccgcctcctgggttcaagcaattctcctgcctcagccttctgagtatctgggactacaggtgtgtgccgccatgcctggctaattttttgtatcttagtagaggcagggtttcactgtgttgtccaggctggtcttga

SEQ ID NO: 293189 - DNA, 548 bp, Homo sapiens
cctcaatacttatttttatcataatcaataatcagcaaactttcttaaatttcaggttctgtgtgccagactctgtacctacctggtacttcacattactttttttttacttttacrattatgtgaggtgaatcctttttaaaaaattttatagaagagaaaacaaagtttcagactcatcgaatactttatgaatacagagctcatagataatagtgccagtattgatgtaatataattacttctattgtatatcaaagttgttgtatttcccactacctgttgccaagtgtctaatgacaatttattaatttattctgagaaattagttttatggatcatatatttatgccatattagccttttctttttctttccatttgtttactgcattaaaaatgattttaaaaagtgcttaatgatcatacaatctgaatctagagtattatcaacttataagtaatttatgtatcttccagatagctaggacttgctatgctacctctttttcctgacagggtgtaagatacacttgaaatagttagagg

SEQ ID NO: 293190 - DNA, 586 bp, Homo sapiens
ggaatggggattgtggtagtatctgattcataamattatcatatagtaaaaactgtttaatataaattgaatgcagtttaggtgtcaggcactgtttgaagttattgacgtgtcttaatttaatatgcaaaacaaccttataaaaccagttccaatacactacttaggttatagatgagaaagccaacacacaaacaaattaagtaccatgtacataaatagaaagggatagtggtatgtatgctgagcacaatgaacttagttgaagcctccctgatattttagtttgctctgcttagtttggaagaaggagatctctgtttgtgcctttgaggattttctccggaaattaagtctacatgctattgaccattgtcccctacaagatttctatatatcattaattttagattcgagctacaatagtacagggaaggttgaaaacatttacttttgaatcaaataagactgactttttttgaaaatctcatttttttactctgcttgaatagcctttcaagtgccctttagtcagttagaaaggcatgataaaaagaaggtaccagatgatctgggtttcaaatcc

SEQ ID NO: 293191 - DNA, 1059 bp, Homo sapiens
caaaaaaatcatgcatttacttccagtgttggctttaaatttattatattactcttataaataaagaggcatgcatttgacaacagtatgtttcaggaacatatccattcaaaatttctcttcctgtgttcaagattgttaataaggtacggtgtcctcttctatatatacctaggtggtttttaaaatatcttttctcaaaagtgtayatggcagcatttacgttctgtctttgcaaattactgtgtgaccttttaataagatacagtttctttgaaaaagttttctcacttcttgaatgggatattactatatccaggtagttatgagaataaactatattcaagtattcatgaaatttaacttagaagctgatactaaatgccagttctgttcctcctcatccctgccactacttgtgggctgtatataattatttccattatcaggcaggaacctggggaatgggaagattacatgaactggtgaactgtgcctacactagcaawaatttgaatttactccaatagtctaaaagacaccctagacgtgaatctttggggattctcactgttgtcttcaggtctggtaaggatctccacagggggtttctgttagcctaagtttagtgagtgcctaattactattttttccctttttcccttttaagtgaccactttctacaaaatgtagatagcaagttgttwcaaaagcaggttatgagccagaaatgggccgtaggatgttgagcctaaattccacagtaagggttgggcacagagtggggtgctaaataaatggtgactgtggataggaggaagaaaagaggtaaacagcattgcccaaggagagacttcagaggccctaatttgccagagaatctacccagtaggggagaaacaaacaaacctaaaagtttggatggccacttatctacaactgtaggtagtctttcatcaggcgagggtcctcagaactcccagttcctttgaccaagaaaggcttgagcaaggctgttgtaaggcatcacgacagcacacaggaaggggcttgcaactg

SEQ ID NO: 293192 - DNA, 597 bp, Homo sapiens
gtgcacacactcaaaatctctaatttatatatatttgctagtaacacatgcaaagctgtatgcacacactctcaaaaatctctgattttgtgagagtaaatctcacccaagaattgtcttactgaaatattctgtgaacctgtcagtagctattccatttcattccacaacataacaaaaagagcaaaaggagagaagaaatatcacttaacaatcaataaaacataaactctctgtctccagcataagcagtaagagctctacaataatcgctctttctgtgtgacataggaggsagttcaaaggagattggtcagtaatacttatttatcttgtggatcacactgacattgtaaattcttaaaattaacttttgatgtgctaatgattaattgataaagagtctacaataagcttaatgtcttaatatgtacaattttatttcagtggatgactcaattaaatatttgcagattggagaatttttaaacaggtgacttggaactgacaaaagtataccatccactttctgtattcctttagcaatttgcttgtgattcctaaagaatgcaccatctttcattgtaacgatttgta

SEQ ID NO: 293193 - DNA, 597 bp, Homo sapiens
gtgcacacactcaaaatctctaatttatatatatttgctagtaacacatgcaaagctgtatgcacacactctcaaaaatctctgattttgtgagagtaaatctcacccaagaattgtcttactgaaatattctgtgaacctgtcagtagctattccatttcattccacaacataacaaaaagagcaaaaggagagaagaaatatcacttaacaatcaataaaacataaactctctgtctccagcataagcagtaagagctctacaataatcgctctttctgtgtgacataggaggcagttcaaaggagattggtcagtaatacttatttatcttgtggatcacactgacattgtaaattcttaaaattaactttygatgtgctaatgattaattgataaagagtctacaataagcttaatgtcttaatatgtacaattttatttcagtggatgactcaattaaatatttgcagattggagaatttttaaacaggtgacttggaactgacaaaagtataccatccactttctgtattcctttagcaatttgcttgtgattcctaaagaatgcaccatctttcattgtaacgatttgta

SEQ ID NO: 293194 - DNA, 574 bp, Homo sapiens
aaaacataaactctctgtctccagcataagcagtaagagctctacaataatcgctctttctgtgtgacataggaggcagttcaaaggagattggtcagtaatacttatttatcttgtggatcacactgacattgtaaattcttaaaattaacttttgatgtgctaatgattaattgataaagagtctacaataagcttaatgtcttaatatgtacaattttatttcagtggatgactcaattaaatatttgcagattggagaatttttaaacaggtgacttggaactgacaaaagtataccatccactttctgtattcctttagcaatttgcttgtgattcctaaagaatgcaccatctttcattgtaacgatttgtataactgcaggtctgctaccacrtactgggaacaatttgcagacagagatctttgtataactggtttgactttacttccagaaatgcatagtccctggcataaaaatatgcttagtacatgctagatgaataagaaaatgaatgaacatactctatttttgggtggattttacttccttcccaaatatttttttcct

SEQ ID NO: 293195 - DNA, 574 bp, Homo sapiens
aaaacataaactctctgtctccagcataagcagtaagagctctacaataatcgctctttctgtgtgacataggaggcagttcaaaggagattggtcagtaatacttatttatcttgtggatcacactgacattgtaaattcttaaaattaacttttgatgtgctaatgattaattgataaagagtctacaataagcttaatgtcttaatatgtacaattttatttcagtggatgactcaattaaatatttgcagattggagaatttttaaacaggtgacttggaactgacaaaagtataccatccactttctgtattcctttagcaatttgcttgtgattcctaaagaatgcaccatctttcattgtaacgatttgtataactgcaggtctgctaccacgtactgggaayaatttgcagacagagatctttgtataactggtttgactttacttccagaaatgcatagtccctggcataaaaatatgcttagtacatgctagatgaataagaaaatgaatgaacatactctatttttgggtggattttacttccttcccaaatatttttttcct

SEQ ID NO: 293196 - DNA, 468 bp, Homo sapiens
aattggcagaaaaagaattcagaaggtcgattattaagctactcaagaaggcaccagagaaaggtgacttccaacttaaagaaataaaaaaaaaggtacagaacacaaatagaaaaaatctccagtgaaatcgacagcataaataaaaagaaataacaacttctggaaatgaaggacacactgaggaaaatgcaaaacgcactggaaaatctcagcaatagaatcaaacaagyagaagaaagaacttcagagctccatgacaagactttcaaattaacacaatccaacaaagacaaagaaagaagaaaaaaaaaaaaaaaaacaaaacaaaaaatgaacaacgctccaggaagttttggactatgttaagtgttcaaacctaagaataatgtgtattcctgaaggaaaaagagaggtttgaaagtttggaaaatatatttgagaaaataattgaggaaaacaagacta

SEQ ID NO: 293197 - DNA, 439 bp, Homo sapiens
agcctttttctacttgtccagaaacatatgattgaagtgtcattcttagtaaattgataartattagttaaatatttttcaaaagtgcaagacaataaaaagtgtttgtgggtgagtaataataataccagcaaccataatcgcaaacaaaggcaataataatgcctatatctattgagaggcaggcattaagtattaactatctcatttaatcacctgagtaactgtagagcaatattattgtcatcacataatgggttcatcttgcctgctgcccagaaaaaagccaatgcactaagaacagcagatttgtgcagcacagaaagagtttaattaacacaggctagccaagcattagactgagtttattaggtaaagcagcctccctgagaactcagaggccagggttttatggataatttggtggtcaagggggcta

SEQ ID NO: 293198 - DNA, 562 bp, Homo sapiens
ggggtgtggaaaatggtcctcatatcccgaattagcctctggatggggaccacagggtcagctgagtcatgagtcacaggtctggggggtgtagtcagtcagtctccagaatgcagaagcctaaaaaatayctccaaagaccaatctcatgttctacaatagtgaagtatctataggattaattggagaagtcacaaattttgtgacctctggccacaagactccccaactgtaaggaattatagaaaatcaagctagggaacaatggctaatcatctttcaaatatgcctacattttagcagaattcaggcccctcccataatcctaaccttgtggcttttcattagttttacaaaggcagtttcagtccctgaacaaggagtggtcagttttagagaggtactgttgtcacccttgctttaaagttaaatgataaaatcaattcctcctatggttagcttggtttaggccaagaattagtgagaacagccagcctgtgaggctagaagcaagatggagtcagccatgctagacttctttgtggtcatacactttgcaaag

SEQ ID NO: 293199 - DNA, 552 bp, Homo sapiens
caggacctagactgaactcctggtgtttcagtaacattaacaatgttccttcggcaggtatgctaacttttgcttttgactcaataggcaataagcgattcacaagtttatgctttattgtgagaaatttacacacacataatcaaacattcacaatacaattattaaaggcaatagttagggtgtaatgaaccacagcagaggctcaggagaccagtccacttagagaggaactcaagcaagtatggaagtctctcctgggtgctgatcagtggtaggcaaagctgctattctgtgggcagtccttcccacagtcaggagaaagctttcagatttytcatgggccaagattccaaaatctcctccgaaattccctgtcccttgttcttttatgattctctgcaggtgtgctcactgtctcactgttatctcagtcactgggtctcaactggcactgagccacagcaggtgttatctcatcatcttagtctattacacatatgcttatcatggggagtaagcacaccacatggccccaagagaagcaagaga

SEQ ID NO: 293200 - DNA, 552 bp, Homo sapiens
caggacctagactgaactcctggtgtttcagtaacattaacaatgttccttcggcaggtatgctaacttttgcttttgactcaataggcaataagcgattcacaagtttatgctttattgtgagaaatttacacacacataatcaaacattcacaatacaattattaaaggcaatagttagggtgtaatgaaccacagcagaggctcaggagaccagtccacttagagaggaactcaagcaagtatggaagtctctcctgggtgctgatcagtggtaggcaaagctgctattctgtgggcagtccttcccacagtcaggagaaagctttcagatttctcatgggccaagattccaaaatctcctccgaaattccctgtcccttgttcttttatgattctctgcaggtgtgctcactgtctcactgttatctcagtcactgggtctcaactggcactgagccacagcaggtgttatctcatcaycttagtctattacacatatgcttatcatggggagtaagcacaccacatggccccaagagaagcaagaga

SEQ ID NO: 293201 - DNA, 597 bp, Homo sapiens
ctttaatgtggtgatgcagtcatgagaatgagaggtaaaaatctcaaatctgtctccctgaccaactaaattaatgggttttatatagtagggaaggtggcaaaacaggaaattacgaaggggtaaggaaacaatcatgatggatragaggttgggtttctcattgcctggactcagtgatctggtgaatttcagtcccttgcctgagggttgattccctaaggaaggcagtgaaatgagacaaatttgagtttcaagtttcaagacagaggaacaatttctatgttcattcaaaaatctgtaaatattatttctgtgggacaattggactggtttcagaagtctcttgattcaactggaacaagctcaaattaaaaaagacttttatattgtcttatttctatttttttatttcttaaaaaaagggatacatgtgcataatgtgcatgtttgttacataggtatacgtgtgccattgtgatttgctgtacctattgacccattctctaggttacctcccttcacccccaaccccccaacaggccctggtgtgtgttgttcccctctctgtgttcatgtgttcttaatgttcaactc

SEQ ID NO: 293202 - DNA, 572 bp, Homo sapiens
aagacacaagtccaagcataaggtgatttctgtctcaccaccccgatcctatgtaggccaataaaactcttatgagtcagcttctaaaagataacaaacagatttcctttaaatggtgactgctgatctaaatcaatgaataaattatccaggtttgtattactccaataattgttggaattgaaatactagtcaatcaggtgctaccatatacaaaatccaaattaaatcatatttgtaaaatataccatgttgtattatctttcttaatttcaatgtagaatgttgagtatggattttgagtactttaaaaataatttaacatggtttatcctaatgacaaagcattttagaaaaattctcataaattcatttatttctgcaaaacaaattaactattttttctttatgtttggctggtgactcttcctcataaccytggattcagatttagtcttactgaaaatgccaaggtctaaaattattcatatatctattttaagaggaatttacagacacctcagtctcttgagtatgacattgaacaatcatctggtcaatactttagagtt

SEQ ID NO: 293203 - DNA, 571 bp, Homo sapiens
taattcaaattctttgctaacagtgcccaaattccctcttataattactcactggttttatgattaggtcggattcattgtaaaagcaaagactgagcaatcttgattactaaacaatgtgctgactgacacactggtaaasagtcaaggagggggttaggatctttatatgtgtgtgtagatctctctctaaaactaaaacaactccagcaatttctacagctacagttaaggacaatagttttctttttctgagtgagaccactcctgggccatttctttccaacactgatccctttccttacccttatctcagaacattcctactcctcctttcagtctattttatattagcttgtgttgactatactattgttacactgtttacactttagtagttggaaagtttggattttgcacaaagggaaaatgatgctttgaacttcttggcctagtaccattgtgaaatgactgcctcagttactaaattgcttttctgaccaatgaaagttatttactcttcttctctttttcttcatttttctgtttacttgtttttaacataggaata

SEQ ID NO: 293204 - DNA, 561 bp, Homo sapiens
ttaccactcacgtaaagaacaattactatatgagataatggatatgctaattacattgattatggtgatcatttcacaatgtatatgtataccaaaatatcatgttgtacaccttaaatacaatttttgtaaattataccttggtaatgtatgggtaaacccatttaaacaaatttgacattatatttamataaatcattactatggtcttactgtagcttttcaaaattcctcccaaattcatattttgaaatctaattactgtgatggtattagaaggtgggccttcggaaggtgattaggttatgaggacagacctctcgtggttcttagacttcacagtctccagaactgtgagaaataaatttctgttgtttataaggtattcacttcatggtattttgttataacagcctgaatggactaaaacatacattttatcttgcatttaattacgtgttttcctaaaattaataaaagttttttataaaaagtttgtaatgactgtctagatcaatttgcatatacatatcaaatgtatttaattattaacttatttgt

SEQ ID NO: 293205 - DNA, 561 bp, Homo sapiens
ttaccactcacgtaaagaacaattactatatgagataatggatatgctaattacattgattatggtgatcatttcacaatgtatatgtataccaaaatatcatgttgtacaccttaaatacaatttttgtaaattataccttggtaatgtatgggtaaacccatttaaacaaatttgacattatatttaaataaatcattactatggtcttactgtagcttttcaaaattcctcccaaattcatattttgaaatctaattactgtgatggtattagaaggtgggccttcggaaggtgattargttatgaggacagacctctcgtggttcttagacttcacagtctccagaactgtgagaaataaatttctgttgtttataaggtattcacttcatggtattttgttataacagcctgaatggactaaaacatacattttatcttgcatttaattacgtgttttcctaaaattaataaaagttttttataaaaagtttgtaatgactgtctagatcaatttgcatatacatatcaaatgtatttaattattaacttatttgt

SEQ ID NO: 293206 - DNA, 561 bp, Homo sapiens
ttaccactcacgtaaagaacaattactatatgagataatggatatgctaattacattgattatggtgatcatttcacaatgtatatgtataccaaaatatcatgttgtacaccttaaatacaatttttgtaaattataccttggtaatgtatgggtaaacccatttaaacaaatttgacattatatttaaataaatcattactatggtcttactgtagcttttcaaaattcctcccaaattcatattttgaaatctaattactgtgatggtattagaaggtgggccttcggaaggtgattaggttatgaggacagacctctcgtggttcttaracttcacagtctccagaactgtgagaaataaatttctgttgtttataaggtattcacttcatggtattttgttataacagcctgaatggactaaaacatacattttatcttgcatttaattacgtgttttcctaaaattaataaaagttttttataaaaagtttgtaatgactgtctagatcaatttgcatatacatatcaaatgtatttaattattaacttatttgt

SEQ ID NO: 293207 - DNA, 1215 bp, Homo sapiens
taatagtttaggattattttgataaaacataaaatctgttaggacagttaccaaaaggcaaaagaaaaggccttctgcagtgcacagaatattatgttagaagaaaacatttcctttagatctttaagaaaacatggcttttaaaaggggagagaaagttgaaaaagagtgagatgcagtaaaagttgaaatttgtgttaaaaaattaagatctcttataatttattaaatcaaccacttaagaaaatttccttgtattaamcaacaatttagtatatgtgtttataatttccctttaattataaacaatttgatcatataagaaggttcgttttttttttttaaataaatccccttattatgccttacatagactattcatgacatgcttgggctttctgatttgtcctccacatccttcttccttaaacaatcagttattttaatttaggactaaatttaccgtgctagattatttttcataaaaaattatctctctttaaactttttcaccacaaaaaactctttatttttataattttctttatgtctctcttatttcctggttcttttaccttgttttatacatcagctttaaataagctttwtaatagtttaggattattttgataaaacataaaatctgttaggacagttaccaaaaggcaaaagaaaaggccttctgcagtgcacagaatattatgttagaagaaaacatttcctttagatctttaagaaaacatggcttttaaaaggggagagaaagttgaaaaagagtgagatgcagtaaaagttgaaatttgtgttaaaaaattaagatctcttataatttattaaatcaaccacttaagaaaatttccttgtattaaacaacaatttagtatatgtgtttataatttccctttaattataaacaatttgatcatataagaaggttcgttttttttttttaaataaatccccttattatgccttacatagactattcatgacatgcttgggctttctgatttgtcctccacatccttcttccttaaacaatcagttattttaatttaggactaaatttaccgtgctagattatttttcatawaaaattatctctctttaaactttttcaccacaaaaaactctttatttttataattttctttatgtctctcttatttcctggttcttttaccttgttttatacatcagctttaaataagcttt

SEQ ID NO: 293208 - DNA, 573 bp, Homo sapiens
gaaaataaaatagaggaaaagtggacctaggaatgctatagtttgcaggtcaaccttagggctccttttccttaatgtaaatgtgcacaaagactgtattagttycattgtattctggcaagtagtggtgccataaaacctacagagtgctcaaaaggggggcattcttcttgttttctcctcattcttagattacttgcctccccacctcctcatttttttccttaaaaggaggaactgagctgtggcctagggtttttgtggggtggatctttatgtgctgcctgtgggaaagactccataatgcatcaccccggagtcgtttccaccctcttacatgtctcagtttctctctccagaggtctgtgacctctgagagggttcaaacatcatgtaatcagccattatatctattttctggatgagccatttttaaaattattttttgttggggatttccctacagagctactgcacatcactgggggtcagcttcccagacacttccataaggctcccaaaaccaagagacagctttcagctggaaggagcaaattccctcaaaagctgaga

SEQ ID NO: 293209 - DNA, 1222 bp, Homo sapiens
actaaaaaggaaatcacatctgactaacactggatttcttagtagaaacctgacaagccagaagagattggggccctattttcagtttcttaaagaaaaaattgtccgccaatatttttgtatcctgataagctaagcttcataaataaaggagaaatacaatatttcttagataataacattctaagggaattcgttaccactagactggccctacaagaaatgcttcaatgatttctaaacatggctatgaaaggttaatatttgcaacaattaaaacagaagaaagtataaaacttacaggtcctaaaaaacatscacttgaggatacaaagcaactaagtcacagtcgatattatgatgggaacaaaacttcacatatcaatattaactttgaatataaatgagttaattgcttcacttaaaagatatagattgaaagaatagattaaaagacctggatccaacatgtgctacttacaaaaacccacttaactggcaaaaacatttagacttaatgtaaaggggtgaaaaaagatattttgtgcaaacagaaacctaagcaatcaggagtaggctatactgatatttgataaaacaaactttaaatcaacaagagtaaawctcttacaatctggaggagcctaaagaaatatagcaaataaattgaatgtgaactactgggatagaaaaagaacatcaggtaaaaataatggaattatggataaaatataaatttaatcacaataacatgttaatatttgtacattaatttaaacaaatgtgacatagtaatgtaagattttaataagggaaattgagtgtggagtatataagaatgttctgtagtatctttgcagcttatctgtaaattcaactctgttctaaaataaaattttctaaaataataaggttgaaatacagattttttcagatgtawgcaaagataatttcttgccagaagacatgcaccacatgagattttaacctaatttgtgaaggtttattataggtatatttttagaatatttgaaatcaagagcaaaaagaacatttttatataaaaatgtgttaatgcgtattaacacatcttaacagttcaagttcttttatgcttttgtattttaacttctataaattgaattaaaatttacttacacaccactattacagtattatattattttgtatttgtctatatatttacctttacgagaggttt

SEQ ID NO: 293210 - DNA, 598 bp, Homo sapiens
ctcttacaatctggaggagcctaaagaaatatagcaaataaattgaatgtgaactactgggatagaaaaagaacatcaggtaaaaataatggaattatggataaaatataaatttaatcacaataacatgttaatatttgtacattaatttaaacaaatgtgacatagtaatgtaagattttaataagggaaattgagtgtggagtatataagaatgttctgtagtatctttgcagcttatctgtaaattcaactctgttctaaaataaaattttctaaaataataaggttgaaatacagattttttcagatgtatgcaaagataatttcttrccagaagacatgcaccacatgagattttaacctaatttgtgaaggtttattataggtatatttttagaatatttgaaatcaagagcaaaaagaacatttttatataaaaatgtgttaatgcgtattaacacatcttaacagttcaagttcttttatgcttttgtattttaacttctataaattgaattaaaatttacttacacaccactattacagtattatattattttgtatttgtctatatatttacctttacgagaggttt

SEQ ID NO: 293211 - DNA, 559 bp, Homo sapiens
attttgcttcttacagtttgggctaagctgataagaattgaatatatttttttgcctgctagcttgctttcaaggaagattaagaacatagaaaacatgtttaatgtattttagctgaactcaggaatcgagtcaactgaatctcagatatatcctgtgtttaaagattgcctcactccataacaagtattgattcagtcagagaaagacctccmtctgaccaagttagaaaatcttgtagagaatagaagagaattaagatgaggagaaaaaatcaaattgtattactgggagagaatccaaatgattatatagaattccatttcactttttaaattccaatttgaagcacagagagattgaacagcatactaaatgacacacacagctaattaattgtaaagcaggaatttgaaacatttttcaaaatcataggtcgccaattcccacaaaccacaaagggaggttggggtaagattcattgtagtatagttttaatttcaatcattaaaggcataggcaaatacttggaaggaaattccccagataaatttgcaca

SEQ ID NO: 293212 - DNA, 569 bp, Homo sapiens
agtaaaacaattattataggatacaaacactgagcttcaaatggcaaacttccctaaaagctggaactttgtagaactttgaaaatacaatgcattattgacctgattgtctaatacccaacagatttctttttctagggctttgttcccatattatcttttgatgttcccgtggaagaggtgaatacttgcaacaccagcagcttaattaggaatactcttttcactgggggatatctcagacttccttcatgctcaatcatcatgtcctaaaatatacagggtggggtaatgcatcttataaatgccartttatttaagttctaatcacagatacttcatcaactgacaaaagaaaaacctcagtaggtacaccacttcaaaatctgggacaacttacatgtaatttcaggaatcagcagggacacacagctggagaaaaataaaaagcttgctgtaattgaaaattgccttgcagcttgtttgtgattaaaatgaacttcagttccttgaaatcttgtttagcaattaaatctgttttacttaggcattgaaatattgtctattgt

SEQ ID NO: 293213 - DNA, 601 bp, Homo sapiens
tggttttgatttgcatttctctgacgattagtgatgattaacattttttcatttgcttgttggtcccttaaataccttcttttgagaagtatctttttatgccctttgctcattttttacttggattatttgttttcttctttttgatttgtgtaagttcctcatagattctgaatgttagctatgaagttatcatcatcctgataccaaaatctgrcagagacaaaaaaaaaaaaaagaaagaaaagaaaactacaggccaatagataaacctagacacaaaaccctcaaaaaaataataacaagttgaatccagtagcacatcaaaaagtaagttcaccacaatcaagtaagcttattcctgggatgcaaggttggttcaatatatgcaaatcagtacatgtgattcaccacataaacagaatcaaaaccaaaatctgtatgatcatctcaacagacacagattaagcttttggtaaaacccagcttactttcatgatcaaaatcctcaacagactaggcagcaaaggaacagacctaaaaatattaaggggcaaccaggacaaatgcacagcaaatatcatattgatcaggcaaacgc

SEQ ID NO: 293214 - DNA, 535 bp, Homo sapiens
ctttcagtcttttctcatgctttcactagagatctagacctggggtagaaaacgtaaggttttcctttctaacattttattttcttatatgaaaaaagttttaacttggggtccataaattgctgctgcaagcaagggtctgttcagctgcaaaaatggtagaaaaaatgtgaatgtgtattcttttgtttacttttccccctgtaggagagatttttcaaaggagttcttgacttgaaagcattaacatttgtctggtgctttttcggcttcactcttccttttgtgtttggagggagctagtatcattctttatttggcaggagacagagaaaagtcacctccatcacataattatatggtttgcctttagccaggcttatgcttactgcagtgacagccaatttctcttgcttagcasaggaagaggcaagctgacttgtcttggcttgctgtctctccaaatccacttctctcctcattgcgcctggccaatactaaagtctctgacgaggccaggaaatctcacataacc

SEQ ID NO: 293215 - DNA, 596 bp, Homo sapiens
  misc_feature (1)...(596): n = A,T,C or G
tatctttccccatgtttctctgtgttcaaacatctgagtcccaaaggctaatgatcattcaaatagaaacacgaaacaagagccttagcaaaaagtataatttctaaaccatgctgcagcaaagattccctcataaatgtgatattaaaggaagtaagtctaaacctttacctaatctaaatttcaatgacatatcatttcttccatcataaaggcaaattctttgctagtttggcttaatttcttaaagtattaccacacttacccaaaggtggccgttgggtcagggtttttgcattatagtcccttctgtggtcaccagaaatatgttataggaatagggtcccaatccagaccctacgagagggttcttggatctcaygcaagaaagaattcagggcaagtccaaagtgaaaagtgaaagcaggtttattaagtaagtaaaggaataaaagaatggctaatctatnaggcagacgagccctgaggtctgctggttgcccatttttactgttacttcttgatgatatgctaaacaanggggtggattattcatgcctcccctttttagaccatatagggtaacttcctgacat

SEQ ID NO: 293216 - DNA, 621 bp, Homo sapiens
gtttgcatgctattatgatggctcttgtagatgccattgctagcccagacagtgccagtcatgacaaattccgtggactgaatgatcaccaaataggaggaaagaaagtgactacagtctgtttttgttgtttgtactttcttatgaaaatttttgccttagctttttctgttaggaggctgctgttcttagggctaggaccagctgcttscctctatcacagttgaaaatcatcatttcctccactgaggtgaaatattattgaacctagcaccttatattctgcttatttctcatgatatgccctaagaatagtgaagtactgttagtaaaattatcttaaaataagttagtaaactgcagaaaggggaaaataaaatgtcttgatcttcaatgttggctttaatgcataatctgaatatattcccaacaaaattgtgttatgttttgttgttaagtttgaaatttttttctgtctagtgtggtggatggatgatgcagttataactgagctctatttttctttaaaatggttaatattatccctatatcaaaaagaaggtaaattacagttatttggaaatttacattatgtaaaaagatatggatgttgctaagaac

SEQ ID NO: 293217 - DNA, 617 bp, Homo sapiens
gagctgtgggtgtaacaagagctcagagttgttcattatgcagtgttcacacaaaatttatttttaataagaaaagtactgaaagttatgttcaaaataaatgtgtgaacatatgtgtgaccgtctacattatacaatatggatatttatgtatttaatatgacaattttcattgacaygtatttgcacttaagcaattgatagcactataaatacaaagaattaggaagagagaaaaatgggatagtagtgttgtcttttttaaaacctataattgttctttaattttcagcactcaacaatatctacttattgtcagaagtgttcttggaaaggttaacttgtaatatttttccttaggatgtgattttcatttaatttatttactagcatgtgtgaaagtcattctccacattgatcagtcaccacaatgaaatggtgttgctgctttatgtgcccacagataatatattgctttttaaattaagatttacatttctataagtgcctgaaaatatgttcactaatacgctatcaagggaaaattaattcctagcaattccttattagataagtattatctgtcttacttttataaagtatagctcccctctcct

SEQ ID NO: 293218 - DNA, 1126 bp, Homo sapiens
gttatttttaaaaataatcattagaaggaaggaaaacaatattcaaaagaaggcataagtattttgaaaatgtggtttcaaatttaatcacaatacatggaaatatacgcaacttgttctatcatatagtaatttttttaacttgagaaagaagaataaattataaatataagctgtctacaaaaagagttttaacacatgcatagtcagatagtttgatagtaaaataagaagaaataatatatgaggtaaagaatagcccccaagaaattggtgtagttaaactaatgttctacaaagttaaaaatcattattaggatacagtgggtaattatgcaacaattaaaatttaaatcattaatgataccattaaaaagtaaaaattcacatgcctttgcatacacagtctcaaaatatataaagatatctataaagacaaattgattaattattaatcttatatgatatataattttattgtatccacatatattatacattataattaatacaatgcttcttggaaacatgaaagaccaagaagacytaatgttggtaaagtcgtagaawtatccttcaggaaatatttatactcaagtcattttaaaaatatcaacctgtttcaggatctgcatcacaatattcaaaactactttcattcaaagacagtatggtagataacttggtacaggctaactgaaaacagcttcttgcttatttattcaagaattagcctatgagttagaccgagtaaataagtgaatgcaaagagccaaatgctacatgtcaataaagctttgactcttaggaaatttatatccctgagtaatgctgggttcagggacacagttgtatctctagatatctttaggatagatgcatataggctaactgcatagatgtgctcatgtgagctctttgccttwtctctataatttttctacttattcattctttctggggtataggcagggcaatgctctcttctgctttaacttgatttttaaatgtttttatacataaacttatttgttcataagcccttatttgttcataaccactagcctgcagaataggaaaagtacatatgtgtgtgtatatatatgtataagtgaattggtgagta

SEQ ID NO: 293219 - DNA, 1154 bp, Homo sapiens
catgtgaggtagcccaggcaagacaagaataactccctcgacttgctcattcactgggttaaagtctcacgagctcagtaacagttcattattatagttttactgaagtttartggttgtttgtagcattattaaggcaataggtaactcagaatagtcaacaggtttaacaaagttattttaatacctttataatttcattacaaaagtaatgcattccccttgtaacaagtgaaacaatgcaaaaaaaaaaacacactaattatcttggcctacattcacctctttcatttacttccatgtgaggaaactgatattaacagtcttctgtgcaaattttaatgattttccaaatgaagaatatttctaaaaattaacaagaataaggcatgtagaatagtctgtgtatactattctactgttcaaaatatcttgcaggtatctatttaaaatattttgcaggaaaaaagggcgatccattggctcctttataaaacttactctgattgcaggagcagagtgacagtctatacawgtgagaactataaaactcttaaaagaaaacacagggaaaaggcatcatgatgttagatttggcagtgatatcttgaatatgacaccaaaagcacaagaaacaaaagaaacaataaactggacttcataaaattaaaaacttttgtggatcaaaggacwttatcgagagagtgaaaagacaacttacaaatgggagaaaatattgtaagtcatatagacaaaaatttcatattcaaaatatacaaagaattgctataacccaatagcaacaattgggctcaagcaatcctcccacctcagcttcccatgcagctgggactacagaaatgcacacaatgcctggttgatttttttttgttttgtacagatggagtctcgctgtgttgcccagactggtctcaaactcctgagctcaaagatcccccccccatctcagcctcccaaagtgagcttagacaggatgatcaccatgtaatcctacaggtgtaagccaccacacctggctcaagcttgtttactttaacagttaacagcttcagctgggcaccgttatgtacacctgtaatcccagcactttaggaggctgaggcaggatgatttcttgaggccaggagtttggg

SEQ ID NO: 293220 - DNA, 456 bp, Homo sapiens
ctacacctttccagccggtagctgctagtcagaatgattctaaataaaaagctaaccattaccaacagcaacattctatattaaccaagttataagagttataacagtatacatttaaaagtttttaaaaaatttttttccattaagttataggggtacacgtggtatttggttaaacgagtaagttctttagcggtgacttgtgagattttggtgcacccatcacccaaacagtatatactgcaccgtatttgtagtcttttatcsttcgcccccctcctactttacccccaagttcctaaagtccattcctttgcgtcctcatagcttagctcccacatatcagtgagaacatacgatgattggttttccattcctgagttatttcactcagaataatagtctccaatctcatccaagtcactgcaaatgctgttaattcattccttttatggc

SEQ ID NO: 293221 - DNA, 640 bp, Homo sapiens
cctttctggcgtgctatgtaaacatcaaacctgactgaaccaatctgtgggccctatgtaatcagacaccacctccttaaacctgcctacaaaatccggcacatccacctccagccagtctttccctttcagaagcccctttctctcactagagacagagctgttctcctttctctttcttctgcatattaaaccgccactcctaaactcctcatgtgtgtccgtgtccttaactttcttcgtgcgagatgacaaagaarcggcttcattattttctgaaattattttaataattatgcagacatgtgcaaccagaaaaaaaatgcaaatcaaaaatactcaactgtcttaaatatgttaaaagggttaagggaaaacaaagaactaaagaaaattcggaaaatgatgtatgaataaaatgggaatatcagcaagtgatacaaattataaaaaggaaattctggagctcaaaagtataataactaaggagaaaaaattcaatagaggggttcaaaagcagcattgagtggaaagaagaaaaataatcagtgaacttgaagataggaaaatttaaatatcgagtctgagaagcagaaagaaaaaagaatggagagaagtaaacagagcctaaggggctcaa

SEQ ID NO: 293222 - DNA, 640 bp, Homo sapiens
cctttctggcgtgctatgtaaacatcaaacctgactgaaccaatctgtgggccctatgtaatcagacaccacctccttaaacctgcctacaaaatccggcacatccacctccagccagtctttccctttcagaagcccctttctctcactagagacagagctgttctcctttctctttcttctgcatattaaaccgccactcctaaactcctcatgtgtgtccgtgtccttaactttcttcgtgcgagatgacaaagaaackgcttcattattttctgaaattattttaataattatgcagacatgtgcaaccagaaaaaaaatgcaaatcaaaaatactcaactgtcttaaatatgttaaaagggttaagggaaaacaaagaactaaagaaaattcggaaaatgatgtatgaataaaatgggaatatcagcaagtgatacaaattataaaaaggaaattctggagctcaaaagtataataactaaggagaaaaaattcaatagaggggttcaaaagcagcattgagtggaaagaagaaaaataatcagtgaacttgaagataggaaaatttaaatatcgagtctgagaagcagaaagaaaaaagaatggagagaagtaaacagagcctaaggggctcaa

SEQ ID NO: 293223 - DNA, 640 bp, Homo sapiens
cctttctggcgtgctatgtaaacatcaaacctgactgaaccaatctgtgggccctatgtaatcagacaccacctccttaaacctgcctacaaaatccggcacatccacctccagccagtctttccctttcagaagcccctttctctcactagagacagagctgttctcctttctctttcttctgcatattaaaccgccactcctaaactcctcatgtgtgtccgtgtccttaactttcttcgtgcgagatgacaaagaaacggcttcattattttctgaaattattttaataattatgcagacatgtgcaaccagaaaaaaaatgcaaatcaaaaatactcaactgtcttaaatatgttaaaagggytaagggaaaacaaagaactaaagaaaattcggaaaatgatgtatgaataaaatgggaatatcagcaagtgatacaaattataaaaaggaaattctggagctcaaaagtataataactaaggagaaaaaattcaatagaggggttcaaaagcagcattgagtggaaagaagaaaaataatcagtgaacttgaagataggaaaatttaaatatcgagtctgagaagcagaaagaaaaaagaatggagagaagtaaacagagcctaaggggctcaa

SEQ ID NO: 293224 - DNA, 617 bp, Homo sapiens
gagagagacaaagaggcaaaaaattatttttaaaaatggtagaagtccccaatttaaagaaagacatgaacctacaaatccaagaagtctaatgttaggagttgatttgtatcttcccccaaagatatgttggagagctataatctccagtatctcaaatatgacctaatttcgatacaggttctttataatcatgttaaaatgaggtcattaggatgggccctaattcagtatgatcaatgtctttataaaaacggcaaaatttgggtacagacaaatatacaaggagaactccatgtgaagatgaagggagagatcagggtgatgcagcaaaggcaaaggtgcacaaaagattgccagcaagccaccaaaatctaaagcagagaggtgaaatggattttccctcaaacccctcagaagaaatcaactcttctgacaaactgatctcatacttctagactccaaaactgttgacaataaattctgttgtttaagctgcccaattaacagtaatttgttacaccagctccrgggaactaagacactattagactccaaataggataaacccaaagaatcatacaccaagacacataatcaaactctaaaaaggcaaa

SEQ ID NO: 293225 - DNA, 544 bp, Homo sapiens
gctagacacaaaattcacatgtaaaaatcagttgagtttcaatacattagcaaatgataatatcatactcaatatcatactatatttcttggggaaacagaaaaacccatcctaaaagtcacatggaatcttaagagacactgaataaccaaaacaatcttgaaaaagaacaaagttggaagactcacacgttttgatttcaaaagttacaacacaactacagtaatcaaaacagtgtggtactgacataaggacagatacacagacaaatggaacaaaatagaaagtccagaaataaactttcacttttaacaagggtgccaagaccattcaaygggggaaaagacagtgttttcaacaaatagtgctggaaaaactgaatatccaattcaaaataatgaagctgggcccttaccttatactttgtacaaaattaactcaaaatgaatcaaagatctaaacctataaaactcttagaagaaagcatagggaagaagcatcatgatgtcagatttgataatgttatcttggatatgacaccaaa

SEQ ID NO: 293226 - DNA, 505 bp, Homo sapiens
ttattaagtgctctgagacaagctgatctccttctgtatcagcttccaattagaaccttcttcttataccagtcatagaggtcaaatcaagggtgtatctattttttaattatatgttttgcagatatcctcatcactattacagaagttattagtcatgatgtctatcatcataaaaagggtttatatttagcatgataacrcatggaacaattgattataaaataaataaggtaaaaatttgaggtgggtggtcagagaccaggggaatcaataaagaataaagggcagatggaaagggacaaagaatggggaatgaaatgatcttcctggaaagttttattaatccattctcacactgctataaagaaatacctgaaactgggtaatttacaaataaaagaggtttaattggctcatggttctgcaggctttacagaaagcatagtggattcttccagggaggcctcaggcaacttacaatcatggtggaaagtgaggggaa

SEQ ID NO: 293227 - DNA, 429 bp, Homo sapiens
ctgtgtaatctcctctgtatatgctaataacaacaggatagttgaaaagcacattayaggcagccttttaagtcctaccaaaacgtttgatcttcagtttgtcagtgacccttctcttattttgctacactactgtaccaacattcttagttttaaaatatagtaaatccccacttaatgtcattgatacattcttagaaactgtgactttaagcaaaatggcgtaacaaaaccaatcttaccacataggctaattgatataaacaagagttaagtttctacgtgtatttctggtcacaaaaacatcatcaaacttataaagaccccaaacacttctaatattaaatactgaaacaagtgtgagctaaatgtacatttaagaaagatgaacaagtaagatatttactcaatttttggtgaatcagtgag

SEQ ID NO: 293228 - DNA, 429 bp, Homo sapiens
ctgtgtaatctcctctgtatatgctaataacaacaggatagttgaaaagcacattataggcagccttttaagtcctaccaaaacgtttgatcttcagtttgtcagtgacccttctcttattttgctacactactgtaccaacattcttagttttaaaatatagtaaatccccacttaatgtcattgatacattcttagaaactgtgactttaagcaaaatggcrtaacaaaaccaatcttaccacataggctaattgatataaacaagagttaagtttctacgtgtatttctggtcacaaaaacatcatcaaacttataaagaccccaaacacttctaatattaaatactgaaacaagtgtgagctaaatgtacatttaagaaagatgaacaagtaagatatttactcaatttttggtgaatcagtgag

SEQ ID NO: 293229 - DNA, 607 bp, Homo sapiens
  misc_feature (1)...(607): n = A,T,C or G
tctgtcatgggtcttgtagttttaaaagaaattcgccctactacataatggagtttctgtacatatctcactctaaaaaatgtgccaacattccatcttaatccttagctaatttgcctaaataatttatgttanataatcctaaaacttttatgcttactacaaatgaacttagagcaaaatctatattataacaagtcttatgtgggttggccaagttattatattatttaaataaatttgatattttaacttggactaatatttcattaccctagttccaaatgtctgaaggatcaagggtgtgaactcctattgcaaaatcatttcaccttcttctccagtactttggcgtcttttatttgtgaatacttccgaatgtagaaatggcaaggatctattacatggcttacaaaaactagctctgcagaacctggataaaaatgtttaagycacattaataaaccatgagttagaaaataattcatgaaagctgaacaaccataatagcctctaaaagagtgtcttatggcattgtgaactctgggaatatcgcacgtcggccccaggaagtagtgcaagccctaaatgattgataaaacaaatg

SEQ ID NO: 293230 - DNA, 576 bp, Homo sapiens
gtaacaaaccattgatgatgcttcccttttcctcatgcctcacgttcaagcattactgagttttattaattttccctattttgcatttgtcatatctattctcagtccctatccagtgctattagttaagttttagttctcatgagttgctgagtctactgatatgatggcctaagtgatccttcagccttcactgtcatcctcttacgccaaataatcccccaaatggccatcaaaattatccctaaaaaatgtaatctaataatttttactttcatgcttaaaaccttttagtggctttctactccctagaactatactgtacaacagaacttttggtgataatagaaatatgccrcattgtctaatatagcagtgctttggtctaaatgtttcaaaattcatgttgaaacttaattcccattgtggtgacattaagaggtggggcctttggggaaattaatgatcaagcaatgagggctctgcccctcatgaatggatttgtgccttacaacaagtctggagggaactagcttatgcccttttttgctcttctgctcttccaccttgtgaaga

SEQ ID NO: 293231 - DNA, 548 bp, Homo sapiens
gcccatagttgattttgttttgtaaaccctcaaactcagatacatagccacacaaaactgcatacctgaaaaggacaaaaacagacaaaaacagtggccactgtgtaaatttttaacaaaatgccaccaaaacataacattaaaagaaactctaaagcattcattcatatttaacaggagtattcatataaatataagggccctaacaataataaatacttgacattaacatgaggccagttttctcatctataactggggatactaacaatatttacatgtatactgtgagggtaaaataagccaaaacaggtagtgtgattagaacagtgmccaggacataaggactttcaataaatgttacctgccgctatcatcatcatcaatattaaagtcatgaagaaactctcagaaaaagtctaatcacattaagcattaaattagaaaaaatattgtcaacagatttataacattaaaaatactgttaaagtcaacttaaaaaattcattccctcctttaaaaaacttacaatttcatgagctccttta

SEQ ID NO: 293232 - DNA, 578 bp, Homo sapiens
tggcattagctagaactttcagtataatgttaaaaagcagtggtaagagggaacatccttaccttgctcctgatcttagtttctcaatggtgggaaagcaagtttctcaccattaagtataatgttagctgtatgtttcctgtaaatgttctttatcaagttgaggaaaattgataaaattttcctcaacttgataaagtttgctgagagtttgctagtttgctgagagtttstttctttgcactatcaatgagtgttagattttgtcaaatgctttttctgtgtctgttaaaataatcatgtaatttttttctgctttggtgtgttaatgtggtggattatagtaattgattttcaaatgttgaactggtcttgcagaccaggaataaatctcacttggttatataattctttttacacattgtcagattcaatctgctaatattttattgaagatttttgcttctatattcatgagagataatggcctactacagtttccttccagtgtctgatgttggtattagggtaatgctacactcaaacaatgagttaggaagtgtaccctctacttctat

SEQ ID NO: 293233 - DNA, 578 bp, Homo sapiens
tggcattagctagaactttcagtataatgttaaaaagcagtggtaagagggaacatccttaccttgctcctgatcttagtttctcaatggtgggaaagcaagtttctcaccattaagtataatgttagctgtatgtttcctgtaaatgttctttatcaagttgaggaaaattgataaaattttcctcaacttgataaagtttgctgagagtttgctagtttgctgagagtttctttctttgcactatcaatgagtgttagattttgtcaaatgctttttctgtgtctgttaaaataatcatgtaatttttttctgctttggtgtgttaatgtggtggattatagtaattgattttcaaatgttgaactggtcttgcagaccaggaataaatctcacttggttatataattctttttacacattgtcagattcaatctgctaatattttattgaagatttttgcttctrtattcatgagagataatggcctactacagtttccttccagtgtctgatgttggtattagggtaatgctacactcaaacaatgagttaggaagtgtaccctctacttctat

SEQ ID NO: 293234 - DNA, 543 bp, Homo sapiens
agtcaatagtattttgaaaaatccatttaatttataaagaggcaggttagaatttaaaagactgcataaatcctatacacttaccacagatgacaatgtccattcatgggtgctctattaatagctctttcacttaaagtttttcctgaaagataaaagtacttacacttaataccttcatgtgagttggtaggaggtggattattgaattaactcatggttcacaaagtatggtcccaagaccagaagcatcagcatcacatggcaactttgtttaagaacttttcagccacattggagatctactccatcacacactgtgggattggggcccaatratctgtggtttaatgagcctccaatgattctgatgtatgctaaggtttgacacccactagactaagcaacttaaccaagtgcaagaaacgtcatttaattactgcttacaaagcgtaatagaaattttctgtattccattcaaacaacatttactgagtacctactatgtgccatactgtgtgagtgtctgggaataaaatgtaa

SEQ ID NO: 293235 - DNA, 529 bp, Homo sapiens
cgtagtccctagagttctacattacaggaagtaagatgtgttactttaactgtggttgacaactgctgaagacacttgtcctctgcctgttattgtttctcaaacactgccactacatttcttgtctaagttttataaagttaaaagatgaaatttaagtttttttcagttacctattctaatatattcaaatatttctgaagaacatatactttagccctaaaatgcctttctgttctgagagtgtacatttttttgtaccataatatattaaaatagattaaacatactggttttagctaagataatttagctttagttaacattcactagtgatttactatagatcttttttkttattacactttaagttcttgcatacatgtgcaaaacatgcaggtcataggtatacacgtgccacggtggttttctgcacccatcaacccgacatctacattaggtatttctcctaatgctatccctcccctagcctcccaccccaagacaggccctgttgtgtgatgttccc

SEQ ID NO: 293236 - DNA, 588 bp, Homo sapiens
cagaattatgtatctactgcaacttgctctctatctcttgctctaattctgtctctcccatgcacacatagaatagttttattgtgaaatctgccatatatccaaataattaggcttattcaaattcttctaaagaattactaaagatggaatgcccctcaggtttattttataaaactaatataactgacacaaaaaccaaacatgaatattacaaaaaataaaaattataggccaatcttacacataaacataaatgcaaaaatcctcaataaaatatcaatcaagctattgcaacaaatataaaattatgtattacaaccaaattgagattatactagaaattacaagcacagtttgacatyagacaatttctctggcgcaacagatgagacctatctgatcaattcagtcattaccaaaaaaatttttttttccaataaattccaacaccacttcaggacaaaagaaataccaaagccttaaacaagaaatagaaggcagccaggtgcggtatattcccagcacttcaggaggcaggaagatcacttgagcccaggagtccaaaactagcctgcacaacatggc

SEQ ID NO: 293237 - DNA, 564 bp, Homo sapiens
tctaattatgttaatagtatacacttgtagtataaaaaaatatagtaattaaaaactttaccaaacagattttaaaactctaatattttaataatcagatacaaagtattatgttacgtttcaatttgtaaggtgctagtaaataacaatggaaaatgacattttaatatagattatggcacttaattaaygtgtattattgtgtaatattaaaggttgagatgagaatcaagtattctaaaatgacatcaaaatgttgactctaaagaaaatagaatatgaaatgttttctgaagaaatgtctgaagaaacatttcatttccatgttctagttttatttaaaattaattttttgatgtagaaattatgctttactaaattaattataatgctttcaccataaatctagcacagatattcattaacttcatcagcagacccttagaggagaaaaatataaaatgcataactctaataaactcggggaaggtatgacaaattttgcaaggataaagagacattacaaaaaagcccgaggtttaagtttcctaagagaattgcact

SEQ ID NO: 293238 - DNA, 576 bp, Homo sapiens
ctattgtaactgttatgaagcaaaatgaaccacaaccatataagacagtgaacttactgataaatgttgtatgtgttctggccataccactaaacagtcccttgtctctctccctctccttggacctccctaattaataatgctacaatggcctcgtactgttcgagtgaaaagaagagtcataggtctcttaatttaaatcaaaacctacaaatgattaagcttagtgaggaaggtacatctaaagccaagttagaccaaaagcttggtctctygcgctaaacaggtagcccagtggtgaatgcagaaaaaaaaaagttcttgaaggaactcaaaagtgctactccagtgaactcatgaatgatgagaaagcaaaacagtcttaccgctgatacagagaaagtttgaatggtctggatagaaaatcaaaccagccacaacattcccttaagccaaaacctaatccagagcaaagccctaactctcttcaattctgtgaaagctgagaaaggtgaggaagctgccaaagaaaagttggaaggtagcagaggttggttcacgaagtttaagaaaaga

SEQ ID NO: 293239 - DNA, 577 bp, Homo sapiens
gttgctttactgcagttgtttggaactgaatccgcaatatctgtggggtatgtatacacatctcaaaaaccatamatatatttaaatagcttgtagtctgtgaacaacaagcacagatctcaaatgtgcaatgttttgaacccaaaaggaatcacaatttgtgagacaccatgcagttctgtggactgaaaacacaaagtattccagataagagagggaagtatgaagcaatgactcctccagtcttttccaaaatcagctcctattcacaagtactaagaaattgtaaaagtacaggcacagctggtggctagattcattgccatcttgtcaagttaagcaggcttttaaggtcaagttacatactacttatgtaatgaaggataattatttgttagcttaaataagaccctgtaccttgattacggtgttggtatagggaaaagaagactgaggcatgtgaattggaaacattatctctgaaatttacaatcatttaaatttattcatgggtacttacagttctaattaaggcataacatctcaaactgatgaacggctctaacaacagaggagc

SEQ ID NO: 293240 - DNA, 577 bp, Homo sapiens
gttgctttactgcagttgtttggaactgaatccgcaatatctgtggggtatgtatacacatctcaaaaaccatacatatatttaaatagcttgtagtctgtgaacaacaagcacagatctcaaatgtgcaatgttttgaacccaaaaggaatcacaatttgtgagacaccatgcagttctgtggactgaaaacacamagtattccagataagagagggaagtatgaagcaatgactcctccagtcttttccaaaatcagctcctattcacaagtactaagaaattgtaaaagtacaggcacagctggtggctagattcattgccatcttgtcaagttaagcaggcttttaaggtcaagttacatactacttatgtaatgaaggataattatttgttagcttaaataagaccctgtaccttgattacggtgttggtatagggaaaagaagactgaggcatgtgaattggaaacattatctctgaaatttacaatcatttaaatttattcatgggtacttacagttctaattaaggcataacatctcaaactgatgaacggctctaacaacagaggagc

SEQ ID NO: 293241 - DNA, 683 bp, Homo sapiens
ctctgttgcttaggctagagggccatctcagcccactgcaaccttcacttcctgggttcaagtgattctcatgcctcatcttcctgtgtagctgggattacaggtgtgcaccactgtgctcatctaatttttgtatttttagtagagtgggggtttcaccatgttggccaggctggtcttgaactcctgacctcaggtgatccacccacctcagcctcccaaagtgttgggattacgggcatgagccactgcacccagcgatgtttgatatatttgaatcgatgatcaaaaattttaactgagggttaaaaatctttaaatcacacaaaattaatcatgaaatagttgacaatgatacaattgagaatgagtattatgtacctagaaatatgaagaaaatcaataaagctgctatggaataaaaaataacctgcaaatgacagaatatttgaaatgtaaaagatgtccttgtatctgaacatacggatacaattttcattccatgattatagatgttatgttctgagagagacatagaagtagtttggttgacataatctcaaggcrtttcaaagactcttccaggctaccttttcagattaggaaactaatgcagatgacgtgcccaagtgtctcaacccattagaaccaaaacagggtagttgaacactgtatcttaaacc

SEQ ID NO: 293242 - DNA, 569 bp, Homo sapiens
aagctgtgtggtaccctaaggcaaaaataaaygatagaatagttatcaacattgatgataccattaacagaccatcttaagtgtggaaatttaccattctgtcaggactgttgctatttaaatctcatttgaatcattcattcattcaatgaacatctactgtctactatgtgccagacacataattccagtcctaggaactagaagtattatagtgaactatagtattacagaatgaagtggaggagcaggcggagaaaacacaagagaataaatttgtaagttcggataattataagagctgtaaataaaatacaaaacagaataatgtgacagtgactgtgggaggttgctctttgaagatgaaggtaatatctgattttggattctaacgacaagaaaaaagtcagccatttgaatatctatggcaaagggtacaatatgcaaagcacaaaggcactactacagaagccagcttttagataagaaaataaggccaaggtggctggaggactgggggcagagtactatgagatgaggataagaatacaggataagaagtgaccata

SEQ ID NO: 293243 - DNA, 569 bp, Homo sapiens
aagctgtgtggtaccctaaggcaaaaataaatgatagaatagttatcaacattgatgataccattaacagaccatcttaagtgtggaaatttaccattctgtcaggactgttgctatttaaatctcatttgaatcattcattcattcaatgaacatctactgtctactatgtgccagacacataattccagtcctaggaactagaagtattatagtgaactatagtattacagaatgaagtggaggagcaggcggagaaaacacaagaraataaatttgtaagttcggataattataagagctgtaaataaaatacaaaacagaataatgtgacagtgactgtgggaggttgctctttgaagatgaaggtaatatctgattttggattctaacgacaagaaaaaagtcagccatttgaatatctatggcaaagggtacaatatgcaaagcacaaaggcactactacagaagccagcttttagataagaaaataaggccaaggtggctggaggactgggggcagagtactatgagatgaggataagaatacaggataagaagtgaccata

SEQ ID NO: 293244 - DNA, 571 bp, Homo sapiens
gctacgctcccactcttccagccacccctacctcccaccttgacacccttaagaaagcaatgctgacttttattctgacaagtggaaatcaatagtggttaatcaagtggattttgtaaatgctaagaagtgtttgtgaaaaccttccctttctgagttaggattgttttttcctgttcatttcaggtgttttattgagcatctgatttgtgtcagcaccatgtaaatatgatgaggagtatttggaatagactttacattcaccagaaaattgatagtatttgttaaaccaatgcatccattcaaaatagaggcagagtaaacagcctaagaaatgatttcctttctacagtctgctaggagaaagaggtgagaggggagtggttgatgattttaatcaagagtaaagggaacatttattacatgaaatctgacttcagttgtgcaaaggtatgttaagacattaagacaattgctggaaggtttcaaatatgtgtacacacacatagagmtacttttgtgtgtttatttatatgtatatttcacaaaggctaatgcccacagaggaaaa

SEQ ID NO: 293245 - DNA, 599 bp, Homo sapiens
aatttactatatctgcattattgatatttttaagtagtagttttaaaaataattatttctatgtggagggtgttttaatttgggattttttttttcttgtaacaggtgctatttgtaaatatgaaggggaaaagtcacttagttaaaagtctagcttatgtcataattaagatacaattattcatttcatgtttgattctattaaactagtggcaaaacagaaytggtcccttagttttttagattacctttccccctatatcacaaaaatatctctttccatatgatctcataattgaggcaaagaagctaagggtttatttaaaatgtgtataagcttgaatttggtcaacactgcataatttgaaatcactctgcatttgtcactgcagcttactgtatgcttgaaaggccttgtgtgtttgtcttaattttagtgaaaaaattagaatttctgccattcatgtacaaaaaaattacaactacagcaaacaagataaaaatgctggtttgcattaatactgttttagtcttaagagcaatttatattatgtgaaatgctgttacacatattttgttggccatatttcattttgaga

SEQ ID NO: 293246 - DNA, 591 bp, Homo sapiens
caacacttaatattatctgactttatttcagccttcttagttggtgtgaagctgtatctcactgtggttttattttgcatttctgtgatgacttatgatgttgagcttcttttcatgtgcttgytggtcatttatataacctatttggagaaatgtctatagagatcctttgcccatttttaaattgggtgttctttatatagcctagatacaagttccttatcagatatataatttgcaaatactttctcttattctgtgtgacagtcttgtaacttatttgatggtctcctttgaaggctaaatgaaaaatttttcattttgatgaagtccaatttatttactttttctttagttgctcatgctttttatatcatatgtaagaaagtggtgccaggccgggcgcagtggctcacgcctgtaatcccaacaatttgggagtccaaggcaggcggaacaattgaggtcaggagttcaagactagcctggcaaacatggtgaaatcccgtctctactaaaaatacaaaaaattagccaggtgtgtggcaggcgcctgtaatcccagctactccggaggctgaggcaggagac

SEQ ID NO: 293247 - DNA, 603 bp, Homo sapiens
cacctcggtacaattctagctggagaattcaccccacattcagcagaggatagaaaatccagaaaaattaactcaaaaaattggatttaatcagtgtagaccaatggacctaatagaacattttatctagtggcagcagaacatacattcttgtcctcagcgcacagattattctcaaggatagaccacatgttaagtcacaaaacaagtctgaacattcaaaaaaacaaatcatttccagtatcttctctgaccacatggaataaaactagaaatcaataacaagagaaactttggaaactatacaaccacatggaaatcaaacaatatgcttccaratgaccagtgggtcaatgaagaagtaaggaaattttttaatttcttgaaacaaatgaaaatggaaacaaaacatactaaaatctatcgatacagcgaaagcagtactgaggaaagtttatagcaataagcacctacatcacaaaagtagaacaatttcagataaacagcctaatgatgcatcttaaggaactagaaaagcaagagcaaactaaacccaaaattagtagaagaaaagaaataataaagatcagagcagaaataaag

SEQ ID NO: 293248 - DNA, 548 bp, Homo sapiens
tgcagaagaatcaaactggaagagaacgtaaggtaagaaataataaaactgggaggtgcggggaatatgagagcataagaaaagtactgtgatgatgcagaagacaccaaatagtagggtaataaataggaaagaaactttgtatggaaaaagcagttctcaaaatgtggtctcatgatcaccgagggtttccaagaccctttcaaaagattcatgaggtcctaggtttcttatatacctgaaacaaaasaacacattgcaacacagtgaacgtggaagcagataagagaatccaagtaccttctattaaaccagacattaaacagatttgcaaaagtgcttaaaacaatgccacttttctaagctctttgttgttttagaaaatagttatttttataatatgttttatattacgttaacataaaaggggtatgttgttgctatattaatagacaattattgattaatcagttaataaatacttaaaattttttcagttttaatttctaatactgtaactattggtaggtataatccacataagcaaa

SEQ ID NO: 293249 - DNA, 566 bp, Homo sapiens
attttatccctttgaactttcaaaaaaactcttaagtaagattatgcaaacttactaaagaccggtcctgattagagggaaaaaatgcaccccttctccaagtcagttctggaggctttctccagagttgttaaggtttgtgttgggtaaagaaagacctcctaacaaaccagcattcttttccacatgatcagagctaattggcccccctgcaggctaagtgaccaatcacatcaacctcagctgaaaccagcccccacaacattataaacagaggaatgtaagctgtaaaaccagtccaagaagagaacctacaaactagacttgtagattaaaattatctgatcaaaaaggcagactctgtaaatttccttaagacctaccttggcataaaggctgacccagcaaaagaactggtgagtacatgcaataatatccattcttctttccttatgggaaacagggaaagaaactgactggcaaatagsaacagagctagattacttccaacagatttttaaaacaaagacattatctatagtgtaggatagtaaggtttctatatt

SEQ ID NO: 293250 - DNA, 631 bp, Homo sapiens
agccttttgacttccctgttcacaggtttttccatgyatttagttgcaagagaaaaaaaatacaattgtaaagagcctagagtaagagtgctacaaaagttgtaggtaagaagtaacaacagtcctgaaaaagcccaaatgagaatgatgaattttgttagctacagtctatacagaaaggctctaagtaaggaattttagaactttcataaaataggttgaaaatacaaaagaatcatggagttttttctttctcaagcttttgtgaaacactaagcacttagcagcattcagtaggacagtggctccaaatgtggaacaagcactagtgtccaggagcatgaggggcattttcacataggcaggaagcaacaacagtggagaatgacaaagttgttcacccaccattttgaaggcaaccaactatcctttcattgttatgtccttcttccatgtgtcaaaatcttttattatgtcatcataattttatttataatgacagtattatacttgtaaaattgtcttctcatctggcaaaacagaaacttggcaatgttatgtcataactctcctctctacattgctttaattttactgatgtgcaaaacacaactggactatctaataattc

SEQ ID NO: 293251 - DNA, 631 bp, Homo sapiens
agccttttgacttccctgttcacaggtttttccatgtatttagttgcaagagaaaaaaaatacaattgtaaagagcctagagtaagagtgctacaaaagttgtaggtaagaagtaacaacagtcctgaaaaagcccaaatgagaatgatgaattttgttagctacagtctatacagaaaggctctaagtaaggaattttagaactttcataaaataggttgaaaatacaaaagaatcatggagttttttctttctcaagcttttgtgaaacactaagcacttagcagcattcagtaggacagtggctccaaatgtggaacaagcactagtgtccaggagcatgaggggcattttcacataggcaggaagcaacaacagtggagaatgacaaagttgttcacccaccattttgaaggcaaccaactatcctttcattgttatrtccttcttccatgtgtcaaaatcttttattatgtcatcataattttatttataatgacagtattatacttgtaaaattgtcttctcatctggcaaaacagaaacttggcaatgttatgtcataactctcctctctacattgctttaattttactgatgtgcaaaacacaactggactatctaataattc

SEQ ID NO: 293252 - DNA, 563 bp, Homo sapiens
tgtggtgtcgggcacctgtaatcccagctactccggaggctgaggcaggagaatcgcttgaaccctggaggcggaggttgcagtgagccgagatcacgccactgcactccagcctgggtgacagagtgagactccacctcaaaccccccccccccaaaaaaaaagtaccttcaggctatgtctataaagtgtatatgaaagattaataaattttatgttggatcttatcccagagatagctcattatgtatatgcaaatatttcaaaatctgaaaaaatccaaaatttgaaatgcttctggtcccaagcattttggataatggatccacaacctgtattctgtagygttttggaaacttttaagtactgtattaaacaatttatctctttgggtttatatgcagtcaagttcctttaaaaatagtccattggttttatacagacaatatttgatggtgtataaatagactatgataggaatgtagaaattagagaatgctgaaaagtggtgctagaaaacttcgctggcaataggaaaatgaactcagaaaccattatctgtt

SEQ ID NO: 293253 - DNA, 531 bp, Homo sapiens
cacccagcaataattttgaatgtaatgatttttgtatgtggtgtgagatgagggtctgacttcattcttctgcctatagatatccagttttcccaccaccatttattaaagagactgtcstttcccccattgtgtgtttgtggcatctatgtcaaaaatcaattgagtataaatgtgtggatttatttctggggtttgtattctctttttggtttctttttttttatttttttggagacagagtctcactctgtcacccaggctggaggtatatattatttgtacttgtgttttatagccctccttttgacatgaattatgtcatctttccatgtcaaatgtgtatctaaaaatctacatcatcatatttgctagctgtattaaatttcattttataagtaaattataataagttgaccaattccctattgttggacatgagggttgtttccagttcttcattgttagataagtgttcgaatgaaagtccttgtagttaagtctttgcttaaggatttataaccagcgagg

SEQ ID NO: 293254 - DNA, 622 bp, Homo sapiens
ccagagaggaagactctgccccagatctgcctgctcagtaacccccactcaaggttcaacctctggcaggatcttcccgagatccggagcagcggggtgcttgagatcctacagcccgaggagattaagctgcaggaggtaacaggcgccgaggggcggggctcccccacagcacaccggggtggccctcactgctgggggtgaggcttcctctggggggtgaggttccctggctggttcaccagaggaatcgctggcagggttgtccatctagaacatgcagaaaaataaacatggtttcacaggcagcaagagacacccagctaccttctaggacagctcacccccaacattgagcgtctgaagcattgctgtctgatgagatagtaggatcgcagtttttccacccttcattatcatcattgtgtatttccgtcacgcgtgaatgccacggcacgaggcamtgctgagctcactgtgactatgccatagctccagttatctgtggttggcggaggtctgccatatctctttgcattcacgatcttatcccaccactttcttttggggctgtctgaacttcggatgaatggggtctctgaaggaagtccctcagcttgcc

SEQ ID NO: 293255 - DNA, 605 bp, Homo sapiens
gttcttgagaagacctcataaataaaactacacgggttgttcaaaattgtgggtgagttgtgtgcagataatcttttataagtctgatgtctagaaagcagaatatgtttttctctaaagacactgggttccctgactagtctagaaaaatrtgacagaaataaagtacctctgcttttaagtgtatatcctgtagttcatcattagggtaggaaggatacaaaagagtataaaagggaaggggaataacacagcttttgacagagaggagaaaatgaataattttcatagtttggttcagtatgccattcggtgctcattcattcattcattcattcattcattcaacacatgtttactgagtacctactcacttaaggtctggggatatagctgagtctaaaacaggcaagattttctgcattcatgaagctgaccctctgattgagaagagaaaagtagaaaatgaagcgtatgagaggttgataagtgtcagagaggtaacaagggaaggtgggtagggagagtgttgggagtcagggataatgatggtgtggtggattgtccaaatttaggtagtgtgttctgagaaggcctctgaaaag

SEQ ID NO: 293256 - DNA, 551 bp, Homo sapiens
acaccatgccattcaacgacagattaattccatagtcatatcatccagttttgcacaggtccacctttccccctatccctctgacttagttgccttaaacagagtatctgttgttgagagagcatcaagaggtatgtcctctcacaggtcccaggctttgtgatcattctgaaaggttcagtagtgttagacagcactatcttctccccagctatttttaatgggactttacagtcaaagcccctgatggtctactttttagaagttagctstctaggttgaagttattacaaacataaatgctttttaatgacaaatttgccttaaaggtatgcagggcagttgtcatgagcaacatggaaaatgagcccctgaactgaaatgtatgtttggaattaaacttttcaggttgtgcatgatgaatcattttcaagctctgtttccctgctaagattgtaaatgttgggttctttgacccgagtctgagaaggtctcaggagagggtaatttggctatgattctggaagacaatatgttgtttcccctctccc

SEQ ID NO: 293257 - DNA, 581 bp, Homo sapiens
tgtgtaaaatctagaatctatatgagcaaaactataaaacactgatagatgaaggggggaagaagggggaaagktaagcaaattatagcccagaggccaaatgtagcttattcctgtttttgtatcccaaggttaaggatgctttttatgtttttaaatggttggaaacaaatcaaaacgagaataatgttctgcaacaagtgaaaattatatgaaattctaaattcagtacccacaaataaagctccattggaacgccagtcacactcatttgtttacatactcatttgcctatggtggcttctgtgctacaatggagagatgagtagctatgaaatgtgtgacacacagactgtatgcttcacttttactgctttgtggcactctacaaattgcaggatttccactggtgcatctatcagctgtgtgaaattacatttttcaaagataatacataaaattataaaataaaattatgaaatacgtaaaatttcattacagatatgaattaatagatgaacatttgtaatcaattttgatgagaggaagtactaactttgaacccccatcaagcacaatgt

SEQ ID NO: 293258 - DNA, 518 bp, Homo sapiens
gtataaggtaatagtcacagtttcctgggattcacatgtggacaaatcttttttggagccaccattcaacccactttacccactaacactcatcaaaaatctaacaaatagcaacaatgattcatttactccctctctgtcatcattagtagtgtaaggcaagtcccaggagaggttatttttaattgaaaaatgcttgcaactgcaaatgtagtcaaaggagattcaagaaagatkttctggcttgggtagggtatatgtcatgaagaagcaggtatccagttgaataacacatttctgcatttattggtattttaattaagaatatacaggttaaaaattcagaggatacaagagtacacaatgaaaaatgtaatttcctcccatccagatccctatcttgttccccagaagtaatgagtatcaatatttttttatcctttcagaaaacttccacagtactcatccatctcctccctaccaacatttttttttacacaattgggaacacaagacat

SEQ ID NO: 293259 - DNA, 457 bp, Homo sapiens
gagaccagcctgggcaacatagtgaaaccctgtctctaagggtgaaaagaaaagaaagaaagaaggcaaaatattagcacagattcattgtagagaaaatgttatgtatcctcacagactggagccacatacaaagagataagtagccttctttcccatgcttccagataascaggatgcatctaaggtaagaggttggaggaaagaagacacattgctctgattccaagggtagagggaataatgaccagatttcaaccctaagatagaacccaaatacttgggaggcttgtggttctttcttcttaatggttgataacacagtgtccctacagagaggtcatctgaaactcagaggcaaataactcatcatgggcagcaacactggcaacctaacttagaagccccgtgtggccccttttttatttggagtgggtctcttcactatagcaaggca

SEQ ID NO: 293260 - DNA, 494 bp, Homo sapiens
gttatgtgggtgttttgtgtaagagaaacattaacctgtcttaaatttttaaagagcctgcctcaagcacctgaactgatacagtgtgtttataaactcctcaggcaaagatcaggtaataaataagcttctggttttgttttgccttagcactaggtatataacaactgttaaaagttgatacattttccctttagtagacactttagaaggatataaaagcaacagcacagtccatattctgacagaatgtataatgaagttgggagaccaaacaaatacataggaaatgacataagattatgaataagtactrtgtagtcagataatagaatgtgaacagaaacccataagaattaagagtactaaaagcaaagcaaacagttcatttatcccatttagtatccttcttagtttttccattcaagtttccccaggcattagttgttttaaatgacccaaactatggagtccaaggcaaaactcaagttgga

SEQ ID NO: 293261 - DNA, 494 bp, Homo sapiens
gttatgtgggtgttttgtgtaagagaaacattaacctgtcttaaatttttaaagagcctgcctcaagcacctgaactgatacagtgtgtttataaactcctcaggcaaagatcaggtaataaataagcttctggttttgttttgccttagcactaggtatataacaactgttaaaagttgatacattttccctttagtagacactttagaaggatataaaagcaacagcacagtccatattctgacagaatgtataatgaagttgggagaccaaacaaatacataggaaatgacataagattatgaataagtactgtgtagtcagataatagaatgtgaacagaaacccataagaattaagagtactaaaagcaaagcaaacagttcatttatcccatttagtatccttcttagtttttccattcaagtttccccaggcattagttgttttaaatgacccaaastatggagtccaaggcaaaactcaagttgga

SEQ ID NO: 293262 - DNA, 507 bp, Homo sapiens
cctgagcttctaaaatgtgtcacctacaatatctagcttgcattaaaaacttcataatcaagcaaaaaaagagagggttgtggaaatgggaagcactgaccaagagatagaagggtcaatataagtagacacagaaaaggtaacagtcattgagttagcagacaaggatttctaaataaccacaaytggtagaagaaaaatatatagggacaatggataaatggatgaataatggtgtgtttcaacagagaatcagatgggggagcaagatggtagagctcggggagcaacatggcagaatagaaagctccactgatcatacccctagcaaggacaataagttaacaactatctacacagagaaaaaccaccttcataagaacccaaaatcaggaaagcactcacagtaactgattttaacttcatatcactgaaagaggcactgaagaaatagaaaaaacagtcctaaattgctgacactacccccacccctggcagcagcagcag

SEQ ID NO: 293263 - DNA, 507 bp, Homo sapiens
cctgagcttctaaaatgtgtcacctacaatatctagcttgcattaaaaacttcataatcaagcaaaaaaagagagggttgtggaaatgggaagcactgaccaagagatagaagggtcaatataagtagacacagaaaaggtaacagtcattgagttagcagacaaggatttctaaataaccacaactggtagaagaaaaatatatagggacaatggataaatggatgaataatggtgtgtttcaacagagaatcagatgggggagcaagatggtagagctcggggagcaacatggcagaatagaaagctccactgatcatacccctagcaaggacaataagttaacaactatctacacagaraaaaaccaccttcataagaacccaaaatcaggaaagcactcacagtaactgattttaacttcatatcactgaaagaggcactgaagaaatagaaaaaacagtcctaaattgctgacactacccccacccctggcagcagcagcag

SEQ ID NO: 293264 - DNA, 525 bp, Homo sapiens
ccacatctctaaataacatgcttatattgctatttattgatttttcagttcaagatagtacctattgatttcccactatggaaaatgaagatttagctgtcttttaatccctggtctgcaccaccacatacatgcatacttttcattcctctgccctctcagtataattatattatgatttttcactagatcagtattctgtgttcacatttttatgactttgtaaatgccagttgcagcagagatatatagtaaactttggttgtgttacctttcctgcacagtttattgttttgtctgsaattaatgcttatttttccattgccttcctttttgaagaatttatcactaagttcactatctgaagtagttcaactttaaactcttccccacttgtgtaaatctctcagtgtgtttaaacacattaggtgttctatcaatttaaccttgaaacaatctcctgaatcttctgcccttttaaagtccgttctgtttgccctctgcacttggcacatagctgttgtc

SEQ ID NO: 293265 - DNA, 518 bp, Homo sapiens
  misc_feature (1)...(518): n = A,T,C or G
ctctgcacttggcacatagctgttgtcttgggaaatcctttcttcatcattctggggatttccttctcctcttccttgtattgaatcccttgtttcctgaatcctctgttttcccaaggtttctgagaaagggtgtgtgggagataatttttttaacttgcatatcttaaagtgtctttattctacactaaaacttaattgatagtttgacttgggtattaaattataggtttaaartaatttttcccagaattttaaatatattgctttaggatatgtcttcatttattctatttgacattatatattatgtcttacaatgttgcctttgaggagtatgtagctatttttttctttatttctttttagacatgggttctttctgtgttgcccaggctggcctcaaactcttagcctcaagtgatcctctgcttcaacctcccaaatagttgggactacatgggcacaccactgcatccactcctatgaagccattttgattctanacatttggtatg

SEQ ID NO: 293266 - DNA, 627 bp, Homo sapiens
  misc_feature (1)...(627): n = A,T,C or G
gccctctgcacttggcacatagctgttgtcttgggaaatcctttcttcatcattctggggatttccttctcctcttccttgtattgaatcccttgtttcctgaatcctctgttttcccaaggtttctgagaaagggtgtgtgggagataatttttttaacttgcatatcttaaagtgtctttattctacactaaaacttaattgatagtttgacttgggtattaaattataggtttaaagtaatttttcccagaattttaaatatattgctttaggatatgtcttcatttattctatttgacattatatattatgtcttacaatgttgcctttgaggagtatgtagctatttttttctttatttctttttagacatgggttctttctgtgttgcccaggctggcctcaaactcttagcctcaagtgatcctctgcttcaacytcccaaatagttgggactacatgggcacaccactgcatccactcctatgaagccattttgattctanacatttggtatgtgacatcctttttttccttcctagaatcttgtgagattttctcttgancttcagtcgtctgagatgtcatgctgttcgttcgtggagtagagtctattttaatcca

SEQ ID NO: 293267 - DNA, 523 bp, Homo sapiens
ggttacagtaggccttgggcaagatgcagtgctgtgctggcttcaggtctgacatagcacagtcatagtagtggtggtcacaggggtgcttgtgtcattccactcccagcattaggtggctcagaacagagagactctgtatgcttgggagaaagtaagagaagaaaacaagagtctctgtctsgtaatccagagaattctcccagatctgggccaagaccatcaagatgatacctctatgagtcagtctgtaagaaccacagtgttactgggcttggaatgttccctaaagcagatacagcttagatcacaacacctaagatctttcaaatatctggaaagccttcccaagaatgatggctacaaataagcccagacagtgaaaactacagtaaatacctaacctttcaatgtccagacagcaaagaacatctattagcatcaactccatccatgaaaacatgacctcaccaaaaggacaaaataaggcaccagaaaccaatcctggagaaacagagacatg

SEQ ID NO: 293268 - DNA, 522 bp, Homo sapiens
actagatgaaattaattcaacaaagatcagaatgcatgcagtcaaaggggatggtgcctcaagcacagtggaatttgaaaaggaaattggaaagctgcattgtgtaaacaccatcgttttattacttataaaatgagctttctactcttaacaggcaaagctaacttggaattgtgtatggctcttttcagtactcttataattaggctcttaattattctttaaaaycttgggcacatgaacttcactccgtaattctttcatacacagtgcactctgggttctctgccttgaggtcatctacttagagatttacccctggcatgtttttaggccagaaggcatctcttcaccataaattactatctgatcaggatgcattttaatctagcctaagatagaagtaattaggagagctaatctgctatcatagaaaattaacaattaagatagggcatgctggctgggtgcggcggctcacatctgtaatcccagcactttgggaggctgaggtgggtggat

SEQ ID NO: 293269 - DNA, 589 bp, Homo sapiens
tgataggtcttgagtctttatccaatttgcccgtctgtgtcttttaattggagcatttagcccatttacatttaaggttaatattgttatgtgtgaatttgatcctgtcattatgatgtyagctggttattttgctcgttagttgatgcagtttcttcctagcattgatggtctttacaatttggcatatttttgcagtggctggtactggtagtaacaaccaatttttataagcactggatacctaacagtgcaaggttgcaagacttaagaaaaaggaagcatgcaaagtgaaccccacatttactctggctttcttcctggaagcatttcacagctatggtacaaggaagtagagcccaagcacagagaggaagtctggtgggtggaggaaacagatttcagagcttggggatggtagggtgatggatgggatttggaggggcatgatgcttaagacagctacatagacggaacatcaaaaatctgtgtaggggttttcttgaatccttagcttaatcctcagatgtgcatgcacaaattgagaccccagaaaacctaaagaaaagagctgttggagtgtgcccta

SEQ ID NO: 293270 - DNA, 589 bp, Homo sapiens
tgataggtcttgagtctttatccaatttgcccgtctgtgtcttttaattggagcatttagcccatttacatttaaggttaatattgttatgtgtgaatttgatcctgtcattatgatgttagctggttattttgctcgttagttgatgcagtttcttcctagcattgatggtctttacaatttggcatatttttgcagtggctggtactggtagtaacaaccaakttttataagcactggatacctaacagtgcaaggttgcaagacttaagaaaaaggaagcatgcaaagtgaaccccacatttactctggctttcttcctggaagcatttcacagctatggtacaaggaagtagagcccaagcacagagaggaagtctggtgggtggaggaaacagatttcagagcttggggatggtagggtgatggatgggatttggaggggcatgatgcttaagacagctacatagacggaacatcaaaaatctgtgtaggggttttcttgaatccttagcttaatcctcagatgtgcatgcacaaattgagaccccagaaaacctaaagaaaagagctgttggagtgtgcccta

SEQ ID NO: 293271 - DNA, 522 bp, Homo sapiens
accccattagcttttacaacagcttttttgtttgaaaattacttgtatttctttttttttttggtaataatttcaacttttattttagattcatgtttgttacaggggtatatttagtgatgctgagattttgcatatgactgatcctgtcacccaggtagtgagtatggtatccagtagttagtttttcaaaccttgctcctcttcctccctccctgctctagtagtccccttgtctrttgttgccatctttatgtcctcatgtactcagtgtttagctcccacttgtaagtgagagcttgcggcatttggttttctgttctgtgttaatttacttaggataatggcctccagctgcatccatattgctgcaaaggacataattttgttctttttttatggctgcatagtattccatggtgtatatgtaccacattttctttatccatttcaccattggtggcacccaggttgattctgtatttgctattataaaaagtgttacaatgaacatacgagtac

SEQ ID NO: 293272 - DNA, 1076 bp, Homo sapiens
accccattagcttttacaacagcttttttgtttgaaaattacttgtatttctttttttttttggtaataatttcaacttttattttagattcatgtttgttacaggggtatatttagtgatgctgagattttgcatatgactgatcctgtcacccaggtagtgagtatggtatccagtagttagtttttcaaaccttgctcctcttcctccctccctgctctagtagtccccttgtctattgttgccatctttatgtcctyatgtactcagtgtttagctcccacttgtaagtgagagcttgcggcatttggttttctgttctgtgttaatttacttaggataatggcctccagctgcatccatattgctgcaaaggacataattttgttctttttttatggctgcatagtattccatggtgtatatgtaccacattttctttatccatttcaccattggtggcacccaggttgattctgtatttgctattataaaaagtgttacaatgaacatacgagtacwggtgattcagtttgtgtttcagttcagtcacttgcaggatgagagtgttgttctgatttttaacaatcttagcactgaacctgcaggagataaggatttctttcaaggaagacctagaaactttcagataatttatacagttcttgagctgggaatttgaatccctaaggtwatccatttctttttttacttttgtctaatgcaattaggaggaaccagcccatgtcattatagttgttagcttgacaaaaccattctaagatattaaatacttggtcactcagaactttgccttttataagtattaatatttgattaggagtatctgtaggtgatattttgcatgtctttgttgccacattacacaatggactatcagtgttctctttactactggaaatagagtcattagtgcctttaaatctaatcagcttagagaaccaattccagaaatgtaagaaccaattcagaaaacttacccttaagattctgttgctctaaagccattcttggtaccaaaatatgtattaaggttctccagagaaacagaacc

SEQ ID NO: 293273 - DNA, 553 bp, Homo sapiens
ggtgattcagtttgtgtttcagttcagtcacttgcaggatgagagtgttgttctgatttttaacaatcttagcactgaacctgcaggagataaggatttctttcaaggaagacctagaaactttcagataatttatacagttcttgagctgggaatttgaatccctaaggttatccatttctttttttacttttgtctaatgcaattaggaggaaccagcccatgtcattatagttgttagcttgacaaaaccattctaagatattaaatacttggtcactcagaactttgccttttataagtattaatatttgattaggagtatctgtaggtgatattttgcatgtctttgttgccacattacacaatggactatcagtgttctctttactactggaaatagagtcattagtgcctttaaatctaatcagcttagakaaccaattccagaaatgtaagaaccaattcagaaaacttacccttaagattctgttgctctaaagccattcttggtaccaaaatatgtattaaggttctccagagaaacagaacc

SEQ ID NO: 293274 - DNA, 553 bp, Homo sapiens
ggtgattcagtttgtgtttcagttcagtcacttgcaggatgagagtgttgttctgatttttaacaatcttagcactgaacctgcaggagataaggatttctttcaaggaagacctagaaactttcagataatttatacagttcttgagctgggaatttgaatccctaaggttatccatttctttttttacttttgtctaatgcaattaggaggaaccagcccatgtcattatagttgttagcttgacaaaaccattctaagatattaaatacttggtcactcagaactttgccttttataagtattaatatttgattaggagtatctgtaggtgatattttgcatgtctttgttgccacattacacaatggactatcagtgttctctttactactggaaatagagtcattagtgcctttaaatctaatcagcttagagaaccaattccagaaatgtaagaaccaattcagaaaacttacccttargattctgttgctctaaagccattcttggtaccaaaatatgtattaaggttctccagagaaacagaacc

SEQ ID NO: 293275 - DNA, 655 bp, Homo sapiens
actttcctatacctcgtataggcacctaataaatatttactgatttaggggaatgtctggacctcttcatccccatctcctaaaaaaaaaaaaaaaaaaagaagtttgacatactgccctatttgtctaggtgtcttctaggtctatattatatgaatattctccttacaattcctgctagggtattttttttttctttatacctttttcccctctacacagtacagagcaactgattttgttgttcctgggcctggaaaagtagagataacctacacaccaagtgacggaacccaaaaggtgacatacctggtacataactttgaaggtatgtatgactgtagcataagcttcttttttttttaaacaaatgatttarataatatttttattgctttttttgttagttatgtgactgcctaaaaatataatctgaatctacagtgtttttgcaaaacccgaaacttgacataaagaagtaatttgcttccataccttcctgtggcatgaataaaggcacaaaagggttacccacttaattggaaatgcctttaggcaaagacaaggagatgattatgcatttatcttaaagcacagagagaaggttggcagaaatctgctgtgcatgaattatatacattaaatattaatattc

SEQ ID NO: 293276 - DNA, 430 bp, Homo sapiens
catcaaactctgccctttgcctcctgtttttcaccagatagaggcaataatggcctggtttctctccatataattagtataataagtgtaagtctaaggaccacctttttcccttagtaaatattgctctttaaaaataaaagggggtgggagggsttaaaggattttttgtattttgacgttgaagtggtgggaggtaaagatgtgacagttgatgccaaaaatgcgaatgactacttcattaatgccagttagtcataaaatgagcctttcccttttttttttttttttagatgagtctcgttttgttgcccaggctggagtgcagtggcacgatcttggctcactcaacctctgccttcctgggttcaagtgattcccccgcctcagcctccccagtagcggggactacaggcatgcaccaccatgc

SEQ ID NO: 293277 - DNA, 430 bp, Homo sapiens
catcaaactctgccctttgcctcctgtttttcaccagatagaggcaataatggcctggtttctctccatataattagtataataagtgtaagtctaaggaccacctttttcccttagtaaatattgctctttaaaaataaaagggggtgggaggggttaaaggattttttgtattttgacgttgaagtggtgggaggtaaagatgtgacagttgatgccaaaaatgcgaatgactacttcattaatgccagttagtcataaaatgagcctttcccttttttttttttttttagatgagtctcgttttgttgcccaggctggagtgcagtggcacgatcttggctcaytcaacctctgccttcctgggttcaagtgattcccccgcctcagcctccccagtagcggggactacaggcatgcaccaccatgc

SEQ ID NO: 293278 - DNA, 652 bp, Homo sapiens
gggtcgcctagggggttccgcgctgcctaatgcaaaggatggaaaagttacagaagcaggtcctgacaccacctatgtctaggtctttagaaactccattgattgtttgcattagaagataatgaatgggattcttattattttcttttttaagacagggccttgctctgttgccctggctggagtgcagtggagcgatcaccgctcactgcagccttgacttcctgggctcaagagatcctcccacctcagccttccgagtagctgggattacaggtgcacacaatcacactcaactaatttttctttctttcttttcttttctttttcctttggtagagatgggtttcagyagcccaggctggtctcgaactcctggactcaagtgattggccctcctcggcctcccaaagtcctgggattacaagcgtgagccaccatgctcagttggcgggggattatctgtgatccaatgaagttggactagagatgtgaagccttagaaaacggtggattgaaaaaagaattttagtctcctccagagattatattttgtgtgttcattgctctcaaaaacatgaaaataaagagtattttatattgtgatttgtaggacaatagcatgcttgtatattgctgcccagaatttaat

SEQ ID NO: 293279 - DNA, 556 bp, Homo sapiens
  misc_feature (1)...(556): n = A,T,C or G
acctcgtaattaaccgtgggttttcaccatagtttgtacaaggagatagctactttctccctacttctcacgagactggtggcttcctcttctggcagggggcagcgcanatnntatcctatgggccccaaagatcccatttgtcccaaagtttctaggtgcagggaagctggtgttcccagagagctgtaaatagctgatactgtcaatccaggcagcttgtgtatttctcccactgacttatgctacactccaaaaagggaaatctgtagggggyaggggtccctctattggaacagaacctacacagtatccagtagatacccaggccctagcatgactctccatagccagataaacagtatggagtgcttataggctggctcaggcccattccttaacctatctcatgtgacattgaagaatttgttccaacctcttgcacaactagtgacagccctaaacaagccttgaggcaaattgttatattgagactattggggaatcaaattaaatacttagaaagaaaatattggttcaagaggttggtgaaaga

SEQ ID NO: 293280 - DNA, 621 bp, Homo sapiens
aaaaagtttaagcttaagaattgccatttttcttgctttatccttttttattcactcctggaggacttcttgtgatgaaacaagtgaacgtttccacccattctcatacttcaccccaaatttaattgaattaaatatattttttctttttaagaattagggttagcttacctttaaaggaaggtctcctgccttgtgacccattttgtgtatatatatttacccaaaagaaaggaaagcagatgaccacaccaagacttgtactcagtatccacagcagctttctctttaatggccagacattggaaacaactcaaatgtcscattaatgtgtggattgaaaaactgcggtatagtcatcaaatagaagtgaactattaatgcataaacaaagtggtagacctcaaaataattgcattgagcaaaagaagccagacacaagagtatatgttgtattattccatttagataaaactctagaaaatatgagctagtctgaggtgatagagagcagatcagtggttgcctagaaataggaagggacagagaaggatggatggattgcacaaggcatgaggaagcttttggggataatggatatatttaatatcttaattacag

SEQ ID NO: 293281 - DNA, 622 bp, Homo sapiens
aaaaacaaaccaactggctggggcctagtgatttttccatcatctcctgcagtatggattactgttgcaattattctatttttattttttgctaattgtatgtaccttgargaaaggtgtcttattcctcattgcatctttaggtgtcaaacattatgccttatatgcaataatgtagctacttattaagtaaatattcattaaagatcactaaattaaatattcaattaagggacagaagttgcattttattgcataaactttataacagaacaagttatcaattaattgttaaaatatgctgcagctattactgagataggtattaaaactgtcttctgaccaaaatattacatatccgtatactgcaaaacgtgaaaaaactgtacatgtatgaaacaaatctctgttgctgagggactgtgaatttacatcaacatcttttgctttaacgtaaccctgaaaataattttgaaattgatttctaagattatctgatccacttcggagataaagttttataacttttgaaaactgagatatgaagaaatgccttaaccaaagattaagtgaaaaaaaatttacaactttgaaaactaagatatgaagaaataccttagcc

SEQ ID NO: 293282 - DNA, 633 bp, Homo sapiens
ccagcttggtgacagagtgagactccgtctcaaaaaaaaaaaaaaaaaaaaaaggaaggaggtattcttttcacaataagaaaacagacactctggtcttgtaccaagtgcctaggtgggggtaaacctagaaaatgtttcccttgcctttaacagacatcagtggtaggtaaaaaactttctttcctatgcaaatggrtgagtctaaggtgaatactgtcgtcatcctacataagaacaacttcaaatattttcttggagtgtaagaaatatctaaagcaccacagaaaagagaaaaatgacagtatgtatatttccaagcaacatacagttaaaatggcaatttaagatgcctcactaataactttctgaaaattaggcattctttcttagctataaagcaaaataatctaacataagaatataatttagaaagcattatgtttcaatagtcatcttgtaaagatggctaaaataaataaacataaaccactcacctatgacctgaattttcctttattcctgtccatcccttgaacaggctttgatgcaaatcccagtcagcatcccacatatcttcctgcatggctacaccaggctgcactttgggttcagctaaaacaaggaaacata

SEQ ID NO: 293283 - DNA, 589 bp, Homo sapiens
accaggtaaaaataaattcgctctggcaccaagcctccatttctctgcagagattgacagagcatgacagagtgttaggtcagtytgtggactcttcagttcaatgcaacacgtagctagtgggccaagcaacaaactggtgcctgagcagggctctgattgtgtgtggatatgagagacaaagagaagggctttttgcctttaacttatgttactatcagatatattttccaaagtggtttcatgttagtttatataactctacgaacatttaataggtacataacagcaacgatgacagttacagcactaggtgcttactgtgtgctgggcattgttctaagccttattttatgtattcagtgtctcacatttttaaaaaaaccactaagaaacaaattttacattatgatttaagacatttatgcacacatatgtaacaaaatttttgcaaaacaatatttgttactacatgcagtatatgtacttgggtaatttctattctttatatataaaaaggacacattataaagtgattaaaaacccattaataagttgtgaccgcttatacacatttaatcctcacaaa

SEQ ID NO: 293284 - DNA, 594 bp, Homo sapiens
cagcaacgatgacagttacagcactaggtgcttactgtgtgctgggcattgttctaagccttattttatgtattcagtgtctcacatttttaaaaaaaccactaagaaacaaattttacattatgatttaagacatttatgcacacataygtaacaaaatttttgcaaaacaatatttgttactacatgcagtatatgtacttgggtaatttctattctttatatataaaaaggacacattataaagtgattaaaaacccattaataagttgtgaccgcttatacacatttaatcctcacaaaacctcctgaaatgggtggtgatattaggtcagttttacagaggtacagattagtgaaggaatttatccaaggtcacacagctattaagtggtaaagcaaggatttgaatttaggcaatctgagtccagagactccattcttaaccactaaactggatgtggtctctgcagagagtcctgtctcatagggagacagaatagatgagggaattaaaaatattaccaagtgttagaaactcaggtgacaacaaaaggactaaattgcatataatcaaggaatgttcaaacaaag

SEQ ID NO: 293285 - DNA, 366 bp, Homo sapiens
ttccctccaactgtccccttcctggtacccaaactgttttcttttttttttttttttgattaagatggagtttcactcttgttgttcaggctggagtacaatggtgtgatctctgctcactgcaacctcckcctccccggttcaaccgattctcctgcctcagcctcccgagtagctgggattacaggtatgcaccaccatgcctggttaattttttgtatttttagtagagacggggattcaccatgttggccaggtgatctccaactcctgacctccaactcctggtctcaggagttggaggctggtctccaactcctgacctcaggtgatctgcccacctcggcctcccaaagtgctgggata

SEQ ID NO: 293286 - DNA, 375 bp, Homo sapiens
tttgtttccttgtcctatactttgttttgttttgtttttaaattttgggcatctcatgaaatccctgcaggccttgattttctgatctctaaaatgggacagtgacacctactcacaggttgctttggggaagacgaggaagacttaggaagctccccgcactgtttcttgtacatgtgccctcaacacccgctccacctgcttccctgcctgggttgctggtaggtggytggggtgtgcagattgtaaagtgctgcaccactgcctaatggcattttctattttggctgcctctgtgcccatagtcagaaagcacttggccactttcttagtcaccaatctgatagttcactcacccttctggagtgtgccact

SEQ ID NO: 293287 - DNA, 605 bp, Homo sapiens
  misc_feature (1)...(605): n = A,T,C or G
ctgcttgatggtgcgcaaaacacaccacgttcattatcctgcttgatcatgacacagcttgcatttcaggcaggaaaccttaacctcactttgcagacagaaaagcaccatctagagagattgaatcacatccctgttttccatagccagcaggtggcacggggccatcatcctccaagctcagggctcctggttactgctatatgaccatgggtacaactgtactattcttagcctcagtttcctccttgtctccaagggcgcagtgagaattaaatgacacaaggatgcaaagagcctggtatcatcacagtacctgctgggacctcaatacttgagcattttcatcccttgggaactcttgcatcagcaccccccagggcagcaggagccctgggagtattgcctggcaggaytaaagatacacaaagatttattgagtgtctactgcgtatgtgccggaggnntttggtggtgacagacacagtggctgcctacatggagcttaatactccagcataggaggtggacagaaaacaaggtagccaggaattcatcaaatgactgcatgtggccaggcgtggtggctcatgcctttaatccca

SEQ ID NO: 293288 - DNA, 557 bp, Homo sapiens
tttgggcattcaaagtcgaatgagtaagacatacaagtcaacattcaatatggggtgaaatcatagaggcttattcatgatttgcccctctgagcctcagtgtcctcatctgtaagatggatttaatgagacctacaacttatagagctgttgcatcgatgaaaggtgatactgcgtgcaaagtgcttagcacagtayctggcacatgagtacctcactgagttttgacatggtgtgtatataccaggcttgttgatgagggcctgcagggaatacaccagaagcactccctgccctcacggagcttgtagagatgaagaaaacacaatgggagcacagcacaatagtggccactttgccatgggatagatgggagccttcacataggaggcaacatgtgaactgggtcttgaaggatgaataggagttcatcaggtgggcaaagagaggaatgacattccagaccaagagaactgcatggacagaagcctgaagctgggacttatccaaggctacctggcctagaaatgggtgagcctgttgcctgatcccagatc

SEQ ID NO: 293289 - DNA, 557 bp, Homo sapiens
tttgggcattcaaagtcgaatgagtaagacatacaagtcaacattcaatatggggtgaaatcatagaggcttattcatgatttgcccctctgagcctcagtgtcctcatctgtaagatggatttaatgagacctacaacttatagagctgttgcatcgatgaaaggtgatactgcgtgcaaagtgcttagcacagtatctggcacatgagtacctcactgagttttgacatggtgtgtatataccaggcttgttgatgagggcctgcagggaatacaccagaagcactccctgccctcacggagcttgtagagatgaagaaaacacaatgggagcacagcacaatagtggccactttgccrtgggatagatgggagccttcacataggaggcaacatgtgaactgggtcttgaaggatgaataggagttcatcaggtgggcaaagagaggaatgacattccagaccaagagaactgcatggacagaagcctgaagctgggacttatccaaggctacctggcctagaaatgggtgagcctgttgcctgatcccagatc

SEQ ID NO: 293290 - DNA, 595 bp, Homo sapiens
ctctttctccattcgaactgagttttttgagatcatggatttgctgagctgaactggcttcctgatcccatcgtcccaagcatctattatgtgagcacatagtgatcgacttcagtgtggcttgctgagtgaatacacatggattttaagaagcctggctttcgtcagttacaaaaggatgagctgtgctgttagggatcggcagggactcctcttctggagtatttgagtcaaagcagctcccacctctcatgcagggtgacagcctatccactactcccatctctaattctgccatttaattgtatttggacgcaacacacttagtctagaaaaccagtcatgcgtcttttcactaggactcccttgaccgagctctctggttttctaactttctttgctaatcaaggtcttaaaggggtaaaaagttcttggcctcctaaagcttaggagggacaagtgtgacttgaaggattaatctccacgctatgaattttaaagctctctggttccatgtgytgggaaaagccatcaaaatgctaatgactctgtggtcttgcctcctgcggaccttttctgcattagaatatattta

SEQ ID NO: 293291 - DNA, 570 bp, Homo sapiens
accattccttcccgaaggccttacctgtagatctatggatacaacaagtggtacagtggggtgagctagggggtgatggtgtttgacgacgtggtctctcctcagacctactgactctggaagactaaagctaggctcttcagagtcctaagagtctcagtttctcagggtctagagaaaattatacaagtagttgagggtcaattcattctctctctctttctcaccattaacctagttctgccttcccacattcatttaactcattgttttatagatccacttgtcttccctctgtccttctattcatccctgtgttcatccatctctccatccacccagtcattttcccatccctcaaccaattatagcctagttccttctttctaccattcaagttcttttataaatccrttcactacccatccatccatttctcctagcaactgtctatccatccagctattatttgcagagtcaggaactgagactcagagggagtaagataccacccatatctttgaggaactcatagtctggtaggtgggaaaaatcacatgagcaaaaaat

SEQ ID NO: 293292 - DNA, 617 bp, Homo sapiens
caggatctggcccacaggttatagtttgtggaaccctgactttaagaactattgagggagtgactttgggctaatgcagaggactctcagtgaatgtttttccctctgttgtgtggggacagagaatggagagagaacagaactgcctatccagaaagctgggttcaagccccatgtggctgtgcagcttctggcaagtctctgcacctctctgagcctcagcagcctcatctggagcataggaataaagatggcacccacctcccagtgtcrtcatgagggtcaaatgaggccctcatgggtcacaggcaatgcccttagcaatgagaaacactgggcaagtggtggctgacttaaacctctgcagggagagctctggccgtgactcctgggagccggtgaggtttagccaaagccccgagtggggaatgtgaggggctgaaccgcacaggggggatctttccaacagaagaggctaaaggaactggaggaagtcgagctgatcgcccatcgaggccaggggcctgacgctgctgccctgtttgaaaacagcaagcccctctacccccacccctgtaccacatgggaacagagctttgctgcataagggttgccag

SEQ ID NO: 293293 - DNA, 569 bp, Homo sapiens
acaaattaaatggaaaataatcattttcacaaaggttttccttttagatttttttgggacacattattatttgaattagattaaaattagcaataatggttgttatgatagtctcaatcatttagcctctacttactatcatataattttctgaattttttttaagagacagggtctcactatgttgcccaggctggactcaaactcctgggctcaagcaatcttcctgcctcagcctcccaagtagatgggactatagataggtgtgtgcctcctcattccatacagttaattttttgagtaattatttgaagatcaaatactggaggcttatatatttatttttcattcatttttaaagcatttctacaaaatctayagttgatctttaaagtggtgagacatgatatctgtatcaataatcccctcatatcaccatcataagtcagaagatgactaaaaatctattctgaaactgtaaaatagcaataggagctgcctttgcatttctagattcaggattgtctgttctgtaatttccattaaaacttttgaagtagagtcaggat

SEQ ID NO: 293294 - DNA, 446 bp, Homo sapiens
cgtacagcggagcgtgcaaggagtaggaaaagctgataccctctctcactgaggtctcaaagttaaatgattatcttgtagtttgtagtgatcagcgagattctccgtgtccaaggtgggctagtcaaagtgtgttcgtttttgaatgatggtatcttctggtacttcaaagtttctgctgttacttacaactccactcgtgcaagcttgacggaagttctgatttatgatcactcacattcttcgctcacttcttgaagtgaagtctggttattgtttttgcatascagtgttatgcctctgcctgaagttttctgccgaaaactttactcaggaggacatttttccatttctgacagttgtgtttggaaaagagtttcccagctattgccactttacttgagattgtgcttttagtattttggggatcactttgtttgcagttg

SEQ ID NO: 293295 - DNA, 603 bp, Homo sapiens
ttgaatgatcttttgtgtttcagtggtgtcakttgcagtatctcctgtttcctagtgaggttatttggattttctctcttcttttcttggttaatcttgctaatggtctatcaattttatttatcttttcaaagaaccagctttttctttcatttgtcttttgtattttgttgttgttgtttcaatttcatttagttctgctctgatcttggttattttctttcttctgctgtgtttaggtttggtttgttcttgtttctctagttccttgaggtgtgaccttagactgtcagtttgtgctctttcagtcattttgatgtaggcatttagggctatgaactttcctcttagcatcacctttgctgtatcccatagattttgataggttgtgtcattattgtcattcagttcgaagaattttttaatttccaccttgatttcgtttttggcccagtgcttatttagtagcaggttatttaattttcatatatttgcatggttttgaaggttccttttggagttgatttccacttttattccaccatggtctgagagggtgcttgatataattccagttttcttaaatgtatttaggctcgtttt

SEQ ID NO: 293296 - DNA, 801 bp, Homo sapiens
tttacatgtattgagataaatcaccaaggctttgcataaattttagaaattctttcttccctaatttctgaattcttcagccttcaagattcaactcagatgtcacctataaagcttttcctgactctcctaagctatagtttattggtcctttctatgtttacctatagactttttaatttaatataccattaaaacatatcacattgtgttataactatgtctaaatcacttactagactgtaagcttccagaaggcaggagtgatgttttgtttgtacagtgcctggcatataatgaatacccaatatatgctttgtggattagtkaacttattatttaaaaaagcaaaccacactttaagtaaataaattaggatatgattattttagaaaatattcactatacaaaataatttacaatgcatttaaaatttcattacatggcttgttttcccctccaggaacatgttcatattagtatcatttttgcatatgtgtgtacatatgtatgcattttccattgttcttctttagtaggggtgttactcgtcttttaaaatacatacgtgttattttgwgggtttggtttcagaccactgcagtaaagcaaatattgcaataaagtgagtcacacgagttttttggtttcccagcgcatagaagttatgatgacactatactatagtctattaagtgtacaatagaattgtgctcataaaaaagtatacacattaattttaaaatactttttctttttttwaaaaaaaaccgtttttttttttccttcagacggagtctc

SEQ ID NO: 293297 - DNA, 520 bp, Homo sapiens
ctgcgcctggctccttttgcactttcaagacagttataagcaacttatataagttataagttattttagaacaaattaagtaatacttatgcacagtctgaataacaacgaagttctaagtcacattcgtttctctttattttctcttggctttcttctatttgcatggcctcaagtatcacctcaatactcaatctgtaacccgtaagagcagcccaagcaaatgacttggcacatcttccaaattctagtgatgcatcaccaaatgcttgctggccattttccccgactgttttgacatctcaaactcacgatgtcccagacatcaccttcctggaaatgtatctatcctgctgtaatcatatgcacccccttcatggtgcatgtgatcaccatggcaccacccccatcccttttcttctaaactccttcctcttccaagtctcccagattcagarcctcaaagctgtctttgatttttgtgtctgaatcactatccttctagcttacaattcccatc

SEQ ID NO: 293298 - DNA, 550 bp, Homo sapiens
ttcatgtcacctctgctgtgtggatctccacctttctttctggaaacctcattctttcatccacaagagttgttcccatctcaagatattaaccctttagttttgggtgttcgtcaatatagaaaagtactgccttcccacattcttccttcatcccagttttcccaccctaactccctgttaggctagtcagtattgtcctttgggattccagaccctgcaaaacagtggaggatgtggtgaagagaggggcctttgtgattaccatatcagtgagagttgtaatcacccctttttttattctatcttgtttctctgtcttctccccaaaggacaggtataatctctcgaccaattgtcgagagacaatgtggtctcgacacctgaaaaggaagccaaatattttccccagcacctcatcatttgcaaagaatttatagggtagagttagtgtttacattattatgcagaccagtccttgcttatttattcsccatatcccttttcaaattgggcctgcttagacactgtggactggcaggttggagga

SEQ ID NO: 293299 - DNA, 455 bp, Homo sapiens
gtaactgatagcctcagaaggtgtaaggttaaataatgatctcatcagtataacaggagctggacagtattaatcagtggtccaattcaaaataaagccacactgctataagcaaagtaatgaaggcttattgtgacctggggctccttaatgacacagatttgattcccacttaatgggcaactgaataatgcagctgatagcacagaccagtggggaaggcagaccagaggggtacaggaggctgcctgggrtgaggcatctaaaggctgttatcacatgtcacatcatcagaccttgaatttgctattaaacagcaaataagcaaatatgccacttacagaagacctttccaaacttcaaggcatctactaaaattatatttatctctctttgatataccaatcacgcaactctaaactatttatgcagaaactaatctacatattaaattg

SEQ ID NO: 293300 - DNA, 561 bp, Homo sapiens
atcatacacacacacaaacatgtgcatctactcttttatgcacatataaatacatataggtattcaaatatattcaagtatttgttaattttactcaaatgggcacattttatatatactagtctgcatcttgattttttccttaactattaattcaaggagatttttgttgctcaattgctgtagctctatttcattctaatgactaccaaatactattgaatgatgtggctgtgctatgaattattttctttcttcttttttttttttttttgagacagagtctcgctgtgtcacccaggctggagtgcagtggcacatctccactcactgcaagctccgcctcccaggttcatggcattctcctgcctcagcctcccgattagctgggactacaggcacccaccaccacgcctggctaattatttttttaatttaatattgtaatttatttcataaattatgctgactcaactgattattattctggaaaaaataccactgtaccacatatatttacagaattaaagaaaaaaygaattaacaattttaatagaaaat

SEQ ID NO: 293301 - DNA, 402 bp, Homo sapiens
aggaacgtggctggtctgaaaacaaatctgtgccagtttgcctgtgactgaagctgcaatttcaacccattcaactacttcaaaatcaatggaaaattgatagatgtaaatgttatgaaattagaaaaagcaaaagatgttaaatgaaaayattttagtccaatatacactgggaacaggaataaaatccctggtgatttacataatttctatgccaggacatcattgtttaaaacttttttgtccattacattgctccatgagctacatggactaaagatctaaagatggagtaactgcccctggccccgtggtgtgaagcacaggaaagcctgtgcctgtgccttggactgcgggagacttgaatggtacaagcatagggtattgttggcgttgctagtc

SEQ ID NO: 293302 - DNA, 527 bp, Homo sapiens
tatttctgctgctagttcgtgtccagggtacaaaggccacagccagtcacctccccacgcccccacttgttccttttttcccagctgaccacttcacaacagcagaaccatttacaatgacactcttctgtgatgtgtagtggggattctctagggtcttgttggtgaccggtgatgttggggtcttcacgctcatgttactcrtgttactctgtggatataatacaggtccaaatttggaatctgctccttcaaggtcccctgttggggttttaggttaggattctaccagctactctgggagaggagaagaaaggattgggctcccagatattctcctcatgacttctgctatgacagtcctggttatattcctcatatcctgtggcccctggtgcctcctccttctgggtcatttacagtccttacgttggtcactgaaactgttgtattggctgattttctcttttctctctggccaggaatgacatatatcctttagactagagagtgaagtcatagaatct

SEQ ID NO: 293303 - DNA, 1101 bp, Homo sapiens
gaagggaagtgggatcctcccatttactgccttctgtgttgtgtgtgaaactattgacatggcttgcttaattaccagcagttactgataagacagactccaggctggctttgagattcagccacccyaacagcattcaggaaggcagcaacaaggtcaaaagatgcattcattgccctctgattgaatagtgcaggctttagagttggaagctgaggctctttgcagataagcagagactctgtggctgccaagtctataacaatttgaccatttttttcagggaaatctacaaaaatgccaaaatgtttacaaataggtacttcctgcttttgtacattgtatgaaaacatgggacatctcttactgttttggtttcattgtgagaacatacaaagcagaggttggagctcttctcctagcccctgctgaggagttggttgctttcttcaccacaaccacttttcccccacaataaagatctgtgttgattgtaaaaaatttggaaaatgcacaaaaacactaagataattctgccacccataactaawgaagggaagtgggatcctcccatttactgccttctgtgttgtgtgtgaaactattgacatggcttgcttaattaccagcagttactgataagacagactccaggctggctttgagattcagccaccccaacagcattcaggaaggcagcaacaaggtcaaaagatgcattcattgccctctgattgaatagtgcaggctttagagttggaagctgaggctctttgcagataagcagagactctgtggctgccaagtctataacaatttgaccatttttttcagggaaatctacaaaaatgccaaaatgtttacaaataggtacttcctgcttttgtacattgtatgaaaacatgggacatctcttactgttttggtttcattgtgagaacatacaaagcagaggwtggagctcttctcctagcccctgctgaggagttggttgctttcttcaccacaaccacttttcccccacaataaagatctgtgttgattgtaaaaaatttggaaaatgcacaaaaacactaagataattctgccacccataactaa

SEQ ID NO: 293304 - DNA, 561 bp, Homo sapiens
ggctttagagttggaagctgaggctctttgcagataagcagagactctgtggctgccaagtctataacaatttgaccatttttttcagggaaatctacaaaaatgccaaaatgtttacaaataggtacttcctgcttttgtacattgtatgaaaacatgggacatctcttactgttttggtttcattgtgagaacatacaaagcagaggttggagctcttctcctagcccctgctgaggagttggttgctttcttcaccacaaccacttttcccccacaataaagatctgtgttgattgtaaaaaatttggaaaatgcrcaaaaacactaagataattctgccacccataactaacatttttgcgtatatccttacagacttttttctaaatattgtgtgtgtgtgtatatatatatatataacaaaatagaattatttcgagcatattgctttgtcatcccttttttcccttcattaatggtatatcctatcaaggatactgatttgagaagctgcatatattctgtttatggctgtgtcataattcattaactcacatt

SEQ ID NO: 293305 - DNA, 468 bp, Homo sapiens
gacatcatccaattctgcccctggagtttgcagataaggaaactgaggctcagggtagccaasgtcatgcagcttaatagccagacaagacttagaactgggctacgcacaatactgggatttggtggctggagttggggagcggttagggtgtaggggaagaaatagagaaatgggcaactcgccttctctctcgtctctcagtattaaataggttaaatgctcagaaacactgattgtggatgaaagccccccacttaagtaaacaatctgaaatggagtggttagtcattgttgaatactgagtggcatttacacaacacagtggtcttgcgctaattatgagagtcagtagactgtgaccagttaacacaggctcaggaattccactcaacctttaaacaacccagaactctttgaaattccagaggaggctgttgaatttgaagctgagatttgcatttttga

SEQ ID NO: 293306 - DNA, 560 bp, Homo sapiens
cacctctcatgtggcagggtcctggaaagtcccgggagaaaaagctgaacagacaccatgcmggttcttagggaatttccatggtatttggaagataaacacaaatggttttcctgtgcctggcagcaggtcagccttaaacagcagggcatagtttgctttggaacgcagtgtaaggctctcaccagagggtcttaggataaggggtggagcctgaagagccttggaggagatggtggtgggctccgtctgagttggggagcctggggcaatgggaggataggctgccaatggtcacagcacccgcacctccctatgcaaccagccatccacgtatgtctttgagcctctctccacattttatcatctcacaccagaacccacattctggatctgtcttttaactcctcttctatcagcccctctttttagtttaaaaaaaagaccctatgaacatatgaatatatgtattgactatacagatggtccccagcttacaagggtttcacttaagatttttgactttatgatggttacaaagtgatatgcattcagtagaa

SEQ ID NO: 293307 - DNA, 468 bp, Homo sapiens
gacatcatccaattctgcccctggagtttgcagataaggaaactgaggctcagggtagccaacgtcatgcagcttaatagccagacaagacttagaactgggctacgcacaatactgggatttggtggctggagttggggagcggttagggtgtaggggaagaaatagagaaatgggcaactcgccttctctctcgtctctcagtattaaataggttaaatgctcagaaacactgattgtggatgaaagccccccacttaagtaaacaatctgaaatggagtggttagtcattgttgaatactgagtggcatttacacaacacagtggtcttgcgctaattatgagagtcagtagactgtgaccagttaacacaggctcaggaattccactcaacctttaaacaaccyagaactctttgaaattccagaggaggctgttgaatttgaagctgagatttgcatttttga

SEQ ID NO: 293308 - DNA, 550 bp, Homo sapiens
gatttctacctggacatccaggcattttcacacatcctctgaaacctaggtgggggctyccaaagctcaactcttgttttctgtgcacccacatgcccaacaccatgtggaagccaccaaggcttggggattgcactctctgaaacagttgctcaagctgtaccttggcctcttttagccatggctggagatggagtggctgggatacagggcaccatgtctcaaggctttacagagcagcagagtcctgggcctggcacacaaaaccattttttcctcctaggcctctgggcctgtgatgggaggggctgccatgatgatctctgaactatcctggagacattttcctcattatcttggctatttaacattcagcttctctttacttatgcaaatttctgcagccagcttgaacttctccccagaaaatggggttttcttttctactgcatggccaggctgcagattttccaaactttcatgttctacttcccttttaaacataagcttcaatttcagataatcgttttgcaaacacatatgactgtat

SEQ ID NO: 293309 - DNA, 549 bp, Homo sapiens
cctccccatgatccattcacctcccaccaggtttctccctcaacacatggggattacaatttgagatgagatttgggtggggacacagagtcaaaccatatcaattgcctcatcatcacttacctgatttgttccaacatctttttccagatcacctcacctcttatcttgctttcctccataacagagtgatcattatagccagcaaaaaggggtatcccttttttgcacaaatttctctagtagttacctatggtttagggaaaactaaaacaaatcttgcattgaaatactatataaactttgttaataagaatgattatcttattttaaatttatgcacttctttcaatggtgttttagcaatgcgaagcttatacctccagaatctcccacttatttttctcatatacaagctggatggagaagtaaatagcagaaaaataaattgatgatatataagctgtgggatagctcaggaccagagccctgaaggcagtgttctaagcatgrcctggattacttattgctaaagcaagtttcttggtc

SEQ ID NO: 293310 - DNA, 489 bp, Homo sapiens
atgccaacatataaaaccccaagtcaaaggtcaaatgctgcacttgacctccaagatacctgcttgggcctcttccaagtttatttcctttttttctgtcctgctctaaagctttttaataaacttccattcctgctctaaagcttgcctgrgtctcttcttctgtcttatgaccctcagttgaattcttgatcctgaggaagcaataattgaggttgctgcagaccccatgcagaatcacagacagtaacctggataacttccactggtaacagttatagctaaaggtggacagcaaagtgcagagtagggttattatctggaataacagagaccaatgacactttgccatatgtattagtcagctcaggctgccataataaagtaccacagattgggtgactcaaacaatagacatttcttttctcactgttttggagggcagaagtccatgatcaaggtgctggtgaatttggtttctggtgaggg

SEQ ID NO: 293311 - DNA, 489 bp, Homo sapiens
atgccaacatataaaaccccaagtcaaaggtcaaatgctgcacttgacctccaagatacctgcttgggcctcttccaagtttatttcctttttttctgtcctgctctaaagctttttaataaacttccattcctgctctaaagcttgcctgagtctcttcttctgtcttatgaccctcagttgaattcttgatcctgaggaagcaataattgaggttgctgcagaccccatgcagaatcacagacagtaacctggataacttccactggtaacagttatagctaaaggtggacagcaaagtgcagagtagggttattatctggaataacagagaccaatgacactttgccatrtgtattagtcagctcaggctgccataataaagtaccacagattgggtgactcaaacaatagacatttcttttctcactgttttggagggcagaagtccatgatcaaggtgctggtgaatttggtttctggtgaggg

SEQ ID NO: 293312 - DNA, 997 bp, Homo sapiens
atgccaacatataaaaccccaagtcaaaggtcaaatgctgcacttgacctccaagatacctgcttgggcctcttccaagtttatttcctttttttctgtcctgctctaaagctttttaataaacttccattcctgctctaaagcttgcctgagtctcttcttctgtcttatgaccctcagttgaattcttgatcctgaggaagcaataattgaggttgctgcagaccccatgcagaatcacagacagtaacctggataacttccactggtaacagttatagctaaaggtggacagcaaagtgcagagtagggttattatctggaataacagagaccaatgacactttgccatatgtattagtcagctcargctgccataataaagtaccacagattgggtgactcaaacaatagacatttcttttctcactgttttggagggcagaagtccatgatcaaggtgctggtgaatttggtttctggtgagggwaactgcacaggtatcaaatgcacagaaatttggacttccagtaggtggcctccagaggaactaccagagtgggcatgcgcttgtttcatatttcagctttgctttttgctatctatcaccagtgtctggatgattcagtagaagtgtaaacccaaaatgtcctgtctgcaatcaacagataacaaaccagcttcactgagctgctttagtacttactagggcaaagaccaaggacagtatcagagataataggtaagagaatatgtataggaaggtaatatgtgatatggatagctaccataaacwtagcttagcaaggaaagtatttcgtaaactgaaaagtattgatcctttgaggtatcatgacaagatagatggatttgaacttggttatatgagctcaagagtggcagagagaagaaatctctttagattaataggaacatcattttgatgtcagtggcagggtatattatggtaatccaggctatcagctcctttgttctt

SEQ ID NO: 293313 - DNA, 512 bp, Homo sapiens
tgttgactgctgagattgatccaggagctattcagtaggatggataatctgacctcactttctctcatgcttctcaccgaccaacccaagctggaaggaaaggcaatctgtaatccacacagggtaccctcagggcacagagcaagatggagaaggtgaagagtggatctgaaaaatgaaatgattcagcacacaggtattcttagtgrggacactcttttcatttaatccccgactttcttgtttaggttacagctgtaaatatgactaaaataatttttttttaactaagaaagagacaacaatgacagccttagcggagaaagttaaaaagtgaagtagctggaacttcatctacttcaagagtcctgtgagcaggttgcatctctatggttacaagtgaaagaaccagaaactggtgggttcatttttcacagagacatggtaagactctagggggaggcagaataccttcaagtcctaggtgacaaacagtgacttaaagttcggga

SEQ ID NO: 293314 - DNA, 535 bp, Homo sapiens
acaagaaaactttgaaactggttaggaaagcatggaatacttaccaaagcacctgacaaaagacaggatagatattagaaagtctagatatttgaagatgttggaaagtatataaaaaggagaactaatgggtttattggacattrtaaatatctcaaggacttatatttgaaatagaatacagttcttgtgcttttcagaggatcattttctgttgaattaatatatggtttagggttagaaaagtaatttcatcgttgacctctttcccttatcttcttcagtttccaaagctgtaaaatcaggtcatatacatgtgaaatattgccaaacacatatctatttgcattctaataatattgaggctgaaaaagtactataaatgctattgtatagcagtataacaaatgtctattaatttctttcaaaattgtatttcctaaattgtgttctgagaaattatattggtatagtttgtgtatttgtccacacccaaatctcaggttgaattgaaatctccagtgctggaggtggg

SEQ ID NO: 293315 - DNA, 535 bp, Homo sapiens
acaagaaaactttgaaactggttaggaaagcatggaatacttaccaaagcacctgacaaaagacaggatagatattagaaagtctagatatttgaagatgttggaaagtatataaaaaggagaactaatgggtttattggacattataaatatctcaaggacttatatttgaaatagaatacagttcttgtgcttttcagaggatcattttctgttgaattaatatatggtttagggttagaaaagtaatttcatckttgacctctttcccttatcttcttcagtttccaaagctgtaaaatcaggtcatatacatgtgaaatattgccaaacacatatctatttgcattctaataatattgaggctgaaaaagtactataaatgctattgtatagcagtataacaaatgtctattaatttctttcaaaattgtatttcctaaattgtgttctgagaaattatattggtatagtttgtgtatttgtccacacccaaatctcaggttgaattgaaatctccagtgctggaggtggg

SEQ ID NO: 293316 - DNA, 594 bp, Homo sapiens
tctttcatgaaaggcaggcatgttccatgaggctaccagacccagctacgtctgggagaatatacaggtgttaaattagctagaggaaatgttctccaggtcctgaaggctgatgcaccatatgaaatattacagcatttcttaaacaacaataaaaagcaagtgaagtaggggcaggaagagagaaagaaaaataaaaatgtctaggtagttcaactctaaattattttctaatcattcataagtttccatataccatgagarcaaatctctggaactatggatgagctttatttagtctgcatgcaaaattctccagattctgtcaggaattatctaaaccattactgagagcaagtctttctgtgccacaggctctgtgttttcaaggtggtggtgcattccagtttgagggcccaagcactgatctaccaatgatcttcacacccttatcatcactataccagcatgaggtaaaaactacattgtattattttatcatcctctttgtcttcctcagaccaaacacaatgatttttctataatgctaaatattgcattatatttatatttatatatcctccttcaaattaa

SEQ ID NO: 293317 - DNA, 594 bp, Homo sapiens
tctttcatgaaaggcaggcatgttccatgaggctaccagacccagctacgtctgggagaatatacaggtgttaaattagctagaggaaatgttctccaggtcctgaaggctgatgcaccatatgaaatattacagcatttcttaaacaacaataaaaagcaagtgaagtaggggcaggaagagagaaagaaaaataaaaatgtctaggtagttcaactctaaattattttctaatcattcataagtttccatataccatgagagcaaatctctggaactatggatgagctttatttagtctgcatgcaaaattctccagattctgtcaggaattatctaaaccattactgagagcaagtctttctgtgccacaggctctgtgttttcaaggtggtggtgcattccagtttgagggcccaagcactgatctaccaatgatcttcacacccttatcaycactataccagcatgaggtaaaaactacattgtattattttatcatcctctttgtcttcctcagaccaaacacaatgatttttctataatgctaaatattgcattatatttatatttatatatcctccttcaaattaa

SEQ ID NO: 293318 - DNA, 594 bp, Homo sapiens
tctttcatgaaaggcaggcatgttccatgaggctaccagacccagctacgtctgggagaatatacaggtgttaaattagctagaggaaatgttctccaggtcctgaaggctgatgcaccatatgaaatattacagcatttcttaaacaacaataaaaagcaagtgaagtaggggcaggaagagagaaagaaaaataaaaatgtctaggtagttcaactctaaattattttctaatcattcataagtttccatataccatgagagcaaatctctggaactatggatgagctttatttagtctgcatgcaaaattctccagattctgtcaggaattatctaaaccattactgagagcaagtctttctgtgccacaggctctgtgttttcaaggtggtggtgcattccagtttgagggcccaagcactgatctaccaatgatcttcacacccttatcatcactataccagcatgaggtaaaaactrcattgtattattttatcatcctctttgtcttcctcagaccaaacacaatgatttttctataatgctaaatattgcattatatttatatttatatatcctccttcaaattaa

SEQ ID NO: 293319 - DNA, 555 bp, Homo sapiens
atattaaaacatattatatataggagtgtagggagggtgcaaaccacaatataaaataaagctcaagttaatttattcttagtctggaaagttgaccaaactctgattctggattttttattttcaaaaaatayagtctgtggcaatgatttccaataattgtgttattttaacacatgaaaacaaatagaccacaatgctctattaaggatcaaacaaacaaaaaatgtctcatatatttatctagaggaatggctccttcttcaagcaataggtgtgcttattttcttgattaaaaaaataaagtaaaatatttagcagtattttatgtatgctaagaaacgcatttgcacattttgagatctctgcatttgagaggatttaaaaattaacgactggtcaggcagcagtcaggatgcaggtgtcatttcctcagaaagcctaaaattagtcatagttgttcatatggtcttcaaatcaattgagttatgtgcattattaacactacatgtgttatgctttattgatccttaaaatatcttcaaaaagatgacc

SEQ ID NO: 293320 - DNA, 555 bp, Homo sapiens
atattaaaacatattatatataggagtgtagggagggtgcaaaccacaatataaaataaagctcaagttaatttattcttagtctggaaagttgaccaaactctgattctggattttttattttcaaaaaatacagtctgtggcaatgatttccaataattgtgttattttaacacatgaaaacaaatagaccacaatgctctattaaggatcaaacaaacaaaaaatrtctcatatatttatctagaggaatggctccttcttcaagcaataggtgtgcttattttcttgattaaaaaaataaagtaaaatatttagcagtattttatgtatgctaagaaacgcatttgcacattttgagatctctgcatttgagaggatttaaaaattaacgactggtcaggcagcagtcaggatgcaggtgtcatttcctcagaaagcctaaaattagtcatagttgttcatatggtcttcaaatcaattgagttatgtgcattattaacactacatgtgttatgctttattgatccttaaaatatcttcaaaaagatgacc

SEQ ID NO: 293321 - DNA, 555 bp, Homo sapiens
atattaaaacatattatatataggagtgtagggagggtgcaaaccacaatataaaataaagctcaagttaatttattcttagtctggaaagttgaccaaactctgattctggattttttattttcaaaaaatacagtctgtggcaatgatttccaataattgtgttattttaacacatgaaaacaaatagaccacaatgctctattaaggatcaaacaaacaaaaaatgtctcatatatttatctagaggaatggctccttcttcaagcaataggtgtgcttattttcttgattaaaaaaataaagtaaaatatttagcagtattttatgtatgctaagaaacgcatttgcacattttgagatctctgcatttgagaggatttaaaaattaacgactggtcaggcagcagtcaggatgcaggtgtcatttcctcagaaagcctaaaattagtcatagttgttcatatggtcttcaaatcaattgagttatgtgcattattaayactacatgtgttatgctttattgatccttaaaatatcttcaaaaagatgacc

SEQ ID NO: 293322 - DNA, 530 bp, Homo sapiens
atttgaaatctttggaattctaaaaaacagcatctttttaaagaattrcacaacaaatgaggaaaagactgtccagggactaaattgttccaaattgaagatattgactcagcagaaatggagtccatgctcaaactcaagtcatgctaatttaagagaataaggttaaaatcaaagtaaaataaaataaaataaaataaagaagaagaaacacaaagaaagggatatttgtaaatgtatccttgaaaactatcacaaaatcttttatcataaatacaaaatgattgcaaaactacctctaaattgctttaagattaatacaaaaattgagtgactcatgcaaaataaaggagatgaaactgctctagcttgactcagagttacactctcagggtgaagtaatgataaatactgctaaatatatttagtttagaagaaaaatcagcagctagtattatttcttttgaggataggtgaagggacagaatggccatctgggaggaaaatgtctgaaaagggacatttatcag

SEQ ID NO: 293323 - DNA, 575 bp, Homo sapiens
catgcagcagtcaccatatgggccacaaggagcagggcacagtatcgtttccttctctgagagaatcccagctgtgaggactcaagacaattccctcagcaggacatagtacctttgagaactgcaggagatcctagtggtaaagtatttagtgtgtctaaaatgtgaatggcagttgttgggatccacttgcctactttcccgtcrtagggagaaattcctcctagatcccagctgatcccagttaggggatggtggttggaggttacacatttccttttattctctctgtggccatccatagtttcagtgctcatcagggtttctgttacttctctgatgcaccccaacactctccttcagttatttttgtttaagtataggtgtttattcattgttctggttgtcttttccagggggacatgtgctaggggcatctaagttggccatcttgctgatgtcactctcctccacgtgattgctggcaattacaaccattatgtcatgtacatcaaacaaccaagtggaaatggattgagtttgtgtttgtgttgggacagaggttacagttggtg

SEQ ID NO: 293324 - DNA, 555 bp, Homo sapiens
attaattttcattgaggtgatactggaagttaattgatttccatttcagtggtgaatgagagcagaaaarcttgaagtctgagagggaagtgggcaggtagaaactctttattgggataaaggagactagaacacatttttatgtagagaaagttttgtgtgctaagaaaaggattactgaagtgattggcaacaagttaaggctgcccgggaaagcacactgatcgtaacagtggcaaaggcaagaggaacaggtttgaatagcatgttcttccaatataaagaaatagtagcataggcctgtcttgttattttgagaaaagccttaatgaaaagcttactactccctgggggagctggcactccttttcacagaattctataagaacttatcctcctactattattttaaacgctgtagaatctacagattgaatgtgtcaagccacagtgtttttttttttttttggtgccaagttatgtgaaggtcaaaagtcaactccgtaacttcatcttatatctgaaacagagggactctcaacttctttttgtata

SEQ ID NO: 293325 - DNA, 555 bp, Homo sapiens
attaattttcattgaggtgatactggaagttaattgatttccatttcagtggtgaatgagagcagaaaaacttgaagtctgagagggaagtgggcaggtagaaactctttattgggataaaggagactagaacacatttttatgtagagaaagttttgtgtgctaagaaaaggattactgaagtgattggcaacaagttaaggctgcccgggaaagcacactgatcgtaacagtggcaaaggcaagaggaayaggtttgaatagcatgttcttccaatataaagaaatagtagcataggcctgtcttgttattttgagaaaagccttaatgaaaagcttactactccctgggggagctggcactccttttcacagaattctataagaacttatcctcctactattattttaaacgctgtagaatctacagattgaatgtgtcaagccacagtgtttttttttttttttggtgccaagttatgtgaaggtcaaaagtcaactccgtaacttcatcttatatctgaaacagagggactctcaacttctttttgtata

SEQ ID NO: 293326 - DNA, 555 bp, Homo sapiens
attaattttcattgaggtgatactggaagttaattgatttccatttcagtggtgaatgagagcagaaaaacttgaagtctgagagggaagtgggcaggtagaaactctttattgggataaaggagactagaacacatttttatgtagagaaagttttgtgtgctaagaaaaggattactgaagtgattggcaacaagttaaggctgcccgggaaagcacactgatcgtaacagtggcaaaggcaagaggaacaggtttgaatagcatgttcttccaatataaagaaatagtagcatmggcctgtcttgttattttgagaaaagccttaatgaaaagcttactactccctgggggagctggcactccttttcacagaattctataagaacttatcctcctactattattttaaacgctgtagaatctacagattgaatgtgtcaagccacagtgtttttttttttttttggtgccaagttatgtgaaggtcaaaagtcaactccgtaacttcatcttatatctgaaacagagggactctcaacttctttttgtata

SEQ ID NO: 293327 - DNA, 565 bp, Homo sapiens
atctgtattagtccattctcacactgctataaagacatacctgagactgggtaatttataaagaaaagtggttttcttggctcatggtcctatgggctgtacaggcttctgcttctgggaaggcctcaggaagcttacaattatgctgaaagggcaaaggggaagcaagcatgtcttacatgggcagcaggaggaaaagagagcaaagggagaagtgctacacacttccaaacaaccagatctcatgagaactcactatcacaaaaacagcaagggggaaatccaccccattatccaatcacctccaaccaggcccctcacccaacattggggattacaattcaacatgagatttgggaagggacagagagccaaacaatattactattctaatgggtatgatgtaatatgtcattgtggttytgatttgcatttcacttaggattaatgatgctgagcaccatttcgtgtacctgttggtcatttttgtcttttttggaaaaatatctattcagatatttggcctattttttaattgggtttttattctccagtattgagtttt

SEQ ID NO: 293328 - DNA, 521 bp, Homo sapiens
ttttagtagtttgtgtcttattttttgttgttcttctagataaagctttgttgattttgttgctcttctcaaagaaccaatttatattttcaacaattttctctattgctttgctgtttttctgtttcattgatttctgcagtaatttgtaccattccttttactctttatgctttctgtggtcttcatttgctcattttttctagttttttaaggtagaatctcaggtaattgatttgagagttttttcactctctgttatgtaggttcaaatgtgtaagtttcttctamgtacttctttagctgcttcccataaattttaacatgttgtatttttattttaattcacttgaaatattttctaatttctcctataagtttattatttgataatgtattattttaacatttgctgattaatctccaaatatttggtgatatcccagttttttgttggtttctaagttaatttaattatgggtaaaaaacatgctttttattatttcaatcgtcttagtgta

SEQ ID NO: 293329 - DNA, 611 bp, Homo sapiens
tcacaatcttcaatatatttgcaaggttttagaaaccacaatacaggataacagaatttaaatgtaatgcatctctttttagttaaaatctagtttttcaaccacagtgaatatcttcaaaaacaactggactaatacattttttaaaaacttgtactttcccaatatttattttcctctcttagaaaacgatgcaaaaatcaaaagacactgctctttatcttctctgctttaatttctgcaatattaacaatattatatttgccaactatgtcataaaggaactatttaaaaaaaaaaccctaaagaattcccaaaggattatcccttcaktcaccagtttaaaattgttttctttccttgtggttaaatattgatgtgtcgctgctatataagaatcatcattatgttaactgttctaattatagactgtcttccatattttccaacactagtgctactttgtttgaccaattaaaaatttggattactcagcagcaagctgtttatgaggttgattgctctgtcatctcatttcacaattcaactttttaatttgaggctatcagatatcataactgagaatgtgaatgtgtcaatagtctaatcag

SEQ ID NO: 293330 - DNA, 1129 bp, Homo sapiens
ttgccacttcaagctcttcactttgaaaagtaaacccaaagaggtagcacttttcaagtccaaacaggatttggcaattttaaaaaaatttaatacttattttgttattcgatttcaacaaatataagcctcctttcctctgacaatgtcactgctagacaaatttttgacatgtattaataattctaattcacatgtaaactgacatttcatctgtttctcaaattagagtgaatcaaatctaattgaggagattcctgagttcatttttcacrtaatgtgacagaggctcatctgagttttgcttccaaatctaggcctggaggattgccagtgttgaggttaactacaagtacaggccaagcttcacattaggtgtcgtggcagcaacatccaaagagagaactgtgtgtgctcatagctgaagtggacaccctgccacaaaggcctcaaatcgggcacccttccaggtttggctgtaggcacagattcttcttctctctagcatctatttcttcagtctactttactaaatggwtctgtaacaaatattagtttcttctcatattttgtgatcttgatacttttgaagagtactggttaatttgtttttttgtagaattcgcctcagtttgggttttactgatgttttcttgctcttaaatgtaggttatggattactggaaagtataccacagagatgatgtgctgttttttccaaaagcattgtattaagtggtacataatgttcatatgcgttaatggtgatgttaatctcaatcatttgcctgaagcagtgtcttttagaatcctctgctgtagtcactgtttttctgtttgtaattactaaaagctttgggagagatattttgagacaatacaaatatcttgtttatgcttaaactttcacccactcattttattatctaatgaatgacctcatttgwtgtaaatattactatgaggtttaatggtgattttatatttctctcatttcttttatatgtgttaactggaattcttcaataaagaagagctgttgctctttctttgttcatttattttattaacttataaatattattttattttttggaatgtaatcaatgccatcattatttattttatt

SEQ ID NO: 293331 - DNA, 613 bp, Homo sapiens
gatgaatgatggaccccatcatattcccatttaattcactgatatggcccctacaaaaatcagggtgatcacagcaaacaatagtggacttaccataaaactgaccaagtggtagtgttaatcatagctgctatgttgtatgtagtactgctaacagaacaaatcaacacagctgctatgaaactggaaaatgaattttttaaagttgttatcaggagaaaggactgaaagcccttagcatttacctgattggacagcagtgcaagttcagagagttgccccaggtctatgttaactctgctgctttctgttgcaatagagtctaaagggacactgcacagaatctgctggtccacgagttaaatgacattatattaatcaaactagtgagcatgaagtagcaaatgctccagatgttctgacaagccatatgtgaactgcaaggtggataaaccatagaaaatttagtctctactaaaaatataaaaattagccaggcctggtggtgggcacctgtaatcccagctactcagggggcgaggcaggagaatcacagggtgaayctggggggtggaggttgcagtaagccaagatcatgctacttcactccagt

SEQ ID NO: 293332 - DNA, 1125 bp, Homo sapiens
tccagtgaggttcaatgaatatctgagcattcctgaggctgaatacaatgcagcctttctcaaaaagatgggggaaggtatgcatgaaaagaactcttaaaatgaactttggatactttgcaattttgccaaaggtcagccatgacattggcaataaaacaytggaaataatatgattataataataatattacagatgagcaaactcccctgggtgccctggtgggaaaaatacaataatactagaatctcctggcagtcaaactagttaatttactgaatgctttttgtgataattttgctgtaaaatagacagtagattatattgaacaacagtacctacaatttccaactgcacagtgttttggtttgttataatcaacgggaggcccaaatgatggctgagttcaggctggtacagccacctgacagtaatgctgaaagtcatctctcagtaagccctaattgttcaatgagagcccatgagagataatgccaaaaaagccttatacacaaaaagcaactgactcccagacaggtagggggcaaaaataagtccattwtccagtgaggttcaatgaatatctgagcattcctgaggctgaatacaatgcagcctttctcaaaaagatgggggaaggtatgcatgaaaagaactcttaaaatgaactttggatactttgcaattttgccaaaggtcagccatgacattggcaataaaacactggaaataatatgattataataataatattacagatgagcaaactcccctgggtgccctggtgggaaaaatacaataatactagaatctcctggcagtcaaactagttaatttactgaatgctttttgtgataattttgctgtaaaatagacagtagattatattgaacaacagtacctacaatttccaactgcacagtgttttggtttgttataatcaacgggaggcccaaatgatggctgagttcaggctggtacagccacctgacagtaatgctgaaagtcatctctcagtaagccctaattgttcaatgagagcccawgagagataatgccaaaaaagccttatacacaaaaagcaactgactcccagacaggtagggggcaaaaataagtccatt

SEQ ID NO: 293333 - DNA, 426 bp, Homo sapiens
gcttaagcaatcttggtatccacagtaaatacactgaggggatgaaagctaaacattttagttaaatgagcaggagtggctacatagatgggcaaactttaccagtgcagatgggatggtgagaagtcagaaataagaaactagggcctggctctggttgttgttcaggctaaaaccagtaaagtgaatacaggaggacacccagcagtcttgtgcatgggatacaagagccaggatactcaggactgacacaagctgtgctaccaacagtcactttttcatgagcttgctcacaggggtcctggaaggcgagttgtgaatgcctacagtgtgctaagcactttcacacatctttatactcaggtgaaatgaacygtattccccccctttatcactgatgatacaggttagattgttaacaaaccc

SEQ ID NO: 293334 - DNA, 473 bp, Homo sapiens
gtcatgttgagcctcattcaacagcacagaataagccaattttatacaagacacaggtatatggaaacacaaataactttaatgatttgtggtaaaaaagaaggaagcttgaatctatgattgaaaaataaaaaataattacatgtatatctacacagaaagtacaatcacaagtttcaagagcttaacacaaactaactgctgtcaaatatttaacaaaagcaaagatgaaactgcttaacagtcagggaaaaacaacaaaaagaagggaggggtgataaaccaagaaaatgaatgacaaaaastaagagacctcataggtgtctttacaatcaggaattcagatgcaaggaacagacacaaacctgtctaaaatgtgacctatgaggcaacagaaagtgacttaaagtctgttataaataaaaaatgacaaccaaaatcctagagagtcttaaattatttaatccagacat

SEQ ID NO: 293335 - DNA, 622 bp, Homo sapiens
tgcatgctttcacctttcacactataacagcagtttagtagttagagattatatggccctcagttatccttctggccctttacggaaaatgtttgctgaccattgacgtaggtcaaaaagttcagtctctcaggctcagagcagagtggggaagggtggagaagagatctggagtggcaaacaaaagctattcagcataaaaagtaatttcacgttatgacagtatgtattagaagtagattgctagaagtgtgattgctggatcaatggtaaatggctgtgtaaatttcctagatatcaccaagctcaccttcataggtattataccatttgacgttgtcactggcaacataggagtggtcctgtttccccacagcctgtccaacagamtatatccaatatgtataggctctttgcctatctggtaggtaagaagtggtatcacaatatatggctgaatttgcatctcttattatgaataaaattgaacaagtttttgaatatgcaggggaccttttcatttcttctctaaactactatttgtttatggaagatatatatttttttcattggagtacaacatattgtaaagtgcactacatatgtaaatatatagctcaat

SEQ ID NO: 293336 - DNA, 626 bp, Homo sapiens
tctacaaacaaaattgcacagcatatattctttgtctgrtttatttcactcatcatatgtctgtgagctttatccatattgttggtgaagtttcctcttttttattccaatatgataactaattttagaaatacacaatttatttattgattatattgttagtagccatttaaatatttcctttttgcatttaagactagtactgctatagacattcgtgtacatgtactttggtgcatatatgtatacatttctataggaaatatacctagcattgaacttgtagatcatgaagtatgactttggctttagtcagtactgccaaagcttttccaaattggttatatcaattttcactctcttcaatagtatattagagttccagttgctacatgttcttgctagtacttggtgtggtcagaatttgacatttaggcctataaattttcatatccacgtatgaaaaaattaactgaagtctctagcacagtccactcacaaaaatttattacagatgaattgtagatataagtgtgcttccaaaaacccttcatgagaaaagatttatggtccacaccagagtaagttatgcctttctttataattcacttcagtacattatctat

SEQ ID NO: 293337 - DNA, 603 bp, Homo sapiens
taggcaaaatgccagtgacattcacagaagacccacaacatttttgagaaaaatatataagcaaaaacattgccagcatgggctgaagtgaacagaagcagtacaaaatgcatcgcatctcccaattttctgctgtcttgaacagaaatgtctgcatctgttattttatgtctgcctcatcattgtttgttgggtatcagataacttgtctttctgggttcacaagttcacagatatagaggcgctgtactcctagagctgtacttaaagaactacactcaaggamattccttcatatacttggacataatttagatgaggagatactggactttcatctgatgccataatggtgtgagttttacagagacatgagagatggtacacatatttttcatgtggaagaaatgagaatcactgggggccagagggaagacaatagtaggttgcttataaattgaatccctgtcttccctaccttcttgtattcagtcccatgtgtaactccttcccctagagtatgggctggacttcattactctcttccaaagaacagaacatggcaaaagtgatggatgccaattctgaaataaggttacaaaa

SEQ ID NO: 293338 - DNA, 602 bp, Homo sapiens
caaaataatcattcttcagtgaaggcgttaatgttgcacagatggtagcaaaggactttcctttgatttttaataagggactggttcgtcaaagagatttctcaacttctgttgtgaaacctataatagagaataacttgaaaggcacacagtgtacatgattataatcctttgatgtagattaatgatagctaaatcacattttctaattgcctcttttttctatagttgattattaaattgtaagaaaaaacttggccaagcagctccttagtaacacatgcatctctgttmctcaatattttgtgatgtactctgaaattcagagaatggaattcttttaaatattatcattaaggaattttctgtgcagaggaaggaccagtatttttcttcatgaaatgaatatgttgatttatcatgctgagaagcattcacccataaaaattgttggtagctgttaataatgtgatttatgttccagcaatagtgttttgctttttacagttttatcttagaatattatcttagatattcagaatatctaataaaattcagaatatacagtcatctttgttgtgctccttgcttagttatgcaag

SEQ ID NO: 293339 - DNA, 209 bp, Homo sapiens
tgccatcctgaccttccccttttcttcccccacacccttctaccaagttctctagcacaaattcttaaaatggcaatgaytactcataatttatgccacagcaatgacttactgtggaatagaagaatggcttgaagctggcatgccatgatttattagtgatgtagacataatagataatgttttgaatgcaacttacaaggcatggt

SEQ ID NO: 293340 - DNA, 1098 bp, Homo sapiens
agggtactttttcttagataaaatcattagtttttcttaagttcatcaaaaatggggttaaaaaatctagaaaaaaaattaaaaaggtaaacatgctgcttaaaatgaatcacaaacagagaagtctcaaaatgaatgaatgataaggagttttttaaatttttaaaagattagaggttgcttctcaaagcagatttccaacagccactaaattttacttaaaacataaaaattctaaagagaaaggagagaaattcaaaccscttcctttagggaagcagtgagctgcttccctaaagcagctcactggagatcactgatttaaagggttcccaatgacgctaccaagcacttgtgcttgtttcagaggcaagtatgtatcataaagaatactctaatgttccttcatgcattcagcacacactgaacactcagtatgtgccaaacactgttctcaatgctagggctactatagtaaacagaagagccagcccctgccctcacacagtttatattctagttgagaggggaaaacaacacaagaaaataaaaatacattacatcaaatgagaaatagtawcataactaggagggactaattaatagggattgatgagaacagatggagtggcattgctagtcacagcctctwagctggatcagactgcattggttgagacaagcatcacaaaaaaagaagtggtagctgtatttgaaaatgacatgaataccaattgatgaaaggaaactgttttacaaaccaaatcaacttctaactacagattaaattaataacataattaagatcttgataaatcaggcattctaccataaaaccttcaaagcacaaagccataaaaccatttttataaactaattttaatccatcagttgcttcataaagagtttcaataaatatacccactgttctttcttaacatcttatttaaaaataattatagtcacaggaagtttcaaaggaatgtacagagatgtcccacgtacttttccttcagtgtccaatgttaacatctaacaccgctataacataataccaacaaattgagttcaatacgatccatagagcttattcagatt

SEQ ID NO: 293341 - DNA, 1660 bp, Homo sapiens
cataactaggagggactaattaatagggattgatgagaacagatggagtggcattgctagtcacagcctcttagctggatcagactgcattggttgagacaagcatcacaaraaaagaagtggtagctgtatttgaaaatgacatgaataccaattgatgaaaggaaactgttttacaaaccaaatcaacttctaactacagattaaattaataacataattaagatcttgataaatcaggcattctaccataaaaccttcaaagcacaaagccataaaaccatttttataaactaattttaatccatcagttgcttcataaagagtttcaataaatatacccactgttctttcttaacatcttatttaaaaataattatagtcacaggaagtttcaaaggaatgtacagagatgtcccacgtacttttccttcagtgtccaatgttaacatctaacaccgctataacataataccaacaaattgagttcaatacgatccatagagcttattcagattwcataactaggagggactaattaatagggattgatgagaacagatggagtggcattgctagtcacagcctcttagctggatcagactgcattggttgagacaagcatcacaaaaaaagaagtggtagctgtatttgaaaatgacatgaataccaattgatgaaaggaaactgttttacaaaccaaatcaacttcwaactacagattaaattaataacataattaagatcttgataaatcaggcattctaccataaaaccttcaaagcacaaagccataaaaccatttttataaactaattttaatccatcagttgcttcataaagagtttcaataaatatacccactgttctttcttaacatcttatttaaaaataattatagtcacaggaagtttcaaaggaatgtacagagatgtcccacgtacttttccttcagtgtccaatgttaacatctaacaccgctataacataataccaacaaattgagttcaatacgatccatagagcttattcagattwtgtactgtcaaactcagtatattttttagccttaagaattactgcaagctcactgagcattttctgttgttctgaagacagcccactgcctataagtacaagaggtccatccctacgctgcccagtgttcatctgttaatataaaaggagataccagtgttaaaaacattagacgactagacaaagacattaaacagactgttacttgatataagcttgaatttcattacttagtttactctaataattttcaattatttccattgaatctacacccagaaccttttaaataawttttttctctttatttttccctcaagaaaatgtcaattgtgatagctctctatacccagggcatctcatttcttcaattttaaattgggtctctctagggttttacttcattcagtcaccagtaagtctttttcttttcccaagtaacttaaaatatccacttaaaatcagcaattccctattccacctccactaacttgtcccaatagagttaaaatcaaacttgtttagtttaaactgagattatctgaaaaatcaaagaatgccaaggcttctagaacagtgctgacctcaaagatagaaaacaaattagcatcaaaatagtaac

SEQ ID NO: 293342 - DNA, 622 bp, Homo sapiens
tgtactgtcaaactcagtatattttttagccttaagaattactgcaagctcactgagcattttctgttgttctgaagacagcccactgcctataagtacaagaggtccatccctacgctgcccagtgttcatctgttaatataaaaggagataccagtgttaaaaacattagacgactagacaaagacattaaacagactgttacttgatataagcttgaatttcattacttagtttactctaataattttcaattatttccattgaatctacacccagaaccttttaaataaattttttctctttatttttccctcaagaaaatgtcaaytgtgatagctctctatacccagggcatctcatttcttcaattttaaattgggtctctctagggttttacttcattcagtcaccagtaagtctttttcttttcccaagtaacttaaaatatccacttaaaatcagcaattccctattccacctccactaacttgtcccaatagagttaaaatcaaacttgtttagtttaaactgagattatctgaaaaatcaaagaatgccaaggcttctagaacagtgctgacctcaaagatagaaaacaaattagcatcaaaatagtaac

SEQ ID NO: 293343 - DNA, 676 bp, Homo sapiens
accatttgagggctacatgaggagagagaaagttgagatttgggagttacaaattcaggcaagtgaacctgaacctcatatagggcatggtcttcagagtccaaaaaaaaaaaaaaagcagcagcagcagctacccatggaagcttcttgcctctgacccagtccacttttccagtctacatcggggccttagcttcttaaaagctgctctggcagcagaactgtgcacctgggaagacatgctcaatcatgcctgcatatgtgctgacccatgggtcagatataatatgatgccaggtgtattttgggaaaaagggaagaaaagggataaactgaactagcctttggggyttattactacaggggagctggatgaggaggtacttaggagatgattcaccttggaagaagctggggaaagtgtttagggagacgaggaagactgagaaatctctgccttcccagaactcagcaacccagctcttatgtgatgtggagaagcagcaatgctggtgattcatgaacaggaggaggaaaggacttgaaagggaccagcatctacaatctagttcgccagcttgcactgaatcttactgaatacaacctgctagttataacagagaaggccagggtgagaactaactattcaagagagcaagattctgtaatcttccct

SEQ ID NO: 293344 - DNA, 499 bp, Homo sapiens
gcaccactgcactccagcctgggggacagagcgagactcctctcaaaaacaagataaaaataataataacaataataataataataatatctgaagatatctgcaatagatatagacatctggatacaggaagctaaaaaattcttaaatagactcaactcaaaaatctcttcccaaggyacatcatcaaactgtcaaaaaaagataaagatttctaaaaacaagagaaaagtgtcaagtctcatataaaagaatccctatcagactaacagaagatttctcaacagaaaacttacataaatccagtagaaactggaatgatatactcaaagtgcagaaaaaaaaaacctgtcagccaagaatactacatgcaacaaatctattcttcaaaaccgaagaagaaataaagtctttcccagacaagcaaaaactgacggaattcatcaccattagatcagtgctaaaagaaacgcttaagagagcctgtcttagtccattt

SEQ ID NO: 293345 - DNA, 499 bp, Homo sapiens
gcaccactgcactccagcctgggggacagagcgagactcctctcaaaaacaagataaaaataataataacaataataataataataatatctgaagatatctgcaatagatatagacatctggatacaggaagctaaaaaattcttaaatagactcaactcaaaaatctcttcccaaggcacatcatcaaactgtcaaaaaaagataaagatttctaaaaacaagagaaaagtgtcaagtctcatataaaagaatccctatcagactaacagaagatttctcaacagaaaacttacataaatccagtagaaactggaatgatatactcaaagtgcagaaaaaaaaaacctgtcagccaagaatactacatgcaacaaatctattcttcaaaaccgaagaagaaataaagtctttcccagacaagcaaaaactgayggaattcatcaccattagatcagtgctaaaagaaacgcttaagagagcctgtcttagtccattt

SEQ ID NO: 293346 - DNA, 570 bp, Homo sapiens
gaagtcccttttcctcttctgtcaaacggggtaatggtgtctatactactgggtgattgttaggattatatgatgaatctggattatacagacttttttctagaaaatataaccaaagcaatatatttttctcaatgatgtgagtaaaatcagggaaggaaagatgatcatggtgtttggtttaagaataaagagaacacaacattatatttatttttatgattgtattttttggtttgactcggcttccaaatttcccaaattaatacctaaaaatggtatgtgtgtattgtgtgtgtgtatacctatactgtattagtctgttctcaagctgttaataaagacatacccaagactgggtaatttatgaaggaaagaggtctaactgactcacagttccacacsgctggggaggcctcacaatcatggcggaaggtgaatgaggagcaaggtcacttcttacatggcagcaggcaagaaagcttgtgtggaggaatgcccgtttataaaaccatcagatctcatgagacttattcactatcacaagaacagtatgggggaagccacccc

SEQ ID NO: 293347 - DNA, 593 bp, Homo sapiens
tcaaagattaaactaacattggcccaagcagaaaagaaaaaaacaggcaagaacctaggaaagtcaaaaagatagagtgtctttttacctccaaatgactgcactagttctgaggaagggttcttacccaggctgaagggtgaaatgacagatgtagagttcakaatatagataggaacaaagataatcaaggtttaggagaaagtcaaaacctaattcaagaaatctaaggaatacgataaaatgatacaaaatctaaaaaactaaatagcaattttaagaaagaactaaacttatttgatagagctgaaatatttagtagaattttgtaatacaattgcaagtattaacagtaaaatagaactaattgagaaaagaatttcacagctggaaggctggttctccagatggaattagtcagacaaaaataaagaaaaaagaatgaacaaaacctctgagaaatatgggattatgtaaaaagactgaatctgtgactcactggtgtccctgaaaaagaaagtaagaaagcaaacaatttggtaaacatatttgagggcatcctcagggaaattttccccaatttaacaaatgaa

SEQ ID NO: 293348 - DNA, 536 bp, Homo sapiens
acaccctgcttctccagcagcctgaaaaccaggcattttacctttctgttatttgagactgagggctcctccctacttgctacaaggtagcaagtcccatttgtctataagttgtgggggtgtgttgggccacctaatctgctgtttaggtacctcccaggggaacatggggatttgctttcctgtagcgttaagacagaagagagacgagagactgctgggctggaaattctagttcagtatgggtcatctgactactagaggcaggggtgagtggarttacctgttctgccttgctggtgcttcctgaggcaacaggaggctgcactccttggcagaatttaggcagaattaggactactacttctagcaggtgtggcctgactgctacaaaaggcggtggtgggtggagtcacccaccctgaggtccaggtgtttcccagaacaagaggatctgttcactagctgatttcagacagaagcgtgacccctggaatagaagccttatcaggctttgcctttctggctaccaatgg

SEQ ID NO: 293349 - DNA, 594 bp, Homo sapiens
cactaatccttttgtttcctctcagtgagagcagcactcatgagctgcttctagtttgctgtcttgacccaatgcccattccataatctgttattgaaggataagaacatatgaarcaaagttcataggcttaacacattaatggggcttcacaattaatttgtacttaaactttaatttaatatattttgataaaagaaatattaccatttctagaatctgtaattaataattataccttttcactagcatatattccatattgtatatttttaactcgttacatattatacagtaatttttgctgtttgctaataatacatttcatgtaattttttcaaccattgaacataaagattctacttttgctaccaagaaaacaacattaatagctaatgatgctgtaacactaatatgtagtttatgctacatttaatatgctaagtttaattaaaacatatagctatggtatgaaaatactataactactaatggtatgaataaagacagaaaccattttaagttttattctaccttttttttataatatataaaatatcctgcattaacacttttatctattcaaataggtat

SEQ ID NO: 293350 - DNA, 536 bp, Homo sapiens
ggacacatatacacacaaacatacacacacaagcacacacacatttacatgttttctattttcttgcaatatgagtatgtttttatatacttatttgtatttgtccttatcttttctgaactgtatttttgtattatttgacaattttactactgggtgatttaactgttctttgttgattcaagatctttatatatgattgatattattcagtcatcagttacatgtattgtaaaattttatacaataattacttgcctttgttacttgttgactgtgctttttttaaaaaaaatgagaaataatattggtaaaattttaaagcttgacaacagcatatacatacatacgtgtgtgtatatatatatacacatatatctgtttgtatgttatatgcatattgatggaagtataataaattctacttcaagggaaattttaatcacaatagccatcaaaagctaaattgtatgcacatttgytaagtatttttatattatccaatgttgcatataaaaatacaatatgcatatggt

SEQ ID NO: 293351 - DNA, 543 bp, Homo sapiens
aaattttaatcacaatagccatcaaaagctaaattgtatgcacatttgctaagtatttttatattatccaatgttgcatataaaaatacaatatgcatatggttgcaatccaaatgagcatcaatagataaattgttaattgtttcatgcataatgtagaatacaatgcgttctttataaaacttatgtagatctataaatatttaaaatctaagtacaataaaattaacttaaaggaaatctaaacagaaagcaatatacaaaatataaccctcttttcataaaatagaagttattttatatakgtatacatacacagaaggatatttatagatgcacacaaacacttccagaatgatacatggcaaactggtggaaatagctatttctggcaagggaagttggctcttgattttggaggttgagggtgttgaaaataaacttcctgttttcactctaatatttccataataaatggcatttttataactagaatatatctgttatataaacataagtaaaaaataaaaatataagtaaact

SEQ ID NO: 293352 - DNA, 572 bp, Homo sapiens
aaacatacatttcttgcatgcataaakgttatttttacttacaatttcttaaggaaatctattgtacatcaccttggagagaggagaaaaggttaaatagtaaagcagtgatttttatctaaggcttatgcattttatcacctttggcatttttctctacttgctatcataacaaaagaaaattctaaattggaacaatttactccaaagaaacttgctactgaaagaaagttatttttctaattttttttctaaattgaatgcattttaattttaaaataaaactgtgttaatttctacagtttctttatcctcctgaagaatccttactgagtttctgtcacaccttattttcactttcatgttagtataaattaacattgcattaaaaagtatttattcaaaataatgtttccttgatggaaataaaggagttagtattagcaactatgatgaagagctaataataaaaagtactgttgaattcttagaaaatactacttcatattcctctctatttttctatcacagatatgaagaatagagccaatattacaacaaataaccttcat

SEQ ID NO: 293353 - DNA, 610 bp, Homo sapiens
tttttcttaagtaactggtcctccagttacttaagggctcatattaagtccttaagtgatagtatatatgtgatatgtataatagtataaatataccattaaagagaatgttaattgctcactttagatgatatacagaaaaagatgttctcttttgggtaaacgtttaatagatttttaaaatacctgagggatgtattcagtatttgggggatatatkgctagtgaaaaaatacacgggaaaatgactgtcttttaaattttaagacaataaacttattatagttttgctgatatacattccgatgtttataataattaactcacaatttttaataatattaatttcccataactgcctgatgagctagtaaagaaatattggtttatattaaaatacatttgtatttaatatatttatttttatatttatagtgtataaattttaaatttttatatttatgtaatttttattcctcaaaataaccacctattctagatatgttatcattatataaaacctggattcaaaatgcaaattttttaaagttatatttcataattattgactgtaatcaataataacaaatctttcaaccaatggacctac

SEQ ID NO: 293354 - DNA, 514 bp, Homo sapiens
tttttctatttttttttttgtgggaggaaaastgcaaaagattaaagggatcattaatttcttaaggaacaaaaaaacacattagaacccagagccattcttacccattatttagtatttttatacgttttaaataacctggtgtcctaaaataattgtgcaaaatttctccatttacatatttatatctcagtaaaacagcacaatgtaggtcattactactatagcaggagacaacgcactaggatattggagactgattagttgctatgctgtgcttgttaacatgcagacccttgagtgaagaatacatttgcatatttcttttcttgtccaggatgacacacatttctctttgcctgcctaatgctattatcatgtttgaacattcttgtcctgggaattaattttacacaggtctttctgtttgctccactttttcactctatttttgattcttttaaaatttatgtttatataattctgtcattacctatttaattgttcaaagtag

SEQ ID NO: 293355 - DNA, 595 bp, Homo sapiens
tccaccagaaaaaggagtaattagcaatttagatagaagtttctcattgggtagcatgcataaagatcagtttcagtaaatattctactacatttatatattttagtaaaatatatttatatatgatttagaatataagccaaaaattatggtttctatcattcaatatagttgaaagttctaattgatacagtttctctatgtcctatctcttcatatcattaaacaattattcaaataatcaagytattattgacacatacaaccaaccaatgaaaaagggtaactcaatacaattaggtaaactcatttttgcacatatgttgttgattgacaaaaatttcatgaagcaattatttaataaatactcagctatgaaacacaacatacctatacattttctaactaactccctgtagaacactcaatttgcctgactggggatgtggaaattatgtggaataatatgtttgttacagtcatttcaagtcttataaagataagttgctcttaaagactgctttagaattatcaatacttctgatttaaaacatacatacacaagtacacatacagacacacacacatgattatt

SEQ ID NO: 293356 - DNA, 586 bp, Homo sapiens
aactagatttttttagcccatttgatcctcactgtggattcttgcactcatcctgaattgaaggcaatccagttttagttgtgtaaactggtttgctctattttccaaagataacctgttggctaatccgcagtttctctcctgtcaagtatgtgtgccacttttttgaatcttctgtccacacaaatgctcatatcatgaaaacatgttcctttttcttgaatgtgtgtatttgaakattcatagatatagctttttatgtacttttgttgtagatatggtccatcagttttgtttctgctattcaatatactctgacattttcactttattagaagaaacaagattaaaaactatactgtaacagttgtcatcactagctttttgtaacactttttagttttaaaaaaagtttttctgtttcttatctaaaaattaatctttcaataattttatttatgtattatattctattaatttagactagcatatcattttgtgtatttgattttttaaaaaatttcttcatttaaaatttatattttacaacaatattttttacatgtaaaactatataaacctaata

SEQ ID NO: 293357 - DNA, 586 bp, Homo sapiens
aactagatttttttagcccatttgatcctcactgtggattcttgcactcatcctgaattgaaggcaatccagttttagttgtgtaaactggtttgctctattttccaaagataacctgttggctaatccgcagtttctctcctgtcaagtatgtgtgccacttttttgaatcttctgtccacacaaatgctcatatcatgaaaacatgttcctttttcttgaatgtgtgtatttgaatattcatagatatagctttttatgtacttttgttgtagatatggtccatcagttttgtttctgctattcaatatactctgacattttcactttattagaagaaacaagattaaaaactatactgtaacagttgtcatcactagctttttgtaacactttttagttttaaaaaaagtttttctgtttcttatctaaaaattaatctttcaataattttatttatgtattatattctattaatttagactagcatatcattttgtgtatttgattttttaaaaaatktcttcatttaaaatttatattttacaacaatattttttacatgtaaaactatataaacctaata

SEQ ID NO: 293358 - DNA, 628 bp, Homo sapiens
actaagtgaaatatgccaggcacagaatgacaaacatcccatgttctcacttacttgtgggatctaaaaatcaaaacaatagaacacgtggatatagagggtagaagaatggttaccagaggcttgaaacggaagtgggtgggtgggtaagaggtgggatggttaataaatacaaaacaaaaaattagttagaatgaataagacctagtatttgacagcacaatagagtgactaaagacaataataatttaactgtaaattttaaaataactaaaacagtattattggattatttgtaacacaaaagataaatgctttagtaaatgrataccccattttaaataatgtggttattatgcattgcatgcctgtagcaaaatatctcatataccccataaatatatacacctaataatatgtacccacaaaaaatattttaagatcacactgtatcaaataaatacataatatatagttatttttcagttaaaattgcagtaaaatgttaaagattacttgaaaaaacactttatttttaaaaaatgctaatgatcatcagagagacttcagcaagtcagaatcttttttgctgatagagggccttgccttaatgttgaaggcagctaac

SEQ ID NO: 293359 - DNA, 628 bp, Homo sapiens
actaagtgaaatatgccaggcacagaatgacaaacatcccatgttctcacttacttgtgggatctaaaaatcaaaacaatagaacacgtggatatagagggtagaagaatggttaccagaggcttgaaacggaagtgggtgggtgggtaagaggtgggatggttaataaatacaaaacaaaaaattagttagaatgaataagacctagtatttgacagcacaatagagtgactaaagacaataataatttaactgtaaattttaaaataactaaaacagtattattggattatttgtaacacaaaagataaatgctttagtaaatgaataccccattttaaataatgtggttattatgcattgcatgcctgtagcaaaatatctcatataccccataaatatatacacctaataatatgtacccacaaaaaatattttaagaycacactgtatcaaataaatacataatatatagttatttttcagttaaaattgcagtaaaatgttaaagattacttgaaaaaacactttatttttaaaaaatgctaatgatcatcagagagacttcagcaagtcagaatcttttttgctgatagagggccttgccttaatgttgaaggcagctaac

SEQ ID NO: 293360 - DNA, 674 bp, Homo sapiens
gtcatgttcaaggagagctttctttaatttaagcgatctaaattcactgactttataaaattgtaacctaaagtaaaaatcctcaagattttacttagcctgcataggytccttataattgaattaattatgttaactaactattggaaggatgaaatataaatataccgcatactatctttatgactctgaaaaattctgaaacattaaattgagaatcaccatgaaacatgcaggaaaaactactaaagagtcaggatgaattagtaaagtcatttcaatgagatttaaatttaaagtagaaaatgaaaaaaataatagttttttacaagtcaaaaatagctgctttgtttttaaaactaaatttattcatctgaaaagtgtacatagatgggaaaaacaattttgtgaaactaatatcagaatgccttatttaagcacacttttactatgatctaacagtgtggtatatgtctaaataaactgtcactcatcttatattaatagataataccatttcctatcaataagaaatttctgcttgtacttagttctgataagattacttggaaaaaattatgtttaacattaaattcatttattcatgcattcatccacttccctctcatacctacttattgaattcgatctgtgtgaggtactatcttctcctc

SEQ ID NO: 293361 - DNA, 674 bp, Homo sapiens
gtcatgttcaaggagagctttctttaatttaagcgatctaaattcactgactttataaaattgtaacctaaagtaaaaatcctcaagattttacttagcctgcataggctccttataattgaattaattatgttaactaactattggaaggatgaaatataaatataccgcatactatctttatgactctgaaaaattctgaaacattaaattgagaatcaccatgaaacatgcaggaaaaactactaaagagtcaggatgaattagtaaagtcatttcaatgagatttaaatttaaagtagaaaatgaaaaaaataatagttttttacaagtcaaaaatagctgctttgtttttaaaactaaatttattcatctgaaaagtgtacatagatkggaaaaacaattttgtgaaactaatatcagaatgccttatttaagcacacttttactatgatctaacagtgtggtatatgtctaaataaactgtcactcatcttatattaatagataataccatttcctatcaataagaaatttctgcttgtacttagttctgataagattacttggaaaaaattatgtttaacattaaattcatttattcatgcattcatccacttccctctcatacctacttattgaattcgatctgtgtgaggtactatcttctcctc

SEQ ID NO: 293362 - DNA, 584 bp, Homo sapiens
tggcaaagaatttatggttaagtccccgaaggcaactgcaataaaaacaaaaattgatatgtgggacctaactaaactaaagagcttctgcagagcaaaagaaattaccaacagaataaacagactgcccacagaatgagaaaatatattcataaactatacatctggcaaagatctaatatccaaaatctgyaaagatcttaaacaatcaactagccaaaaacaaataatccaattaaaacatggtcaaaatacatgaacagacacttctcaaaagaaaataatcaagccacaaacaaacctatgaaaaaatgctaaatatctctaatcatcagaaaaatgcaaatcaaaaccacaatgagataccaccttacaccaatcataatggtgattattaaaaagtcaaaaaataacagggtggagaggctgcagagaaaagggaatgcttataatacactgttggtgggaatgtaaattagttcagccatagtagaaagcagtttgggaagttctcatagaatgtaaaatagagcaaacattggacccagcaatctcattactggtcatgtacccaaaagaaaata

SEQ ID NO: 293363 - DNA, 397 bp, Homo sapiens
aaataattcattgtatcaaaaagacacakacactcatttgttcattgcagcactgtgcacaatagcaaagatatattgtcaacctagctgtccatcaacagtggattgaataaagaacatatggcacatatacaccgtggactactacgcagccgtaaaaaggaatgaaaccctttcctttgaggcaacatagacagagatggaggtcattgtcctaagcaaattaatgcaagaacagaaaaccaaactccacttttgttctcacttataagtgggagctaaatattgaatacacataaacttaaagatgagcataatagacattgaggcctactagatgggagagggaaggagggggatgtaggctgaaaaactagctatcaggtactaagcttac

SEQ ID NO: 293364 - DNA, 397 bp, Homo sapiens
aaataattcattgtatcaaaaagacacagacactcatttgttcattgcagcactgtgcacaatagcaaagatatattgtcaacctagctgtccatcaacagtrgattgaataaagaacatatggcacatatacaccgtggactactacgcagccgtaaaaaggaatgaaaccctttcctttgaggcaacatagacagagatggaggtcattgtcctaagcaaattaatgcaagaacagaaaaccaaactccacttttgttctcacttataagtgggagctaaatattgaatacacataaacttaaagatgagcataatagacattgaggcctactagatgggagagggaaggagggggatgtaggctgaaaaactagctatcaggtactaagcttac

SEQ ID NO: 293365 - DNA, 397 bp, Homo sapiens
aaataattcattgtatcaaaaagacacagacactcatttgttcattgcagcactgtgcacaatagcaaagatatattgtcaacctagctgtccatcaacagtggattgaataaagaacatatggcacatatacaccrtggactactacgcagccgtaaaaaggaatgaaaccctttcctttgaggcaacatagacagagatggaggtcattgtcctaagcaaattaatgcaagaacagaaaaccaaactccacttttgttctcacttataagtgggagctaaatattgaatacacataaacttaaagatgagcataatagacattgaggcctactagatgggagagggaaggagggggatgtaggctgaaaaactagctatcaggtactaagcttac

SEQ ID NO: 293366 - DNA, 857 bp, Homo sapiens
gttggtcttgtaacatagacaacaatgatcagtataataatgcctttgaatatggctattaagagtattgcaatatatatatttaatatattgccaacatgttagtgcagaaaaaattgtctagaaatgttatatttctcaaaatcattattagatgtacttattttattttatagaatgtgatttgagaagacttgttcctaaatcaaaaattttaatcatgtaagttttaactamatttagatactactttagacacaattatttcccagtgcwactctaagcaaatggacttgacagatatttacagaacattctacccaacaacttcagaatatacattgttttcatcagcacatgaaagattctccaagatagagcatatgataggccacaaaacaagtctcaataaattwaaaaaaatcaagtgtattaagtattctctcactggaataaaattggaaattaactccaaaaggaaccctcaaaactatacaaatacgtgtaaattaaataatctgctcctgaatgatcattgggtaaacaatgaaatcaagatggaaatgtaaaaactctttgaactgaatagtaatagtgacaaaacctatcaaaacctctggcaaagagcaaaaagtgaggctaggaggaaagttcatatcattaaatacctacatcaaaaagtctgaaagagcacaaatggacaatctaagtttacacctgaaggaacaagagaaataagaacaaaccaaaccccaagtcaacagaagaaaagaaataacaaagattagagcagaactacatgaaattgaaacaataacaacatcaaaaaaaaaagataaatgaaacaaaaagctgat

SEQ ID NO: 293367 - DNA, 584 bp, Homo sapiens
tccatcctcattcaacagtgtgacacattggtaatcaccakagggtgtgtgctaaacagtacttttaaagaagtcttgttctgtcaaaagtgattgtgattttaaaataataagaaagataaacaaatggatagataggagaattcatctgtactctggatatgattgagtttttagagcagaagaatttctagttcagggaatttttgagggaaaagttcagccaaatctcacagagccatatctcacaggtcagccatagttggaagtttatgtgtttaataatcttttaagcataaagcatatcatctttcagcataggaactgtgctgcattccattcgcttttccaaatttactctccaccctttggtagcatgttctgtgcctcaggaagctaaactttatggatagcagcaatggagtcactggctttctgatttccacttgtatttggccaaaacgagacacctgaaaaagatccaaatgaaagaagaaaatgaagtagaattcgtattttttttcctttggatccccaaactcctaattgtcagtttttgtactactcttcctgttttgtagtga

SEQ ID NO: 293368 - DNA, 620 bp, Homo sapiens
acctgtgcactggggaagattaagtctgcctttagagaatactggacagtggctttaagttgacaatgattccaggagacttaaaacatcactgtggccctacagtcagagtagggggctgatggaggtcaggtgatcaataaagttttaactcaagtccaacttacagtgggtgcagtrggtcctcaaacccattctgtgattattatctcagttccagatccataattgaaatagacatacttagctactggcataatcatcacgtggtttccctaacctgtggagtgaggtcctttatggtggaaaatgtcaaatggaagcaagtagagttttctctccctaggacaataataaattggtaaattaaaaacaataccatattttgggaggaatttcagaaacgaatgccaccatcatagatgtgaaagatgcaaggtggtgattcccaccatatacctatttagttctcctatttggcctgaacagaaaatagatggatactggagaatgacagtgagttattgtaactttaaccaggggcaactccagtcataaatgttgtatcaggtgtggtttcattgcttgagaaaataaacacatctcctggtacctggtac

SEQ ID NO: 293369 - DNA, 620 bp, Homo sapiens
acctgtgcactggggaagattaagtctgcctttagagaatactggacagtggctttaagttgacaatgattccaggagacttaaaacatcactgtggccctacagtcagagtagggggctgatggaggtcaggtgatcaataaagttttaactcaagtccaacttacagtgggtgcagtgggtcctcaaacccattctgtgattattatctcagttccagatccataattgaaatagacatacttagctactggcataatcmtcacgtggtttccctaacctgtggagtgaggtcctttatggtggaaaatgtcaaatggaagcaagtagagttttctctccctaggacaataataaattggtaaattaaaaacaataccatattttgggaggaatttcagaaacgaatgccaccatcatagatgtgaaagatgcaaggtggtgattcccaccatatacctatttagttctcctatttggcctgaacagaaaatagatggatactggagaatgacagtgagttattgtaactttaaccaggggcaactccagtcataaatgttgtatcaggtgtggtttcattgcttgagaaaataaacacatctcctggtacctggtac

SEQ ID NO: 293370 - DNA, 611 bp, Homo sapiens
agctgagaaagcatgatttattctcaatgcttcaataggcactgagcctgtccctcttctgctgaagggtgaatttgctcactcttctggagctcaaacactctttttctgctgcccatggatgttacaactccaggttctccagcttttggactttgggacccacactatgggccctccagactctcaggcatttggacttggactaagttactggttttccaatttgcagatggcctatcatgaaacttctcagcaaccataatcaagtgarccaattgccctaatgaatttgtttcatgtttccctacacatcctactgggtctgtctctctgaagaaccttcactaaaacagatagtaaagagatattccttatatgtaacaattctaatttatttaatgtaacttataataatattttaagtgacttttgatatttggccagtaattccaaaaagtcatattgagttttagcatacatgcattttacaatgaaaattcttgttaaaatgcacaaatggaacttattatttttcaggtgtagattgattttgtggaatatataaagaggtgtaaagaaacatcccaaatttgttgcttaaactgata

SEQ ID NO: 293371 - DNA, 589 bp, Homo sapiens
tttatgtagtatttttcacaattagtatctactttgtatttttaatgactttagattcttggataacattattaagttaattttcttaaatatagctaacatctttatttttaktatatctgcttttacaatttcactttagatagcatttactatcgacaatttgtatgttattatatgaaggcattttattactttggtcttggtgcctattttagtggagacattagctcttccttcagggagaggctaatggagaagcacagaagggcaggacctattctgtttcacttaaagtgatttttcaagaggaaagagatgagccactgagcagaacgtgaaggtgctactgaatactgtctcgcttactactacatcaaagataattatctgatagttaaatttttcttggaagaaaccacatttgaaaaatacattcactctcatagtcgtccatctgccctggatattttgaggattaaatattgaagaaataaaatctaaaggcaaactcactgagtgtcacatattttcatcagttctcaatactagcagggacttctgtgactgtaatattacctatgcactt

SEQ ID NO: 293372 - DNA, 589 bp, Homo sapiens
tttatgtagtatttttcacaattagtatctactttgtatttttaatgactttagattcttggataacattattaagttaattttcttaaatatagctaacatctttatttttagtatatctgcttttacaatttcactttagatagcatttactatcgacaatttgtatgttattatatgaaggcattttattactttggtcttggtgcctattttagtggagacattagctcttccttcagggagaggctaatggagaagcacagaagggcaggacctattctgtttcacttaaagtgatttttcaagaggaaagagatgagccactgagcagaacgtgaaggtgctactgaatactgtctcgcttactactacatcaaagataattatctgatagttaaatttttcttggaagaaaccacatttgaaaaatacattcactctcatagtcgtccatctgccctggatattttgaggattamatattgaagaaataaaatctaaaggcaaactcactgagtgtcacatattttcatcagttctcaatactagcagggacttctgtgactgtaatattacctatgcactt

SEQ ID NO: 293373 - DNA, 589 bp, Homo sapiens
tttatgtagtatttttcacaattagtatctactttgtatttttaatgactttagattcttggataacattattaagttaattttcttaaatatagctaacatctttatttttagtatatctgcttttacaatttcactttagatagcatttactatcgacaatttgtatgttattatatgaaggcattttattactttggtcttggtgcctattttagtggagacattagctcttccttcagggagaggctaatggagaagcacagaagggcaggacctattctgtttcacttaaagtgatttttcaagaggaaagagatgagccactgagcagaacgtgaaggtgctactgaatactgtctcgcttactactacatcaaagataattatctgatagttaaatttttcttggaagaaaccacatttgaaaaatacattcactctcatagtcgtccatctgccctggatattttgaggattaaatattgaagaaataaaatctaaaggcaaactcactgagtgtcacatrttttcatcagttctcaatactagcagggacttctgtgactgtaatattacctatgcactt

SEQ ID NO: 293374 - DNA, 531 bp, Homo sapiens
cacataacttaaactttaaattaaataaatacattaagtatgaagataaaattttgtcttgtagacgaggagattattctgaattttctatatgggctcaaaataatcacataagttcatgtgagtaaagaaactttcccaactctggtaggtggaagatgtgattatgaactatggtcagagagatgcaacacagctggttttaaagatggagtaaaagggccacacgccaaggaatattggaaactcttagaagctggaaaaggcagaaacatagattttccccaaaagcctccagaaaggaatgtcccaaatttgcctttaggccagcaagacttctgttgaacttctatgctatagaaatgcaagataataaatttgttttgatttaarccatgaaatatacggtgatttgttaaagcagacaaagaaatctaatataaagctatcgattttctcattttctgtttattaagaagacctgagatatatatataaaagcaaacagagaaaataaaaaacaatcaaaaa

SEQ ID NO: 293375 - DNA, 544 bp, Homo sapiens
tgggcacaagttggaagcatttctattaacaacttgaacaagccagtgatstccactctcaccactcatattcatcacagtactggaagacctagccagagtgatcaggcaaagaaagaaatacaactctttctaatagaagaatatttagtcaaaatacatttcttcattgatgctatgactccatacttagaaaaccacaaaagctctgccaaaaggttctgagaatttatacatgtcttcagtcaagtttcaagatacaaagtcaatgtaaaaaaatcagtagcatttccatacaccaataatgttcaagctgagagtcaagtcaagaatgcaatcctatttcaaatagccataaaaaatacatagaaatatagctaaccaaagagatgaacgatttctacaagaagaattagaaaacactgatgacagaaatcagaaatgacacaaacaaatggaaaacattccacactcatgaattgaaagaatcaatatcattaaaatgtttatactacccaaaacaaactactagatttaacaaaat

SEQ ID NO: 293376 - DNA, 584 bp, Homo sapiens
tccatcctcattcaacagtgtgacacattggtaatcaccagagggtgtgtgctaaacagtacttttaaagaagtcttgttctgtcaaaagtgattgtgattttaaaataataagaaagataaacaaatggatagataggagaattcatctgtactctggatatgattgagtttttagagcagaagaatttctagttcagggaatttttgagggaaaagttcagccaaatctcacagagccatatctcacaggtcagccatagttggaagtttatgtgtttaataatmttttaagcataaagcatatcatctttcagcataggaactgtgctgcattccattcgcttttccaaatttactctccaccctttggtagcatgttctgtgcctcaggaagctaaactttatggatagcagcaatggagtcactggctttctgatttccacttgtatttggccaaaacgagacacctgaaaaagatccaaatgaaagaagaaaatgaagtagaattcgtattttttttcctttggatccccaaactcctaattgtcagtttttgtactactcttcctgttttgtagtga

SEQ ID NO: 293377 - DNA, 515 bp, Homo sapiens
ttattttatttattttttaaaatattttaaaacatagttatacacacacatatgtggtcttttagaatacacgtctaaatatccatctgtatctatctatctatctttaatcactcacagggtttttatttgtcaagtgccccaactgacttcttaaaatttcctatctctatgcctaacrtgttttgttgcgtttgagctcttttcaccaagctgtctcatctattacttttctttccatgtttacatttatatctccatgtttatattcatgctattttattttacatttttgtatatttcttgattacattctgtaatatattttttccaggatgattctctctgattattggcttctgagtggtccctaagagaatgtattgtttgctattagtaatttcttatactttataagtcctggagcagctacctttgttatctaatgagtgcaatttttgtccttccctcactgattagaaagcattcatagggatataaacagcagcaaaggt

SEQ ID NO: 293378 - DNA, 515 bp, Homo sapiens
ttattttatttattttttaaaatattttaaaacatagttatacacacacatatgtggtcttttagaatacacgtctaaatatccatctgtatctatctatctatctttaatcactcacagggtttttatttgtcaagtgccccaactgacttcttaaaatttcctatctctatgcctaacgtgttttgttgygtttgagctcttttcaccaagctgtctcatctattacttttctttccatgtttacatttatatctccatgtttatattcatgctattttattttacatttttgtatatttcttgattacattctgtaatatattttttccaggatgattctctctgattattggcttctgagtggtccctaagagaatgtattgtttgctattagtaatttcttatactttataagtcctggagcagctacctttgttatctaatgagtgcaatttttgtccttccctcactgattagaaagcattcatagggatataaacagcagcaaaggt

SEQ ID NO: 293379 - DNA, 516 bp, Homo sapiens
tattcatgctattttattttacatttttgtatatttcttgattacattctgtaatatattttttccaggatgattctctctgattattggcttctgagtggtccctaagagaatgtattgtttgctattagtaakttcttatactttataagtcctggagcagctacctttgttatctaatgagtgcaatttttgtccttccctcactgattagaaagcattcatagggatataaacagcagcaaaggtaatagctacttcaactctttttcactgccttggctttaaacttcttttgcaattcaggtcctcaggaatttattttattcttttatctgaaatatgaaagaaatcttgtatatttatatatacatatttaatatatgtaaaaagtataaaacatataaatgtacttatatgtaaatacatacataatctgtagcttttgccttgtttgcaactggttttattttaaggccactttgaggaaacatgaaggtctagttatagatttat

SEQ ID NO: 293380 - DNA, 584 bp, Homo sapiens
tccatcctcattcaacagtgtgacacattggtaatcaccagagggtgtgtgctaaacagtacttttaaagaagtcttgttctgtcaaaagtgattgtgattttaaaataataagaaagataaacaaatggatagataggagaattcatctgtactctggatatgattgagtttttagagcagaagaatttctagttcagggaatttttgagggaaaagttcagccaaatctcacagagccatatctcacaggtcagccatagttggaagtttatgtgtttaataatcttttaagcataaagcatatcatctttcagcataggaactgtgctgcattccattcgcttttccaaatttactcyccaccctttggtagcatgttctgtgcctcaggaagctaaactttatggatagcagcaatggagtcactggctttctgatttccacttgtatttggccaaaacgagacacctgaaaaagatccaaatgaaagaagaaaatgaagtagaattcgtattttttttcctttggatccccaaactcctaattgtcagtttttgtactactcttcctgttttgtagtga

SEQ ID NO: 293381 - DNA, 565 bp, Homo sapiens
agagtgagcaactctaaaagcatatttgattatatagttcatgaaaatttccccaatcttgctagaggggaggacatcaaaatttaagaaatacagaaaactctatacaaaatacaggtacataatggccagattgaccaaatattaacacaaaataaaaaaaatkaaaggctcctagagggaaagaccaggtcatcaggctagcagtggacttttcagcagaaactttataaaccacatgaaattagagtcctattttcagcattttttaaaatttttattttcagcattcttaaagaaaaatatattccaacaaaaattttatatcctgccaaaataagcttctttagagaagggaaattaaaatcctcctcaaacaagcaagcactaagagcatttgttaccaccagaccagccttacaagaaattcttaagggagtactaaatatggcaacgaacattaaaacctgctaccacaaaaacagtcaagcatatggcctgcagacaatataaagcaattacacaatcaagtctacaaaagaaacagccaacgacgtgatgacag

SEQ ID NO: 293382 - DNA, 565 bp, Homo sapiens
agagtgagcaactctaaaagcatatttgattatatagttcatgaaaatttccccaatcttgctagaggggaggacatcaaaatttaagaaatacagaaaactctatacaaaatacaggtacataatggccagattgaccaaatattaacacaaaataaaaaaaatgaaaggctcctagagggaaagaccaggtcatcaggctagcagtggacttttcagcagaaactttataaaccacatgaaattagagtcctattttcagcattttttaaaatttttattttcagcattcttaaagaaaaatatattccaacaaaaattttatatcctgccaaaataagcttctttagagaagggaaattaaaatcctcctcaaacaagcaagcactaagagcatttgttaccaccagaccagccttacaagaaattcttaagggagtactaaatatggcaacraacattaaaacctgctaccacaaaaacagtcaagcatatggcctgcagacaatataaagcaattacacaatcaagtctacaaaagaaacagccaacgacgtgatgacag

SEQ ID NO: 293383 - DNA, 584 bp, Homo sapiens
tccatcctcattcaacagtgtgacacattggtaatcaccagagggtgtgtgctaaacagtacttttaaagaagtcttgttctgtcaaaagtgattgtgattttaaaataataagaaagataaacaaatggatagataggagaattcatctgtactctggatatgattgagtttttagagcagaagaatttctagttcagggaatttttgagggaaaagttcagccaaatctcacagagccatatctcacaggtcagccatagttggaagtttatgtgtttaataatcttttaagcataaagcatatcatctttcagcataggaactgtgctgcattccattcgcttttccaaatttactctccaccctttggtagcatgttctgtgcctcaggaarctaaactttatggatagcagcaatggagtcactggctttctgatttccacttgtatttggccaaaacgagacacctgaaaaagatccaaatgaaagaagaaaatgaagtagaattcgtattttttttcctttggatccccaaactcctaattgtcagtttttgtactactcttcctgttttgtagtga

SEQ ID NO: 293384 - DNA, 598 bp, Homo sapiens
actttttgctttattgtacatgaatatctttgtgtgactatgtattcaaagaacagagaagggaaagctagagagtgttaccctagagagctacctgcatgctacatcaatatgatgtatattgtatgtgtaaaaattacscatatgttaatgtgtgtaaagtaaataggagtgcagaaaaatagaaatgcagtctccaaccattggaaatataaaaatatatagaaaaaaatgtaacaattgcaatatatatccatgtcattgtgattatttaaaaactgacttaatctatcacaaagaagtataacccctttttaaaaagccagagaaactaaagaaacatagttttggtgtcttataatgctcagattttcttcatttgatatcaattgaaaaggaaaaattcagtctcgaggaaagttatacatactttattgagcatctacaacatacctgacactttctcaacactatctttttaacctttttgaaacaactgtagattttgcagatgagaaaactaagatgaagggattagaaattttaccaaaatcataatggaagtgtatgattaagtagggattcaaaacattgtaga

SEQ ID NO: 293385 - DNA, 429 bp, Homo sapiens
gaaattatctttggggtatggtgtgggccactacttaacccaccacaagcattattatcttttcaaatatctcttccttattctattgttttctttaagaatttcaaagtgagcattagatctttgaatgctatctttgaagtctcacagccgatcttatattctctctctctgcaagtctgtgttatattctgtataacttcttcacatatgtatcagttaacttttactatttgtcaaactactctgaacttggaataataatttattcagcttatggttctgtacatcagcacttaggtctgtgttcaggtggttggtccttcttgtatgagctgggcttggatgatgttagctaggtgtgttcaagtgtctgcraccaattggagggtctttaggctgggtgctttattatagctatggatgaaa

SEQ ID NO: 293386 - DNA, 456 bp, Homo sapiens
ctgtggtttccagtttctcccccaggtttgatttacaggtttcaaataggtgttgtgtaaactgaagtgcaaattaaatgagatactctactakaaaaatagtgtcacaggtaagtgacaaaattttatactgacctggctgtggcagacattgtggctgtctcccaacatcaccttcaccactttcctgttatgctatcctcatggaaggtagatgagattgactcactgcagtatctgagtaggtgaggtcagacttgttaaagccacaaggccatagttattgctttaggaaatctggttctaagctcatcagctatggaaatcctctggccacagaaattatgtaaaaatgaacatttcactgaatttagtaaatatgtagcattttgtagggaaaatacttttctaacaggtttacgaaaaaggaagatctgtccttgccttggacaagga

SEQ ID NO: 293387 - DNA, 558 bp, Homo sapiens
ttttctcactttactgtacactttataaactctgtacacttaggctacactgcattttatcctgcttttttttttgtggggtgacagagaaaagcattatgaattatgacctagaagggatgttaagaggcatttgagacctagaagtaaccaccccagatacattatggtttatattgaacattggatgcattattttaaataaaatgtcaaatgggcttttatttttaaaggcaaaacaaatagtttatrtataaccgtgggcaaaaaaaaaaaaaaaagtgcttggaaaccaatgtttaaaatgttccttttgttgaaataacttgtcccaacatacaagtgaagtcagaggctattattgtagtgagagacaatatgtgcagaataaacaccttagacccagagttatgaaatgggggggatttgaagctcagttctgatgtttactaaatcctcgctttggggcaagccatttaacctgagttagaatagcctgatctaaaacaagaataatgtctattgtccagggttatttggtgaaaagataatgacata

SEQ ID NO: 293388 - DNA, 458 bp, Homo sapiens
aaatgttaagttaattatactcactgccaataagaatccagttgaatcagagcacaccaagctcccttgaactatcaagtaaaacctctggcaaagtgatgatataaaactcagagagagaacagatgtgctgcaggagaacatgctgtttgtataggcactaaagtttctcttaaaataaatacagtcatttaaagtcgttgagtcgtggctggagaagcaccacakggaggtgatagagcaattaagagtcctgtgggaaaggaaagaactgaaacagattctctatggagcaaatcttaaatatacaaattaaattgcgtgtaaatagtaggttgaaacatgtctgaaattggttccatattaacataggattctatataatacactaggcctgctttttgatcaagcctgatctaaagagaataaggaaaataatagtcacatttcaaccctgg

SEQ ID NO: 293389 - DNA, 1024 bp, Homo sapiens
aaatgttaagttaattatactcactgccaataagaatccagttgaatcagagcacaccaagctcccttgaactatcaagtaaaacctctggcaaagtgatgatataaaactcagagagagaacagatgtgctgcaggagaacatgctgtttgtataggcactaaagtttctcttaaaataaatacagtcatttaaagtcgttgagtcgtggctggagaagcaccacagggaggtgatagagcaattaagagtcctgtgggaaaggaaagaactgaaacagattctctatggagcaaatcttaaatatacaaattaaattgcrtgtaaatagtaggttgaaacatgtctgaaattggttccatattaacataggattctatataatacactaggcctgctttttgatcaagcctgatctaaagagaataaggaaaataatagtcacatttcaaccctggwtgcctactcacagggtttatgtgagaattaaggatagtcaggtttttagactcacagccacacattaggagctcaatattgtttttctttcttgtcttataaaagaagggaaattacatggtcaagttaaaaggggcctggagttaagccctgaagtaactttaaacatttaatatattggttctaaaaatttatgtattaggttggtagagttcctagtgaggaatgctttggggattacagtccttttaagatatatcatattttactgaaaattcaaaactaacattaaccatgctgtttttaaaaactattgcaatatttactttttaaaaggacatacaatcwtttcaggataaattcaatgcactgttctgctcactcttcacttggatgtataacacatatcttaaatttgaaatgtccaaatcgaacatttttttctgctccaatatgtacctgttttcccctcaatctttggaagtgtcaattccatcctactagtttctaagagcaaaacttacttttctcattatcttaaaatccaaaatcaaatcaaagttta

SEQ ID NO: 293390 - DNA, 535 bp, Homo sapiens
cgtatttctcttctttcaaaagcaaatgggagaaatatcactgaattctttttctcagcaaggaacatccctgggaaagagaatacacgtctggaggtatagtcctataaacggctccccccccaaggtgtgcctgtctcttatggtcragactgcaggggtgaaatagaccccagtctcccatagcgctcccaggcttattaggaagtcgaaattcccacctaataattttggtcagactggttgctctcaaaaccctgtctcctgataagatgttatcaatgacaatggtggccgaaacttcattagcaattttaatttcaccccggtcctgtggtcctgtgatcttgccctgcctccatttgccttgtgatattctattactttgtaaagtacttgatgtctgtgacccacacctattcacacactcactccccttttgaaaatccctaacaaaaattgctggtttttgcagcttgtcgggcatcacagaacctaccgacatgtgatttctcccctggacacccagctttaa

SEQ ID NO: 293391 - DNA, 535 bp, Homo sapiens
cgtatttctcttctttcaaaagcaaatgggagaaatatcactgaattctttttctcagcaaggaacatccctgggaaagagaatacacgtctggaggtatagtcctataaacggctccccccccaaggtgtgcctgtctcttatggtcaagactgcaggggtgaaatagaccccagtctcccatagcgctcccaggcttattaggaagtcgaaattcccacctaataattttggtcagacyggttgctctcaaaaccctgtctcctgataagatgttatcaatgacaatggtggccgaaacttcattagcaattttaatttcaccccggtcctgtggtcctgtgatcttgccctgcctccatttgccttgtgatattctattactttgtaaagtacttgatgtctgtgacccacacctattcacacactcactccccttttgaaaatccctaacaaaaattgctggtttttgcagcttgtcgggcatcacagaacctaccgacatgtgatttctcccctggacacccagctttaa

SEQ ID NO: 293392 - DNA, 622 bp, Homo sapiens
aggctattgtcagccaaggtcatttgagttacaatgtcagtcaaaattatagcctggtatcttgtagagtcatttaaccagttgaataactgttttttgttccctttacttttcaattcatcaaccagaaacatatccctacaacatacacctttacatatcrtaccatacagaagatatttactaaattacatcatattaagcaaaagagttaaagctttttcctgcttcccaattcagatgctttgttacatcattgaaagtttctcagcatgtatcaaagccacagatcttctttagtttgtatttgagattcaggcgatgttagctagagccagtaataattacattccgagaacaggcatatggtctaattcacactatcattttttctcacaattgaaagatgccagtttttaaaaatacatgattattccgcctatagtggtctgccttgccaatttgtgggtcacagactcccgtacgctaaagctggaactcataaatgctttatggaatatcctttcagtagtagagatggagattgcaggggccagatgggacaatattcatggcaaagcatgagactagaaagatcatttactcttttttttgtcctgtt

SEQ ID NO: 293393 - DNA, 1234 bp, Homo sapiens
aggctattgtcagccaaggtcatttgagttacaatgtcagtcaaaattatagcctggtatcttgtagagtcatttaaccagttgaataactgttttttgttccctttacttttcaattcatcaaccagaaacatatccctacaacatacacctttacatatcataccatacasaagatatttactaaattacatcatattaagcaaaagagttaaagctttttcctgcttcccaattcagatgctttgttacatcattgaaagtttctcagcatgtatcaaagccacagatcttctttagtttgtatttgagattcaggcgatgttagctagagccagtaataattacattccgagaacaggcatatggtctaattcacactatcattttttctcacaattgaaagatgccagtttttaaaaatacatgattattccgcctatagtggtctgccttgccaatttgtgggtcacagactcccgtacgctaaagctggaactcataaatgctttatggaatatcctttcagtagtagagatggagattgcaggggccagatgggacaatattcatggcaaagcatgagactagaaagatcatttactcttttttttgtcctgttwtttctgaataatttaaaattgtagagaatatatatcttagaattatatagaatatatatcttagattgcagggaagtttcctaagaattgagtaattaatattcttttatcacttttctgccattaccttccttcactctgctcattggagtagagacagatggcttgagatgaagcagttactgaggaccatgagacaaaactcatttgtaagaatggtgaagtaacgaaatctacaaagtcaagataccatgtctcattacgagataaaatwaaacttctatcttatttaaaccactattatttttgggtttctcttacaactgaatttatctttatggatggaaatataatgtaatatataaattatttggaatgacatgtcctatccaaattcctggcattttttaatcctctgtccactgtcatatttaattttatagctgtggttgcaaacaagaggctcaaagagatttaaatggcacaaggacatagatttttggccagtaagaattcaaacacttatttttccaacattaaaagtcatgaattacacataaaatctagcatttgggagtccaaatgcatcataataacagagctgagttcag

SEQ ID NO: 293394 - DNA, 453 bp, Homo sapiens
gtggtgatgaacttccttgacttttgtttatctgtggaagttttttcttttctcttttattcctgaaacaaagcttttttgagtaaaatatttttggttgtcaggtttttaccttcactactttgaatatataccactcactctctctgcatagcagggtttctgctaagtccactgatagccatactagaactcctctatttttgatgtacttttatatcttgctgatcttgggatttttgtttgtctttgattttttaagaatttgattattatgtgttgtgataagcycctttttggattaaattttactgaagattaatgagctccctgtgtctggatgatggcttctttcttcagattaggaaagtttttcattattatttatttctttaatccattattactttaaatatgttttctggcccattttctctttcttgtactttttga

SEQ ID NO: 293395 - DNA, 595 bp, Homo sapiens
agactccctctgctccattttccaccacagaacagagcacctgtgggaggtcaggtgaatcaatatagatgtgatgtcctctcacagctgagggagcctccaacaaaaggcttggcaatgttatagactctggggttggtggagaggtgaagggagagcagtagtcgtggaaaagtgctgggtgctgtgtcagagtggggaaaagtgtctttargccccacctacaaaccataaggaagccttggtagagacacctgaagagaaactctgcccaaggcctcagatagaaacctaggaaagaagacacctgggctaggaaggtaaatgcatgaagagcatgacctgcctggggaacctgaatccttgactgcaaccccctgcagagacctccccgtgcactggctgtgcaccctatctgcagtggggagagcagctttcttctccatgagacctgctaggcaaagcctttgtaattgcttatggtcaggcttgataggtcacacaaaggtttttaaatagaaggcggactcctcaggcaatagagaccaccaaactctactactttagacagtcacttaaaatacgtaatgtaaat

SEQ ID NO: 293396 - DNA, 587 bp, Homo sapiens
cacataatgattgtttattaagttgaataactggcctactgtatttgtgcaattacctttgaaattagaaagaggttttttttttcttttttcattgacttaataggtcagtgttttctcaaatcttcataaatacctgcatttcccagaatcctatttttaaaaagttccccattgcaataaatcatttcagttggtctgggagtaaacctcctaatttgtatttttatccagcaccccggataattatgagaaggtcctctgatgactacacctttgagaaacatcatattatgtagtattcacaaatgctgatgagcctacatgaaattttggcattctagtgatttaraaaacttggttgtaagcaagctctttccataaagggtttacacttatgtgacacagactggtataacataaagagctataaattgaccatttaaaacattatttattgatgaaaacaattcacacgattcatagaaaagcaaacttcaactgatgtgtcaagggtgaaaacattttcacaattaattgcatagagctacctctactaaagttatcctgggtatattattcaacag

SEQ ID NO: 293397 - DNA, 569 bp, Homo sapiens
caagctctttccataaagggtttacacttatgtgacacagactggtataacataaagagctataaattgaccatttaaaacattatttattgatgaaaacaattcacacgattcatagaaaagcaaacttcaactgatgtgtcaagggtgaaaacattttcacaattaattgcatagagctacctctactaaagttatcctgggtatattattcaacagtttttcatcatggtaaatgataaatccattaaaacaattattttagaagatagatgatggcagaacaaaaacagttgaaccaytattctagtaaagtttggcattcactctgctcatgagatgcaaattttcttctgtgaaaatgaagcactaaatattagcagagggtgtgatgtctgaaaaattattgctgaaatctgtaattatcattaaatattcaggatacatgggggtattctgaggaatatattaccacatcactttcttgtccaaaatccttcaaagattcttttcaagttgcctgcaaaattaagttgattctccttggctttttattttaagcattctgt

SEQ ID NO: 293398 - DNA, 530 bp, Homo sapiens
ctgtaacaatcttctcactaagtactaattatgtactaaaatcatttctctcgaactaatttttatttttttatttttctcttatggtttaatagaaagttacaattacctcagatttaccataaagacagcgccagagccaaagtttacttcactgttacagtatcaggactacaggaatgctgcactaatttcgtgttaacccccaacttgctttagaarcagttgcttgtaggctctgatatatccattcttgatattgagtccctcttgttctccaaatcacacacacacaaaaaaaagtcatacctcttgctaatgacatctaaatttctggtttcagtaggggcttcaatcagaaaagaaatagtcaaggaagaaagacaggcagaatctttgaatatttcagaggaagatgagggaattgccatataatcaaagactaaaaagatctatttcattaatattagaaggaaaatttttattccgagagagttaacagtgaagataatcaatttggggctgtgttt

SEQ ID NO: 293399 - DNA, 626 bp, Homo sapiens
tttttcagaatacaactatgtgtattattttggggatagttaaaaattatgaagtatcttccacagatatttaatccaaatatgtgggttgaagcaatggtatatgcatttttttcagataagtcttatgtatactgatattaaagggctcytattatagcaaatatcactaaccaaaatatttaaaagaaataaaacctaaatgttatgtggaaaaagccatagttaaacttgtctgtaagatttatcaaggactaattatagttgctcgtgtgcacttagcactgattatctgttaataaatacattttctacatataaacataagactattttgccaattgaacaatagtagtaatgatgactaggtaaaatcatgtatgtattaatcagaagtagtatttaacaaccttctaaacatctcttttaataactatcctgccagtagaggataaatcgaagagttgaggaaagttcttaaactgtgggagtcagacacatgtcctttcaatcatgcctctaccactaactaactttgtgatattggacaatttatttaacctctctaaaattcagtgttcccagtgataaaatagctacaataaagacgccaatgtgagggttaa

SEQ ID NO: 293400 - DNA, 1236 bp, Homo sapiens
tagactaatgtatgaattgtttttagtgtttgtttttcagaatacaactatgtgtattattttggggatagttaaaaattatgaagtatcttccacagatatttaatccaaatatgtgggttgaagcaatggtatatgcatttttttcagataagtcttatgtatactgatattaaagggctcctattatagcaaatatcactaaccaaaatatttaaaagaaataaaacctaaatgttatgtggaaaaagccatagttaaacttgtctgtaagatttatcaaggactaattatagttgctcgtgtgcacttagcactgattatctgttaataaatacattttctamatataaacataagactattttgccaattgaacaatagtagtaatgatgactaggtaaaatcatgtatgtattaatcagaagtagtatttaacaaccttctaaacatctcttttaataactatcctgccagtagaggataaatcgaagagttgaggaaagttcttaaactgtgggagtcagacacatgtcctttcaatcatgcctctaccactaactaactttgtgatattggacaatttatttaacctctctaaaattcagtwtttttcagaatacaactatgtgtattattttggggatagttaaaaattatgaagtatcttccacagatatttaatccaaatatgtgggttgaagcaatggtatatgcatttttttcagataagtcttatgtatactgatattaaagggctcctattatagcaaatatcactaaccaaaatatttaaaagaaataaaacctaaatgttatgtggaaaaagccatagttaaacttgtctgtaagatttatcaaggactaattatagttgctcgtgtgcacttagcactgattatctgttaataaatacattttctacatataaacataagactattttgccaattgaacaatagtagtaatgatgactaggtaaaatcatgtatgtattaatcagaagtagtatttaacaaccttctaaacatctcttttaataactatcctgccagtagaggataaatcgaagagttgaggaaagttcttaaactgtgggagtcagacwcatgtcctttcaatcatgcctctaccactaactaactttgtgatattggacaatttatttaacctctctaaaattcagtgttcccagtgataaaatagctacaataaagacgccaatgtgagggttaa

SEQ ID NO: 293401 - DNA, 573 bp, Homo sapiens
actcttctggttacacgatactctcaaccagttgcaggtgtcaagaacatgaacatcacaaaatctggaacctagtcatgactgcattaccatcatgggacttggaaaagtcgctttaacttttttaggctaactttctttactagtaaaatgagataagcataatacatttctcagagggtcttggcaaagatgaaatgcaattttgcatatgaaaaagaaatcatagtacctggatcctgccaggaacccagttaatgtttgcaattatccattacttcattcaatctgatatttaccttcaccatgtgagataggaagagtgagggtactataaccctgttttgcagtggagaaaactcaggattagagaaagagaaaattgagacattccatgtaaattgtgacagagcctctgtctacttgaactcaagttcytctggcttcaggtccaggacttattctaccaactgtatttcctttggggtaaaaacaaacaaaaaaaaaacatgtagtttttcttgttacatttcaggaaaataggtgtttaagtgttaaataatgcctctgtct

SEQ ID NO: 293402 - DNA, 573 bp, Homo sapiens
actcttctggttacacgatactctcaaccagttgcaggtgtcaagaacatgaacatcacaaaatctggaacctagtcatgactgcattaccatcatgggacttggaaaagtcgctttaacttttttaggctaactttctttactagtaaaatgagataagcataatacatttctcagagggtcttggcaaagatgaaatgcaattttgcatatgaaaaagaaatcatagtacctggatcctgccaggaacccagttaatgtttgcaattatccattacttcattcaatctgatatttaccttcaccatgtgagataggaagagtgagggtactataaccctgttttgcagtggagaaaactcaggattagagaaagagaaaattgagacattccatgtaaattgtgacagagcctctgtctacttgaactcaagttcctctggcttcaggtccaggacttattctaccaactgtatttcctttggggtaaaaacaaacaaamaaaaaacatgtagtttttcttgttacatttcaggaaaataggtgtttaagtgttaaataatgcctctgtct

SEQ ID NO: 293403 - DNA, 1793 bp, Homo sapiens
aggattcaaagattcagtttctcactttttaatctctgttgggaattatgaggcaataattattatcacttcaattgccaggtattatcraaaatgaataatcatatggtcataaaacattatctggtaccaaagaatatactattaaatgaaataagtgaagataaaactttttaaaatttttatgtatttttcccagacggggggtctcagcctgtcacccaggctggagtgtagtggcgctgtctccgctcacttcaaacctccacctcccaggctcaagtgatcctcctacctcaaccttccgaacagctgaatagctgggactgcaggtgcgcgccaccttgcccggctaatttttgcaatttttgtagtgatggcatttcaccatattgcccaggctggtctcgagttcctggacacaagcaatgcaccttctttggcctcccaaagtgataggattgcaggcgagagccaccatgcccagccaaaacttattttttaaacaagctataataaaaagaatgtatttgttgagtttatttaatataaaaccttgacttcaaaatttgtaagaataatgtttagagacattaactawtggcctttagacttgaactgcagcatggctcttctttgggaccccagcccgtggcccactctacagatctggggacgtgccaggctttataatcatgtaaatcaattccttcaaataaatcttcttctgtatatatgtatacatcctagtggttctgtttctttggagaaccctaactaataaaatcaccattctatgcagagaaggttgactatgaatgtggaaaaatgatcagcaaagcttggcagtcatgcagaagcaagtatatttttaaagctggtagagtctatgaacaacaaatgagtatttactaccttcagtctacacctcaaaaacacctaccggtggcataaaaaccawagatgaaatcatttcgtataaacttcgtggaataaatataaattaaaatgatataaaacatgcatttgcctacaaacatgtattaatctttattttagaaggtaaaatgaagataacttttttcttctttttcagataacttttttatggaggtatctcttgcaaaaaaacatcacaggttcttctttttcactgctcttttaatctgttgaatattaaagcatcctcwgatgaatggagaaaaaacaagaccagtataactagatactgcagcataggaaatgtacatgttcttttccttttatttctgagcccagagagaaacctcagtaacacaatatgggcttttatatgggatttttcttgtttataacacaaataataatactatgaaatctatagtaaggcttgtctccaatgaactcactgtgaaaaatattgcagtttttttwacatcattgcatataatcaaagggcccagtaggtgctcagtgatacaagactccatagatcattctagcagtgactaccaaaatacatagctactttattaccttagttccatcttaaaaagtctatagcatatagccatttgcataaagtcaatgctgtagaaaataaaatcagcaataaacagaacaaaaatttatttcaaaatgtgtattgtgtgtgtatatatatatatatatatacacacacacacactacatactgtttatatgtgtgtgtatatatacaaaatgtacattcgtattttttgattacttggattttaaagagagaaaggttgatgtggtctggtaaacatttttttcttttgcccagataaaca

SEQ ID NO: 293404 - DNA, 603 bp, Homo sapiens
gatgaatggagaaaaaacaagaccagtataactagatactgcagcataggaaatgtacatgttcttttccttttatttctgagcccagagagaaacctcagtaacacaatatgggcttttatatgggatttttcttgtttataacacaaataataatactatgaaatctatagtaaggcttgtctccaatgaactcactgtgaaaaatattgcagttttttttayatcattgcatataatcaaagggcccagtaggtgctcagtgatacaagactccatagatcattctagcagtgactaccaaaatacatagctactttattaccttagttccatcttaaaaagtctatagcatatagccatttgcataaagtcaatgctgtagaaaataaaatcagcaataaacagaacaaaaatttatttcaaaatgtgtattgtgtgtgtatatatatatatatatatacacacacacacactacatactgtttatatgtgtgtgtatatatacaaaatgtacattcgtattttttgattacttggattttaaagagagaaaggttgatgtggtctggtaaacatttttttcttttgcccagataaaca

SEQ ID NO: 293405 - DNA, 490 bp, Homo sapiens
cactgggggcctaagatggactagtttctaggacaatcaatataaaaccaatggactgactctttcctcaatacttacacaaatacctatgacataaagtacaatacaacaagtttcattaaacatattaagtagcttgtgctactgaagaagcctgaatgaatgttttatcttgaattctttgtttttgaatttataataaatgagaacaacattgccattaaagttttttccaaacattttctatctttgaccagtgtttctcaatctatttgtctttatgatgcccctcctgaaaaaaaatttattttaatttaattaattaaaattttatttaatgtctacctaatgaaagcaattaaatgttaaggaataagattttgtcaaatataattgkgtctcaaaggaccacaaatcattgtaatatttaagatttttttctatgattttctccctctacaccaaaccaattttgcccttttggggggaa

SEQ ID NO: 293406 - DNA, 656 bp, Homo sapiens
gttctttacctttcatactgattcattctgtcttgagccatgtagttttgtatgtcagaaaagcctaataattcttttgtgtagcattccaccacatgcagttagatatttaagtaatgttatagcaatcattgatcatactttttctactatctgtttcsctgggctttttttaatcttttaaactatatttatattttatttccagacatttataatatgctgttatttattcctgtattttaaatctttacataagaatataacctaatgtgtccatgagtgaatctttcttttcagctttttgggaagctatactatatgtcattaggccatgaacattccccactgtgaagagttcaaggaggagaaggcttagtctgcctgggtagtcttcagagacacaggttatcaaagtctgtgcaggacataggctatgcaccaggtctgtgtctgctggggctaaattgggtgagaacagagtcaacttttaaatgaactgatgattatgataaaaggactggcttttatttttattcttttgagcagaagaatgagctggaatcctggctgacttatcctgaatgattacataacatgcaattatcagtagtaatagagaatgggatgaagaaattctcaggaaatctctggac

SEQ ID NO: 293407 - DNA, 492 bp, Homo sapiens
gctgaattttgctaagatcaccaactttttttctcccagaaacaagaaggaaggcagagataagagagggtgagaagatgttgtggtgggattatatggaaaattgtttatgcgtatcactcaattttggagtgtttmtaaattttcttctcccatgatatagctgttagatggataaatttcttgctttacaaaatggctttttaattatcctaggttagattgatacattttaaaaaattgtgacatctcgcatttttcagcgttaaagtaacttatctctccctcaactttctaagccatccatatgtcccagaatttggtgagctgctaaacaattatccttcaaaaatagttgatacattgtgggaaataacatcctgttttagtttactataagaaaatcatgagtcaaatgtaatgaatttccctcccaacctaagagccctcataacattctgtccctcagcttccaactttccaaaagagctt

SEQ ID NO: 293408 - DNA, 572 bp, Homo sapiens
gctacttctgacttgatttacccactctgtgaattcaacatttgatggcaattatatgctgaattcatttggctactaggggagttttttgcttaagattccatttaaaaatcacttatatagtttattaggaaagattgagcctacattttaaatgatacatgggaatataaaaataaataggacatttagctacacctaactattccattcaagttttttctttgtgttttgtccctgtgtttctgtgtcagctgatactcctttactgtgttgtgacagtgatgattggaattagggtactaattgcaatgaattcttagcacttgcaagaaatcactcactaattcatcaataaaaaggaagtctttgaacccagggaggaagaaaagaatcttttggaatttattcttctgtctccttctattatcctaagcccaactrgtatactatgttaacaggcactttcatatctttaagtcacctgcttttgtctgaaatgtttgagatgagagaacaaaggttaatctttgtgtgatcacaagcgtgcaggcaaaattcccccttaattc

SEQ ID NO: 293409 - DNA, 490 bp, Homo sapiens
aatgctaggacttctaactggcagaactgtaaaataatagatttgtcttattttaagccagtgccttgggctatttgtaatagcagtgacataaaatcagtacagcaggcaaaaggaaggaaaaaagtagaaaggaaggaagggggaagaaaggagggaaggaaggaaggaaggaaataaagaaggaaggaragaaaggagggagggagggaggaaggaaaatttgggtttaaatcttctttgttctttaccctggaaattcattcaatatatcagtcaccttcttttgaaagaaggttcttatagttgcccagaggagtcttcatttcacaagattagtcactgaaagaaatttcttgtttttaataattagagaactggcccagtgtttaatggggacatgggattggtattttagataccccttccatgagtcatttttggactcatggaagtccagtcattcatcccaacccatttgggattgctt

SEQ ID NO: 293410 - DNA, 1199 bp, Homo sapiens
acagaactgagttgcagacacaactttaaaggcaagagctgcasttttttttagcttaacaatattaatattctagagttggatattatcatgccaaaatggcctaaaagattaatgagcaacttcaaagaatccttagtgacaaaatgaattttctcattatgttttctttcttttcttctgtgttttccacatcatagttgagagatgctcagaggaacagaatgcatatacacttggccagacttttctgttgtggattctttgtctttggaagactagataaaggtaagattaagtagtaaattttaacacctgcatcgggtacttccttcattgtttttcttttttcacttccaacttgaataatcaaacacttgaagaaaatagaccatctttattctctggcaagttcaacaaatgggtttataaattactgagtgtttgtacaaataatctgaaaatctgaatgtagagctcagcaaaatttgaaagttcttactgtgaaagttggcagtcattttcaaaccttgcaatgtagaagatcagtctgaatatctgattaatatcaatgtattatcagttgtttactgactatcwacagaactgagttgcagacacaactttaaaggcaagagctgcacttttttttagcttaacwatattaatattctagagttggatattatcatgccaaaatggcctaaaagattaatgagcaacttcaaagaatccttagtgacaaaatgaattttctcattatgttttctttcttttcttctgtgttttccacatcatagttgagagatgctcagaggaacagaatgcatatacacttggccagacttttctgttgtggattctttgtctttggaagactagataaaggtaagattaagtagtaaattttaacacctgcatcgggtacttccttcattgtttttcttttttcacttccaacttgaataatcaaacacttgaagaaaatagaccatctttattctctggcaagttcaacaaatgggtttataaattactgagtgtttgtacaaataatctgaaaatctgaatgtagagctcagcaaaatttgaaagttcttactgtgaaagttggcagtcattttcaaaccttgcaatgtagaagatcagtctgaatatctgattaatatcaatgtattatcagttgtttactgactatc

SEQ ID NO: 293411 - DNA, 511 bp, Homo sapiens
ggtttattattttttcttttctttggcttttcagatgaagacatagctataattcttatgtatttcattggagtgatagcccagcaatgtcaaagctgtagacctaatgaagctgggcatacatgatgatgtaaaagctttgattatgtrtctctacctcaacttgggataaaagctctcatggcaaaacaaaacagataaacacaaagtattttttttccctagtcaaggttcatttttcagcttctttcccttggatctacttcaaggatgccatatctgagacactttcagattctgctatttataagctttgatttaggaggcttgttcttaggaatatcaagctgtcaaatgtcaggtgcctctggatttatcttttttttttttttggctattctcttgcaacatgaaagctatctagcaaggaaccttctttgtcagacggctcttctgaaagtagcacaaaattaaaatattaataatagccacttgaaactagttagggagg

SEQ ID NO: 293412 - DNA, 636 bp, Homo sapiens
atatgactatatgccaaacgttgaaaaaaattattattaattttggaagccatgtttccttatttctctcttctttatgtagttggtatggttggctgcctatcttcaagcccaatacgccagacctcctaagaattttctgagctgcccagtttttttttttttttatgtttagcaaatgcctttttccacttaaatatttcagagacaattttttgttgttgaaaactaagaatcctggcagagagaggatccctgtgctccttggagcccagaagagatttaatccccgggacatagtctagatgtaacagctgggtcctctgccttttcttcattggaaatttcttctcttggggtagaggaaaggattcccggagggaattggaatgaatcatgaatctgctgttaataacactttgtactttccttgcaaattttgttcccaccagagctcaaaatgttttrtaatccagcattttgttctgtggctgttatttccaaggatattatatttgaggataatatgcgtttctagaaaaattgccaaagaattgttgcatgtgaatagaaactgaagcaaactttgcctctgacccatgctaaaataacactcttgtcagcttgactatatta

SEQ ID NO: 293413 - DNA, 538 bp, Homo sapiens
ctccttggagcccagaagagatttaatccccgggacatagtctagatgtaacagctgggtcctctgccttttcttcattggaaatttcttctcttggggtagaggaaaggattcccggagggaattggaatgaatcatgaatctgctgttaataacactttgtactttccttgcaaattttgttcccaccagagctcaaaatgttttgtaatccagcattttgttctgtggctgttatttccaaggatattatatttgaggataatatgcgtttctagaaaaattgccaaagaattgttgcatgtgaatagaaactgaagcaaactttgcctctgacccatgctaaaataacactcttgtcagcttgactatattaataaccatgaaggtgatattttaatactacctgtattccttacaggagaaaaagctctagaattagtcctccagttatttcaactactcagacctttcgatgaggatrcaagacaggtcttgaaagatgttgttttgacacccttgactgttgtagtaatca

SEQ ID NO: 293414 - DNA, 1175 bp, Homo sapiens
tgctcctgtttgagctggatttcaagtctgttgtgyatgatacttatttaatttggaaaaagtatagaagtcataaacatatatgtgataaagccctattacttacagtgtctttgaggctattctttgtgagcacagagagccagtgctacctttcgctaggctaccaaactgcgtagaaagtaacaatttctaaattataccaaaaccaattatgaaatgttaattctaaattaaagggatttgttattggattttaaaaaaatggtttctaccttctgacaatttttttattcatcctattcaagaaatgcaactctcaatcatgatttattttcaacattgttgttaatataggtgcctagttcatgtctaagtcaaccaattgtgaaaccacattttaagctgttctctgcaaactatcaaactaccgtcaacttgtttttgtgaatagaattcttgctaattagcatgcttatttcttatgtagttttttaaaaaaggaaatctaatatttaaaatatgttgtctatttattcttctcattaccaattgaaaatgattgctttgttgggtttgcctttcatwtgctcctgtttgagctggatttcaagtctgttgtgcatgatacttatttaawttggaaaaagtatagaagtcataaacatatatgtgataaagccctattacttacagtgtctttgaggctattctttgtgagcacagagagccagtgctacctttcgctaggctaccaaactgcgtagaaagtaacaatttctaaattataccaaaaccaattatgaaatgttaattctaaattaaagggatttgttattggattttaaaaaaatggtttctaccttctgacaatttttttattcatcctattcaagaaatgcaactctcaatcatgatttattttcaacattgttgttaatataggtgcctagttcatgtctaagtcaaccaattgtgaaaccacattttaagctgttctctgcaaactatcaaactaccgtcaacttgtttttgtgaatagaattcttgctaattagcatgcttatttcttatgtagttttttaaaaaaggaaatctaatatttaaaatatgttgtctatttattcttctcattaccaattgaaaatgattgctttgttgggtttgcctttcat

SEQ ID NO: 293415 - DNA, 624 bp, Homo sapiens
gttgaatagggtaggatagatttcttcagttgtttcagaagaagataattgatatcttgggtaatacacaatacagtcttgtacaatatttaaacaatgacttgtgcctttatgagtttctgtatctaaattgatttatttggaaattatgtcacgttatggcatcttgtcttgccttgatgacatttgattctttgcccagtccttctctcccaactctgctgaggaggagccaagagagttattgacactatgctttacataaagcataaatgggaagagggaaaacagaaagctcctttaggaagcacatgcttctctaaatgctgtaaaacaatataggactggaaaaaatgtgcagaaacagacatacagcaaataaaatataaatagaataaatgagtgatgaagaaattgaacaggaagcctacagtaaccaagtggattaaaggcatcaaatctacctctatttcttttggaatatatgtcccaactgactgtgtggttcaccttggctccctctgcrtctatggaagataatagttaaaataggagcattttatcaagttataggaaaaagggccatggatagatgagtggatttataacaagaaggttaaaggg

SEQ ID NO: 293416 - DNA, 1754 bp, Homo sapiens
ggcaaaatccgtgtgcagtagtttgtgactataaatttctgttacactgagactaaagtaaattgcagattctttaaaaaagttttcctatatcacacagtgctttaaaaggcaggtttcaagcataaatttatttcagtttctaaggcctgtatttggtgatgrtattattgatccgagtgtctgaatagtgggtagccattgaacaacagtaagaggcaatagtaaaaggcaaatagttctggattttaaagggaaaaaggaaagcttctaataaaagccaacatcattgtcacctaaaataaccaaatatgaaaaataactaaaaatataagtacttttaaaagaggagattcagatataattattattctcagacaacacaaaagatgtagattgttacctctcagtgtctggtgaggatgaacagtgatgatataagtgcaagtgctttgtaaactaaactgccacatcagtaaaaggcatttctattgtgtgtgaacacattgagtcatgttgtcaaatgagattggtctctctcttttatagatagggaaaaatgaccagattgaattaacacaggcatgaagacagaaaaattcwctaattttcatatttttagtagagatggggtttcaccaggttggccaggctggtctcgaactcctgacctcagatgatccaccgcctcagcctcccgaagtgctgggattacaggcgtgagccaccacacccggccagttatgcacttttctaactgccgtgcatgcctggaaaacaggtgttaggagtttgtaattctagtaatccagaaaggacacaaatttaagagaataattgctctttttaaatatttatttagaagctcttactctttctcttcatgatttcttattctagaacgcaggttgtaagacaattggtcactctatttcagcttctctttacaaagaagtcagcgccttccaatcttatcaacacttaagatctaagtggagtataactctgacagatgttaaatatttcatttgtagaatataaattcttacccaaaaagctatagctaatgtcacacttcttaatgtagtaaataacattctctgacttgaattttcaccaatatgatagtcttcatcaaawacaaaagcaaattaaattagtttgaatacaaagctgtwtttgttactgctattataatctggttctgtatgtgctgttttgtaagttttttgaagacctcaaaatcttgagctatgactaactccacattgaagaaaaacaggtgtacatcacaggaaatcatggcagggtcccagtattgatgaacacatcattattttgctgtcatttccctgtaattagcacattgtgacaatttgttctaatatgcaaaaaaaaaaaaatgccagcaatgatgctagtaatttttcctcctttctacttatttttattttttattttggggaatttcatttttccatatgtaaattctaagtctgaaatcacactttatatcagggtagatatttggcaatagttcatatcagaaaatgttcatcttctttctttaggtataatctaatgttatwgtctgaatgtctgtctgccccccaccaaaaatttcatatattgaaattctaatcttcaaggtgataaatagtattaggaggtaggcctttgggaggtaatcagatcatgaaaatggaaccttcatgaatggaattagtgcccttataaaaaagaccccagaaaat

SEQ ID NO: 293417 - DNA, 622 bp, Homo sapiens
tatcaaaaccctatcagtaagtggcaagtggcaattaagctgcatctggtggcaggctttatagtggcaagtgagttgatgtactccaattgtacagctgcatctggtggcaggctttaagtcagaatctgacacttattttggtttgtgcatgggccgcccatcattatattatttaccatttctatccacacctctttcccgcactgtgcatttgtcttagtcacagttttggtaggcccacaagctaaccctagccaaaatgaataaaayacaaacatcactggagagcatctttcaaaagggggaaagacccagtgatgagacagcggaagactctaagacactaagaatgtcaaccataaagaaagctgcatttaaaagaaaaaaccaggagtcccactgaaattccaggttcattgcaacaggtgattcacattcttcaagcacactttgtatgatatgtggtgacccactatccaacgaagccatgaaaccatcaaaactccttcaccacatggaaaccaagctcacttcattaaaagacatgtctttggagtttttcaaaagagtaaaaaatgtgaacacaaagaacagaagtaattattgaaggccaccactt

SEQ ID NO: 293418 - DNA, 641 bp, Homo sapiens
gagtttttcaaaagagtaaaaaatgtgaacacaaagaacagaagtaattattgaaggccaccacttcatcaaatgtgtctgcactgacagcataattcttagtggctaactgcattgctaaagctaataarccctttgttattggtgaagagttggtcctgcctgctgctaaggacattcatcatgaacttttaggagaggctgcattcaaaaggtggcacgtgtttctctttcagccaacaccataaatagacaagttgttgaaatagcagaggatattgaggcacaattgttaaaaaggattaatgagtcactgtgatattcaatccatgttggtgaatctaccaatgctgacaacaaaacaacaatgtttttgtgtgatatattttttcaggaggatgtgcctgagcatatgttgtgtgcactttgccaaccaacaccacagatgcagaactattcaaatctttgaatgattacacaatagaaaaactaaattggtgattttgtgtcagtttatgcacagagtggctgccatgactgaactgctttctgatttcactactcaagtcaaagtggccactactgattgtgagtctatggactgtgtcatccatcgagaaatgctggctagctgaaaaatg

SEQ ID NO: 293419 - DNA, 641 bp, Homo sapiens
gagtttttcaaaagagtaaaaaatgtgaacacaaagaacagaagtaattattgaaggccaccacttcatcaaatgtgtctgcactgacagcataattcttagtggctaactgcattgctaaagctaataagccctttgttattggtgaagagttggtcctgcctgctgctaaggacattcatcatgaacttttaggagaggctgcattcaaaaggtggcacgtgtttctctttcagccaacaccataaatagacaagttgttgaaatagcagaggatattgaggcacaattgttaaaaaggattaatgagtcactgtgatattcaatccatgttggtgaatctaccaatgctgacaacaaaacaacaatgtttttgtgtgatatattttttcaggaggatgtgcctgakcatatgttgtgtgcactttgccaaccaacaccacagatgcagaactattcaaatctttgaatgattacacaatagaaaaactaaattggtgattttgtgtcagtttatgcacagagtggctgccatgactgaactgctttctgatttcactactcaagtcaaagtggccactactgattgtgagtctatggactgtgtcatccatcgagaaatgctggctagctgaaaaatg

SEQ ID NO: 293420 - DNA, 641 bp, Homo sapiens
gagtttttcaaaagagtaaaaaatgtgaacacaaagaacagaagtaattattgaaggccaccacttcatcaaatgtgtctgcactgacagcataattcttagtggctaactgcattgctaaagctaataagccctttgttattggtgaagagttggtcctgcctgctgctaaggacattcatcatgaacttttaggagaggctgcattcaaaaggtggcacgtgtttctctttcagccaacaccataaatagacaagttgttgaaatagcagaggatattgaggcacaattgttaaaaaggattaatgagtcactgtgatattcaatccatgttggtgaatctaccaatgctgacaacaaaacaacaatgtttttgtgtgatatattttttcaggaggatgtgcctgagcatatgttgtgtgcactttgccaaccaacaccacagmtgcagaactattcaaatctttgaatgattacacaatagaaaaactaaattggtgattttgtgtcagtttatgcacagagtggctgccatgactgaactgctttctgatttcactactcaagtcaaagtggccactactgattgtgagtctatggactgtgtcatccatcgagaaatgctggctagctgaaaaatg

SEQ ID NO: 293421 - DNA, 641 bp, Homo sapiens
gagtttttcaaaagagtaaaaaatgtgaacacaaagaacagaagtaattattgaaggccaccacttcatcaaatgtgtctgcactgacagcataattcttagtggctaactgcattgctaaagctaataagccctttgttattggtgaagagttggtcctgcctgctgctaaggacattcatcatgaacttttaggagaggctgcattcaaaaggtggcacgtgtttctctttcagccaacaccataaatagacaagttgttgaaatagcagaggatattgaggcacaattgttaaaaaggattaatgagtcactgtgatattcaatccatgttggtgaatctaccaatgctgacaacaaaacaacaatgtttttgtgtgatatattttttcaggaggatgtgcctgagcatatgttgtgtgcactttgccaaccaacaccacagatgcagaactattcaaatctttgaatgattacacaatagaaaaactraattggtgattttgtgtcagtttatgcacagagtggctgccatgactgaactgctttctgatttcactactcaagtcaaagtggccactactgattgtgagtctatggactgtgtcatccatcgagaaatgctggctagctgaaaaatg

SEQ ID NO: 293422 - DNA, 536 bp, Homo sapiens
atttgccttgttgatgattctagaaatagtgaaccataatagatttcttggaaatcttaaattagagcatatagtggcccatttttcttcctcagaaatttttatttcaatgtggagggagcagtaccaggaacttggaagactgcccagtgtgctctacatagcattcaattgaccttttgacctatgtcccaaatacagcygataatgtgacaattagttccttcgtttgtttaagggcaagcttactcccctgtgcacagtgccataaagaaaaaagtataaagctcattttctaagaaaaatgttcaggaaacctagtaaatgagatcaactgcaaaaattgattttgtgaatggtttgttagaaaacacataaaatggtaacatcagttcaaatgtgacattcgaattgtttgtattccaagcctgtgcagatgggcaattcactttgtaggtaatttttatggctaagataacaaaccatcatatttgccttggacaacctaccttatgctataacagtcttaatcagtt

SEQ ID NO: 293423 - DNA, 634 bp, Homo sapiens
gattcttcctaacgtagcttcctgggtatcttgcaccactcaaactgataggcaggatcatgacacccccaacacacacaatttcaaaactatatttagataatttccatatatgagtggcattttggtatcaggattctttgcaactatttatttctttagatattttcttacctgatagtaaagagctaaatgtagcatataaagttaagctgtaggtaaaatatcctagatattcagaaaaagaagataatagcataggctacggaaatcagggaattttgtaatatattgtttgttgataaaacctaaatgtcaatgttacatagatttttgttttaacattatttcatagatttccacagttaatctgcacagcaatattgcaacctattaagtcagcaaactgagaccacaaattytgaaccttttcacaaaattccaacaaaatctatgactaggaaaatgttatccagctgcaatgatgatttctacaataaggtagagcagaatacttttcaataccttgtgcaatttgtatgttaatataaagtgtgaatggtatgttatgatagagaatagctagaaaaatctattttttttacagatctttctacattacatggtgcattgt

SEQ ID NO: 293424 - DNA, 580 bp, Homo sapiens
tttaccaataaacaatcaagagagataagtgcttgtcacacctcgctcatgtgaaagataggaaatcctgattttacttcttgacaataaaacagatgcctgctacctttgctattaacaaaattttgacatggaactgtagtgagtgttttgactagtatgttactagtatacatataagcatatgttataagtaaacccccaaaatttaacctgaaaaggtgtattcatcagctcttactgatagaatcactttaaatacatatttttatgcatgtctattgattctattttaggatttctcaacctcaacactattaacactttggatcagataattgttgcgaggcctgtcctgttattgtaagatgttaagcagtaaacctgccctctgcccactagatgccagtagcaccactccagttgtgacactttttccacatccacagaaaaccttagtattgttagtcttttcaacttgagccattctaatagatggagtgtagcatttccttgattatctttttaasatcgaccacacaatctatttaatttagtatgaataccacatctttttcat

SEQ ID NO: 293425 - DNA, 613 bp, Homo sapiens
ttgttctagtttttctaaatataatgtgctttattttaaaaagcattttttttgcaatttattaatttattgtagaattgccctggctagttattcagtggaacagagatacaaaatagaattttcttgaagcttaaggtctgtttaaaactattgagatattgaatttcccgacaattttttgaccacttatgagattacattaaatataatttcccagctctgaattaacttgggtaaaagtggtgtgcaggtgagcattctgagaacttttatttcttcatttgaccccactttaacttggcaacttgctctttaacttcgttactcaaatctcactcaaacaccctaagttctggagaaattttatgttattgagtgttctattttatatactgggtcttgtaatgctaaccaattacatacattataacactgtatatttaaataaatcctggaagttagrtagtattatatttctcattttcagatgtagtgattaagatacaggatttatattgcatttgtagtaaatgaaagaactaataatggcactcatgcctgtctgaatctagtgtgcctatatttaatcactgtgctacactgaaatata

SEQ ID NO: 293426 - DNA, 547 bp, Homo sapiens
tacactattttctagaatgcaattgaccaatgctcagtctgacattttctactactgaaatcattttacactttaagcttctcatcattgtcaatttttatatgaarcctacttggatatttctgattacaatgaatcctgtccacttacgggattctcaagtagtattattcaacttatgacagtttgaatggttatacatcaatttataaactccttaatggtggaactaaaatgtacttgtccttgaatctccatgacctaggtcagcatgtagaaatagatatggagtcattataaattgatttaatttgattgaacaaaaatctgtagtagaatatattttataactccttccctgtctgtctctcttctggtgttgcatctgaaaaaaaagcagttttatgctcaagtaagatacatatttcctttttgtgaaaaactattctatctcgtttatcttataaattaaaaatattcatattaaatcctgtattggtctgttcttgcactgctataaaaaaccctgaaacttggtaatttttag

SEQ ID NO: 293427 - DNA, 481 bp, Homo sapiens
tcatcagcctggccccttctgtccatatcactatcagcattttggtcaaaaccatttaacaagtctttaggaagattcagattttcccacatcttcctgtcttcttctgagccctccacactcttccaacctctgcctgttacccagttccaaagtcacttccacattttcaggtgttttcatagcaatgcctcacctctcagcaccaatattctgtattagtccattctcacactgctatacagcaatacctagaactgacacaagtatatatttttcacaagagctttaattggctcatggttccacaggaagtacaggaagcatggctggtggctggggaggcctcaggaaattctgaatcatggcatcagcrgaagcaggaatgtcttacatggtggaagaaggaggaagagagcgaatggggagatgctacacacttataaacaaccagatctgatgagaactcactcactatcat

SEQ ID NO: 293428 - DNA, 481 bp, Homo sapiens
tcatcagcctggccccttctgtccatatcactatcagcattttggtcaaaaccatttaacaagtctttaggaagattcagattttcccacatcttcctgtcttcttctgagccctccacactcttccaacctctgcctgttacccagttccaaagtcacttccacattttcaggtgttttcatagcaatgcctcacctctcagcaccaatattctgtattagtccattctcacactgctatacagcaatacctagaactgacacaagtatatatttttcacaagagctttaattggctcatggttccacaggaagtacaggaagcatggctggtggctggggaggcctcaggaaattctgaatcatggcatcagcagaagcaggaatgtcttacmtggtggaagaaggaggaagagagcgaatggggagatgctacacacttataaacaaccagatctgatgagaactcactcactatcat

SEQ ID NO: 293429 - DNA, 586 bp, Homo sapiens
taaagaccaacgtttaattttgttgattttcaaaagcatcgttaaagaattgcttctattgcatgtggctaacaaattcttaattggtgctctcatgtctatgaattataattaacaagctttacaaatgctttgccaccccgaagtgctgctcaccctcaaatggttcccttcatccttaggacagatctgaacccaaagacccaactccttcatcaatccagtattctggcagctgactgaatttactgaaagagttggagaattgggtttctagtgccaacccacaatatgcaacttctgtcatttttttattccacamacttgaaacttgctgcagaaaatcaatgcatcagatacaccacatcaagaacataatcttgctctttataaaaaggtcgcacgtttatttaaagcatatctcaagttaattaatggacacacattatcagaaaaactaaaacaaaagtaaaccaaaatataaaatagctcaaataatctaaagtaggtttaaacccatttttttccacctcatggcactatgactaggaagacatggataatatagttcacattttacttacaa

SEQ ID NO: 293430 - DNA, 530 bp, Homo sapiens
caagcaattacaaagaagatgacccttctaagcctccttcaaacattggtcttgtatgactatatgaacagagtctgagaatattagaactataagagtcttctgaggttagtgtgttgggggcgaagggcaatgcttctccttaccctcaatgtctttttccaagtgaaagaaattctgccagcatcccactcctggcccttctccactccttcatcactccttccatgcagagacagagtgactcaataacttgaagtttggaagcttgggagagaagctgggtatagggagcatttctcatttcttattcttcttcagacaggggcaaagtgcctggaggaagtgcagagtcaaatttctatagatggttcatccctgctgaamcaggcatgccctgattgggcacagccaggggctgggtgagtaactcccttcaattacagggaagcaggcctgtttcttgggtgttgtgaagaccacaccaatgatctaggctgatggctgttatcatttagaaggtttgctac

SEQ ID NO: 293431 - DNA, 560 bp, Homo sapiens
ccatgcagaactataagtcaattaaactctttcctttataaattacccagtcttgagtatttctttatagtggtgtgaaaacagacaaacacactatcgttgctatcattagtagtaattctcttcccttccccaggcagaatgtgtgcatgcatcttttgatcagacacctacttatacaccaggtactttgatctgaagatgcacagtytctccatccacacagaattcacaccctacccagcaggttacgaaaacatatcatgaaaaaagtaatacagctcattaataatttttacatggattacaagttgaaatgatcatattttggaaatattgggttaaataaaatatattgtaaaaattaatgtcattcctcaaaaagttaaacacacaatgagcaattggcaattctactcctaggtcgatacccaaaagaattgaaagaagggacttaaacagatatttatacaccaatgttcagagtagcattattcacgatagccaaaagctggaaacagctcagtgcccactgatggatgaataaataaacaaaatgt

SEQ ID NO: 293432 - DNA, 558 bp, Homo sapiens
acatctgaagcatggccattatggcggtggtgagtttccttcatctgtcagttttggccaaaagttggcaggatttaggaactgtgctttggaratgaggagtaaacacttcagagtatcccatatttctggccagaggaccaggaaaggaagatctgtgagtaggagagtatgggcagaatccttggggtttttatgtgtgtgtgtcttttttctatcccagccatgtcccaaaatcagcccagacacaaaactgcactcatatgacacagaaacagcacaggcaccaaagcccccaaaagatatcccattcctttggactgagaagctcagaatagaggccaatgttatgtgaataaggtaaggaagagtacatgagaattttttttaattttttaataattttaacttttgttacggattcatgggtacatgtgcaggtttgttacaggggtatattgtgtgatgctcaggtttggggtatgaataatccccatcactcagtgatatggcttggctgtgtccccacccaaatctcaccttgaattgtcataatcc

SEQ ID NO: 293433 - DNA, 484 bp, Homo sapiens
cataaactttaaagcgggcattatgaccatgctccataagataaaggtaaccactcttgaaatgaaaagatagcaattttcatagagaaacagaagctattaaaaaataaccaaatgaaaattttggaatcgaaaaatacactatccaaaattcattggaaaatgttctcatttactggatgagctcaatatcaaaacggagatgacaaaggaaagagtcagtgaatgtgaagttaggtgaatagaaattatcaaatccaaagaacagagaggaaaaaagattgatttctttaaaaaagccccaaggagcaattagagaatatcaaaagatmtaacattcaaaagatctaactggagaattaagaaggattggtgcagaataaaaacaacaaaaaacaaaacaaaactcttaaagacataatggctgaaaattcccaaattttgtgaaaaacataaattcacaaattctaaaagctcagcaaac

SEQ ID NO: 293434 - DNA, 577 bp, Homo sapiens
cttgtacatgaatattcattgcagcaataattgctaaaaaattgaaacatcccaaatgcccatcaactgaggactggataaacaaaatgtgctatgcatgtatgtatatatgtatgtgtatgtatatttgtgtgtgtgtgcaaaatggaatattattcagccatagaaaggaatgcacactacatgaataaactttgacaacattatgctgaatgaaagaagtcaaacacaaaatactacatattgtatgattccattcatatgtaatattcagaatgggcaaatccacagagacagcagattagagattgccaggggctagttgggagcagggaggtgtagggatgggggtaaaataggaagtgacagttaagatatttgaggtttcttttcggggtgataaaatgttttaaaatggattgtggtgatggttgtacaactttgttaatatacgaaaaaaccattgaattctatactttaaatggatgaattgtgtggtrtgcaaactatatcttgataaacttgttttaaaaagaatagaataaaaaggaagggttagttgtagtcttggacagcc

SEQ ID NO: 293435 - DNA, 496 bp, Homo sapiens
ttgtgtagtttgcatttgttacaccagcacagattacttttataatttaaaataggaaaagtgagggatggagaagggacagtaagaggaaggacagaacaggacaggaaagaaaaagtccttcaagcctccaaaattctgtcctctcactctctcctctctcctrttttctgtcagccctaatgagagctggagaagggcttctggagtgagaggtgaggtggacccgctccctaagggatgaggcgaaaacacaaattactccctgaggctgagtcaatttcaacagctctgactccagctccctgatgccagcaacccattgcttctaagtcagagttaaatgagttcagcacagcatcacctgtgaggtttggggactgaggagtgctaattattcccccaaattatatttcatccttttctcattcatctaagaggtcagagtgaagaagaggaattttctttcctgatttgggggcgggatggagtgagg

SEQ ID NO: 293436 - DNA, 658 bp, Homo sapiens
ttccttcaaccatactagaagggatacaatttgggggaaggaataactttagcacagtgcttctcaaagtgtggccccctgtccagcagcatcggcaacacctgrggacttgctattaatgcagattcccaggccccgccccagacatatggagtcagaaattctgggcatgaagcccagcgatctgtgttttcaccagccctctaggagattctgatccatgctcaagtttgagaagaactgcttcccattaagacaggacttagcagattaacctctctctgcctccacttcccctccataaaatggggcaattagaagtacccacatcacagagtaattgtaagaaattagtgagataaggtatgtgacagagtttaccgggactctggtaagcctggagcttactgaggaggtcagtgaaagataataccagttactaatgttatcactacaattagctaaggtttgatagctataaagaggacagctctaaatttggtcaagctctacttagagtcacctgcttagaaaagaagatgttttggaggttctgcagggacctgaggcaactcccaggcagcacttagaagttcacaacctgcctgctgcctgaacttagaaaaaagtgtggttattcttgcctccttcagcaggc

SEQ ID NO: 293437 - DNA, 634 bp, Homo sapiens
caatgggtacctcaaaatattcccaaccaggtaaaaagaagttccctttggagatcttatctccccaaaatgttccagcggaaccacattcctccacagaggctccattcagagagcactcgggaggcgtctaggggcatgaagagtgaactctacctcggtgccttgtgctaaccacagcaggatccctagtttgagcaggatccctcaaagtgtgggtcctgaaccatctgtacttgaatcacccaggtacatgtttaagatacaaatttccaggctctagctcagaccagctgaataagtatctataggargaaaaatatttgctactcatgtcacagcaaaaggccaatatcctaataagtaaagagttcttataaatcaataaaaaaacaaacaatccagtgccaaaatgatcaaagggtgtggccaaagggctcacagaaagggaaatacagatggctcttaaatatatgaacattcttaacctcactcataacaacagaaaggctcattgaaaggtcaggaaagagcactcttagacctagccacaaaggtcagtttggcaagaccatccaaatgcaaaacacacaagccctttgacccagcaattacaattctatatttcacacat

SEQ ID NO: 293438 - DNA, 634 bp, Homo sapiens
caatgggtacctcaaaatattcccaaccaggtaaaaagaagttccctttggagatcttatctccccaaaatgttccagcggaaccacattcctccacagaggctccattcagagagcactcgggaggcgtctaggggcatgaagagtgaactctacctcggtgccttgtgctaaccacagcaggatccctagtttgagcaggatccctcaaagtgtgggtcctgaaccatctgtacttgaatcacccaggtacatgtttaagatacaaatttccaggctctagctcagaccagctgaataagtatctataggaggaaaaatatttgctactcatgtcacagcaaaaggccaatatcctaataagtaaagagttcttataaatcaataaaaaaacaaacaatccagtgccaaaatgatcaaagggtrtggccaaagggctcacagaaagggaaatacagatggctcttaaatatatgaacattcttaacctcactcataacaacagaaaggctcattgaaaggtcaggaaagagcactcttagacctagccacaaaggtcagtttggcaagaccatccaaatgcaaaacacacaagccctttgacccagcaattacaattctatatttcacacat

SEQ ID NO: 293439 - DNA, 584 bp, Homo sapiens
gcgcctggaacgccaactctgcttatctccccaggggcccacggcgaggaccagcaaggagcctccagttatagcagcacatactggcggactctttcctgcccatggtcagagaagaaaggaaagcaaggcggtggggggaggggtgccatttcatcccacgcaaatgctcaatgttcaagattcaaagaaacatccatacacggacacaaatgactgttcctaatgactgtgactgtgtacttaagatttagtgaatattttgcagtatatcccacagatgcagtgtaatttagtggttaaactcataggctttggggtcagagagactgggacttaagtcctgattgtgaccttgagaaagtgatctcggtttcctcatctgggcaatggggagaatactaacaccaatctcagaaggctattgtgagaattctatgagataacaagcttggcaggggacscagcacagagtgagggttcaggtgatgtcacctgctattaaagtcactatgaccaggtcaaatcagatgtctgtatagctatagaagtagacttgaagaagccaacattgaagccaagct

SEQ ID NO: 293440 - DNA, 537 bp, Homo sapiens
cccactctggtgccagaaagaggatactacccccaccccgcccccaccaacccttgccaagctttggatcgcagacatcttcatgtactaggagttaggattccggggctctctgggtgagacctacatggcttcctcctcactatgacccaagagcttgaccacagggagatttggactgaagaayagatttcttgcaagaagcaaaggagttttcctccaggtacaaaacagaactgctgaggtacctgagaggtgttacctgcatcagtcctctcaaaccaagctcccatgacacaggatctggcctgggaggaatatggttcccctatggtcacgggatctgtttgggggtaatgcagctctcagagattgagccaagtaacccccaagggacctctgtagtgcaaaggcaggttttctgtgggtgaggacaatggacaacatgatgtgggcagcagggactgaattccaaatggccctggatgatggtcctgctccccttgtaccagctgtgtggtcttggacaagtcactt

SEQ ID NO: 293441 - DNA, 537 bp, Homo sapiens
cccactctggtgccagaaagaggatactacccccaccccgcccccaccaacccttgccaagctttggatcgcagacatcttcatgtactaggagttaggattccggggctctctgggtgagacctacatggcttcctcctcactatgacccaagagcttgaccacagggagatttggactgaagaatagatttcttgcaagaagcaaaggagttttcctccaggtacaaaacagaactgctgaggtacctgagaggtgttacctgcatcagtcctctcaaaccaagctcccatgacacaggatctggcctgggaggaatatggttcccctatggtcaygggatctgtttgggggtaatgcagctctcagagattgagccaagtaacccccaagggacctctgtagtgcaaaggcaggttttctgtgggtgaggacaatggacaacatgatgtgggcagcagggactgaattccaaatggccctggatgatggtcctgctccccttgtaccagctgtgtggtcttggacaagtcactt

SEQ ID NO: 293442 - DNA, 515 bp, Homo sapiens
aactcagctgcagacaatgtgtaagtgaacacgtatgaccatgttccgataaagctatttacaaaaataggcaattggctgaacttggcccctggctagacagtaggttgggtagtttcccaaccactgttctaataggatctagacttacctgaaagttgggaagtgaaaacaaaacactaagagtagcccctgaatcccacttcccatcacctggctcccctagagccctcatctctgccactgggactttatctagtgtctctcctttcctcatcctgacccacccctcctggkatgggttaggtcttctccaccgctctgaccacagttttgaggtacacactgatttttctgatgacttgatgagtatgggcctctcccactggtttgggagtgctgggaaggcaggggttgtgtttaacttctttctggctcccagcacccagcacaaagcctggcatatagtaacagctccataaaaacagtttaactaaacaaatacatgaaaatcc

SEQ ID NO: 293443 - DNA, 554 bp, Homo sapiens
tttttccatgtggagtcttcaaaatctggtgtgcattgtatacttagagtacatctcaattcagactagccatgttttaggtgccctctagccacatgtggccagtggatgccatattgggtggcatagtctaggctgtgcttggtgtaatgggtggaggccatacttcagagtaaatttttctgggtttcaattcattcatttagttcaataactatttattgagcatatactatgtgccagatgctgaggataaaatggcaaatgagaaagatttgatttctgccttcatggaaggcatatgctaatggaagagggtgacacaaaacaaatttacaaggaagtaaatacagtaatttcaaagtgttccaggtgctrtgaaagaagcagacagggtgctgagattgagacttatacagtgatcatgaagacctctctgttctgctgaagctgaggtcagagaagaggccgtacaaagagtggaggtgtcggggggatagaggagcatgttccagggagagagaagacatgtgcaaaggccctgaggcaggaaa

SEQ ID NO: 293444 - DNA, 554 bp, Homo sapiens
tttttccatgtggagtcttcaaaatctggtgtgcattgtatacttagagtacatctcaattcagactagccatgttttaggtgccctctagccacatgtggccagtggatgccatattgggtggcatagtctaggctgtgcttggtgtaatgggtggaggccatacttcagagtaaatttttctgggtttcaattcattcatttagttcaataactatttattgagcatatactatgtgccagatgctgaggataaaatggcaaatgagaaagatttgatttctgccttcatggaaggcatatgctaatggaagagggtgacacaaaacaaatttacaaggaagtaaatacagtaatttcaaagtgttccaggtgctatgaaagaagcagacagggtgctgagattgagacttatacagtgatcatgaagacctctctgttctgctgaagctgaggtcagagaagaggccgtacaaagagtggaggtgtyggggggatagaggagcatgttccagggagagagaagacatgtgcaaaggccctgaggcaggaaa

SEQ ID NO: 293445 - DNA, 1189 bp, Homo sapiens
tagggctccatttccctctctctaagtcggcagaagcagactaaggacttcaatatagaattatcttaasgaaatttacaaaacatgaaattgaccattttcacacagacacttcaacggcatttacagtcaacaatgtggtgcaaccaccacctctatctacttaaaaacatttatatcacccccagaggaaaccccagacccactaataacagtcactccccatgtcccctcctctcagcccctggcaacacccatctgctctggctctatgggtttacccattctggacatttcatagaaatggaatcctgcagtacaagcccttttgtgtctggcttttttcactttgtctaatctttttgaggttcatccacattgcagcatgcacgcatatctcatttcttttaagttacattgagacactagtgctcggtgaaccgaatcgaaactccaattcacctgctgtacaggctggggcctcaagaacaagcctctcacttcccagagtgcctgtccccgtgcccgtcccctgtcaggatccattacggagggacaaggatggagacacwctgggtgccttgtgactcatcccctttgtgcccaggcattcactatgccagcccctgccctcaagatgatcccagtctagtgaaaatgatcaataatcaaaaaactctcactgcagttccatcctaggtacagaccccaaataattgaaagcaaggactgaaatacttgtagacaaatactcatagcagcactattcacaattgccaaaaggtggaaacaacccaagtgtccatcaactaaggaatggataaacaaaatgtggtacgtccatataatggaatattattcacccataaaaagggaagaagtactgattcatgtggatccaccttgaaaaacactatgctaagtaaaagaagtcagacacaawgggtcatatatcatatgattccatttatatgaaaaatcccaaagaggcaaatctatagagaaagagagcagattcgtggttgccaggagctggggctggcagggaatggggagtgactgttaataggaatgggtttttgagggggtgatgaaataggtttggaactaaatagaggtggtggttgcacaatcttgtgaatgaactaaatgtcacatcctggtttacttcgaaatgattaattttatg

SEQ ID NO: 293446 - DNA, 592 bp, Homo sapiens
ccagggtttttattgttttgggttttacatttaagtctttaacgcrtcttgagttaatttttttaatatggtgtaaggaagaggtgtagtttcaatcttctgtatatggctaaccagttatcccagcaccatttattgaatagggactccttcccccatttttttgtttttgccaggtttgtcaaagatcagatagctgtaggtgtgcagtcttatttttgggttctctgttctcttccattgctctttgtgtctgtttttgcatatatggtgtatattttaaagtgatctttttggctgcttgttgggaagtggattatagaaaggcaggaatagaaaaactgagaagatttggtaggctgtgataataatcagggcaaattatagggaactacctgtgcagtggaaatgagggggtagatttgggatacatttggggactgtagtaggcaggcagaacagactaactgatagattagaagtgaatgagaaaattaagagtgatctgaattttggggttaaataatttggtagatgcttgtgtcattatggaagaaaattattttattttagtaacgaaattacttcatta

SEQ ID NO: 293447 - DNA, 1247 bp, Homo sapiens
aagtcttcaataaattttactgactcaattaatgaagttggcctataataaatagaaagcctaaaagaattattcagaaggcaagcatcacgttaaggtcaatctgacagcctaactccctacatacctggtgttgagaggcaatacagaggttaagaaacccaggcttgtttgttttcatttcagtgaaaacgggacaaataaataggataaatggcatgcatcatgtattaaatgtccctctatatagctctttagtcccttgtgctaatgtatctatacatacaattactgggtcaaaatgcacttgaatagtaaatttgtcacagatatgatcaaaytgtcctcaaaagaaaaggcgttctcacaaatgtatggactatttctggatggatacacaaaatgtactaagattactagtctgtgagctgtcaaactagggatctggtaggggaaagatgttgattctttcactgtatgttttcctattatttcatattcaaacccaatatattacatattttttaaaacttttaaaactgcctgactcttttgagaccactccctataaccatatggaatattcttttgtgcatctttggaagcccaccctcagcaagcctwaagtcttcaataaattttactgactcaattaatgaagttggcctataataaatagaaagcctaaaagaattattcagaaggcaagcatcacgttaaggtcaatctgacagcctaactccctacatacctggtgttgagaggcaatacagaggttaagaaacccaggcttgtttgttttcatttcagtgaaaacgggacaaataaataggataaatggcatgcatcatgtattaaatgtccctctatatagctctttagtcccttgtgctaatgtatctatacatacaattactgggtcaaaatgcacttgaatagtaaatttgtcacagatatgatcaaattgtcctcaaaagaaaaggcgttctcacaaatgtatggactatttctggatggatacacaaaatgtactaagattactagwctgtgagctgtcaaactagggatctggtaggggaaagatgttgattctttcactgtatgttttcctattatttcatattcaaacccaatatattacatattttttaaaacttttaaaactgcctgactcttttgagaccactccctataaccatatggaatattcttttgtgcatctttggaagcccaccctcagcaagcct

SEQ ID NO: 293448 - DNA, 583 bp, Homo sapiens
cttgtgctaatgtatctatacatacaattactgggtcaaaatgcacttgaatagtaaatttgtcacagatatgatcaaattgtcctcaaaagaaaaggcgttctcacaaatgtatggactatttctggatggatacacaaaatgtactaagattactagtctgtgagctgtcaaactagggatctggtagrggaaagatgttgattctttcactgtatgttttcctattatttcatattcaaacccaatatattacatattttttaaaacttttaaaactgcctgactcttttgagaccactccctataaccatatggaatattcttttgtgcatctttggaagcccaccctcagcaagcctggcatacgggactctatagaggaactgcactggtactacaaaagttcttgccttgggctagtcaccagcttcgtgttatgaaattaatatgttgaggacctaaaccctgatgtgatggtatttggatatggggcctttggtggagcccccatgaggggattaatgcctttataaaaagaggaagagtgagatcactctctctactgtgtaaggacacagta

SEQ ID NO: 293449 - DNA, 583 bp, Homo sapiens
cttgtgctaatgtatctatacatacaattactgggtcaaaatgcacttgaatagtaaatttgtcacagatatgatcaaattgtcctcaaaagaaaaggcgttctcacaaatgtatggactatttctggatggatacacaaaatgtactaagattactagtctgtgagctgtcaaactagggatctggtaggggaaagatgttgattctttcactgtatgttttcctattatttcatattcaaacccaatatattayatattttttaaaacttttaaaactgcctgactcttttgagaccactccctataaccatatggaatattcttttgtgcatctttggaagcccaccctcagcaagcctggcatacgggactctatagaggaactgcactggtactacaaaagttcttgccttgggctagtcaccagcttcgtgttatgaaattaatatgttgaggacctaaaccctgatgtgatggtatttggatatggggcctttggtggagcccccatgaggggattaatgcctttataaaaagaggaagagtgagatcactctctctactgtgtaaggacacagta

SEQ ID NO: 293450 - DNA, 569 bp, Homo sapiens
aaaaattgtaaattgccaaaaaattatgttattgagatattgttcacattaaatgatatacatcaatttagggaacactgataataacatactgcaacattttattaataaatatttacagtctcaccatttacttaggaatttagaagtatgtatctgtggtgttttaaatttttccttaattatcttacatgttttctgtgatcttttattatttctgcctgctactataaatagtatctttttgtaagtcacatattctatccattgtgtcagtatacacttaaatttgtatttaaatattttatatctggcaaactcactaaactctgttattattcttttggttttatgtatatttagttataactgtgaataaamccatatttctagtcattctactttttattttctatatttcttactatgttgaatcagaggacaattgaatacagctgatcattttcctaattaaaagagaataacatatcactattaaaaattatgtatcttgtaggttttattaagctattcattcttagactaaggaattttttgtatttaaaagt

SEQ ID NO: 293451 - DNA, 562 bp, Homo sapiens
acagaaatagaatgggaccactgataatttagcatgctctgctccatcccatttcttttcccatrtaaataatttctattttattaaataatttatatttatttaaataatttagataatgataattagtaaacataataaatttgtattaggaaagtacagaaataatctcttaatgtttaagagaggggcacataaaatatcaatttaccgtgaattatttttatagcatacttgacaagtatattttaaaggaaaaaccagaatacaattgagcaaaatgacacatactaatgtgactgagagaactggagaaatagatatgaccgggagtagaaagtgagtttatctcaggaaagagaaattatacttgagtccaggaatatttagattatggaaatgtgataattagaacatgataggataaagcaagcctctagcagtaactatggaatgtttgagcaagtgtactgtgtaaatccaagttaatatcctgagatgggaggccagttcaggtccattcctgaaatagaagacatatcttaacaactttattaccatc

SEQ ID NO: 293452 - DNA, 562 bp, Homo sapiens
acagaaatagaatgggaccactgataatttagcatgctctgctccatcccatttcttttcccatgtaaataatttctattttattaaataatttatatttatttaaataatttagataatgataattagtaaacataataaatttgtattaggaaagtacagaaataatctcttaatgtttaagagaggggcacataaaatatcaatttaccgtgaattatttttatagcatacttgacaagtatattttaaaggaaaaaccagaatacaattgagcaaaatgacacatactaatgtgactgagagaactggagaaatagatatgaccgggagtagaaagtgagtttatctcaggaaagagaaattatacttgagtccaggaatatttagattatggaaatgtgataattagaacatgataggataaagcaagcctctagcagtaactatggaatgtttgagcaagtgtactgtgtaaatccaagttaatatcctgagaygggaggccagttcaggtccattcctgaaatagaagacatatcttaacaactttattaccatc

SEQ ID NO: 293453 - DNA, 562 bp, Homo sapiens
acagaaatagaatgggaccactgataatttagcatgctctgctccatcccatttcttttcccatgtaaataatttctattttattaaataatttatatttatttaaataatttagataatgataattagtaaacataataaatttgtattaggaaagtacagaaataatctcttaatgtttaagagaggggcacataaaatatcaatttaccgtgaattatttttatagcatacttgacaagtatattttaaaggaaaaaccagaatacaattgagcaaaatgacacatactaatgtgactgagagaactggagaaatagatatgaccgggagtagaaagtgagtttatctcaggaaagagaaattatacttgagtccaggaatatttagattatggaaatgtgataattagaacatgataggataaagcaagcctctagcagtaactatggaatgtttgagcaagtgtactgtgtaaatccaagttaatatcctgagatgggaggccagttcaggtccattcctgaaatagaagacataycttaacaactttattaccatc

SEQ ID NO: 293454 - DNA, 568 bp, Homo sapiens
atatcttaatactactataagttatttagaaggtaattttatcaacacttccaataagttaccctgctataaaccttaaactaaatgatatgtgtacatatcacatgtatacagkgggtatatgtatgacatacctttttatagatatagggtataaaaagaaggttttgatcaatttcactgaaatactagataactaagtatcaggaataacatgaattgagtgcttacatatacagtgggtatatgtatgatatacctttttatagatataaggtataaaaaaggttttgatcaatttcactgaaatactagataactaagtatcaggagtaacatgaattgagtgcctattacatgttcagcactttatgtccaaacagctactaaatggcagtacagagctgaatacaggctgtaggatctaaaacatggctttctcctttcagctctgttgtctctgcctcagtgctccttccatttcactctgcatgtatcaatcagattgactaatttatacattcacactactcactttagagaaatcctaaaaataaaaataaaaaaa

SEQ ID NO: 293455 - DNA, 490 bp, Homo sapiens
acaacatccatctcatgcaaatcatactgataaagattaaataaataagctagagggagcataattaggccagaataagctttctgcctaaatcatttgtacaattgcttattgcaggctcacaattacttatcacagagctttccaacacaggtcccttcagtgagttacaggtatgccaaggcatggatcctctctgctcrggaacagtctggccggcccagttaggtaatgtctcagtatgaacagcctcctctatttacccgtaactgctgtataagtattatctttatgtataccatgatgtgaatgaatggatgaaaaaataaataagtggaaagaccaatacatcagatgagaaatagtgaattaaaataaaccagttaagaactccaaactgaaggaactccaaaatgtttgtttttcttgttgttattgacttggaatcaatataaatcttgagaataaaaggggaagaagggtggagaaa

SEQ ID NO: 293456 - DNA, 582 bp, Homo sapiens
ttgcaaagttgatacttccatatttattattttaacaatattttgtttttctaagtgaaaagtagaaaaaaaaacacatgaagccattttttctagatagaagaaagttcataggagaaaaaagatacaaatacacatagatgtaaatatagatacagatagatactgacataaacatacyaatccacaaagctttttgcattattaggcttggaggagataaaaggatatatcaaggaggcaaaggcaaaggcaaaaaaagagaataaaaccagagcaaaaagtggtaagaaaatgtgacagcctaaattgcttgaaagacaagtgccactatcagtactgcaatgaaaacactgagcgttggtatagaaggaaaaagggagcactaaatgcaagattcatggattaagccaggaaccctggaagagggctaaagatttgtaacattccctgctgtcaagctgaaacaactgtaaatcctctctgaggaaagcttccacaatacagagttataggatatatatatatatatatataacttaaatatcataactatatatataacttagatatcatacatat

SEQ ID NO: 293457 - DNA, 582 bp, Homo sapiens
ttgcaaagttgatacttccatatttattattttaacaatattttgtttttctaagtgaaaagtagaaaaaaaaacacatgaagccattttttctagatagaagaaagttcataggagaaaaaagatacaaatacacatagatgtaaatatagatacagatagatactgacataaacatactaatccacaaagctttttgcattattaggcttggaggagataaaaggatatatcaaggaggcaaaggcaaaggcaaaaaaagagaataaaaccagagcaaaaagtggtaagmaaatgtgacagcctaaattgcttgaaagacaagtgccactatcagtactgcaatgaaaacactgagcgttggtatagaaggaaaaagggagcactaaatgcaagattcatggattaagccaggaaccctggaagagggctaaagatttgtaacattccctgctgtcaagctgaaacaactgtaaatcctctctgaggaaagcttccacaatacagagttataggatatatatatatatatatataacttaaatatcataactatatatataacttagatatcatacatat

SEQ ID NO: 293458 - DNA, 585 bp, Homo sapiens
tcatgcctcattgagagcatttatcaaatgtatcatagctgtctgttttctgtccacctttcccagttgactgtaagcttctgagacagtgactttgacttttgaccttttgattccatgctgctcttyaagatgtagcaaagtatttaacacatgttagttcacaccaaggtgtacaataattgttaatgaatgaatgctatattatcttaatactattaagatgttacatttattagtcatgtaattaattcagtgacaactttcatcaacaagaaactttgattttcctataactttttgatgagaaaaacgtatgtccacatcagaagataatgcatagtttaattagtaaacttaaaatttggcatttggattgttacactgatgtcttatcagtttatgaagagtaaattagttttcttaatcaaattcctaaaagccagaaacaggaccatggtagactggttgagataatgtcaccggttaagagcgtgggcagatagccagataatctttctttacataaatctctgcaactggaattcccttccttctagaaagattatcagagcatttttcaaa

SEQ ID NO: 293459 - DNA, 587 bp, Homo sapiens
ttaataatggtaaggatcttttggtttaacccctggttgggacgcaagaccgaatacatatgtgtggataaattggtcaggaggtgggaaaaaatatttcagaagctccctgacatggaaatccaatgaactttgattttaaaacctgttggtgacgttctaatgagggctacaattataatgagagaatatagagatgcatcgtttgatggaattaggtaaaagtttggatgaaaattgaaatgtttgaacagggtatatctgaagtgactctctccttgaccsgaacatattattaggatggatatcttgtctaacaggagaacactttttctacctaatgctgtaaaacaaaatgcttgtaagcctgtctttcagatagtattaattggacatgctaaatgggagtttatagaatatcccacacgagctgttaatttcagatagtaccagatacctggcagacaaaagacagtgcaacattaattaattaaatattgattaattaagtttagagatatggaaagaagttggagtactggagagacattttataataatggattgaaggaattaatgttgttaaa

SEQ ID NO: 293460 - DNA, 587 bp, Homo sapiens
ttaataatggtaaggatcttttggtttaacccctggttgggacgcaagaccgaatacatatgtgtggataaattggtcaggaggtgggaaaaaatatttcagaagctccctgacatggaaatccaatgaactttgattttaaaacctgttggtgacgttctaatgagggctacaattataatgagagaatatagagatgcatcgtttgatggaattaggtaaaagtttggatgaaaattgaaatgtttgaacagggtatatctgaagtgactctctccttgacccgaacatattattaggatggatatcttgtctaacaggagaacactttttctacctaatgctgtaaaacaaaatgcttgtaagcctgtctttcagatagtattaattggacatgctaaatgggagtttatagaatatcccacacgagctgttaatttcagatagtaccagatacctgrcagacaaaagacagtgcaacattaattaattaaatattgattaattaagtttagagatatggaaagaagttggagtactggagagacattttataataatggattgaaggaattaatgttgttaaa

SEQ ID NO: 293461 - DNA, 536 bp, Homo sapiens
tatatacaaatacatctgagatttaaaaacactatgtacaaatctctgctaatgctatttcacattacactgtaattatgtatttacttttctgcaattccttagaaggctatactccttaaaggcagtcactgggttttgtttaactctgtaatgttaggcacgtaataaatgcctgacatacaatgtgcattaaataaacatattgaataaattacacattatacaatagggcaatatttaagagttttaagatgatagcagacacatgataatgatgctggaggtcacagtcagagtaygaagaagccactcctagctgctgtgatcagagaatatatattcctatgtactttgggccatatggttctacttgcaataaaatgctccccctagactccacaagaggtcagagtcttctttcttgatctaatgaggctaggggatcttatttaacaaaccaggcatataacagctgaaagaaaagagctcattttttctttgatagtattgctgagtgcagaaattatgcaaag

SEQ ID NO: 293462 - DNA, 537 bp, Homo sapiens
gtggggcggggtggggggtggcggcacgtttgtgtgtgtgtgtgtgtgtgtgtgtgtgtgtgtgtgtgtgttttcctttctgggctaatccagaaaaaactgttatcccagagatgagcagagcttctcatctaggcatgtgatggaggggagaggtagacagaaaaagaagcttaaactttcacaaatttatgtttgctggaataacttaatctttttctaagggttgtccaaaatgtatgtttccatattactcagagtctgataataaatgcatttcaggatcaagaataacactggactctaagttcccattaacaagtactaaaargagtgtaggggagaaggtaaccaagtagcaagctgaccaccaatggcaaggccaccattagattccataacaacactggtcatctggctcagaacaagatgtcaagctgaaaggaaatgctggccatggacaagaaaagtagagccattttcagcatgtcctgagaccctcctcaaacaggttgagcaatggagagagaataatca

SEQ ID NO: 293463 - DNA, 599 bp, Homo sapiens
ggaggtagagagtagaaggatggttatcagaggcttggmaaggtagtggagggtttgggggagatgggtatggttaatgggtatataaaatagttagaaagaatgaatagtacctagtacttgatagcataagagggtgactgtagtcaaaataacttaattgcacattttaagctaactaaaacaatataattgaattgtttataacacaaaggataaatgcttgaggggatggataccccatttttcatgatatgataattacacacagcatgttgtatcaaaatatgtcacgtaatccataaatatatacacctactatgtacccacaaaaataaaaaataaataaatgtttctgagatttccatgtctattattttcaatcttctctcttcacttcttaaagcaaagaaataaataggagtggtgacagggagaaaatcaagaaaagatgctgataataagactcttcaatcaaatcttttcttattctattattttcttcacctttactaatacttgctcactcttcagaaaggtgattgggagtgatgcttaaataatcaaaccgcagacattatggactgattcttcgtttt

SEQ ID NO: 293464 - DNA, 643 bp, Homo sapiens
actactcatatcaccctataggcagaaacaggaattgaccacagaatcattaaagatggtatttcttgcaagaataaatgctgacagaagagactttaaatggaaagagaaattaccctcttaaaaaaaaaaatgaggaaaataggtacggacttcctgagagtgtaatgtaccatgtactgatggacaccagaaccattcttgcccttctattgtgtgcctgtctatagcgatccggaaaagtgagctaaatatgcctggctagattcgcaggccctgagattaaatagaacctggcaagtttctgattatgctactgtcttctaaacccaaagccgttggacatattcttmaaagtgctacaaatctactctcttaactttgcacacattaacagatttaaaaaaaatttaattatagataagacatgcaaaattgacgttaattacatccttaggcttttctttctctttacttttttcatattagagggagaaactcacctagcaaagatgtgcattggtgtgtacgtggataagttatctcatgttgatgctcttttttatggctgcattgttggtaaagaggcagaatgttacacttcttactaagtcaaagtagaatgatggcaaaatgtgaagtt

SEQ ID NO: 293465 - DNA, 610 bp, Homo sapiens
tgtcttctaaacccaaagccgttggacatattcttcaaagtgctacaaatctactctcttaactttgcacacattaacagatttaaaaaaaatttaattatagataagayatgcaaaattgacgttaattacatccttaggcttttctttctctttacttttttcatattagagggagaaactcacctagcaaagatgtgcattggtgtgtacgtggataagttatctcatgttgatgctcttttttatggctgcattgttggtaaagaggcagaatgttacacttcttactaagtcaaagtagaatgatggcaaaatgtgaagtttattattagagtaattattaatgaacgtgctacaaaatggtgaaatagaagagatgcgctcagttttgttaaatgaaaaatcagcacagaatcatcatagaatagcaacaagaaatttaattttggatatctgctggaagtctcacttttatgaaagcagaataactgatgagaattgaaaataaatgataaacttaagttacagaggtgagaagagagccataggtaggaagaataaaagtggttgctgctcaatataacagaagccctgtaaagtgaagcca

SEQ ID NO: 293466 - DNA, 610 bp, Homo sapiens
tgtcttctaaacccaaagccgttggacatattcttcaaagtgctacaaatctactctcttaactttgcacacattaacagatttaaaaaaaatttaattatagataagacatgcaaaattgacgttaattacatccttaggcttttctttctctttacttttttcatattagagggagaaactcacctagcaaagatgtgcattggtgtgtacgtggataagttatctcatgttgatgctcttttttatggctgcattgttggtaaagaggcagaatgttacacttcttactaagtcaaagtagaatgatggcaaaatgtgaagtttattattagagtaattattaatgaacgtgctacaaaatggtgaaatagaasagatgcgctcagttttgttaaatgaaaaatcagcacagaatcatcatagaatagcaacaagaaatttaattttggatatctgctggaagtctcacttttatgaaagcagaataactgatgagaattgaaaataaatgataaacttaagttacagaggtgagaagagagccataggtaggaagaataaaagtggttgctgctcaatataacagaagccctgtaaagtgaagcca

SEQ ID NO: 293467 - DNA, 594 bp, Homo sapiens
aggtcagaatattgcttctatggtttatttgtccccaccaaaactcatgttgaaatttgatccccaattgtggtggtgttgggagatggagcctggtgggaggtgtttgggttatagggtgcatccctcatgcatggcttsgtgctgttttcacagtagtgagttctcacttttgtgagactggattcgttttcgaggcagtggggtgttataaagccaggacatccctcaggtttccatctcttcctgtacctccaattcccctttcaccttctccatcatatgagcagcatgaaagagctcaccagaagctggggacatgcccttgagcttctcagccttcaaatcatgggctacatataagcctctttcctttataaattacctagtctcagatattcttttacggcaacacaaaatggactgtcttattttggtgtaattggtcaaaataaatgaaaaatgtttactaagcactaactatgaagtcagcatctactagaagttaatagaggataaaaaagaaatagacatcatggcccccatctcaagttgggtatgatctggttgaggagatgaggaaatcagacctaa

SEQ ID NO: 293468 - DNA, 594 bp, Homo sapiens
aggtcagaatattgcttctatggtttatttgtccccaccaaaactcatgttgaaatttgatccccaattgtggtggtgttgggagatggagcctggtgggaggtgtttgggttatagggtgcatccctcatgcatggcttggtgctgttttcacagtagtgagttctcacttttgtgagactggattcgttttcgaggcagtggggtgttataaagccaggacatccctcaggtttccatctcttcctrtacctccaattcccctttcaccttctccatcatatgagcagcatgaaagagctcaccagaagctggggacatgcccttgagcttctcagccttcaaatcatgggctacatataagcctctttcctttataaattacctagtctcagatattcttttacggcaacacaaaatggactgtcttattttggtgtaattggtcaaaataaatgaaaaatgtttactaagcactaactatgaagtcagcatctactagaagttaatagaggataaaaaagaaatagacatcatggcccccatctcaagttgggtatgatctggttgaggagatgaggaaatcagacctaa

SEQ ID NO: 293469 - DNA, 594 bp, Homo sapiens
aggtcagaatattgcttctatggtttatttgtccccaccaaaactcatgttgaaatttgatccccaattgtggtggtgttgggagatggagcctggtgggaggtgtttgggttatagggtgcatccctcatgcatggcttggtgctgttttcacagtagtgagttctcacttttgtgagactggattcgttttcgaggcagtggggtgttataaagccaggacatccctcaggtttccatctcttcctgtacctccaattcccctttcaccttctccatcatatgagcagcatgaaagagctcaccagaagctggggacatgccctygagcttctcagccttcaaatcatgggctacatataagcctctttcctttataaattacctagtctcagatattcttttacggcaacacaaaatggactgtcttattttggtgtaattggtcaaaataaatgaaaaatgtttactaagcactaactatgaagtcagcatctactagaagttaatagaggataaaaaagaaatagacatcatggcccccatctcaagttgggtatgatctggttgaggagatgaggaaatcagacctaa

SEQ ID NO: 293470 - DNA, 652 bp, Homo sapiens
gcagtggcgtgatctcggctcactgcgagcttcacctcccgggttcatgccattctcctgcctcagcctcccgagtagctgggactacaggcacccaccaccatgcgcagctaattttttgtatttttagtagagatgggttttcactgtgttagccagcatggtctcaatctcctgacctcgtgatgcrcccgcctgggcctcccaaagtgctgggattacaggcgtgacccacaacacccggcctgaaagctaattttcataaagtgacaatgggcctctccagctctggctgatacacaaatattgttttcacttaggaactgagtatttcttgaagcgggttaataagggttttacagaaggctggtgaattatctggaggcaattttacaatttagagaacaagtgattatgtctatttagtgatgaatggggcagaattgacattctcaaaagacagggcaataggattctagtcagtaagctttgctcagtggacgctttcacctggagttttagagaaactagctaagtacagtgacttttctacatgtcaatatgataaatatttgttaaatgttactgtgtaaacagcacccaattagtcactggtacacaatttgcttctctcgttcacctgtgtctcagt

SEQ ID NO: 293471 - DNA, 597 bp, Homo sapiens
tcatataaaatgatgtaggccaggtgcagtkacttacgcctgtaactccagcattttgggagactgaggtgggtgcatcacttgacctcaggagtttgagaccagactgggcaacatggtgaaaccccatctctccaaaaaaaataaaataaaataaaaattagcctggcatggtggctcacgcctgtattcccaactacttgtgggactgaggtgggaagatcacttgagcccaggaggcagaggttgcagtgagccaagattatgccactgcactccagcctgggtaacagagcaagaccctgtctcaaaaataaataaaaataaaatggtgtagtattagcatgtaagctatgcacattttcttgtttactttatctgtagattacttataatacctagtacaatgtaaatgctatgtaaacacttgttatactgtattgtttaggaaataatgacaagaaaaagatctgtatgtattcaatgcaggcacaaccatcctttttttttttttccacgtattttcaaactaggctggttgaatccacagatgtggaacccagggatacagagagttgactatgtactcatttgggt

SEQ ID NO: 293472 - DNA, 597 bp, Homo sapiens
tcatataaaatgatgtaggccaggtgcagttacttacgcctgtaactccagcattttgggagactgaggtgggtgcatcacttgacctcaggagtttgagaccagactgggcaacatggtgaaaccycatctctccaaaaaaaataaaataaaataaaaattagcctggcatggtggctcacgcctgtattcccaactacttgtgggactgaggtgggaagatcacttgagcccaggaggcagaggttgcagtgagccaagattatgccactgcactccagcctgggtaacagagcaagaccctgtctcaaaaataaataaaaataaaatggtgtagtattagcatgtaagctatgcacattttcttgtttactttatctgtagattacttataatacctagtacaatgtaaatgctatgtaaacacttgttatactgtattgtttaggaaataatgacaagaaaaagatctgtatgtattcaatgcaggcacaaccatcctttttttttttttccacgtattttcaaactaggctggttgaatccacagatgtggaacccagggatacagagagttgactatgtactcatttgggt

SEQ ID NO: 293473 - DNA, 179 bp, Homo sapiens
ttaaagcacctagccccatacctttgacatatgcctagaaactatcctactatcctccacattactatgggcaaccattgtacaaayacaggttgccatttttcagtttctctaatagttgcctcaccatatccaccaccctaagctaataacatatattttaggttctgattacagca

SEQ ID NO: 293474 - DNA, 628 bp, Homo sapiens
tcattttgtcagcacagggcacaatgaaatgccatcacagttgcctcattagtaagcaatatcttccatttttgaaggcaccccagcatgttctgtaatagctcccattaagtccagtcgatgtcctctggactccccctccgcctcccacccccagatgatgatgacacaaatgtcttgaaatattgacatgtccgcagtcactcgtttacagaatgtctgtacaaatatttacattrccccgtccctcccagcaaatttgcctttagattaatctgcacaccgaacgcaggccgggagtggcttggagtgtggaagggtttaagggtgtggaagggttgtagtgaggcgggactgactgactttgatcggctttgccaggggcttgaaggaaccggctcttcctttcgcagaacccaggtgtttctctgggcccgggaagtttttgctcccgagcgagtcagggacgggagcaggcacgcacagtcgcgtaagtgtatgaaatgacgacctcagaagggcgcccagggacatggggcttggcagccccgagcggaggccgccaggcagccgttctttcggaattcggtctcccgcagtgctcccggctgcggcgctcctgggccga

SEQ ID NO: 293475 - DNA, 537 bp, Homo sapiens
aagttttgtggtaggtacaagttttctttctgtggtggtcactgtgatgcactgctcagattcccccttcaggactcaaggttttattccccaagcagcaaggaatgctgtggacaaggcagccctcagctgtcagttcctttcaggaatttcctcagttgaagagagattccttgcctaaggtgacagtccctttctggggtggtctacatccaatcactggtcaatgcagaggtataaaggcctagccctgttgccccaattcaaggcatctttgataggtcatcsctgcttcagaacatcccagagggctaagggtttcattgagaatccatcaatccatcacggctccacttctccctctgccagtcccttccgtttccttgcctttcctgtcctaggtgatgatccttggagcatgcctaatgaacctcctgcctgctcatctctgactcacagtctgcctctccgaaagcctacctgtgccatctcggtaactggtttctctctggagttacaaaggactactatttttca

SEQ ID NO: 293476 - DNA, 899 bp, Homo sapiens
tgtgccatctcggtaactggtttctctctggagttacaaaggactaytatttttcaactttctgactattaaatacggctataatttataacattaaaattttatgagcttctctttgcctgctccactttccctctcttgatcaatcagcatgaagtggaaagatatagacgctgagaatgggaacagaaaaagcctaagaggaagccagagtctgtcttgggaaggcaagttaaggtgtaggacaagtttgtctggtccaccacccttttctttgctattttctccctctttcaacccctgcctcctagtgatccctgtgttccatgcattcatattgcatggctcctcccttctcagaagagtaactcatccctactggagctgacttgccttacttagtcaattccagcttctataacagactacaataaactgggcagcttcaawtgtgccatctcggtaactggtttctctctggagttacaaaggactactatttttcaactttctgactattaaatacggctataatttataacattaaaattttatgagcttctctttgcctgctccactttccctctcttgatcaawcagcatgaagtggaaagatatagacgctgagaatgggaacagaaaaagcctaagaggaagccagagtctgtcttgggaaggcaagttaaggtgtaggacaagtttgtctggtccaccacccttttctttgctattttctccctctttcaacccctgcctcctagtgatccctgtgttccatgcattcatattgcatggctcctcccttctcagaagagtaactcatccctactggagctgacttgccttacttagtcaattccagcttctataacagactacaataaactgggcagcttcaa

SEQ ID NO: 293477 - DNA, 619 bp, Homo sapiens
tttctcttgggttaataccaaggaataaaattgctggtttgtaggttatgtgaatattcarcttattaagtattgccaaattatattcccaaatggttgtactaatttacataaaccagggaaacaaccaaatacaaacactaaataaaaacatgcacttctgttttgcatatatgtctgttgaaatacatatctttttagaaagcaagagaatgatgaacgtaaaacttagaatggcagttatcttttatatggactggagggtagcatgtggggaggaacacacacatggatgtttgttattgataatgacctagtccttgggtttcatggtgagtttctaggtgatcattgtacagtaattcccccgttatccaaagggagtatgttccaagttccctagtagatgcctgaaacctccgatggtgccaaaccctatgtatatgcttcttttccatgcatagatacctatgataaaatttaatttataaattaggtacagtaagagattaacaatcataataaacagaacaattattaacactatactgtaataaaaagttatgtaaatgtggtttctctctctttcaaattatcttattacactgtatttacctat

SEQ ID NO: 293478 - DNA, 591 bp, Homo sapiens
ttgtacagtaattcccccgttatccaaagggagtatgttccaagttccctagtagatgcctgaaacctccgatggtgccaaaccctatgtatatgcttcttttccatgcatagatacctatgataaaatttaatttataaattaggtacagtaagagattaacaatcataataaacagaacaattattaacactatactgtaataaaaagttatgtaaatgtggtttctctctctttcaaattatcttattacactgtatttacctattctcagaaccagattgaccatgggtaattgaaactttggatgggggtagatattgtattaaaaaaaaagaaagaggataatgcatggaccagtgatgatattttaaggttctaaggaaaaagaaaataaggacaatagagttrtcacaagacaataagcctacaagatattagttgaaagatgaagatgcagtccctatgcataggcatgagttgcccagagttcatggaagaaatttgcaaaaaggttgagcaggaagtggtcatgctgagaagaggaaggctgttgtggacttagaaaatgatatgaacagaagttgaggg

SEQ ID NO: 293479 - DNA, 552 bp, Homo sapiens
attttcttaaatcaaatgagagctttcatgtgtcagtatccaaaggcagcgttttaaattttgattatactgtgaaattctgctttaaacaaataaaaattcacattattttccgtcctcttctcttcccccttaaacccctaccattactctttctacacacttaatatttctgttaatttgcttctgagggaatgcttgggtatttactgctaagtgtttttctgggtctttctagaagsccgactgattttattgcttaggtttggggccaaatcctatggttgcctggctctctgagatattgagtcttcaacctttagctgcctgtgagtgactgctcaaatgtcatggggagcctctgcaagataaccattaagggttttttttttttttttcatttgttaaatccccaaaactaatgctattaaggggcttttcatagaactagaaagctctatgtattcatctttttaactcccacatcacatagccttgtacatagtggacattcagtaagtgttgataaatatacaatttttgttaattgat

SEQ ID NO: 293480 - DNA, 503 bp, Homo sapiens
tttgttgtagcctgaaggattctagatgtaatcctacttgtccaatttgcctttattcaagagcaagaccaacataaaatagactgttagtgatagactgtaaaaaaatggagttttattaaagataccatttaatgaatgcttactgtgggccaagaattgggttgcttgcatcrtctatattcagatttaaaccacacaacaacattttggagtaggtatttctatccccattttacaaaataggaaatggaagcacagaagcagtacagcttactgaaaataaaaaatagtaggtggcaaagccaagtttccagatcccaaggtgaatttcaaaacctgtggtgctttaatcctactatctggcctaagggtattagttccataacaattgggtttggagatagcaccctaggggccaagggtgtcatttacatgagaatcaatgaggagccagagaaagtgagttttgtagcagttattaggctagggtgttggggagg

SEQ ID NO: 293481 - DNA, 608 bp, Homo sapiens
aggaagttttcctataatcttaaagtttgttttgtaaacaagtcctctttaatcagggctttcaagctattctgtcacttcaaagtcctttcaaaccagccccaagtcacatttttggtgcacagaccaaaaaataggcctggcaaaagcagccatcattaccactcatcatgctggttagtcttttttaaaagtctaagaagctacagcaagttcactgaacaattattaagaacaagttttaagaagaaaattaatctaatcaatttatttggagatctacctttacaaagcaacaggggacaggactctatgctgtaaagagagatgcaaaatgaacaacaagtggtgtttctactcagaaaatctgcaatttctccaagtagtgcaaaagcccaggagatcagagactgaggatgagagctcttggtatttatagtaaaacaaagggttcccattcccagagaatgcgacgccatccaattccatgtctaatctactgagccagtagaggtaggcttttaaattakcttgtgtaaaataaaatgtccatcatgacaatagcaatggattctgatatatggtattttgtgtgccaggtacttgtc

SEQ ID NO: 293482 - DNA, 547 bp, Homo sapiens
agcaaagatattattatagcttgttcttttgcccagagggattcagctactttataaaatgatccaatcagttttcccagaatctttattaaatagccaatgccattagatagcaaatgattgatttctattggaatgcatcttaaggcacttttcgttaatggatgctatttacctggcctctttaggttaaattaacataatatcatgtattataatcagacaaagtccttttaattcatatttctatctaatgtggttttctaaatgcttaataaagaaaataaaatgttaaaaattactaggatggtaatcaaaaacagattcatgtgagatgagagagggtcctgagctccaggtgaggaactcccccaagttgataccttgatttcagcccgtgagaccctgagcagagaacccagtggaactgtgcctggacttctgacctgtagayacagtgatataatacatggatgctaggttaagccatgaagtgtgttattatttctcatgctgcaatatagaattctttgtgtacatgagttta

SEQ ID NO: 293483 - DNA, 1052 bp, Homo sapiens
agcaaagatattattatagcttgttcttttgcccagagggattcagctactttataaaatgatccaatcagttttcccagaatctttattaaatagccaatgccattagatagcaaatgattgatttctattggaatgcatcttaaggcacttttcgttaatggatgctatttacctggcctctttaggttaaattaacataatatcatgtattataatcagacaaagtccttttaattcatatttctatctaatgtggttttctaaatgcttaataaagaaaataaaatgttaaaaattactaggatggtaatcaaaaacagattcatgtgagatgagagagggtcctgagctccaggtgaggaactcccccaagttgataccttgatttcagcccgtgagaccctgagcagagaacccagtggaactgtgcctggacttctgacctgtagatacagtgatataatacatggatgctaggttaagycatgaagtgtgttattatttctcatgctgcaatatagaattctttgtgtacatgagtttawaagtcttttttcagaaatatattttgtcaccattttctcatagactgtggcttatcttcttctcacaacagtttctttcacaaatgtgaattttaaaatttaataaagtccaaactatccatttttattttataaatggttacaaaattttgtgttatacaattttgtgttgtatctaaaaatccatcaccaaactgaaagtcaactacactttgttatgttttcttctaaaaaaaagtatagttttaacatttacatctgtgatctatttccagttaatgtttgtgcgatatgcaagggctatgtctaagttcgtttactttwtaaatttttatttatgcatgtggattccaatagttccagcaccatttgattaagagaccatcttttctccattgaattgcctttgcatctttgccagttatttgaatctctttgggtcaatttgttgggttcctttgatttaaaggtctattgtttcactattaccactgtgtcttgatt

SEQ ID NO: 293484 - DNA, 2121 bp, Homo sapiens
tcagaaagattgtttagaattaccagcagcatatcttgatataaataagcagagtgtcttctatttgggtaaatgttttacagacagaaagcctccttataaccattatctaggaggactgctctcaccacctctacttagtacactgagtgtacacttacccctcattcattattttcaatagctgtataatattscaggacgtatatgtttcataacttatgttgtgtttctctctaatttggcattcaggtctttttcttaaaagtaactataaactctagccctgccctgactccagaagatttggtcatgaatgtttacagtgtgcttttcatcggatatttctttaacctcatggatggcctaatgcctaagtgttcaacctgggaccagatgtccctttcatagaaaacttgtttatactggcagacacccatgtggttcttgtctgatctgtgtccagtttactcctgccaagatagtcagtgtctaagagaacactgatcttgaaaaatgttgggtttgcagattggacacataggaagcaactcaacaaaacaaatacaacawgaaagtgggagttaataccactctcatttaataaatgagaaatttgtggctcaaagaagtcaggttacttcccatggccatatgatttgttagctgtggagttggaatctgaggccaactcttgctccattcaaaagctcttatgagctttgtgcttgaagtgtttggggaggaaaagttaccatattaacgtcttwctgaaataaaggaaatgggcaaaatcataagtaatcacaaatctatacatatttattgaaaagataaaatactaaattggattccagcatccttgggagatcaggtaaacctagttatctaaacaaatacttggtgtcactgattcggccttaatctattattcttaactttgcaaagaatttttttaaatgtccctcaatgaggcaaaaaaatccaagtatccactgcttgctgtaaggaaaattctagatgttaatgattctgcagggtggcataggcaggaacaggagttcwgaaagtgggagttaataccactctcatttaataaatgagaaatttgtggctcaaagaagtcaggttacttcccatggccatatgatttgttagctgtggagttggaatctgaggccaactcttgctccattcaaaagctcttatgagctttgtgcttgaagtgtttggggaggaaaagttaccatattaacgtctttctgaaataaaggaaatgggcaaaatcataagtaatcacaaatctatacatatttattgaaaagataaaatactaaattggattccagcatccttgggagatcaggtaaacctagttatctaaacaaatacttggtgtcactgattcggccttaatctattattcttaactttgcaaagwatttttttaaatgtccctcaatgaggcaaaaaaatccaagtatccactgcttgctgtaaggaaaattctagatgttaatgattctgcagggtggcataggcaggaacaggagttcwtgggtcctgattgccttcaacagtgtggcatgtttcttaaagagggaaacaaagccatcaaacacttgcttctcaaacccagctttttaatgtgtgagctcaaaataaaagcatacactagtaaaataataggcctatatcaggcctaaagaatacctttttaaaaagaaaactaaataatggacaactgtggtaaagcaaagagctgacatcactggtgggatttgaggcattctataaggtccaatagctcacaggacatgcctttgtgaacacwaaagccttgaatccaggtagatgatggacccaatggtccagactcatgaagaactacaagatcccactatgtcagcctccaggcttcagactgtgggtcactgatgacatgggcatggagagcactctcaataaggtatgaggctaagagtgatggctccacaactagatgcccatataacactcctagttccatcccagaacacagtgggatttttctgtgtggcaggattcagcaaactatgacccatgggccaaatccagcccaccgcctgtttttatatgccc

SEQ ID NO: 293485 - DNA, 659 bp, Homo sapiens
agtggcaagtatttttaactctaacactcctcctttgcctggaggtgggggagctattctccatgcttgttattgccagaggcagaccactttgctctctctatcatctcttactattccaagtttgaatctcctattattatgtcttgcttactgaaattatctgccaactccattaactttctttcattcccctcatatttgagcttcttgttcattatcagtcttaaaccctcactgctagtctaaaacttggtgattttaaatatctgcatagacagttcttcctatatcttgcccattcagattttcctcaataaattttgtccactcctatctcagctcgtcatagaaataccattagactgtgtcattacattaaccacatcccctatacaatctcaattttatacaatctcaattttaagcaaccaactaacattttctrttttctatctcactctttcaagtccttaaatcctgaaaatccattcactacccagaatctttgatccattgattatatacattttctttctccctcagtttccttcatgtactcactgcttttttatgcagtctaaattccagagtctgtcatcatacttatgcactgcataaatccctaattatcttgctactatgtcatttcgttgtat

SEQ ID NO: 293486 - DNA, 1186 bp, Homo sapiens
gaatggtgtgggactagctctgtgcaacaggagatacaaaatcttataagacattgtttctggattctgataacatagaggaaaaaaagggtcataaaatttttagagatttattttcaacatgagtaatattggattcacatatattgagtttatgaagcaagaatctattagccagcrggtgcgccatgggagagtgttttggaccaaattgtgtcccccaaaattcatacgttgaacccctaaacctcaatatgttgaatttggagatagggcttctaaagaggtaattaacgttaagtgaggacataagagttgagccctaaccaaatacaactagtgtgcttgtaagaagaggaagagacaccaggatgatgcacttgcacagaggagaggccatgtgaggactcagtgaaaaggtggccatctgcgagccagggagagagaccttaggagaaaccaaacctgccaacaccttgatcttagactttcagcctccagaactgtgagaaaatgcatttatgctgttgaagcctacagtctatggtactttgttattgcagccctagcaaatwtagagactataatccttcctttttaagattctgatctgaaatcatattgagttaggaacgatataatgccttgtaatatataacctagtgccttacaagagtatccttccatttcttcctccctcttccactatattataaaatctataatacattgttattatatttgctttaaacagtcaattatcatttccagaaatgagaaaatgcaaagcaaaatctgttttattgatttacatattaattattactgccatttttctttttgtagatctaaatatgcaagagattctttttaacattgttaatatttaatattttaaaatatttaaacaaaaaactatggaagagaaaaattcaaaaattatattaatcaatgatttcttatttcwgaatgaaaaaatattttatcatttatttagaaactatattgtgtgaaacacttttgggcacctttaaatttatattccataaacatttagtcttataggttttcaatggaatattggttaaataacattcacaaatgtctaaaataaatgattatttcatatatcaagctcacaaaagaacagatttctgtgaaagcaactattatattatcattaatc

SEQ ID NO: 293487 - DNA, 564 bp, Homo sapiens
atgctgatttaggatgtttaagagaccctttaggcattttcttgtttcagtagatgcgtgtttagttttttcctttctttgctgactgctcacagtgacattttggatgatcatgggatgtgtatgtggtaaaataaargtgagtacatttccagccttgtagaaaataaaataataaaatgcccattatagaaattgtcatgcagtaaccaaacctgtgatattctgctagctttagttatgatttattatgtaggaggtttctataagccttaactctagttaagcattgcaattaatgttatgagaaggttaaaaccaccttattgagaatagaagattaaaagacgttttgctcaaataggaaagttcatttcttaatttgggcccacaaaggccttctcttttgcttgtaatttccctcaaaattggagcttcctttcaacagaggtttttgttcaaccatagaacatgagggtctttgatggttcctgttcaactttgtttctcctaagttgcatgtcattaatttttctccttctaccccatgctttctgcatgacc

SEQ ID NO: 293488 - DNA, 499 bp, Homo sapiens
atttatcttttcagcccagtggctttaagtggtgtttgtatactcatgattctcaaatttatatcttcatcttaaatctttccagtttcaaactcatatattcaattatctgtttgatatcaccacttggatgccacataagcattgcaaactgatcctatctaatatagaacctttgattcaccatccgtgtcccagaaataaatctatttctcctacagtcttccatatctcagtaaatggcaccaacatccaaccagttgttagaataaaatctagatgtcacccttatttcctctcttagcctcattcttcatcgaatccgtcatcaactcctatcaattatacctctaaaatatatctcakgtttttctcttcatcgctattgctaccaccctatccaagtcactattatctctcaacagtactacttcaacatctatctaattccctatttccaagccactcccccccaccccaatagtcagagtgatctttt

SEQ ID NO: 293489 - DNA, 627 bp, Homo sapiens
ggtttgcatgcttatttagctgtaaaaaaggatgaaaagaacaaatcaacaccctcactggttgttgattcccagtagaaagaaatagatttgaaagcatgtctaggtaatggatttattttgattgttttgagttttccaagtgcatgtggcttcagatgaggttggaataatcccacaaagaatttccttattcattggttcatttggacttacacttctggtaggcagcttcctatttgtaagattttattaaaaatcatttccctttcagaagttgtgcccttcacttctctctgaataaacatttgaaaagcttttggattgctcttcaatctatgactgtaagcaggaccgtgtcatggttttagctgatgcagtttttagaatatttcttattggaataacattatctcagggcaatatttaaatataagagggagtgatttatttctcatagaaacatttgtctctaaggacaactaaaagtacagtagcagaataatgtgtaaacatttataattgacttagtrtttgtaatttatccaacattatgattttggctagaagcattttaaaaataagtctcttttagttatattgttttcccccatgcataaatggtag

SEQ ID NO: 293490 - DNA, 627 bp, Homo sapiens
ggtttgcatgcttatttagctgtaaaaaaggatgaaaagaacaaatcaacaccctcactggttgttgattcccagtagaaagaaatagatttgaaagcatgtctaggtaatggatttattttgattgttttgagttttccaagtgcatgtggcttcagatgaggttggaataatcccacaaagaatttccttattcattggttcatttggacttacacttctggtaggcagcttcctatttgtaagattttattaaaaatcatttccctttcagaagttgtgcccttcacttctctctgaataaacatttgaaaagcttttggattgctcttcaatctatgactgtaagcaggaccgtgtcatggttttagctgatgcagtttttagaatatttcttattggaataacattatctcagggcaatatttaaatataagagggagtgatttatttctcatagaaacatttgtctctaaggacaactaaaagtacagtagcagaataatgtgtaaacatttataattgacttagtgtttgtaatttatcyaacattatgattttggctagaagcattttaaaaataagtctcttttagttatattgttttcccccatgcataaatggtag

SEQ ID NO: 293491 - DNA, 1119 bp, Homo sapiens
atgttattcctttcatttgttttttccaggcagcacttgcctacttgagttcagaaactagtccctttccgggaggctagagaaatgccacgcttctctgggggatcagcccaggcctgggacctcagggtgagaggcagcttgtgttagtgtaaaaagctgtactgtccacacccaccctgcactaacactgtgccctcagtaggatgctgctaatgagccttaccttttctttgttcacttttttaattgcccacttcgtttctgtttccttgtctgtmgcttcaatgactattccaaagctcccttttcccaatattcttccaaaggtatagatttcctggagaaaaaaaaaaaaagagttgtctctctatgccattcatcagctattaaaaatgaacatataatactgacagatactcacccaagggaaaagagattctgctccaagttaaaatcaaatagaagacactatatatttgcttcaatattaataaacacatcttaattaaccaaaataagcgttgatgaattttattaagtgtwattccagctgcttcaggatgatggagaacatggtaagatcagtgaattctataagcatgagcctactgccacacttctttagccataaagtgagggccttggtcagaggcattgctgtgtggaataccatgacgatggataaggcagtccatgaatccacagatgaatccacagaagcattgcatgcaggataggcaaacccatatccagagtaagtgtctgttccagtgaggacaaacttcttccttttccatgatgaatgaggtacagtataatcaacctgccaccaggtagctggcggatctcaccaaggwatggtgccatatagagggttcactgttggtctctactgctggcaaattatgcactcagcagtggctgtagccaggtcagccttagtgagtggatgtctatgttgctgagcccatgtgtaatctccatcccggccaccatggcccctttgcttattgccccactgggcaatgacaggggtggctggggaaagacagtgagtggtatccacagaatgggtcacactgtccatttgattattaaaatcctcctctgctgagg

SEQ ID NO: 293492 - DNA, 573 bp, Homo sapiens
attccagctgcttcaggatgatggagaacatggtaagatcagtgaattctataagcatgagcctactgccacacttctttagccataaagtgagggccttggtcagaggcattgctgtgtggaataccatgacgatggataaggcagtccatgaatccacagatgaatccacagaagcattgcatgcaggataggcaaacccatatccagagtaagtgtctgttccagtgaggacaaacttcttccttttccatgatgaatgaggtacagtataatcaacctgccaccaggtagctggcggatctcaccaaggaatggtgccatatmgagggttcactgttggtctctactgctggcaaattatgcactcagcagtggctgtagccaggtcagccttagtgagtggatgtctatgttgctgagcccatgtgtaatctccatcccggccaccatggcccctttgcttattgccccactgggcaatgacaggggtggctggggaaagacagtgagtggtatccacagaatgggtcacactgtccatttgattattaaaatcctcctctgctgagg

SEQ ID NO: 293493 - DNA, 1060 bp, Homo sapiens
ctggaatttatccatgatctagagggcaatggataccattcctgaacttaacaaatgggttctttcacagacaatgtggtgactatgcagggctgttctatgacacgtgtactcctggaatgctagmagccagcaaaagggaggagaaacaaacaggcaactaaattcaatgaggagaggaaagcagtccatttcatgtcatagatttctacagtttgttcacctgtttgttgagggttgtttcatttacttgctattcctttttttcactgctcagcacttctctcaagtactgcttagttattgactgagtgtgacactttctgtgtaagttaggcaattggggaagaaggggtatgtagtgaaggacagtaggcactgtttagtaagttattctactcgtgcataaaaaattcattgaccagaaagggttaatgcccctccaaatggcttaacttaatccccaagtgcaattggctcatttgaaggatctggcccattgagtgcgtgttagcctagaagctgatacacctwctatgacacgtgtactcctggaatgctagaagccagcaaaagggaggagaaacaaacaggcaactaaattcaatgaggagaggaaagcagtccatttcatgtcatwgatttctacagtttgttcacctgtttgttgagggttgtttcatttacttgctattcctttttttcactgctcagcacttctctcaagtactgcttagttattgactgagtgtgacactttctgtgtaagttaggcaattggggaagaaggggtatgtagtgaaggacagtaggcactgtttagtaagttattctactcgtgcataaaaaattcattgaccagaaagggttaatgcccctccaaatggcttaacttaatccccaagtgcaattggctcatttgaaggatctggcccattgagtgcgtgttagcctagaagctgatacacctcttcaccaagtccggtgcagtgaggttaaacccaaaggcatgcaataggtcagtagcagagtcaggaataaaatctcagccatctgaacc

SEQ ID NO: 293494 - DNA, 526 bp, Homo sapiens
ctatgacacgtgtactcctggaatgctagaagccagcaaaagggaggagaaacaaacaggcaactaaattcaatgaggagaggaaagcagtccatttcatgtcatagatttctacagtttgttcacctgtttgttgagggttgtttcatttacttgctattcctttttttcactgctcagcacttctctcaagtactgcttagttattgactgagtgtgacactttctgtgtaagttaggcaattggggaagaaggggtatgtagtgaaggacagtargcactgtttagtaagttattctactcgtgcataaaaaattcattgaccagaaagggttaatgcccctccaaatggcttaacttaatccccaagtgcaattggctcatttgaaggatctggcccattgagtgcgtgttagcctagaagctgatacacctcttcaccaagtccggtgcagtgaggttaaacccaaaggcatgcaataggtcagtagcagagtcaggaataaaatctcagccatctgaacc

SEQ ID NO: 293495 - DNA, 1165 bp, Homo sapiens
ttataatttagacaagtaatgactatccatagtgacatatcttgaaccaggccttgtatttttttaatagaatgaaattttgaatggcacagatattataaataataacaccctgcacttacttagtactttttagttactcaaaarcaatcatactcattcttttttagtaaccttatgggagaaatagaagagagattctgatttccatttttgttagtgtggaacctgatgggaagagaggcaattttccgaaagtcagataagtcaaagatggcagaccaggactagaagccatttttttggagctccagtctgatattcttcctgataatcttctctctgtttgttccttcccctgtcaatgtaaccctcaaaatctacagtctatgacagggttaatcatgaccttataaattttatgtgtccctatcctctatagaaaaatgtttaatctctaactcactctcaatatgccccataatctccctcccaaatttctttgctgtgttatttgcactacttctttcagttttttttttcctttcgatctccagccttataccacaagcatttctaactwttataatttagacaagtaatgactatccatagtgacatatcttgaaccaggccttgtatttttttaatagaatgaaattttgaatggcacagatattataaataataacaccctgcacttacttagtactttttagttactcaaaaacaatcatactcattcttttttagtaaccttatgggagaaatagaagagagattctgatttccatttttgttagtgtggaacctgatgggaagagaggcaattttccgaaagtcagataagtcaaagatggcagaccaggactagaagccatttttttggagctccagtctgatattcttcctgataatcttctctctgtttgttccttcccctgtcaatgtaaccctcaaaatctacagtctatgacagggttaatcatgaccttataaattttatgtgtccctatcctctatagaaaaatgtttaatctctaactcacwctcaatatgccccataatctccctcccaaatttctttgctgtgttatttgcactacttctttcagttttttttttcctttcgatctccagccttataccacaagcatttctaact

SEQ ID NO: 293496 - DNA, 623 bp, Homo sapiens
taatacttcatgtcaaccagtcttctccagttacactgaggttgcttacaattttatttcgaagtaaacagatgctaataaacacagatgaatatctcttttatgtagggcactacatagaaccacaaacacaaaatagcctagaaatcttccaataataagggagtataagggtatatatatgtatatatatatacacacagcactggctctgttgctttatggtctgcaaatgttgggattgctacagaagtcaaattcatcaggacacatctttcagttatcaagagaaaaggaaaatcaagtagcctctaatgagctctccttaaattttaacatccaaacgcccaacccatccaattatttgcttgtagaagcaattactgtaacytcccccaatttaaactagccattggttttcttgctaaaattcacacttttctctatttggcaagtaaggcagagcacaatattttgcattctgttaaaatgtattttcccccctctggagaaagaatgaaaatgtgtttcatgccatatgcctgatattttctagttgtacttgttcacatatttttgactctacaatagctggcactgtgagatgcaaatcccaggcattc

SEQ ID NO: 293497 - DNA, 454 bp, Homo sapiens
caggagccttcctggaagtgcttccattggccaaagctgaaataatttaagcaataatataaatgccaatagaattggattgtcgctgagttaataaaataaatattcgtggacccatgttgatataattgagtgactcaataaataaatggagtagaggaaacaagtcttcataccagaaggaagaataccaaataataagtatagaagaaatgaaggaagtaaataaaaatcaccatgagaacctcaaagtartaactgctgcaggcaagatccatggataaatgctgaaattagtggtaaaaacttcaaggagaaacttcgcatagcaacaaagcatctcccccaaatgtttatttactgtggtggttttaacatatgtgtacatatctgtagatacttatcctccaagggatgaattttacttcctcttcacttgaatgtggctggactt

SEQ ID NO: 293498 - DNA, 514 bp, Homo sapiens
tggagaataataagtttagctgaacaatatctcaaactatctcaataactttctagaagcagctgaaatgtaaaagtagtttgcaatgtataaaaagagggttgctaacaaggaatcacaatttaatgtctcagtcttttagtaacaacagaagaagctgctggttcaatcttctyggactattaacgaggactgcatgataataatttcctttcttgcatataaaacaaaaatctagttttcagttttcatcagttttatgaatgggttgacagaggaattaattaactaattaaaactggaacatagcaaatggcaaggcttcctttgcaaaaatttgcattggccttataccttttctcaccaagcttcttgccacttttaatttcggataattaaattgctataatttctatgtttctttttacatttctggttttgaaattaacatatagtaaaattgacatttttctttaaattaatactttttttaacttttaagttcagaggtaca

SEQ ID NO: 293499 - DNA, 514 bp, Homo sapiens
tggagaataataagtttagctgaacaatatctcaaactatctcaataactttctagaagcagctgaaatgtaaaagtagtttgcaatgtataaaaagagggttgctaacaaggaatcacaatttaatgtctcagtcttttagtaacaacagaagaagctgctggttcaatcttctcggactattaacgaggactgcatgataataatttcctttcttgcatataaaacaaaaatctagttttcagttttcatcagttttatraatgggttgacagaggaattaattaactaattaaaactggaacatagcaaatggcaaggcttcctttgcaaaaatttgcattggccttataccttttctcaccaagcttcttgccacttttaatttcggataattaaattgctataatttctatgtttctttttacatttctggttttgaaattaacatatagtaaaattgacatttttctttaaattaatactttttttaacttttaagttcagaggtaca

SEQ ID NO: 293500 - DNA, 569 bp, Homo sapiens
tgcagtcatctcatcagttctttccctaccttaaacccaaggtagacttagagattgactaattgggggactctgatttatacgtttgttgaaaccttgtcctgaaaaacagtaaatcagggaaaaatttgaactccaccctctgaaattttctataaactctaatctccaactgatgtaattcaaattgtttagctgatttatcaatgccataaattttctcagcgctgtgattctcaatcctagctgcacattacaatcacctggggggcactttaaaaaaatacggatgctgggtgagagcaactgaatcatattctattggakccaagcatctttgttttttaaaagctgcttaggcaattcttatatgcagctaaagctgagattcactcttttactgtttttagtaaatacctgcattacagagtttcctatgcatctagtaatgtagctgaacgaataataggtaaaagaaggcttatctaaatgtttaaactataattattgctttgcatatgatatgtcttcagtaagttatcgattgaataaacattataattttaagc

SEQ ID NO: 293501 - DNA, 581 bp, Homo sapiens
cactttaattttctttagcatctttggatcatgcaattttagagttagaaatctttgcaacatcagttatcagtgygggcagtcaaagagaagaaaggaagaaaaaggacttgagtagtccaaatagatgaaattatttcccatggtcatgcaagtatcccttaggcctactctaggcttttgaccacttttgtaacttctcataatgacccagtgtagagaaaaaacatgacatatatttgactagtatggaaacatttgtggattgaggaagtggagaagaaatggtgtttacccttcaacaaaacctaattataattatgcttattagttaatgtgcataatgccattcttcttttacctagacagggactaaacattaatttttttctgaatgaataattctcaccttgtgtctgaatacttaaagtgacttaaaatatagagggttttctatgctggaccaaatttcctagtctctttttggctgtcacttgtccctgcctctgagaaatgaagtataaaagcagctaagagtctgctcattcctctgaagccagaggtagaagctatttggaaga

SEQ ID NO: 293502 - DNA, 581 bp, Homo sapiens
cactttaattttctttagcatctttggatcatgcaattttagagttagaaatctttgcaacatcagttatcagtgtrggcagtcaaagagaagaaaggaagaaaaaggacttgagtagtccaaatagatgaaattatttcccatggtcatgcaagtatcccttaggcctactctaggcttttgaccacttttgtaacttctcataatgacccagtgtagagaaaaaacatgacatatatttgactagtatggaaacatttgtggattgaggaagtggagaagaaatggtgtttacccttcaacaaaacctaattataattatgcttattagttaatgtgcataatgccattcttcttttacctagacagggactaaacattaatttttttctgaatgaataattctcaccttgtgtctgaatacttaaagtgacttaaaatatagagggttttctatgctggaccaaatttcctagtctctttttggctgtcacttgtccctgcctctgagaaatgaagtataaaagcagctaagagtctgctcattcctctgaagccagaggtagaagctatttggaaga

SEQ ID NO: 293503 - DNA, 572 bp, Homo sapiens
ttacatcagaagagactaatcaaagacctggatacaggaaagcacaagcacactggagatcattacggcaacagtctgcaccactgtacagtatttcttcttakgcttaatattgtgccatcttcctaatctctccacatatgaaacttccatatattttacctcctccaaagcatgccctgaactttcccactcccagtcttagttcatggactcccagaggtttgttttaaagatgcagtttccagtgtctcactcacatctttcaatccataatctcaaacctagaactcagcaacagacaattttgactaggtctatagaatattctcgtgcacaatatagtttgagaccaggaaaactttaaaaatataatctatgcataatatttttaacaaccttgaaactcagagatctttaggcgatctattgatgttcctcagggaatgcataaatctcttaagatagcaaacattgtgaatgtgggtataaagatcttttcagtgtccctcatttgcatctggcctagcccgattcatctgtattgccattcctcagttggcttctcaggc

SEQ ID NO: 293504 - DNA, 1248 bp, Homo sapiens
ttttaacaaccttgaaactcagagatctttaggcgatctattgatgttmctcagggaatgcataaatctcttaagatagcaaacattgtgaatgtgggtataaagatcttttcagtgtccctcatttgcatctggcctagcccgattcatctgtattgccattcctcagttggcttctcaggctcaatcatccaccaaagcttatctgtttacaagtttagaacaatgttgcagagaactctagctttattctattccttacctcatgtcttcttccttgcccttcccactttagtactcaatcacaaaaccgtcttacatttataaaggaattgaagttgcaaagtgcttctatgtgtattaactcatttgattctcaaaaacctctttgtaaagaattaaagtaattataagtacagatactccttgactcatgatggggttacatcctgataaacccatcataagttgaaaatattaagtcaaaaatgcatttaatacacctaacccactgaacagcatagctcagcctaatctaccttaaacatgctcagaaaaattactttagcctacwttgtaactgaaaagagtagacaagctgccactttatacctaaggcatcgtgtgaatacattctggatggtggatatggatgaaatgaggaaaaagcaaatcattggtattaatgaaatggcagtgatgggtctgtcacagtcaggatatatagtttgagaatgttattcacagtattataaatatacgggcgctcatgcccttgagtagaaaccaaatataattattccatttacacaattgtctgtatgtgttttctctttctattgagaggactattttctcatcttctaggatcattttcctttaatgtctaacaattccaaaaggtacagtgtggttagtaaatgttctcctaatcttatctcctgaagtgtcatatcacttcaatcagtcctatcttttagaagtgcagaatagctgctccagtccctgtatcataattttcaaaccacttgaagagttattttttaaaaatcaaataactataaaagaatcaagccaacaagttttttgtttatttgtttgttttgtttcagtaatggtatawcaatatttgcagctactatgaaagcactgcctttaaaatatcaagaggaaaaataattataagtctatccactatccaaaatttggtattcaaatagctttgaaagccaaaaaaatttcataatt

SEQ ID NO: 293505 - DNA, 551 bp, Homo sapiens
ctataaatatcattgtttgtcttaataataaaaataaccaccaataggatggtaatcaatcaatccccacatttatggggcagttacaattattattactgtattataatttcctaattttattgatgaggaagctgaggcttatcaaaactaagtaattaacaagtggcagagcagggatatgaacccacactgtctgattccaaggtggtgatctataagttccagtggttcttgctgagcaaacagttgggatataatgtgctctctgtctgcctttgtcctcttatgtagctaagataaagaggaaatctcctgtatttcttaaatatagacatggtgtctattatttcagaacatcttcctatctggaaagatttgtgcaaaattcccaagagctcccaamtacctctatgtataacccacgagatgtcttaattgaatctaaattctaagtagcatttaatttaatttcaattttttttaggaaagacatgttaggctttgccctgtttctgtttacataatttttaaaccaatattatgtaaat

SEQ ID NO: 293506 - DNA, 527 bp, Homo sapiens
gaaccctctgcctctaggatctaatcagtattcaggaagctttactcatgcccttctgcctttttggaagctcagttatttcataaagacatgacaaagctttctcatcattcattttttcatttactcattgaacgtctactatatatcaagcacgatgctaggttctagggatctagaagtaaagagaacaggcaaggttcttcatctcatggagctttattcttgtagcagcttgcaggaagcagatgatataaagcaaacacattaytaaacaagaaaattacagactgtgaagagttcaactggaggaaataactaggggaggacacagtaactgaagaaagcgctttagaagtttaatcagggaaggtctctctgaagaggtgatatttgaagtgggactcaaaggataaaggagaagaaaggtcattccgggcagaaaggtaaattagagctccaccttggaggtagaaaagggcttagtaagacagaggctcagtgtgagaaatggcaaatggtgtagg

SEQ ID NO: 293507 - DNA, 501 bp, Homo sapiens
actggcagtgaaaatgaccttctctctaatgtgagacaagctgttctggtctccgtttkcaagtttgttttaggaaaggcgaatgctccgtattattggaaccacgaacaacctagcaagactgaaatgctaagaaataagcaagtgagagcgaggcatcagtggcaaattggaatctaaggccttttgtgcttgttaaatggtggaatgattataattggaaaaagtgatgtgcattagttctgagtgaatgtacaagaaatgacaagcgtgtaacttaatgattacttcacaacactcaggactgccttctagtctcgcaccgaagagttcagccctacagcagagaaagccacatgctttctcctcctattcatgagtattctccacaggtcacatggaaataaccctgaagtgataactcttggtttaggaagtctgttgcttaaactagtgtaagtcattgtgacaaagaatggcgggatatattttttcttttcc

SEQ ID NO: 293508 - DNA, 604 bp, Homo sapiens
tcaattaatgtttgggtggaagcaacagaaatggattctcactgcatttaagttaaaagggaggaaggagattattggaagactgcggagatagctaacacaacttaaggaattgcaaagctacatatttccaggaggacagaagcagtggcaattccatctcagtggacctctgtactttctcggtgggggctccactcctttacagtgactccgctgactctcctctacttctctctgtctctgtttaaattgaacctttctaaaaagactcagatttggtcagcttgggttaggctgtcatccttgyagtccacaggatggagatggctacctgaaggatgtgtggttttcattttgagggaaaaataaaagacttctacacagatcatctctaaacctcatatttcacagagattgaggtttaaggagcaggagtaattttttgcccaaggccacctaatctttgatcagaggaagatgcttaagaaaaatgtgaagtttgttctcagtaggttaggtgtcttctttctgtcttaatgacacctcttgtctactcttaggggatatatatacttcctcattaaaacttgtacattataaa

SEQ ID NO: 293509 - DNA, 501 bp, Homo sapiens
actggcagtgaaaatgaccttctctctaatgtgagacaagctgttctggtctccgtttgcaagtttgttttaggaaaggcgaatgctccgtattattggaaccacgaacaacctagcaagactgaaatgctaagaaataagcaagtgagagcgaggcatcagtggcaaattggaatctaaggccttttgtgcttgttaaatggtggaatgattataattggaaaaagtgatgtgcattagttctgagtgaatgtacaagaaatgacaagcgtgtaacttaatgattacttcacaacactcaggactgccttctagtctcgcaccgaagagttcagccctacagcagagaaagccacatgctttctcctcctattcatgagtattctccacaggtcacatggaaataaccstgaagtgataactcttggtttaggaagtctgttgcttaaactagtgtaagtcattgtgacaaagaatggcgggatatattttttcttttcc

SEQ ID NO: 293510 - DNA, 530 bp, Homo sapiens
aggtatggtgagaatttacttatatagtttcaaatagctagccagtttcctagctccgttggttgactaaatcaacatcattaacagtgataccaactaagaattaagttctcattcatttcagggtttatttctgttgaattctgtctttctgttcttatgctaatcttacagtcttttaattataacatgcttcattataactcattttaatatttttaaaagaattttcactctttacttctctctttgaaaatattcttggctcacctgttctattatctttgtttttttcaaattctcccaaaatatgcaactggaattttttaattaaaatktgtttcaacagttataataatttaagaagaattaaaatagtcacaagatgtagctttcatctgagtcagacaatatgcacagtacatttcttttatttctttttttatatatcctagtagaattttatagctttcttaaaatatgccaaatctctctcctgctgcttttatttctaactattgcttattatt

SEQ ID NO: 293511 - DNA, 572 bp, Homo sapiens
aaataggtgagcaagagaaaacatacctgtaaaggaagggtaaagcagtttgagaattggctggaattgccatatagaaatttagataattttctgcactcagtactgaattgtgcrcagtagcagaagcagtattttaagaaaattactctaaacagtaattttcaataaattttacatgaaggcaaatacaaaagtaaaggctattgcaatattcctgaaataagagtatttcactccaacataattgtggtatttttgatatcttatggcagagttaatgaaaaatattaagaaaaaaatattgagaatttatttccaagcaaggaaaaataagtctcacggactgagccctagcagggtgagaggaaaggagaaggcaaagataaactctagttcagtacattataagagctggaggttagtagctttggaaacaaaacaattcaacttaattcattgatgtataaagtgaaggtggtaaggccagttctgttatccagttccaggccacttccaccagaatgtagaaatagaataaatctgagtctccagaattttaggtacactga

SEQ ID NO: 293512 - DNA, 572 bp, Homo sapiens
aaataggtgagcaagagaaaacatacctgtaaaggaagggtaaagcagtttgagaattggctggaattgccatatagaaatttagataattttctgcactcagtactgaattgtgcgcagtagcagaagcagtattttaagaaaattactctaaacagtaattttcaataaattttacatgaaggcaaatacaaaagtaaaggctattgcaatattcctgaaataagagtatttcactccaacataattgtggtatttttgatatcttatggcagagttaatgaaaaatattaagaaaaaaatattgagaatttatttccaagcaaggaaaaataagtctyacggactgagccctagcagggtgagaggaaaggagaaggcaaagataaactctagttcagtacattataagagctggaggttagtagctttggaaacaaaacaattcaacttaattcattgatgtataaagtgaaggtggtaaggccagttctgttatccagttccaggccacttccaccagaatgtagaaatagaataaatctgagtctccagaattttaggtacactga

SEQ ID NO: 293513 - DNA, 545 bp, Homo sapiens
  misc_feature (1)...(545): n = A,T,C or G
tggaaaccagatttcaaaatatttagagagaatagataacaaaacattttgaaagtgttaaagagtacattctaaatatataataggaatgggaaaaaagagttgaaggtgtgaaaatttggcctcaagaagctgggtcatgggaattatcaggygtgggacttcaatgctgttcactttcctcgcgacacctaattcagctatttacctctcctgggtcccacagaaaatactggcagagtttttctccctcatanagctgacaaataatttgagaatatggctagagcccaaagaccaaagtaactgcacacctcgcaccccagagaatatgccggctgtctatgacagacagaaggcaattttaaaaagaaaatagccaaaaaagcagggagttttccatgttttaaggtggacaaagatggtaaaagaataataaactcatgaaaaattaaactaatatcccattagttcatactgatataagtgaacaactgaatagattgatggatggatagacagatagatagatggatagacagaca

SEQ ID NO: 293514 - DNA, 545 bp, Homo sapiens
  misc_feature (1)...(545): n = A,T,C or G
tggaaaccagatttcaaaatatttagagagaatagataacaaaacattttgaaagtgttaaagagtacattctaaatatataataggaatgggaaaaaagagttgaaggtgtgaaaatttggcctcaagaagctgggtcatgggaattatcaggtgtgggacttcaatgctgttcactttcctcgcgacacctaattcagctattyacctctcctgggtcccacagaaaatactggcagagtttttctccctcatanagctgacaaataatttgagaatatggctagagcccaaagaccaaagtaactgcacacctcgcaccccagagaatatgccggctgtctatgacagacagaaggcaattttaaaaagaaaatagccaaaaaagcagggagttttccatgttttaaggtggacaaagatggtaaaagaataataaactcatgaaaaattaaactaatatcccattagttcatactgatataagtgaacaactgaatagattgatggatggatagacagatagatagatggatagacagaca

SEQ ID NO: 293515 - DNA, 611 bp, Homo sapiens
gtagatctctgcaacattcatataaatatggacaaataacagaaaggaacagagaaaaaatgtagaagtgggacmatgacctagccatccctaatgagcataagacctgttatcgttaatgaaaaagaaatgctgctcaaaactccactcatactgccttctagttccggtaataagttgttgatatttaatattagaccttcataagagtgctcatcagaccagtaaaacataagttctcaaggactgatactgtattctttgaaatgtaacatctagcatctattattatgtgagtgtttattattaaatgaatgaatgaatccttacacgtttattgcacctactttctcctctttctgtatcaatcttgccccagtgtgtgtaggtgctagatcacttcatcatttaggtcattgttcaagtatcttcttagagaggtgttttctgatctctgcatagaatacattgtctattacctattgctgtctctctctctatccctttaaccttctgtattttctttttaacacacattatatctgacatttttcatttatgtatttctttgtttactgcctactaaaatgcaagctccttgagggcacaga

SEQ ID NO: 293516 - DNA, 611 bp, Homo sapiens
gtagatctctgcaacattcatataaatatggacaaataacagaaaggaacagagaaaaaatgtagaagtgggaccatgacctagccatccctaatgagcataagacctgttatcgttaatgaaaaagaaatgctgctcaaaactccactcatactgccttctagttccggtaataagttgttgatatttaatattagaccttcataagagygctcatcagaccagtaaaacataagttctcaaggactgatactgtattctttgaaatgtaacatctagcatctattattatgtgagtgtttattattaaatgaatgaatgaatccttacacgtttattgcacctactttctcctctttctgtatcaatcttgccccagtgtgtgtaggtgctagatcacttcatcatttaggtcattgttcaagtatcttcttagagaggtgttttctgatctctgcatagaatacattgtctattacctattgctgtctctctctctatccctttaaccttctgtattttctttttaacacacattatatctgacatttttcatttatgtatttctttgtttactgcctactaaaatgcaagctccttgagggcacaga

SEQ ID NO: 293517 - DNA, 611 bp, Homo sapiens
gtagatctctgcaacattcatataaatatggacaaataacagaaaggaacagagaaaaaatgtagaagtgggaccatgacctagccatccctaatgagcataagacctgttatcgttaatgaaaaagaaatgctgctcaaaactccactcatactgccttctagttccggtaataagttgttgatatttaatattagaccttcataagagtgctcatcagaccagtaaaacataagttctcaaggactgatactgtattctttgaaatgtaacatctagcatctattattatgtgagtgtttattattaaatgaatgaatgaatccttacacgtytattgcacctactttctcctctttctgtatcaatcttgccccagtgtgtgtaggtgctagatcacttcatcatttaggtcattgttcaagtatcttcttagagaggtgttttctgatctctgcatagaatacattgtctattacctattgctgtctctctctctatccctttaaccttctgtattttctttttaacacacattatatctgacatttttcatttatgtatttctttgtttactgcctactaaaatgcaagctccttgagggcacaga

SEQ ID NO: 293518 - DNA, 624 bp, Homo sapiens
agagaaagaaaaatatctagtgcaggccgggtgcaatagctcatgcctgtaatcccagcactctgggaggccgaggtgggtgaatcacttgaggccaggagtttgagaccagcctggccatcatggtgaaaccccgtctctactaaaaattcaaaaattagttggacatggtggcatgtgcctgtaattctagctactcaggaggctgagcaacaagaatcacttgagactgggaggtggaggttgcagtgagctgagatcktgccgctgcactccagcctgcatgacaaagggaaactctgtctcaaaaagaaagaaagaaaagacaaatatctagtgtagtttcctctatgtataaaggcaccagtcctagaggattaggaacccacctgtatgacttcatttaacctaactggcttcctaaaaagccctatctccaaatagccacgttgggggtgaggctttaacatctgacttttggggggatacaatatcttcataatttgcacatatctactttttgtgtgagtcaggatgtttcaagttgcaagaaatagaaacactttacctcagtaaatggacatttatcataatatatatcttaggatgcagggttctactatt

SEQ ID NO: 293519 - DNA, 549 bp, Homo sapiens
atttacctatttgctaagcttttacatcaggaactgttaaagtttatatttacctaattgtttaatggcttgctttaaaaggttatacaaaattcttgctaatttttttgtgtttgttaatctgatttattgacattgttcccaggctcatggggcattctgatttgctctacttgtagtgatatattaagagctgatgggattctccaacttctcatgygctttcaattcttcctgagtaatctcattcaaatttctaagtgcctgaccctcactagtagagtccttgaccatgatcttgaccaggaaatcttatcacctttagacttcagtgttttgggttgttttcattgtgccgtgcatgttttaagtgctagtttaaagctaacttagagcaccagttacaagaagaaagtatacaataattttatataacacaagtatttttcttccttttttgtatttttccttatgtagtaatttagaggtatgagaagcaaacttttatttctcctgttcctacattacttaacacattgaaagaattcc

SEQ ID NO: 293520 - DNA, 602 bp, Homo sapiens
agtggagttgcttggattctgttgtcaatattcctgactccctttcacagtaaaactccctaagcaagttctaattgttttagtgtaatgtgtcattatcaaatacagagtacttttattgagcagaaactttgtttaagaaatctcttggtcaggcgtggtggctcaggcctgtaatgccagcactctgggaggccgaggcgggcagatcacaaggtcatgagatcgagaccatcctggccaacatggtgaaaccccatctctactaaaaatagaaaaattagctgggcgtgttggtgtgtgcctgtagtcccagctactcaggaggctggggcagaagaatctcttgaacatggagggtggaggttgcagtgagccaagattgtgtcactgctctccagcctaggtggctgaatgagagacactctgtctcaaaaaaaaaaaaaaaaaagacagaaatatctaattcctggyccaactgtcaaaatagctgatttggaaacagtaacacatgctgcaaaatatgacaatgcaaaatgaaccacctgaacctgcttttcttagatgtagcctaccaggagggtaagtgtggaagaaggaag

SEQ ID NO: 293521 - DNA, 612 bp, Homo sapiens
aattatctacacattcgtctgcataaatatcatgcttcaagggcagtcagttcttttatcttccattttgaaggtcatcacatactgagggatgcctaggatgtgcctgagggatgtcccttccttgagaaagtttatttttcagtgaatcaaaagaacatttccttttaccaaagggagacgtgactgagatagaagatgggtttgatttttgctttctttttgtctcgttttagtgccttaaacatttttcctcagtaaatcatacatacagttaaaatagaccagaagaaactaggtaaaaaagacaagaaaaaaaaacaatgaattaagaaacagcaaataagaacttcctcaaggagacattaagaactttcagagctttctggcttttarggacaagggagaaaagtttggatatgagaaactatataaagctcaataattagaattagaaatgaacactagagtgagagagaaaattaaatattatattatttctgtattatgtggtttgttaaaataaagggacaaattgcttgtatatattaaaatatctaaataaaataaatgcagtctatacaaaaaagaattataatcgcaataattata

SEQ ID NO: 293522 - DNA, 561 bp, Homo sapiens
tgtttcaagtccactgatcttttcttctgcagcatctaatctgttcttagtattttccagtgaagtttatatttcaaatattttattttaaattcacaaagttctttcataaaaatatattatctttgttttctctctacattcattctttccttgatggctttatgtatttgtaacagctaatttactgtatttgccagtgatttccatcatctctgtcatttctgagtttgtttctattcactaatctttctcctatttatgagtaatattttctactttcttcacaaagctagtaattttttattagataccaaccattgtgacatttacattttgaaagcctgggttttgttgtgatcttctaacaattgttggactttgttctggcatatgttgcaggcaggttgaccatttcaagacttttmaagaaatctttttagtgtgtatttgaatgacctttgctctatggctagtttagcactacaaaaggcaggacacttctgggatctcttctaaatgttccactactgtgctgattataacttgagcaaatcccac

SEQ ID NO: 293523 - DNA, 551 bp, Homo sapiens
atcccagtaactttgcttgaatctctgcacatcgttatcagccagactttattttccccgatgtccgcttaaatcgtttttatgttgcttgcagttgaaatagtcttgtctaataagttgacacccaacaattagttgtcagtaacaacaagtagttggttattatgatartatggcctaccagctgtaccaatgttcaaataaaatagtgagaatttttaaaaagagattttagtgaaggctttcactttagagaaaaggataaagacattattagggaatttggttcatggagaagctagtcaatagaatggccttagtttcttgccaagtctcttgaaatggtttcaaattcttataaactgagggttagagatctaagataaagaaattgtttccattgataaaaccttggttgtgtgtgtgtgtgtgtaaggaggagtaactattaaggattaaatgataaaatgtgaccagatacctcacacttatttgtggaaatgttttggcaacttttaggtaatagggaggaagcacacttggtcattatc

SEQ ID NO: 293524 - DNA, 530 bp, Homo sapiens
cctctggacttacttgccacttgtttatattttaccccatttgcatccttacaaattgtgattttgtattctagggttttttgtaggcttttttgttaatgtatacagttatgttatctataaatacagatttacttcttcctttcctaacactatactgattccttgctaaattactctgagtggggcctctggtaaagtttgcttgatagtactgagaatggatacccttatctcactgctaatcttaacatgaataaggtgagygtttgcacattcagtaagggggtactttatgagtatcttttaatagattggggatgtttcttgttattcatttatattgaaagttatcgtgaattggttttgaatattgtcaattgctttttcttcatctaccaagatatttaattcttctttttttcttaatatattatattgattggttttcaatattaaaccaatcttaagttcctgggattaacctcatttgatctcaatgcactatcctctatttatattgctggagt

SEQ ID NO: 293525 - DNA, 532 bp, Homo sapiens
cccggtggaaggtgattgaattacgggggcgaatctttcctttgctgttctcatgatagtgaatgagtctcatgagatttgatggatttacagtgggagtttccctgcacaagctctttgcctcctgccacccacataagatgtgacttcttcctctctgccttctgccatgattgtgaggcctccccagacatgcagaactgtaagtctaataaaccttattattattatttttttttggaaattgcccagtctcggtatgtctttatcagcagcatgaaaacrgactattacacgtgttaatgagagagatcagtctaaaatgttgtctcttgtatttttcttgtctagttgtggtatcagtattattctactcttataatattagttgaaatgttctctttcttcttcactttctaaggagtacagggatgttatcatatactccttagaaagaatgatacagtgtttgaatatttgctccccactccggaatcatgttaaaatttaattgtgattgtgtgattgcaac

SEQ ID NO: 293526 - DNA, 532 bp, Homo sapiens
cccggtggaaggtgattgaattacgggggcgaatctttcctttgctgttctcatgatagtgaatgagtctcatgagatttgatggatttacagtgggagtttccctgcacaagctctttgcctcctgccacccacataagatgtgacttcttcctctctgccttctgccatgattgtgaggcctccccagacatgcagaactgtaagtctaataaaccttattattattatttttttttggaaattgcccagtctcggtatgtctttatcagcagcatgaaaacagactattacacrtgttaatgagagagatcagtctaaaatgttgtctcttgtatttttcttgtctagttgtggtatcagtattattctactcttataatattagttgaaatgttctctttcttcttcactttctaaggagtacagggatgttatcatatactccttagaaagaatgatacagtgtttgaatatttgctccccactccggaatcatgttaaaatttaattgtgattgtgtgattgcaac

SEQ ID NO: 293527 - DNA, 532 bp, Homo sapiens
cccggtggaaggtgattgaattacgggggcgaatctttcctttgctgttctcatgatagtgaatgagtctcatgagatttgatggatttacagtgggagtttccctgcacaagctctttgcctcctgccacccacataagatgtgacttcttcctctctgccttctgccatgattgtgaggcctccccagacatgcagaactgtaagtctaataaaccttattattattatttttttttggaaattgcccagtctcggtatgtctttatcagcagcatgaaaacagactattacacgtgttaatgagagagatcagtctaaaatgttgtctcttgtatttttcttgtctagttgtggtatcagtattattctactcttataatattagttgaaatgttctctttcttcttcactttctaaggagtacagggatgttatcatrtactccttagaaagaatgatacagtgtttgaatatttgctccccactccggaatcatgttaaaatttaattgtgattgtgtgattgcaac

SEQ ID NO: 293528 - DNA, 545 bp, Homo sapiens
ttaccacagtcttggtattgcttacccatttaaccatagtgatatagtattctctagtttggaaacaaaattaaaatgtatgtttagagccagagcattgatatagtaccaacaatatacatttgccattttatatataagaataactgaaccactataaggatgttgctacatattaatttatgtatagatagatagataaatagatrtctgctcttttcaatatttacatatataaatacaaatatatgtgtatgtatgtattcacatggatgtatacatatgtatacaaatatacagataatttgagaacaaatttgagagtgaattatttcccagaaaagtatttcttggaaaaatcaaaacaatgacatgctagatatttatgaaaattttctattgattagtactcctttaagtgcaaaacaagtatacatttataaaggtatgttatttttttctttaaaatcacaatcaatgaatcatcaagaataatctcttccagttaaaaggcaaagattattcctggcttaataattatatcc

SEQ ID NO: 293529 - DNA, 545 bp, Homo sapiens
ttaccacagtcttggtattgcttacccatttaaccatagtgatatagtattctctagtttggaaacaaaattaaaatgtatgtttagagccagagcattgatatagtaccaacaatatacatttgccattttatatataagaataactgaaccactataaggatgttgctacatattaatttatgtatagatagatagataaatagatatctgctcttttcaatatttacatatataaatacaaatatatgtgtatgtatgtattcacatggatgtatacatatgtatacaaatatacagataatttgagaacaaatttgagagtgaattatttcccagaaaagtatttcttggaaaaatcaaaayaatgacatgctagatatttatgaaaattttctattgattagtactcctttaagtgcaaaacaagtatacatttataaaggtatgttatttttttctttaaaatcacaatcaatgaatcatcaagaataatctcttccagttaaaaggcaaagattattcctggcttaataattatatcc

SEQ ID NO: 293530 - DNA, 593 bp, Homo sapiens
ttgaaatttgaagtaaaaaattaatttgaatattgtaaacaactaaccaaagactgcaaaatcaagaaggtcatattttttggtaaactctatattgaactgatatatagttgcttttctaatataatcagaaatttgtctcaattacctgccataatattatattttgtgcaatatgaggtaacaaactaacatgaataattttaaaaataaataccaccaacaacaaaacagaatttaaacattcatcttgagagctttccttttcaaagttggtctcaaatgaaatgctacaagaacatctttgcaacacctcacaggcatgacagaatatatttattagctaagatgccaaattttgacttaaaaaaaagaacttaatctttggaaaagaatgaaaagccaacgagtacaaatgtggtgaataactgatttttaagggaacactaacttagttgtaaactgttaacttgaaaatcattaatttacagcaatatacttatagttctctttgattaaatattgtgattattgtgtctgtttttamataatgtggcttacggtcataagcaaagcataatctgatgtgagat

SEQ ID NO: 293531 - DNA, 605 bp, Homo sapiens
tgaccacattaggtatttgctatactcattttcatctagtttaatttaaagcacaatttagtataaactctatgtgttgtttcagtttccaaagtggcactttttgaaagtttatcacataagagtgaattgaaacaatacatttgttacagcaaaaactaacaaaacattttttgaaaccagagtagataataaaaaatctgaaaattgacgtaacatacccaaaatgatactgaaatttgttttaagaacaaggaccaaaacagattattttcttagagtcctattgtcttaagtacctgggtaggtgagcaggtcttcctactaaaaatcacctgaggactggaaattctttcttttggctttgcctattagaggcatatgttttttacttctaataaatattaatggtagttatcatatatagttatacatattatttgcatatatataaaatgacaggtttgaggctaagaatggcacccacatgtagctaagtcattaggagtaaatggagcaaacagagctccatatgtatrtgttaacttgacaaggagatgtttggattccagctgtgtttttggaaatacaaattgttgacctgt

SEQ ID NO: 293532 - DNA, 1098 bp, Homo sapiens
gtcatgtacaacaataaatatagtgactaatcatcagggaaatgcaaatcaaaactacaatgagataccacttcacacctgtcaagacagctattataaaaaaaaaagtgttggtaaaaatgtggagaaattggaactctcatacactgttcagtatacaaaataatccaggtactatacgaagacagcatgaaagttcctcagtaaattaaaaataaaactaccttatgatctagccgtgccagttctgggtatttattcaaaataattgaaattggaatctcaaagagttattagcactcctatgttcattgcagccctattcacaatagccaggatgtagaaacagtctcaatgtccatcaacagataaatggttaatgtgccatatacatgcaatggaatactatgcaggttttaaaaagaaggaaattgtgcaatatgcaacaacacaaatgaaccttgaagacattakgctaagtgaaataagccaggcacagaaagacaaatactgcatgattccccttttatggggaatcaaaaatagtcaaatacatagattttaagagtgaaatggtgattgcaagggwgaggagggacacaagtggtatttcatatataactcctcatagaagctatgtgctgtcagtgattctagagacttgaaagcaattcagtccaaggtacttctgtctccaagcccaacatttgaaggacaatggcttaagtaattctctaatatggtaaagcccaatgtctaagtcacctcattgtaatagatctacaacagacatctgtaagatccccaatagtgatttttatgctaaacacccaattaaaaaaaggcacattttcagagtgaagtgagatccatcttttgaagagtgattccttcctttagttctgtcaggaaactcaaagagatgagaatagcctgcttagtctctgagtatttggagatcttaatgaaggcaatgaaagtgaacaaacacttttctctttcaaaagagtttcaagagattgtttatctctgtggatgatttaatactgcttacctatttaattawagaattcaatatattgatttttttctttaaca

SEQ ID NO: 293533 - DNA, 620 bp, Homo sapiens
gtattctcatttagttctaagtgtttgctgatttcttcttgaaactatgaatagaaattatattttgtttccaaatgtataaccttttaaatgttgttatttgtgcaattcaatttcattgtcttcagagagtgtaatctgtcagctgagtaatgctttcaatgcatttttggtaaaaataaattcagaattaggttcatataggatagttttattataacatctattttcccacacaactgaaagtgtaaactaaaagggcattccatactttactgcacatgtgtactaacagaatcttcctttgaaaaattttctgtcttattggtatgtatttgcatttcaatatctccctaagtagtctattttatgttcttagtggaagttctctagacgtctagctgcttaaggtcaacagcaagcctgtgacttctttatatcamcttctttgtatactatctgacgtactactgatttacaagtatttgttgactagaggtataagtgcatagacacccaatttgtgagatatgagaactgcataacccaaaggctggcacagagttctaaagtcatacattttattgccaagttcacacaggcaaataactcagtggata

SEQ ID NO: 293534 - DNA, 511 bp, Homo sapiens
attgtgggtgatttttatatactcctttatcagtttattaagtttgaatttttcagaattttatagtgcatatatgtcaattaagcagtcatacacaattcataaatagcttttttgttagctatttttaaattgaggcaaggtgattcaaaccatttcctaaaataacatatgtgattgtgtttgtgtgtgttcaaagttatgtataaattgtatttacctagcactgacttctgactcattagcaaagtagactaattttaatcrattgccaaaatattcataaataatcatgcagtcatgttcatttctcaatgaggcaaaccacaaattacctaaacagcaaccagaatagaaaaaaaatgttttctacttcaatgaaggctgtgttatagtccctatatagaagaggaacaaagtaaacacaatgtaagaactttattaagtttttcttctgaacatttcagaaatacaggaatttgcctacatattaggctggtttgactgagaa

SEQ ID NO: 293535 - DNA, 591 bp, Homo sapiens
atattacttgtacaaaataggttatatatatgttcattgaataaaaaatcttctctagattatctcaggtcctcaaaagttgggtgcttttaatttattaaattctctatcccaaagccctcagttcataggacacacatgtaactcattaaattgtactgagtgttgagactgttttgtgggaaggtaaggcttgaatgtatggctatggatggaggtcctcttcctaagatgtctgtgagttgtatatatggctgggtttcaccaccatgaactagaggtttagaatgccacaagaactgggccttcggggacatgaggacaatgaaatcaaaacatggaaaaaagccagcacttacctggatgaggaacatagctaygtggtgaaattctccacgtcccccttgcttaacaggcactgtcataaagaatttgctgccgtctctagaaaacacgggctcctcattctaaaatacagaagagcacagaacaatctcagaaaggcacatgcaatctgtgctgcctactactgttaattcctgcatgggttataccaaatattgatttataattagttaggaaaatgggcac

SEQ ID NO: 293536 - DNA, 564 bp, Homo sapiens
cgtaacccagggcccggcatagcatatgtgcttggtaaatgttaccgttttctttgtggttacatccatctatgcatgctagtccattcgtggaaatgcagtcctggaatccaagggtcctgatgaaaattgcagtctttcttttttctgcctaagccttggctaaaatatatattcagcaggtaattctcctatatactattggtttactgtggagttttattgaaggatggaggcaaaatgttgaaacattatctccaaatcttcataggaaaaaaaaacatctatgaaacatcttacccagaaaattactaggaagcagatagtataaaagcaaaccataattctattcaaatttttattttaatactcataaaatgttttagttttccrtcaagtgaaagaatttatctttggaatcaatagaaatatagttattataaatttagtttatgcttttacatcctggtagaaatgtagcaatacacataaaaataaaagtttcattgattttttttctccaaatgcaccatcctattttgtaaccttggctatgtgtatagg

SEQ ID NO: 293537 - DNA, 559 bp, Homo sapiens
tggtctttggcctgtgccttttttctcttgtctctttctggaattaggaggactcacttctttcctctaactgatacacacctcaagtcacttgagcccacttctcaacataccctaggttcccatcagtttagaacagtgcttctcaaactctttggtttcaagaccccattacatgccataaaattatcgatgaccccaaaacacttttatttgtggatttacctaccaatatttatcatattaaaaattaaaacrcaaattagaaatatatatttggttataaataacaataagcccaacatacattaacacaaataacatgtttttggaaaataaccattttgtaaaacaaatgagaaaaacagcattgttttaatctttgcacatccctttaatatctggcttaggctgggcacagtggcctatgcctgtaatcccagcactttgggaagctgaaatgggaggatcacttgagcccagaagttggagaccagcctgggcaacatggcaagacccagtctctacaaaaaattaaaaaattagctgggcatggtag

SEQ ID NO: 293538 - DNA, 559 bp, Homo sapiens
tggtctttggcctgtgccttttttctcttgtctctttctggaattaggaggactcacttctttcctctaactgatacacacctcaagtcacttgagcccacttctcaacataccctaggttcccatcagtttagaacagtgcttctcaaactctttggtttcaagaccccattacatgccataaaattatcgatgaccccaaaacacttttatttgtggatttacctaccaatatttatcatattaaaaattaaaacacaaattagaaatatatatttggttataaataacaataagcccaacatacattaacacaaataacatgtttttggaaaataaccattttgtaaaacaaatgagaaaaacagcattgttttaatctttgcacatccctttaatatctggcttaggctgggcacagtggcctatgcctgtaatcccagcactttgggaagctgaaatgggaggatcacttgagcccagaagttggagaccagcctgggcaacatggcaagacccagtctctacamaaaattaaaaaattagctgggcatggtag

SEQ ID NO: 293539 - DNA, 531 bp, Homo sapiens
gttcatgcctataatctcagcactttgggaggctgaggcaggcagatcacgtgagttcaggagttcaagaccagcctggccaacatggtgaaaccccatctctactaaaaatacaaaaaattagctgggcgtggtggttgttgcctgtaatcccagcaacttgggaggctgaggcaggagaactgcttgaacccaggaggcaaagattgcagtgagctaagatcgtgccactgtactccagcctgggcaattgagcaagactctgtctcaaaaaaaaggctaagactgaagaagagaatgtttatctagaataactaatgtcaaaaactccaaacaacaacaacatgatgagaaaggagagcgagacaaaagggatactaargaatgctaatttatgtgatttaatacatacattatgtattaatgtatacataattaatatatataccttcccccaacatgaatttgaagaaatcaacagtcagacttttcattaggagtgatgtgtgctttgataaagtcagggacgga

SEQ ID NO: 293540 - DNA, 531 bp, Homo sapiens
gttcatgcctataatctcagcactttgggaggctgaggcaggcagatcacgtgagttcaggagttcaagaccagcctggccaacatggtgaaaccccatctctactaaaaatacaaaaaattagctgggcgtggtggttgttgcctgtaatcccagcaacttgggaggctgaggcaggagaactgcttgaacccaggaggcaaagattgcagtgagctaagatcgtgccactgtactccagcctgggcaattgagcaagactctgtctcaaaaaaaaggctaagactgaagaagagaatgtttatctagaataactaatgtcaaaaactccaaacaacaacaacatgatgagaaaggagagcgagacaaaagggatactaaagaatgctaatttatgtgayttaatacatacattatgtattaatgtatacataattaatatatataccttcccccaacatgaatttgaagaaatcaacagtcagacttttcattaggagtgatgtgtgctttgataaagtcagggacgga

SEQ ID NO: 293541 - DNA, 541 bp, Homo sapiens
ttaaattagtgcctgttaaccaaaaaagaaaaatagtaacacatatttagtcctatatatttgggtctccaattactaaacccgttttcatcaaagtaaattgtgttagagatctagccccaaccaagaaccaataggttcaattacattacgtggtgatgtttttgtttcttcaaacaaatggaagattatgcagaacactagacaggtttcgtgatttaaaataaaaatgcacttmtgtgaaattaagataagcatatagcacaatgagcaatagaatttgttgaaaacttcaggtgagcagatctatctccgtcacctatccggagtcaacctctatgtccaatctgcactcacagccatgaatgtgcagctgaacatggttgaaatctttagacctttcaacaattgccccaataggactgaggcatctctcacttagctttactgaactccacatgaatgctcaataagggcttgtttaaagtcttctccccatacaaggtagcagctctgtggtctgcgatgacctcctcacccc

SEQ ID NO: 293542 - DNA, 551 bp, Homo sapiens
ctctgaacagaccaataacaagcagcaagattaaagtggtaattaaaaaattaccaacaaaaaaagtccaggaccagacggattcacagaaggattctaccagacattcaaagaagaattaattgttaccaatcctattgacactattccacaagatagagaaagaggaaaccctccctaaatcattctgtgaagataacattctagattatatatatataatatatattatattataatatataataaataatatataatttataaattataaatataatttatataatacataatacaatattctaccagatatatatgtatatatatatatgtatatatatatgtgtatatatatgtgtatatatatatatacgcgtatatatatatgtgtrtatatatatacgtgtatatatatatatatgtatatacacacacatcagttttataatccacgcttgattgatgggcatgtgggttggttccatgttttgcaaattatgaattgtgctgctatacacatgagtgtgcaagtatcttttttgtataat

SEQ ID NO: 293543 - DNA, 569 bp, Homo sapiens
gtgtatctcatttcttaggtctattagtaactgtcttaaatttgggagctccagtgttaggtgcatatatgtttaggattgtgatatcttcctkttggataaggccttttatcattatataatgtccctctttgtcttttttaactgctgttgctttaatgtttgttttgcctgatataagaatagctactcctgctcacttttggtgtccatttgcatgaaatgcctttttccacctttaccttaaatttgtgcaagtccttatgtgttaggtgagtgtgtgaaggcagcagatggttggtgaattctgtctgcaattctgtatcttttaagtggaggatttaggccatttgcatccaatgttaatactgagatatgaggtaccattccattcattgtgctatttgttgcctgtgtaccttggttttttgtttttagtttttgttttttaaattgtacttttgttgtataggtcctgtgagacttatgccttaggttctgttttgatgtacttccaaaatttgtttcagtatttagagctccttttagcagtttttgtagttgtggct

SEQ ID NO: 293544 - DNA, 515 bp, Homo sapiens
ataataacattttcccattctaaaacatatgaaagttttataggccaggtatggtggctcacacctgtaatcccagcactttgggaggatgaggtgggagatcacttgaggacaggagttcgagaccagcctggccaacatggcaaagccccatctctactaaaaatacaaaaaaattagcctggtgtggtggtgcttgcctgtaatcccagctattcgggaggctgagaggcacaagaattgcttgaacccaggaggcggatgttgcagtgagctgtgattgtgccactgcactccagcctgggtgacagagtgacacactgcctcaaaaaataataataataaaatgaaacacatgaaggttttataaagaaattgtaatcaaatattttatcttttaaaaatattgaagaatagaaatgaatatgatagattatagtagacattaacaagcaattagtaaaattaaagatttttctccagtgaggctargttgatgagggagactgcaggaa

SEQ ID NO: 293545 - DNA, 556 bp, Homo sapiens
  misc_feature (1)...(556): n = A,T,C or G
attctctatatctgtaccctcaataggtaaccattttcatagctggatggattactacagcacatatttttaaagatttgttaaatcaatgttgtgacatttagtaattacttcttttaaaggaatgttaaacggtaacttctatntaatcaataccttctgtatgtgacagtctatacagcgttttacaaataatgtatacaatctcactaataattacttctactaagaagtaggcatggttcccattttacagaagagaaagctgaggcctggagagattaagcaacttgccccagctttacatagctaatgagtgattaaacctggatttgaatacaagtctatcaaactgtaatatgtaggtctrtacaccatattctgcatctcactttttacatggtcgtcagaatcaaatttattttcttatttcctttaattatccatgacttaatgtgagaggtagggaaaatgtagtccagctgctatgcatttcaccttggcttaagggttcgtctagctctgagcttctcagtttcacagtgtaggtgtgcta

SEQ ID NO: 293546 - DNA, 425 bp, Homo sapiens
tgttgctgccactcaacaatcccctttgttttttttttttttttccgaagcaagtaaaytaattcttaccttcaactcagatgaattctgggtattcctggtaaacatgactttatttcaagtttagccattttccatacagcattgttatttctactttcttcatcctcattctgaagagaaattaaactataagcttaccagtacatcacctctgtaagctaaatgaggatacagttttattgattacaccatttcattgctttcaaaatgagcaataatcacataatgattattggacacttcccataacataatgattattggacacttcccattaccacactgtcagctagttcataaaactgtaccttaaacacattaaaggaaattcaggatcaaaataccaattttatggtaatatt

SEQ ID NO: 293547 - DNA, 589 bp, Homo sapiens
ctttttaaatctctcagctttaatttctaagacagtcagtctaacgaatataacccacataagcagacactttttggagtcctcagtaattcttgaagagtatcaagagatcctaagaccccaaagtttgaacattgctgttttgaagggtcattggttcctttctctgaatttcagagtcatttgcatatcaccctcatttgtgctttgcaagctgagagagccctggactcagcagtgagagcccaggtagcagaggaaggagggctgagcgccttgaagcaaacacagccaaaggtcctggccaggagacagacatttcagtgtagctatgggaggcactgaggacccagggtgggtaggractttgtgaagactccttctgtgatgttctcaccgtaaccactggtttatcacctactctagtaagttctcatttccattactcttcacaagaaaggatttaatattctcatttctagtcagttcaaccactattggatattgtagttttattctagtcattttaacctcctgatattcacattgccaaatttctgatgaagatttgaagtacattggtgtactt

SEQ ID NO: 293548 - DNA, 598 bp, Homo sapiens
attaacaaggtagggtccctcccgaggggagttgaatgtatgggaacagaggaaacaaaaacactggaagtaaatcctggtggtataacatgatgatttgtgtaacagcaatatgtaaagaatataatggaagagtaaatggggagcaagtcactccatggtagctttgtagtaaccactatagaatgggtaatttctaagctaagtaaatgagtaaaagcttatcaaggagsctttttaccaatgagtaaatgagtaaaagtttatcaaggaagagagcagatacaccagatagagagaacggtgtgagcaaagacaagagatgaaaatgccgtggaagttcatttgactgaaacatcgtgttgaaagttggctcctgtagaaaataggtagtattgaaagattttaaagcagagtaggtagtatggtagcgaagactggattaaagagctatatttggactcgagtagaatgggtttaggtggtgactcaagtgcaggaccaagagagcaggtagaacaacattttcagcattcatgtctcagagttcctccttgtcaatataatttgttaatattctttgtgagatagatgaatt

SEQ ID NO: 293549 - DNA, 586 bp, Homo sapiens
ttggggcacgttcaaggtctcctctctgcctaccaccacccactcgattctgcatccccaggatcccctgaacagtactcatctctgacaggtgacagactctccagctgacctcctctctgctcctgacctttgggttaaggctgctccaccctcaagggagtcgtcttgggaaagatcctttaaagatggctctggtttggcagcactgggcagcatgcctgtcctggaatggtgctgggataggggtcatagaactaagtctgctctaccatggcatgtccagaatggatggggaagcacctctcttgaaaatgtgatggtgagtcttaatatgtcagctttgaggcttcagcagagacttaagacaaaaagagaagtaccatttatgctstcattatttcaagacaaatagaatcaaatacatagaaccagaaagtttttattcaatttggctggtacatcctactcccttgcattagcatcgaggtcatttttttctgacctacttattcagtttgttcatttctgatgaggaaacagggatctggtttgctgcattacttatctaaggagctatcatgtt

SEQ ID NO: 293550 - DNA, 569 bp, Homo sapiens
tatcttggtggtgctgacttcctgttatggtcctrgtaccaattcaccctcctcaaccttctattgcaataacaatgaaaggctataatgagttacaaagttgtgtcagcactgaaaattagaaatacttatcaacattttgacactctggaaggaatttctactagacaaatcccaggtgaggtcaagtagtggaaatgacagtggaaaacaaatactttaccaggtgagatagaagagtagctgcaaattgaagaaagagagaaagagaggaaaggatggggaaggagggaaggagggaaggaggggaggataagggaaggagagagactgcttccttatctttatccaaatttagttccaaaaatgaatcaacagatttctagagagactagctggagtttaattattttgttcccggtcatctcttcagcccacagccatggtatcctactactgctataacaaattaccaaaatgtagcaacttagaatagtacagatgtattatattatcttccagttttgtaggtcagaagtcctgacttctgggtactggatcttactggg

SEQ ID NO: 293551 - DNA, 569 bp, Homo sapiens
tatcttggtggtgctgacttcctgttatggtcctggtaccaattcaccctcctcaaccttctattgcaataacaatgaaaggctataatgagttacaaagttgtgtcagcactgaaaattagaaatacttatcaacattttgacactctggaaggaatttctactagacaaatcccaggtgaggtcaagtagtggaaatgacagtggaaaacaaatactttaccaggtgagatagaagagtagctgcaaattgaagaaagagagaaagagaggaaaggatggggaaggagggaaggagggaaggaggggaggataagggaaggagagagactgcttcctyatctttatccaaatttagttccaaaaatgaatcaacagatttctagagagactagctggagtttaattattttgttcccggtcatctcttcagcccacagccatggtatcctactactgctataacaaattaccaaaatgtagcaacttagaatagtacagatgtattatattatcttccagttttgtaggtcagaagtcctgacttctgggtactggatcttactggg

SEQ ID NO: 293552 - DNA, 548 bp, Homo sapiens
gtagttggaataatatcatatgtgggctttcagatgkgcttctttcacatagcaatatgcatttcagtttcctccatgtcttttcatggcttgatagctgactttttttagtgctgaataatattcaattgcttggatgcatcacagtagatttattcacctactgatggacatcttggtttcttccaagttctggcaattgtgaatgaaactgctgtaattgtccatgcgcatgtttttgtgtggacgtaaattttccactcttttgggtaaatactaaggagtacaatggccgaatcttatggtaagagtatatttagttttgtaagaaaccaccaaactgtcttccaaagtggctctacaatttttccttcccactagcagtgaacaagagttcctgttgctccacatccttgacagcatttggtgttgacagtgttctggattttagccattctaataggtgcatagcggtatctcgttgttttaacttcatttccccgatgacagatgatatggagcatcttttcatctgctttactgccatc

SEQ ID NO: 293553 - DNA, 548 bp, Homo sapiens
gtagttggaataatatcatatgtgggctttcagatgggcttctttcacatagcaatatgcatttcagtttcctccatgtcttttcatggcttgatagctgactttttttagtgctgaataatattcaattgcttggatgcatcacagtagatttattcacctactgatggacatcttggtttcttccaagttctggcaattgtgaatgaaactgctgtaattgtccatgygcatgtttttgtgtggacgtaaattttccactcttttgggtaaatactaaggagtacaatggccgaatcttatggtaagagtatatttagttttgtaagaaaccaccaaactgtcttccaaagtggctctacaatttttccttcccactagcagtgaacaagagttcctgttgctccacatccttgacagcatttggtgttgacagtgttctggattttagccattctaataggtgcatagcggtatctcgttgttttaacttcatttccccgatgacagatgatatggagcatcttttcatctgctttactgccatc

SEQ ID NO: 293554 - DNA, 548 bp, Homo sapiens
gtagttggaataatatcatatgtgggctttcagatgggcttctttcacatagcaatatgcatttcagtttcctccatgtcttttcatggcttgatagctgactttttttagtgctgaataatattcaattgcttggatgcatcacagtagatttattcacctactgatggacatcttggtttcttccaagttctggcaattgtgaatgaaactgctgtaattgtccatgcgcatgtttttgtgtggacgtaaattttccactcttttgggtaaatactaaggagtacaatggccraatcttatggtaagagtatatttagttttgtaagaaaccaccaaactgtcttccaaagtggctctacaatttttccttcccactagcagtgaacaagagttcctgttgctccacatccttgacagcatttggtgttgacagtgttctggattttagccattctaataggtgcatagcggtatctcgttgttttaacttcatttccccgatgacagatgatatggagcatcttttcatctgctttactgccatc

SEQ ID NO: 293555 - DNA, 549 bp, Homo sapiens
ttccttgttttctctgagtaattttttaaaattataaaagcttgattctaattgtcacaattacccacatcttaattaatatattgcttaaagatgtgtgcatattagacctaaaagggtgggtttcatatagcttgattatcataattgcaagtattctattttctcatttacttaattgattgtcatagatttccagatgaattmacactgctgggagaaaactgaatacatttttaagagaaaaaacaaaaatgaacaaaaacagaaatggggatatttaaaagagcaatgtgccccacaatataatccatgggagcatgaaaaatcgccctcgataagatctccttacctccttgctggttaaaatgggcatttttgtgaaatgaaagagaaatgaacgaaaaagtgttattgattcaaccacatcgataataacgctggctccacactctcttcagccagaggtgcctagtgctcaagaaaatttttccatttagtttaccttctagaatctatcagtttagtacattatgtcaagtatttgtt

SEQ ID NO: 293556 - DNA, 1201 bp, Homo sapiens
ggaagtggccactatcccacccctgcaaccaccctcaccgtggcacagttccctggcttaaagtactgattaactttgtgtttagttaagtcaaggagaactgataaaatagagtttacaatattacagtcttaggctcacactgatttctcatctgaagaggcctagaaataaatatactagccattatgtattaaattaatggagagtatataacttccaaactagaggggaggatgaacaaaggaaaaacaaacaaaaccaccttactcaatccagttgaagccataaagggaaggagaaacaggaacagaaaaagaggtatcaggaaaaaaagcaaagaaaaaatkaaagcatggtaggaataaatccacatatttcagaaaccacagtccatttaaatgaatttaattctccattaaaagagaccttcttaaaacagaaaggcacgagtttatttttgtgtcactgagttggcttgtattggatcaggacttttacaaaaacagctataagacctgggtcagatagcgaagggaaactgctgacatcggtgaataagcataagacaaggcatgcaggcagatcctggwtcacattcttctcaagtgaagcctgtgctccttttctgggtttccaccgtgcagcttagagcccagcttagcatcaccatatctggggacagtgctcatagggtggctgactcacagagactaacttgatactcttctacaagtgaatgtagtacagagtatggggcttggaggagaggtcttgtcccaccatgagccctactcttcaatagctgtgtgaccctggacwgactcctgcaatgttctggatcttgtttggtgctttgtgatatcaaaatgctcactcataaagtgagtggtcaggataggagctactgccacaggtaatccaatgccttttgtgtcttgcttcactccctcagattcaaagtcttcagtaagagcatccatgtgacctataagcaaaggctcatgtgcccacactttcctcactatcagggaggaggaagggagtagttggttctttctggttatgaaatggaaggcagagccctgtcttccaccaaaacgagaccagtgtggaattcatccccaaatggaaagcatgtttagttaatgggtagaaaatttaaaagccactacactgcgaatgcctgtataattgcaca

SEQ ID NO: 293557 - DNA, 608 bp, Homo sapiens
tcacattcttctcaagtgaagcctgtgctccttttctgggtttccaccgtgcagcttagagcccagcttagcatcaccatatctggggacagtgctcatagggtggctgactcacagagactaacttgatactcttctacaagtgaatgtagtacagagtatggggcttggaggagaggtcttgtcccaccatgagccctactcttcaatagctgtgtgaccctggacagactcctgcaatgttctggatcttgtttggtgctttgtgatatcaaaatgctcactcataaagtgagtggtcaggataggagctactgccacaggtaatccaatgccttttgtgtcttgcttcactccctcagattcaaagtcttcagtaagagcatccatgtgacctataagcaaaggctcatgtgcccacactttcctcactatcagggaggaggaagggagtagttggttctttctggttatgaaatggaaggcagagccctgtcttccaccaaaacgagaccagtgtggaattcatccccaaatggaaagcatgtttagttaatgggtagaaaatttaaaagccactacactgygaatgcctgtataattgcaca

SEQ ID NO: 293558 - DNA, 505 bp, Homo sapiens
attcctaagagtgggagccctcagtaagtgcaaggtagactgaggagggataggtctcttaagacctctgtagcttctaatcactcctggtccacaggaactatattcttggtcaatttcagaccagaagcccactcactccagtgaccctcctccagcttctcagagccactgtgcatgctgcttctccatggragaagggagtattactgtagcaaagccagctcctgagcactctagccacctcaatggactctagatcactatctctagtataggtagcgtgatagtaaattttaagtgtcaatttgactggtttaaggaatacttaaagaactggtaatacattagtttggggtaagtctatgagggtgtttccaaagaagattggtgtgtaagtcagtgtactagtggggaacatctaccctcaacgtaggtgggatccatccaactggccgggggcatggatggcatggaaaagacagagaaaaggtgattttctgtc

SEQ ID NO: 293559 - DNA, 505 bp, Homo sapiens
attcctaagagtgggagccctcagtaagtgcaaggtagactgaggagggataggtctcttaagacctctgtagcttctaatcactcctggtccacaggaactatattcttggtcaatttcagaccagaagcccactcactccagtgaccctcctccagcttctcagagccactgtgcatgctgcttctccatggaagaagggagtmttactgtagcaaagccagctcctgagcactctagccacctcaatggactctagatcactatctctagtataggtagcgtgatagtaaattttaagtgtcaatttgactggtttaaggaatacttaaagaactggtaatacattagtttggggtaagtctatgagggtgtttccaaagaagattggtgtgtaagtcagtgtactagtggggaacatctaccctcaacgtaggtgggatccatccaactggccgggggcatggatggcatggaaaagacagagaaaaggtgattttctgtc

SEQ ID NO: 293560 - DNA, 530 bp, Homo sapiens
aattctatcacatccctgatcctcagatgacgcatatgaaatgcattacaccttgctgggctgttatgtgggttaaagaagagcatgaaaagctctccataagtgacagcttcctggagcaactgacctaatgagtcccctatgtctgtcaccaagccccagattgacctgtttatctcagtcagcatttttgctgtgactaccaatagatcatctcagatctcggtttttttgcaacttcatcaatgacctatctggccagcaggagaatttccttctgtttacaccctgtctccttcccagatattcctactgcatggtatgatataaaaggccattaaaattttgtcccagggagccccacagtcatctcctcaagagtgtgaaatcatgtatagcccaaatttaaatgtgtagcaggtmtccctgagtcaaaattagaatttggtatcacgctgagtttataaagaggagcttcctcaggtctccattagcataagatgatttccatactcaaagaagaaagttca

SEQ ID NO: 293561 - DNA, 1099 bp, Homo sapiens
atatctcaaaatgcagaaaggaaaccttccaatggaatttcatactctgcaaaatttcttaagtttttcagattaagggaaaatcaagaactttctgagacagaaacttgtggtggcaggttaagtatatcagtcccctccctcttggaagtaaagcagtttgtcctcacagggatgamtacatagtctgggtgtgggtttgctctcctacattcagaacctcagctataaccactatccaggggcctatggaatcccatgcaatacaacatccaaccagtgagtccaaaacaacatagcagctaaccaaaacactggccctatagtgaaggaagagctgaaacaggtccatgatcattaagttcacttaatggtatactagtacatttttaataactggctctccagaaaaaaaagaaaagccctgatttgtagtatttgtcaattttcttgatgtaaatactactataatgggcaatttcaagttgccaaccgacacagaaaatcctgaaaatgtagtaattgaccctgcaaagtcagtataagcctwatatctcaaaatgcagaaaggaaaccttccaatggaatttcatactctgcaaaatttcttaagtttttcagattaagggaaaatcaagaactttctgagacagaaacttgtggtggcaggttaagtatatcagtcccctccctcttggaagtaaagcagtttgtcctcacagggatgactacatagtctgggtgtgggtttgctctcctacattcagaacctcagctataaccactatccaggggcctatggaatcccatgcaatacaacatccaaccagtgagtccaaaacaacatagcagctaaccaaaacactggccctatagtgaaggaagagctgaaacaggtccatgatcattaagttcacttaatggtatactagtacatttttaataactggctctccagaaaaaaaagaaaagccctgatttgtagtatttgtcaattttcttgatgtaaatactactataatgggcaatttcaagttgccaaccgacwcagaaaatcctgaaaatgtagtaattgaccctgcaaagtcagtataagcct

SEQ ID NO: 293562 - DNA, 266 bp, Homo sapiens
gcatccttccaaaatatttacatcatgattttggatagcatatacactattattgcaatataaacattactgacaattargctatatagtaaattatgattacattttgtctcctgaataacttaattttttctctagaattaagaactgctggtgggggccaagatgaccaatgagaagcagctgcagtgtgtggcactcatggaaaataacaaaaaggggtgagtaaatacagcaccttcaactgatatatccaggtactcgca

SEQ ID NO: 293563 - DNA, 543 bp, Homo sapiens
aacctgtggcaccagtgagatggacttcagtttggtacaagtcactgccagcagtgggcaggccatagtggccatggtgttgagcatgccctatgtagtgctgtgctggtctcagagactctaagctttggatgtgacccagtgctacctcagcctctgctgccaaaggattctggccattgtgatcctggacttagagcagctcctagtgctgcaattgctgaaatggtcacaggcttagggacctccccagtcaaacttctctgaatctctggacaggcttactgctaaaggaagctccccaacaaagccagattgcaaagactagattaggtacttacatcaatgcatggacatctacaaatggcyacaagaatcacaataaatcagggaatgttcacttcaccaagcagacaaaataaggtgccagtgactgaccctgaagaaatggagatggaagaactgcctgacaaggaattcaagatacctgttttaaggaagctcagcaaacttcaagaacataccaaaaaacaattcaaaatt

SEQ ID NO: 293564 - DNA, 565 bp, Homo sapiens
ttcctttcactacacccccttggccaaacccagaagccaagggcaactagaagccagaaggcaaggaagcccacagatgcaggtcagcctcctgggcagacagccaggagagaagcatggagggtggatttggaaaggtaattggaagttatccagcatagtccatgcctcttgcccctcaggaccatattcttctttcttgggtaagacatttgtgttccctctcayaggtgaaattctgaatcatcacattaggtcaatgtagtcatactcctatctgaaacttttaaaagccacccccagtgttactcatgtaaggtggttagagaaaaaggcagggatagggagcaaacagttaaatagaacatcgagactccttgattctgtagttactcaccaaagccaagtttggtaatcatagctaccttcttctaccatccatcccatgttccgcttacatttgccagcacctctgctggatgctgttcttcaccttacagttgagtcaagcctccatttctgtgcaatccaggtcctcagtgctcttctttattgggtgcttcca

SEQ ID NO: 293565 - DNA, 531 bp, Homo sapiens
atgttctcttagttcatggctaatttcacagagtctgagacctaattagtaagtcaagcaaagggataggtccagagagaacttaytgttggtgaggcctgtttgataatgttttcatataatattgacagtatacacagtcatagtttcattttacttattatttatttatttattgaggcagagtctagctctctctgtcatccaggctggagtacagtggctcaatcttggctcactgcaacctccacctcccaggttcaagcaattctcacacctcagcctcctgagtagcttggattacaaatgtgcaccaccaacccggctaatttttgtgttttcagtagagatggggttttgccacgttggccaggcttgtctcatttcatcttatttctactgtcattccatttggtcaatttgtaatttaataattttgtacaaggcagtttctacattaattttatttttctgaaaagtgtctatcatattagtggcattatgaaaatcgtagattattttctgtgtttt

SEQ ID NO: 293566 - DNA, 542 bp, Homo sapiens
tttgttgttttaagttgctcagttttggtctaacttgttatgcagcaatagataaataatatgcagagaaagagaaacaaatgcatttgttttattattgcaattttctccaatattttttattttctttctcacaatgaacaactatccttcatttacccaaatattctatttaaaagctaataatacagcatttgttgagtyatctggttctgcaagattgagatcctcttgtcctatgtgccaggaatgaactccagtgtccccacccaaaccctggggaatgggagcagaagccagaggaggagcccatatctgagccccaggtattccacctgcacttcacctgttggaccagcttggtggttgagagtccactgaggcactggcaaggaggtggccaggacagacaaggctgcctctatggacctcacagctccagcccagattcagctgaagtcctcaggcaacaggcagcacagctcctaccccaggcctctcagggctgccaagaacatgagctccggatgctaggctgtgtt

SEQ ID NO: 293567 - DNA, 570 bp, Homo sapiens
cagtgccagacggtgacaaaacagtcagtcactgtagattctagagctgggcagggatgtggtgaaaaaaatctttagaacgtgggtccacattcctcacataggttggaatgaatgaaaggcagaaaaaccgggaatacaagtacagtagtaatggcaattaaaaacacaaagttatatttaaagaaataacctgtagggacttgataagttagacactgagtcaggagaagtaggagatattgtcaatgagtctcaggttttgaatatcactggtgagaggaatattatgacagtgagagaaatgaaaytgggaggaatgtgtgggctgggaggagaagataattaacttaaccttaaatatatttggttggatatcagcaggatgtccaaagtgggctgtcctgtaggctgcaggaggtaaagtgggatgtgcagtctacatttgggagccattagcccaagataatcattgcagctgtagaagtcaatgaattgcagcttaatatgatgtgaaatagaagtgcttaggaccttgttagccttagggtggccccagaaggaggtgaa

SEQ ID NO: 293568 - DNA, 555 bp, Homo sapiens
tcctgtaggctgcaggaggtaaagtgggatgtgcagtctacatttgggagccattagcccaagataatcattgcagctgtagaagtcaatgaattgcagcttaatatgatgtgaaatagaagtgcttaggaccttgttagccttagggtggccccagaaggaggtgaaatctacartgggagaaagaggtgtgaagggagtcattcaatgtcaagggttccaaggaggcaatgactaaatatcaaaggaatcaaaagaatctctggatcttgctccacagaagttaatattggtcttggacagaacatcccacatagatactgtgcaggagaatgatgaaggataggacagggtgctgtgcaaaagaacatggggaaagcccaagtttagctgatggcagtgtttgagccaggacaggtgaattgcggaggtctgagagccagatgccatgtccagggagaaatgagaggaagaaaagagggatatagactgaagttcagtgaaaagtcatttgaggaaaatagggaggggaagctttgggggtgaggcatgtgg

SEQ ID NO: 293569 - DNA, 555 bp, Homo sapiens
tcctgtaggctgcaggaggtaaagtgggatgtgcagtctacatttgggagccattagcccaagataatcattgcagctgtagaagtcaatgaattgcagcttaatatgatgtgaaatagaagtgcttaggaccttgttagccttagggtggccccagaaggaggtgaaatctacagtgggagaaagaggtgtgaagggagtcattcaatgtcaagggttccaaggaggcaatgactaaatatcaaaggaatcaaaagaatctctggatcttgctccacagaasttaatattggtcttggacagaacatcccacatagatactgtgcaggagaatgatgaaggataggacagggtgctgtgcaaaagaacatggggaaagcccaagtttagctgatggcagtgtttgagccaggacaggtgaattgcggaggtctgagagccagatgccatgtccagggagaaatgagaggaagaaaagagggatatagactgaagttcagtgaaaagtcatttgaggaaaatagggaggggaagctttgggggtgaggcatgtgg

SEQ ID NO: 293570 - DNA, 564 bp, Homo sapiens
ccattctcagtcaggcagcccagagaaacataacctcaaccttgctatctctgtgtccagccattgacrcccacagagcacaccccttcaactctaggccaaagaaaagcatgaggaaagaaagctgatttttgttaaattactgatttctacttccacaaggattaagtaaaaatcttttcaaatattagggaagaaatacgttctaaagcacatgaggaaagattagtccaagtggtcttaggttgcattttagtaatgtgggttttctgccccagggagaagcaaagttgttgaaagatgggaaagtcttcagagtggtgcgagagaattgctgggatccagaagttcgtattagagaaatggaccaaaaaggtacgatgagaagtgctaccaatgttagcatctgatgtaaaagcaatgtctgcccttaaagtttgctgacaactttatgtgatggtaacttctgacccccttttctctgccaggacaggctgttccagcttcactgtgggagggacagggccttccactacaatgcttttagagtgtggattcaaaatg

SEQ ID NO: 293571 - DNA, 505 bp, Homo sapiens
agaatttctagggaaaaggccatagtgaaaagtctaaaatattttgtatttcaattccatcttattaacagatatctatagaagatttccacattttcccaagggaaaaatctttggggttaaaagtatatagacatatttaaaaatttgcaatatggtacttgagtttagactctaaggtttaaaaaaatcatgtcgagcaaaaagaggcccatcatttgaaagttgcaagtagtggtttatctccagaatggacactttatctcatattaatgctgactgtttctctggcttgagaaaataaccagaatataaatattaagcattttagcttggtaatcaattatgtggttgagctgtgcctctgagttgtttagcttttgtgtcacccctgcaracatggatggttagcaattggttgtgactgttgattgtttttggtttggatggagagtgatgagaaggcatgtaagcagaagacttcacagggcagaaactgaaagag

SEQ ID NO: 293572 - DNA, 574 bp, Homo sapiens
tgctgcacatctgtcatcctgaaatctctcttcatgaggatattctcaatctctctcattggattccttgtttgctgaatctcatgattttcccatttcttggttttactccttcatcttggtggacaacatccttcaataactttcagagaaggaagtatggaggatgaacttttcaaaaccttgtttatctaaaaatgtctgtattcatccttcgcaatgacctaattgtttggctaggtaacaattctagcttggaagtcgtttctttccctcagaattttaaagtcattgttccattgtgttccagcttttagaggtgctgttgggtaatgcaatgacatcctaatttttgaaatttgtgtaaaacctgcttctctcttctccttaccacaacttcaaagagtctaagratttctttttgtcctgaaatttcacaatgatactacttgatataggtctattttcacccattaccctagtcatttggtggatcctttcattctgtaaatttcttaaattatgtgttaatgatttccttccctctgctttttctctctagaattcctattgt

SEQ ID NO: 293573 - DNA, 494 bp, Homo sapiens
atgtttgttttaaactgctatgtttgggggtaatttgtaacacagcaatagctacctaatactcggagcgaggacaggtcctaaagggaaagagggaacagtgtggaagaagaccccagtgtgcagttcgccaaggtaatctcctgtcactgctatccaacctctgtagaycccaggcaggctgactgtaacctcacgctatagctttagagatctagaaaccttcagagagatttcccaggacagcattcacagtttggctgcaagctgtcatcactcatgacaggagagccaggacaaagcaggatagggcaggttgtgaccctggtcctcaagaatgggcaacagtaataatactgtgactgtaatgtgaccaagcgcagaggagaaaaatgtggactgcaaaacagctgatgcccaaatccagaggtctcatccactgtggtcagtagaggcatcattgtgactcatagccagtcccctggccgttttgg

SEQ ID NO: 293574 - DNA, 494 bp, Homo sapiens
atgtttgttttaaactgctatgtttgggggtaatttgtaacacagcaatagctacctaatactcggagcgaggacaggtcctaaagggaaagagggaacagtgtggaagaagaccccagtgtgcagttcgccaaggtaatctcctgtcactgctatccaacctctgtagatcccaggcaggctgactgtaacctcacgytatagctttagagatctagaaaccttcagagagatttcccaggacagcattcacagtttggctgcaagctgtcatcactcatgacaggagagccaggacaaagcaggatagggcaggttgtgaccctggtcctcaagaatgggcaacagtaataatactgtgactgtaatgtgaccaagcgcagaggagaaaaatgtggactgcaaaacagctgatgcccaaatccagaggtctcatccactgtggtcagtagaggcatcattgtgactcatagccagtcccctggccgttttgg

SEQ ID NO: 293575 - DNA, 494 bp, Homo sapiens
atgtttgttttaaactgctatgtttgggggtaatttgtaacacagcaatagctacctaatactcggagcgaggacaggtcctaaagggaaagagggaacagtgtggaagaagaccccagtgtgcagttcgccaaggtaatctcctgtcactgctatccaacctctgtagatcccaggcaggctgactgtaacctcacgctatagctttagagatctagaaaccttcagagagatttcccaggacagcattcacagtttggctgcaagctgtcatcactcatgacaggagagccaggacaaagcaggatagggcaggytgtgaccctggtcctcaagaatgggcaacagtaataatactgtgactgtaatgtgaccaagcgcagaggagaaaaatgtggactgcaaaacagctgatgcccaaatccagaggtctcatccactgtggtcagtagaggcatcattgtgactcatagccagtcccctggccgttttgg

SEQ ID NO: 293576 - DNA, 538 bp, Homo sapiens
atattgagtctcctataggtcttttagtccaaagaagatctccttatcartatgtcctagcagggataccattcaaccattcccactgtgtgagaagcaattttccagaggagcggcactgcttattaaattgtgtccacctgaagccaatgtaatcaaccatccagttaattcagtgggtgaaaaagcatcaaatcagtggcttagtgtagtgatatggtttgcctgtgtccccacccaaatctcatcttgaattgtaatccccataatccccgtgtgtcaagggagacaccaggtggaggtaattgaatcatggggctggttccctatgctgttctcctgatagtgagcgagttctcacgagatctgacagttttataagtgtgtggcaagctccttctatggtcattctctctccttccaccttatgaagaaggtacctgcctccctttgacttctgccaagatagtaattgtccgaggcctccctagccatatggaagggtgagtcaaacctctttccttttacattactcagt

SEQ ID NO: 293577 - DNA, 538 bp, Homo sapiens
atattgagtctcctataggtcttttagtccaaagaagatctccttatcagtatgtcctagcagggataccattcaaccattcccactgtgtgagaagcaattttccagaggagcggcactgcttattaaattgtgtccacctgaagccaatktaatcaaccatccagttaattcagtgggtgaaaaagcatcaaatcagtggcttagtgtagtgatatggtttgcctgtgtccccacccaaatctcatcttgaattgtaatccccataatccccgtgtgtcaagggagacaccaggtggaggtaattgaatcatggggctggttccctatgctgttctcctgatagtgagcgagttctcacgagatctgacagttttataagtgtgtggcaagctccttctatggtcattctctctccttccaccttatgaagaaggtacctgcctccctttgacttctgccaagatagtaattgtccgaggcctccctagccatatggaagggtgagtcaaacctctttccttttacattactcagt

SEQ ID NO: 293578 - DNA, 544 bp, Homo sapiens
aaagcagggattgggaactgaagacattgctgtacaaagagggaaggaggacacccgttgtgggataaccacaaatcactgggtgaaaatggggcaaatcagatgtgatcatttgctgagaagctgattatgtatatttccaacacccaatgggttattataacrtatccactgggtaagactgatatagcagatccaccagactcttgttctttcttgtgaatataaagaaatattgctaatgggtatacatgtgattttttgcttcattttatttctgcatggcaagttatggtttctgccaagcttgtgcaaactgtatcaagctaagacaaatcttttccttttagagtgtcgataaactttctccctaggtttataggaataaatgagctggaaactggactgcccttttctgtaaagcattgcacacaagctggtcatacaatttctcaatgtgcttttggcaacccaaaactcctcttacagctctggcattgtcagtgttcattgctatgccatactcaaaattacatggacttcc

SEQ ID NO: 293579 - DNA, 521 bp, Homo sapiens
gtgattttcagctgggcacagtggctcacacctataatctcagcactttgggaggctgaggcagayggactgcttgagcttaggagtttgagaccagcctggggaacatggtgaaatcctgtctctacaaaaaagagaaaaactagccagccatgatggcatgcacctgtagtcccagctactcggtgggctgaagtgggaggatcgctggagcccaggaggttgaggctgagtgatctgtgattgcaccattgcactctaacttgggcatcaaagtgagagctcatctctttaaaaaaaaaagtgattttcatgtaaaaattgccagtctctaatactatgccaaaggcttttattgaagttcattatcagaatcttaattggataaaaatttaaaccagtatgaaatttatataaaaacatttttctatataaaaggcaagttagtatcatgtacaagttaacctatttaaatgtggttagaatattgcagaaagataatgactctgcagagccgtgga

SEQ ID NO: 293580 - DNA, 570 bp, Homo sapiens
gacactaaaatgaaggagactagacactaacaagaaggagctcccgagatggggatggggtgcctcagatttgaatgagtagtcaattgagtccaacgagggtgccaatgagctcttttacgtggttctggcaaatgtaccctgcaaccataattttctctcaaggtatcattaaaatcaaatgattcccttattttgggtatccatttacactgtaattattttggtcttttgtagtgactttcgtggttaaattaagcaattctactcccgcctgtgtagataatgtaatgactttttaatcatttgttttctactagccaaattgtttccatgatcccattagaaattcttctgtagtgattccagtggatttattgaactactggtgacagccacactgatgaactgcaggctgcctgctgctagattcagccaataaatatcaaataccttccattttcccctggaactaagaaagaagmtaataattctgatcaatggacatagttcctgagttttgccatagaagtcataaagaataccatgtgggtatggtagtttaaaaac

SEQ ID NO: 293581 - DNA, 571 bp, Homo sapiens
gaatgctcaacctatatcaacaatgactatttttccctgcctgcttttgaaactagctcttagaagaacttgtttcaaaaggacaagggaaagcaccttctcatgcagcgtcgtatttattttactgatcatggcttaaacaggcgatagaagaaacattgcctaaagagaaaatctcaattagccaacttcttctgttctagtcattgtttttatacacactagactagatcacagcmagtgggctggactgagggagtgaggttattggaatataatggtgatattaaaacttgaagttcaaataaacacatccaggactatgagagttttgtaaattaaaactggcagaagatcacagtttggcttcacatgaatctgaaatttctaagacattttccattttttcctcctagagtttggaatcaccactgttcatgcaaaccagaaacagacctggctatctgacaaatcattggctagtcactctctttcaagatgtctaaagatagagaagcaacagagggctatattgctattttgtattaaataaaaccaacagttaaggttt

SEQ ID NO: 293582 - DNA, 502 bp, Homo sapiens
acatcctatgttggggatcatctgtatttttacctatcactatgtttttgtctatccatagtgttcctatatacctggtgtatattccatagtatgtaccccatcaaattttgtttattcaacttcctagtgatagacacctaatttctcatctacctgtctgctaccacataaaaggtagcaggggacataattgattayggccctttatggatatgttgcaggcgtttctctggtgtatattcccaggcgtcagttggatggatcatacagaatataaatacacccttggtttctctaagtattgctagattgtgtctgtaccagttaactctcacatgccttttttcccctaaattcttgccaacacttggaatcattcaattttataatatttgctactctgatgtccataaagtggtatcttacagttgctttagttggtcacgttggtattggtcatattggtattgtcgggttttgtactagattgtaatgggtg

SEQ ID NO: 293583 - DNA, 526 bp, Homo sapiens
aatatcttcattttgccccttgcatttcagtgataatgtatctgggtataaaacccaggagcaaaattctcgtgctttggaagtatggctgcactgtctccttgcatccggtgttgctattgagaagtgtgatgacagcttattcttgttcctttcaaggtcatttgctcttgctctcaggaatcttcttttaagttcttaaatttcctgataatgtaatgtatctaggtgttgatttttttttcttatctctactgtacaacacyggcgaaaccccttcaatctaaagcttttatctgtatttctatgtagattatcattaattcaaaatagttctccactactgtttattgtttctctctcattctgagactttacttttttttttttttttttttttaattgagacagggtttcactctgtgacctaggctggaggccggagtgcaatggtgcaatcaccgctcaccgcagcctcgaccttcccagctcaagcgatcctcccatctcagcctcctgagtagct

SEQ ID NO: 293584 - DNA, 560 bp, Homo sapiens
ttacccctttatttcctgaatatctttttctatttggcatcctcaaatttactttgctgtcctatctttaggtagccatcacagcataacctcttattcatagcagaggcataaaattatacctcttaattgattgtgctagcccataggccaatggtattttttaaaatggcaaaataattgttcttggttcagaaaaagaaaaaagtctctttcatatgcaaaaagagggcacaagttaccatcacttgtacatgtgttaagcattttcacaatgtcagagaaaggtctgcaatagtgagtgagccagactcacttatttgatctctctttgaatcaaggtttcacatttttaagatgtcttagtagtgtgcagctaaggaacaggcttaggaagttgacctcatgatattgaccccatgagcagtatttcaacaaacaggagctagcctgtgggaagcatgaaggcactaaaggatgatgtaagctgtctaagtctccaatctactrccttgagttttggcctcaggaccaatgtagcaatttgcaattatgatccc

SEQ ID NO: 293585 - DNA, 628 bp, Homo sapiens
ttatatattttcatatttactgcatgtatttgtctcaatttgctgtttgcttttatgactttgccatatatacacatatataggtatgtatgtagatgtatgcacacatatatgaaygaatatgaatatgaatgtatgaatatatgaatgtgtgtatatatgcctcatatacatatatgtatatataatacaaatgtgtgtacacacacatacataaatacatatacttcctttagttttcttttaatagtggaaggagtgagcagaattgcaactcaacagagctaatagcagcaggtattctgagtgaccccttgatactatgactcttacatctagaacgatagcgcaagttcattcatggaagctctggttcatttatgtgcttagtgttgactttgtgccagacattatactaggtgctagggactcagtagtgaataaaaatacacccaatccctgcactgatgaagcctaggaagacatgggtaattgtttccatgcacagcaagatctgtgctctggagaaaaggacgtggtctccaagagggtgaaaccaggcatgttaacagcctttggagtcacagcaggcttctctgagggcaccgtaggcatcccttcctcatgt

SEQ ID NO: 293586 - DNA, 530 bp, Homo sapiens
tttcttttaatagtggaaggagtgagcagaattgcaactcaacagagctaatagcagcaggtattctgagtgaccccttgatactatgactcttacatctagaacgatagcgcaagttcattcatggaagctctggttcatttatgtgcttagtgttgactttgtgccagacattatactaggtgctagggactcagtagtgaataaaaatacacccaatccctgcactgatgaagcctaggaagacatgggtaattgtttccatgcacagcaagatctgtgctctggagaaaaggacgtggtctccaagagggtgaaaccaggcatgttaacagcctttggagtcacagcaggcttctctgagggcaccgtaggcatcccttcctcatgtggggttctttattaagaatgttttcttcactgcaaaccagtttagagytcaccatatgaagggagggtggactaactctaagctcaaagatagacttccatcatgtgtgcttgtggtacagtgtttagcaccataactc

SEQ ID NO: 293587 - DNA, 631 bp, Homo sapiens
tatatatgtttaaaaatagtgctatttttacatgactttgaaaaattggcctgaccctatgttaacctatttctaaaagtctgtgttcataaattgacttattttatccactgccyatggagcaggaaagacattatgctagcacaacatgtactaaccctgatgtgctattgtccttctcttaatttgttttataactttggctcattcttggagatgagttcttttcaccagaatctgccaatcctagaattacaattcctctcttcctcacttcttccatttagtaaacatgtttttcctgtgtgatactagaacattttgaattttaatttcctctaatcctatcacacgaagtgatatgatacaatcaaagaaaattaagggaagacaccaaagacagaaatacataaaagacaatgctaaggtaattataaaaatggcaacagaaagagttctgtggaaagattcactctctggtcaggagataatttagaaataaatgttgaggaaggacttgattttttgaaacaaagtgattttggagggatcaggaaaagaaacgtagactagtatgaataaatgataagacttgggagtgagaaaagtaggaaaaagaagtaggcaactt

SEQ ID NO: 293588 - DNA, 552 bp, Homo sapiens
tgttacactgtcataatgttataaagttttggttggctactttacctgggctccttctccatggtataagcaattcaccacattatctaataagttgatatccagtttttggctgaaatcaagcagctgacgagctgcatggtctgctaacattgtcataattgctggcatagattactgaaaataaagaaaaaaaattgaagctgcctatcaagttttggtattatcaaaaacttcctacaagttattttacttcaaccatgttattacaaatattttaatgaatactttagagactttaattacaraaaactgagatagtaaaagcaagtaacaaaagctgaaattacttagctatttgataattacataaattattatggtccattcaacttttctagtgtttagtttatacaccaggaagactttcctattctactaacatttataaagtatgctaacctattatttaaacgcatccactattaggattttatggtcctaaaacgtgatacagttcagtatcttgatgtcaaaactttttaagcaagt

SEQ ID NO: 293589 - DNA, 550 bp, Homo sapiens
gaaagaacgatctgaaagggctaaaggaaacccagtcttcacasaggctgggaatagcgcctgtctccaacagccatagtggaaatttttataattcataagaccttggacagagtactcagaaggatcttgcctccatagctgggaatagttaacagtagactaaatgctgctctggttccatctaacaactatgaaaagcagaaactgaaaggatcaaatggtttctaagtaatgtaactgcatcccagaaaaaaaactgcaagaatatttataggaacacaaaaatatctggcacacaagaatgtgaaatttataatgtctggcattccaattaaggattctaggcataaaaagaagcaggaaaatatgatccataatgagaagaaaaatcgatcaattgaagccaatctagaactaacattgatactaaaattgacagataaacaccttaaaacagttactataaaattattctatatgctttaaaagataagtggaaacatggaagatatggaaaatttctagacatgaaaactataatgtggga

SEQ ID NO: 293590 - DNA, 1066 bp, Homo sapiens
atttctaagttaggactactctctgcatcctcactaacaccaccctactccagtctcttatcgtctgacctatttgctggccctaaacctaatccaactcccctcagattcattctttccacactgctgccagagagatgcttattcaaagcaaatatgagaatcctctacttaaatctcatgaatgaattmcagttttaagatggagtagagatcttctggaactctattccagaaagaaacaggaattcagatttcatctttgattaaatcagaaataaatagaacttgaaatgggggaaaacagaaaacgagatgaagaaaaaaagttgatagaaaaatgctacaaaacccagcagagcagggaaagtcagacatgagtgcctgcaaattaagaatttcataagaagcaagcaaaattgcccacatagaaccctagaaagctgcaagttccaggtaatacaggaagtagagatgagatgatagtagaagtgtttttacagagctgtggaatgatatgagaagattcggccaaagattcaaagaaagctaagcagaacaagcaatgtaattatcaacatcaaaggaaatgaaaattwtggtgatcaaaactttgcaatacaataatggacctttttaaatctaaaaatgtgaaaawcaatgcatcaattttcatactttctcttttaaattttctttcttttgatccccaatatattatcagtataatcaaatgacattagtattaaccaacatcagcagtctgtattctgtaaggaattgagctcatacaatgaatcacctcgagtattttttaaacacaaaattacaacaatttataaatgttaatctttaaaatgcacttgagaatgattgtcccaaaggttaagtggaagctttttcaaaaaacagatcacaaggaactatgccaaccctttcctaaaaatttctataaaattcaaaggaagaaataaacaggaaatctagtttacaaatgaaatttaatatagtagtcgtatatttataggccaagagctcatacgtaaaatgtgtgaaggaacacaat

SEQ ID NO: 293591 - DNA, 467 bp, Homo sapiens
tggtgatcaaaactttgcaatacaataatggacctttttaaatctaaaaatgtgaaaatcaatgcatcaattttcatactttctcttttaaattttctttcttttgatccccaatatattatcagtataatcaaatgacattagtattaaccaacatcagcagtctgtattctgtaaggaattgagctcatacaatgaatcacctcgagtattttttaaacacaaaattacaacaatttataaatgttaatctttaaaatgcacttgagaatgattgtcccaaaggttaagtggaagctttttcaaaaaacagatcacaargaactatgccaaccctttcctaaaaatttctataaaattcaaaggaagaaataaacaggaaatctagtttacaaatgaaatttaatatagtagtcgtatatttataggccaagagctcatacgtaaaatgtgtgaaggaacacaat

SEQ ID NO: 293592 - DNA, 586 bp, Homo sapiens
caatacatgtggtaagattgcttgatacccagtcaatctccattctccccttcctccttactaaaagaacctgattgttggtggtatcaatatatctgactaaagtattaaatttcccttaattcctgayagaaagggatggctatgtgttaagatatgaccaatgagatataagcaggaattgttaggtaggacttgtacaaaagtgttttaaaggtggactgactttactggaacaccagtgtgttccttacctttcacttcttcctgactggaatgaagatttgattgctagagctccaacagtcactttgggaccataatattaccttgaggatgggagctacactcagtattagaacaccaaaatcagtctatctctgaaaacgccacagaattatcacatatgcccaggactatacaacttttgttacatgagaaagataaaacttttaattttttgccaaattttttagtctctgttactagtgccaaaactaattcctaacacaatgagaagaaatatttaataaattatggtatacccataatttagaattccataggctcaatctttaaaaaggtg

SEQ ID NO: 293593 - DNA, 586 bp, Homo sapiens
caatacatgtggtaagattgcttgatacccagtcaatctccattctccccttcctccttactaaaagaacctgattgttggtggtatcaatatatctgactaaagtattaaatttcccttaattcctgacagaaagggatggctatgtgttaagatatgaccaatgagatataagcaggaattgttaggtaggacttgtacaaaagtgttttaaaggtggactgactttactggaacaccartgtgttccttacctttcacttcttcctgactggaatgaagatttgattgctagagctccaacagtcactttgggaccataatattaccttgaggatgggagctacactcagtattagaacaccaaaatcagtctatctctgaaaacgccacagaattatcacatatgcccaggactatacaacttttgttacatgagaaagataaaacttttaattttttgccaaattttttagtctctgttactagtgccaaaactaattcctaacacaatgagaagaaatatttaataaattatggtatacccataatttagaattccataggctcaatctttaaaaaggtg

SEQ ID NO: 293594 - DNA, 586 bp, Homo sapiens
caatacatgtggtaagattgcttgatacccagtcaatctccattctccccttcctccttactaaaagaacctgattgttggtggtatcaatatatctgactaaagtattaaatttcccttaattcctgacagaaagggatggctatgtgttaagatatgaccaatgagatataagcaggaattgttaggtaggacttgtacaaaagtgttttaaaggtggactgactttactggaacaccagtgtgttccttacctttcacttcttcctgactggaatgaagatttgattgctagagctccaacagtcactttgggaccataatattaccttgaggatgggagctacactcagtattagaacaccraaatcagtctatctctgaaaacgccacagaattatcacatatgcccaggactatacaacttttgttacatgagaaagataaaacttttaattttttgccaaattttttagtctctgttactagtgccaaaactaattcctaacacaatgagaagaaatatttaataaattatggtatacccataatttagaattccataggctcaatctttaaaaaggtg

SEQ ID NO: 293595 - DNA, 613 bp, Homo sapiens
ttttttacacactatagataaatgtgtttgcatgtgtatttaaaagggtttagaaaaatgagtgcaaacttgttagcagtggttatctttgggagctgggcagcaatgaatgtaggagtcttttattctttaatatgtgtatctctttattatttcaatgtttaacaacaaatacatgctgcattacttgcgttataaaaataatgggtgtgaagaaaaagagaagtcrgtagaacccattctaccctaactacttgggatttctttggacagggttctgcttcattggcacatggggcaacttgtaaagaatgctatgcagttgggaggctgaggcgggtggatcacaaggtcaggagattgagaccatcctggctagcacggtgaaaccccatctctactaaaaatacaaaaaaattagccaggcatggtggtgggcgcctgtagtcccagctactcgggaggctgaggcaggagaatggcgtaaagctggtaggcagagcctgcagtgagccgagatcacgccactgcagtccagcctgggcgacagaaccagactccgtctcaaaaaaaaaaaaaaaaaaaaaaaatgctatgcaggccgggcgtggtg

SEQ ID NO: 293596 - DNA, 613 bp, Homo sapiens
ttttttacacactatagataaatgtgtttgcatgtgtatttaaaagggtttagaaaaatgagtgcaaacttgttagcagtggttatctttgggagctgggcagcaatgaatgtaggagtcttttattctttaatatgtgtatctctttattatttcaatgtttaacaacaaatacatgctgcattacttgcgttataaaaataatgggtgtgaagaaaaagagaagtcggtagaacccattctaccctaactacttgggatttctttggacagggttctgcttcattggcacatggggcaacttgtaaagaatgctatgcagttgggaggctgaggcgggtggatcacaaggtcaggagattgagaccatcctggctagcacggtgaaaccccatctctactaaaaatacaaaaaaattagccagscatggtggtgggcgcctgtagtcccagctactcgggaggctgaggcaggagaatggcgtaaagctggtaggcagagcctgcagtgagccgagatcacgccactgcagtccagcctgggcgacagaaccagactccgtctcaaaaaaaaaaaaaaaaaaaaaaaatgctatgcaggccgggcgtggtg

SEQ ID NO: 293597 - DNA, 578 bp, Homo sapiens
agtgactggctttacttggagcattctaagaggccccataggatgctgaagtttgttatgatcttccttggaagtctcaaaacatcacttccattgcactctttgccagaccagatttaaaggaagaggagaaatagactctacctcttgacagagaaatggcatgttttagggtagaaggaattggtggtgaccattcttgcattcagtctactatagctcctcactgcctctctggccccaacaatcccttcccttctgacctctggatagcatgtatttatacgtccagatttgaaagtactacacttttcagtcacattacagaaccacattaatagtgatagctaaggctgggcgcagtggctgacacctgtaattccagcactttgagaggccgaggtgggcagatcaggaagtcaggagttmgagacaagcctggccaacatagtgaaacctcatctcgactaaaaatacaaaaattagctgggtgtgctggcacgcacctgtagtcccagctactcaggaggctgaagcaggagaattgcttgaatctgggaggcagaggttgcagtgag

SEQ ID NO: 293598 - DNA, 621 bp, Homo sapiens
attttctcccattctgtaagttgtctcttcactttgttgattgtttcctstgctgtgcagaagccttgtagcttgatgtaatcccatttgtctatttttgctttggttacttgtgcttttgagatcttacagagtaaacctttgcccaggccagtgtcctggagattttcccccaatgtttctttctagtagtttcatggttttaggtcttagatttaagtgtttaatccatattgactgaatttttgcatatagtgagagatagaggtctagtttaattcttctgcatatggatatccagttttctagcactacttactgaaaagactgtcccttctccattttatttcttggtgcctttatcaaagatgagttggctgtaaatgtgtgtatctatatctggattctctattctgttccgttgttgtatgtatctatttttatgtgagtaccatgatgtttttgttactataaatttatagtaagctttgaaatcaggtagtgtgataccttcagttttgttctttttgctcagtattaccttggctattgagggtcttttgtggttccagatacattatagaatttttttttctgtctctgtgaagaatgtcattggta

SEQ ID NO: 293599 - DNA, 573 bp, Homo sapiens
attggcctgtaattttatttttttcttcttgtgtacttgtctggttttggtttcagcataatgctggcctcatagaatgagtctggaagtgttccttcctcttcagtttttttgaagagtttgagtagaattggtgttagtttattatctttaaatgtttggcaaaattcagcagtgaagccatcaggtcttgaaatttttattgatgagaggttttttattatgcctttgatcycattactcaatactggtttgttgaggttttctatttcttcgtagttcaatattcatcaattgtacatgtccagatatttgtccatttcttctgggttttccaatttgttggtatatagttgttcataatactgtccacagattctttgtatttctgaagtctcatttattatgtctcctttttcattactgaatttatttatttaggtcttctttttttctcagtctagctaaaggttagtcaatttccttttcaaaaaactaacttcttgtttcatctatcttctgtaaattttgtctcaattttatttattttggctctgatcttcattatttatt

SEQ ID NO: 293600 - DNA, 1107 bp, Homo sapiens
attggcctgtaattttatttttttcttcttgtgtacttgtctggttttggtttcagcataatgctggcctcatagaatgagtctggaagtgttccttcctcttcagtttttttgaagagtttgagtagaattggtgttagtttattatctttaaatgtttggcaaaattcagcagtgaagccatcaggtcttgaaatttttattgatgagaggttttttattatgcctttgatctcattactcaatactggtttgttgaggttttctatttcttcgtagttcaatattcatcaattgtacatgtccagatatttgtccatttcttctgggttttccaatttgttgstatatagttgttcataatactgtccacagattctttgtatttctgaagtctcatttattatgtctcctttttcattactgaatttatttatttaggtcttctttttttctcagtctagctaaaggttagtcaatttccttttcaaaaaactaacttcttgtttcatctatcttctgtaaattttgtctcaattttatttattttggctctgatcttcattatttattwatccttgcatccctagaataatcccacttgatcaagatgaatgatctttttgattgttgttgaaattgttttgctagtattttgttcaggattttgtgcatttatgttcatcagtgatattggcctgtaattttatttttttcttcttgtgtacttgtctggttttggtttcagcataatgctggcctcatagaatgagtctggaagtgttccttcctcttcagtttttttgaagagtttgagtagaattggtgttagtttattatctttaaatgtttggcaaaattcagcagtgaagccatcaggtcttgaaatttttattgatgagaggttttttattatgcctttgatctcattactcaatactggtttgttgaggttttctatttcttcgtagttcaatattcatcaattgtacatgtccagatatttgtccatttcttctgggttttccaatttgttggtatatagttgwtcataatactgtccacagattctttgtatttctgaagtctcatttattatgtctcctt

SEQ ID NO: 293601 - DNA, 573 bp, Homo sapiens
attggcctgtaattttatttttttcttcttgtgtacttgtctggttttggtttcagcataatgctggcctcatagaatgagtctggaagtgttccttcctcttcagtttttttgaagagtttgagtagaattggtgttagtttattatctttaaatgtttggcaaaattcagcagtgaagccatcaggtcttgaaatttttattgatgagaggttttttattatgcctttgatctcattactcaatactggtttgttgaggttttctatttcttcgtagttcaatattcatcaattgtacatgtccagatatttgtccatttcttctgggttttccaatttgttggtatatagttgttcataatactgtccacagattctttgtatttctgaagtctcatttattatgtctcctttttcattactgaatttatttatttaggtcttctttttttctcagtctagctaaaggttagtcaatttycttttcaaaaaactaacttcttgtttcatctatcttctgtaaattttgtctcaattttatttattttggctctgatcttcattatttatt

SEQ ID NO: 293602 - DNA, 588 bp, Homo sapiens
tttttaatatggcaaaagatagtgatctgtttcattcttctacatatagttatctagtttttccagaacaatttttggaagagaccatccttttcccaacgtatgttcttggcagctttgtcagaaattagttgactgtatatgtattgatttatttataggtcctctattctgttccgttagtctatgtgtctgtttttatgccagcaccatgctgttttgtttactatcactttgtagtataatttgaagtcaggtaatgtgatgcctccagctttattcttttgctcaggattrctttggctattcttggtcttattgtggttccatataaattttaggatttttttcctctttctgtgaagaatgtcattgatattttgatagggattacattgaatctgtagattgctctgggtagtatggaaattttaacaatattgattcttccaatccatgaacatggaatatatttccatttttgtgtgtcctcttcaatttctttcatcactggaaagatctctacaataaaaacaaaagtaaatttcttcgtggtacaagtaagtcttttaagataagaaattttaa

SEQ ID NO: 293603 - DNA, 561 bp, Homo sapiens
cagtcatggaactgtcactgaaaagacttcaatgacgatatctatcaacagtggtgctttgcatgttgatatacaatttgcctagcatcatttgggaaaaaactatcctttctccttcaagttacctttgcacctttgtaaaaaaatcagttgaaaataaatgtgttggtcaattttggggctgtttgttctgcttcattgatctatttgtctatcttgataccagtactatactttctttttttttattactgtagctttattatgctatcataaatgggattgtttgcttgatttcttttttggataggttgttagtagtgtattaaaatactgttgatttttgtatattgattttatatcctgcaactttactgaatttattatttctaacagttttttggttgagtctttaggattttttatatataagattatgtcatctgtaaacagatrcaatttaacttctctctgattcggacaccttttctttctttcccttacctaatttctctggcgagaacttctaggactatgttcaatagaagttgtgagagtaag

SEQ ID NO: 293604 - DNA, 579 bp, Homo sapiens
taagctttttgatgtgctgctggattcggtttgccggtattttattgaggatttctgcactgaagttcattggggatattggcctgaagttttctttttgttgtatgtctgccaggttttggtatcagggcgatgctggcctaatacagtgagttagcaaagagatcttccttttccattttttggagcagtttcagtagaaatggtaacagctcttcttcatacctctggtagaattgagctgtacatctatctagtcctgggctttttttcagttggtaggctattcattattacctcagtttcctaactcattattggtcmatttggagattcaatttcttcctggttaagtcttgggaaggtgtatgtgtccaggaatttacaaacaaccatcagagaatactataaacaccttatgcgtataaactagaaaatctagaagaaatggcctgcatagtttttatacttgcttgagttttgttggagttttaaaatagaaagatattccatcaaaataaaaatgtcttcatctctatgagaaaaataaaatgtaaggactgataatgatgcaacaga

SEQ ID NO: 293605 - DNA, 532 bp, Homo sapiens
tgagttaggtttaacaacatctctgcattttctaaaaagaaataaaatatttagagaaggcccagttttaggaaaccacaaaaaactgtcactgaaaaccactgtgtttttacattatgaggcgccaagcagatgtgataaactgtttatctaagggcctatcygcagaagtcttgtggattagataaaacctatgaaacctaccgtgttcactgtgcgagagtgagaagtcattttgcttccttggagaaatctatatgggagcacagacttttgcatacttgattgtcatgtgtgtcacctagggatgaaaaagataggacggacccagggcagcttttggatgagacagagagcctggcaagaagcaaggaggtgattacaggggtttgagcaagaaaccacagaggagcaagtagaatgatgaaaagtcatggaattggccccgcaggagagagagagagaagaaagatgttcattatctatggaaagggagaaggttgaatggagacctaatcttcaaggaaaagaa

SEQ ID NO: 293606 - DNA, 500 bp, Homo sapiens
tatcatgctttacctcctgcttctctggtgaagtgagtgccctggcgtgataggctcaccctgcctctgatcctgtacatgttctcctctcagccttaacccaattatgcctgaggttgcagttttttgaattcttgcaatcagagctttgtgatgaccttgagcagtaggatataaataattcctacatgcttagcattccaataatggaacactagacatatgggttaagaagagtataagacgtaagaaactaataagtaagatcatgaagttaaaataacaaaagcaaaacaaaaccccaaatcttttgatccagctacctatgacttacaaattgtaaaaccttaaacctagttaatcattctgaacctcaytatccttctctaagtaatggagatagtcactacttgaacatgcacacatgtgtgagaattacaggagacaacatatgcaatgctctctcttgtctcagctctccactttccctacaaactatt

SEQ ID NO: 293607 - DNA, 517 bp, Homo sapiens
tgaagttaaaataacaaaagcaaaacaaaaccccaaatcttttgatccagctacctatgacttacaaattgtaaaaccttaaacctagttaatcattctgaacctcattatccttctctaagtaatggagatagtcactacttgaacatgcacacatgtgtgagaattacaggagacaacatatgcaatgctctctcttgtctcagctctccactttccctacaaactattcattcaaacttcaatccccagtctatctactccagggtgccttttcaggtgactaaaatatgtttattttctggcyctccagattgacttcatagatcatatttcatttgaacttcatgtttagtctgaactcaacactttttagcatttcagggagcaaatactatgactaacaattaatggaactaattatatatacataataatatataatacataacatagaatatagactacagaatactatatatattatataaatgtaacacatataataatatatgta

SEQ ID NO: 293608 - DNA, 552 bp, Homo sapiens
aggcaaacagatgagccacacccttgtcacatgtcctgcgagggggatcagggacctctcccatttcacttttacagatgttagatatattaatggcatagtgtaacttctgattttatttttatatccttgtaacttatgtgttaatttttatatgtgtggtgaatatgttttgccttcccaaccttcttttctacctttctctctcctactagaatgcctctcttgttcaggtttctttctttcattgcatattcatctactttacttaattaaatggaaagaccaataattcattttctatgatgaagtgtttctttccttctgtggcatggaacaggacttagcacagagtcacactatgtacatatggaatgatgaataggacgaacaaattgtatatggcatcggtattcatcttactacaacaaaatgttaaagcaaataagatggaataacaactaatatttagtttaaggtacttttctatggggkgtgtgtgtgtgtgtgtgtgtgttttactagcagtaggtactgggctctgtatggtat

SEQ ID NO: 293609 - DNA, 508 bp, Homo sapiens
cttgaaaatacaccctggaatgaaatgtagatgatttagtgctgtgctccttgaaggagtccacaggagaactccatatatcgctcaagaagattaactgaagaggaacagaaagcacctagagaaaacttgcaaatctgtgaagaaattatgcaatatttaggttgtgatctcatcagacatgtattctactctgtgagaataagcttatttgactacattgactccaaattaaaaacaactaaaagctttttcattttatattttaggattgactgctttatgtaggcaataatgccttttcccctaaaatacatcagccttcacatgtgtttactaatactggtatctcccatgggatagraaaggaaaacagttccttttctttaaggacctgtctgcagcagcctccaactttgggtatccctaattatgctaagtccttctgtctttttgtttatgaaagaggagattgtgaattaggactactaacatggtaaagtagttt

SEQ ID NO: 293610 - DNA, 508 bp, Homo sapiens
cttgaaaatacaccctggaatgaaatgtagatgatttagtgctgtgctccttgaaggagtccacaggagaactccatatatcgctcaagaagattaactgaagaggaacagaaagcacctagagaaaacttgcaaatctgtgaagaaattatgcaatatttaggttgtgatctcatcagacatgtattctactctgtgagaataagcttatttgactacattgactccaaattaaaaacaactaaaagctttttcattttatattttaggattgactgctttatgtaggcaataatgccttttcccctaaaatacatcagccttcacatgtgtttactaatactggtatctcccatgggataggaaaggaaaacagttccttttctttaaggacctgtctgcagcagcctccaactttgggtatccctaattatgmtaagtccttctgtctttttgtttatgaaagaggagattgtgaattaggactactaacatggtaaagtagttt

SEQ ID NO: 293611 - DNA, 480 bp, Homo sapiens
aatatacatcttacaagtattaattgatgccttatatctccctaaaatgtataaaaccaagttgtgccctgaccaccttgagtacatgttctcacaatctcctgagtgctgtgtcacggaccatggacactcatatttggctcacaataaatgtcttcagatattttacagagtttgactcttcattgacaggtgattgctttggaaaacatatttggctttctgtagttggtgctgtcttgaaactgaggtaaagagaagtagcaatcattgatccagtttggatgctttggggccaattgctgtagttggggtttggcttcctggccaggttgctgcagacatggtggattagaattctgctgtcctacatgayctggccattgaccatttctacattaatttcatcacagctttaatctctttcataaatgctaagcactttgtattattactaaacccttcagtcctcaggggaat

SEQ ID NO: 293612 - DNA, 548 bp, Homo sapiens
attgcagccagactacctctctagattcctcctctctgggcagggcatctctgaagaaaagacagcagctccagtcaggggcttatggataaaacctccatttccctgggatagtgcacctggggaaaggggctgctgtgggcacagcttcagcagacttaaaagttcctggctgtcaactctgaagagagcagcagttctcccagcacagtgctgcagctctgctaagggacagactgcctcctcaagtgggtccctgacccctgtgctgcctgatggggaaggggaagacacctcatacaggagagtgccagctggcatctggcrggtgcccctctgggatgaagcttccagagaaaagaacaggcagcaacatttgctgttctgcagcctctgctggtaatacccaggcaaacagggtctggagtggacctccagcaaactccaacagacctgcagcagaggggcctgactcttagaagaaaaactaacaaacagaaaggaagagcatcaacatcaacaaaaaagacgtccatgcagaaacccca

SEQ ID NO: 293613 - DNA, 450 bp, Homo sapiens
caggagagtgccagctggcatctggcgggtgcccctctgggatgaagcttccagagaaaagaacaggcagcaacatttgctgttctgcagcctctgctggtaatacccaggcaaacagggtctggagtggacctccagcaaactccaacagacctgcagcagaggggcctgactcttagaagaaaaactaacaaacagaaaggaagagcatcaacatcaacaaaaaagacgtccatgcagaaaccccatctgaaggtcgccaacatcaaagttcaaaggtagataaatccaygaagacggggagaaaacagagcagaaaggctgaaaaatccaaaagcagaaggcctcttctcctccaaaggatcacaactgctttccagcaagggaacaaaactgaacagagaacgagtttgatgaattgacagaaataggcttcagaaggtgggtaat

SEQ ID NO: 293614 - DNA, 314 bp, Homo sapiens
tgcttgacagaaactaattttctttactgttgatttttgtccccaaaccacttctttatcatagaactgccttgcttcaaggacaatcttcctagtatcgccagggtttaatttcttttatatcttccattcacttcaagataaagcccaagcttaaacatggcgtgcaaggctttcacagtctggcttcyacctttctatccggttttgtctctcaacaatctgcattttcaactttattctccagtaaaccaaaacattttgcagtcctactcaatgtatgagagtctctaactgttcagttctccttttct

SEQ ID NO: 293615 - DNA, 408 bp, Homo sapiens
tcataatctccatacatatctttccaatttctgtatttgaggtattaattgagctttttataagtcattatgcttaggagtacctaaagatagtttcctagataccacaatgtctcacttgaygacaaactgtagttgcaatgattatctctatctttcttcctagatgtctcataaatcttgtcatatgcaaaattttcagttcttacttcatcagctttcccttaagcatgactaaatctccctgcctcccctttctctccctgtgtatgtatatgtgtgagatacctcattactgttacccaatttgtaagtctagggatcatcttgattctctttcaaataccactttcaccccattcaagtatttatgcattcaacttatttctgagacctagaatttgccac

SEQ ID NO: 293616 - DNA, 524 bp, Homo sapiens
tgctgaatatctattcagatattcatctggggctcctggaccatgctacatcattttgacctctggaggatggctgtagacttaatagctaaggtcggttacacaagatgccccatgcctatgtgattgaccctcaattataaccctgtgcttggaccttcttgtactgttttatgcacctattaccttctctmatttaatctatatcctttcactgtgataaatcatatctatgtgtataaaagctttactgagttctgtgagtctttctagaaaatcatccaacctgagggtggtgacggagatcactgacacataggctttaacctcttaattacaagttggagcaccacatttaatattcccaataagaacacaattaatagggtgtgtagttttcccaatgcaaagtcgaattgttgttctaaaaaggacaggattgtcgataaaagaaaaattcacatatatatatttctttatatagaatattaaaccctttccacttatgtaattggcaattattt

SEQ ID NO: 293617 - DNA, 1147 bp, Homo sapiens
gccccagcacattaaaagagaattaagtcagttttaggaagcagaayattcatattttacctttatttttaaacaactgttaaaacctctacctttttatttctttacctcagagaaagaatggccctgaagcagcaacaacttgtctaaccctggataccataattgaaataaatggaggaaaaagatgtttttattttaaaagctctttcagtattactgtgaagaagcaattagaacaatttacaattgtattttttaatgtattttcatttttataaatttagccatgtacaatcctactccaaacaggaatttaaagaataataatgtctactatttttaagcacctactatgtgacaggtattgtcctaggctttttactacattacatcaccaatctttcaagacagttgttagtatgtctgttattacagatgggaacattgttcctgaaactgtaagaaatctttccatatttgcatgcctattatctgatggattgaggttgttgacttcaaaattccttttctctgcgtactacccagctattacaaaaatccataagccattgtgcttaaagatgaataaaawtgtgcctagaaattagtaagtggttacttaactttaggtcttccccttctatatcaaaaaagatcttcagtaagacctaacgctattataatawttttatgcaacaaaaacccttcttgagaagaaaataaacctctcattcataaataatgtaattattatactgttgctgatttcttttgttatgttaatgtcattgcatcattagtgaaaattctgcccaatgctaggataactctgttattcttgagacagtttggaaatttgctttccagaggattgcattaactgaaaatgccaccagtaagcagattagcaaacccatgcactatctttttgctattatttacttattgctattttaccattttaaatgaaatataatatttataactttaaaattaaaaaaaggacacaaggttgccatcagagcaaatgctatattcatttacctcatttttttttgtatacacatagaaaaggttgttttcccgcataaatcttccatgaaatctaggggaagatacagtcgtaatggtggcagccacaggg

SEQ ID NO: 293618 - DNA, 578 bp, Homo sapiens
tgacaaacctttagccacactaaggaaaaaagagagaggctgggggctgtggctcacacctgtaaccccagaactttgggaggccaaggcaggtggaccatgaggtcaagagattgagaccatcctggccaacatggtgaaaccccgcctcaactaaaaatacaaaaattagctgggcatggtggtgtgcgcctgtagtcccagctaccctggaggctgaggcaggagaatggattgaacctggaaggcagaggttgcagtgagccaagattgcaccactgcactccagcctggcaacagagcgagactctgaatccaaaaaaataaataagtaaatgaaataaagaataatgaataaggaaaaaagagagaagatccaagtacataaaatcaaaaatsaaaaagtagacattattacaactgatactgcagaaattcaaaggatcattagcagctaccatgagcaactatatgccaataaattggaaattctagaagaaatggacaaattcctagacacatacaacctaccaagattgaaccatgaagaaatccaaaacctgaattgaccaataaca

SEQ ID NO: 293619 - DNA, 578 bp, Homo sapiens
tgacaaacctttagccacactaaggaaaaaagagagaggctgggggctgtggctcacacctgtaaccccagaactttgggaggccaaggcaggtggaccatgaggtcaagagattgagaccatcctggccaacatggtgaaaccccgcctcaactaaaaatacaaaaattagctgggcatggtggtgtgcgcctgtagtcccagctaccctggaggctgaggcaggagaatggattgaacctggaaggcagaggttgcagtgagccaagattgcaccactgcactccagcctggcaacagagcgagactctgaatccaaaaaaataaataagtaaatgaaataaagaataatgaataaggaaaaaagagagaagatccaagtacataaaatcaaaaatgaaaaagtagacattattacaactgatactgcagaaattcaaaggatcattagcagctaccatgagcaactatatgccaataaattggaaattctagaagaaatggacaaattcctagacacatacracctaccaagattgaaccatgaagaaatccaaaacctgaattgaccaataaca

SEQ ID NO: 293620 - DNA, 571 bp, Homo sapiens
aaggattaaatgagctaatttgtgtatacataaagtrttcagtgcagttcctggaagttgataagtggaaatattatttattcatttggctaaaataactttagcatcatagccatcttcttctcataagttagagacttcttttgttaaaggacatacttttcagtggttttaaactgctttatctaaggctaatactttctcgcccgtgtgttgctccttttggcttctgcttccactgcactcacatctattcctttcttattaaagcaaatcatcactctttgataatactttgtcaagaaaacagcatttgcttatctagatgtctggtcatcattttctacttcagccatcaggcaggtatccacatcttctttggaaaatatttattacttcatcacttatcacatctcaaggttaaaaagtctgacaaaatgagacccctatgtttgtttaccacctaaaaatgagtacgatattagaaatgttattaacagacagaaatataaaatcttcaatattaatctttcagaaatgagatcatttgcaaagattaggcgaagtttca

SEQ ID NO: 293621 - DNA, 571 bp, Homo sapiens
aaggattaaatgagctaatttgtgtatacataaagtgttcagtgcagttcctggaagttgataagtggaaatattatttattcatttggctaaaataactttagcatcatagccatcttcttctcataagttagagacttcttttrttaaaggacatacttttcagtggttttaaactgctttatctaaggctaatactttctcgcccgtgtgttgctccttttggcttctgcttccactgcactcacatctattcctttcttattaaagcaaatcatcactctttgataatactttgtcaagaaaacagcatttgcttatctagatgtctggtcatcattttctacttcagccatcaggcaggtatccacatcttctttggaaaatatttattacttcatcacttatcacatctcaaggttaaaaagtctgacaaaatgagacccctatgtttgtttaccacctaaaaatgagtacgatattagaaatgttattaacagacagaaatataaaatcttcaatattaatctttcagaaatgagatcatttgcaaagattaggcgaagtttca

SEQ ID NO: 293622 - DNA, 656 bp, Homo sapiens
tcctcaaaacccagctgagtgctgggaaaagtacccttctctaatatgacacaaatggtttaggttaacttggcccaaactcttaattctacagccttcctacaatttcctacttttttgtcaccagcttctctctgactccttgctaagttcctcaggcctgctggcctcagaccagctacagaagtccatccttttacagtctccacacactcacaagcagcattttccctggtcacttaacttccggatggtttccacgtgcaacagccttctgcgacctcctcctgaccctcagcccttcatcttccccagagctggggctcccctgtttatttggcccctgggaagtgtggcccagctctygtgtgcagctgatggtgtgctgccctgctcagctccccttcaggaccgaggagaccatcttctatctgcatgggatgttgcccccagaagctctcacagctgagcccttccccaggaactgccccagactgaagggagctgcctcaccaacagggcatcctacacccagtgacttctccatgggaggtggggtacaaagcgtagcccttatgcctccctttggggcaatgtgaaaggccaccccagttccagtttcccatggaactggctgatgactgtgctgccacttc

SEQ ID NO: 293623 - DNA, 597 bp, Homo sapiens
  misc_feature (1)...(597): n = A,T,C or G
nnnnnnnnnnnnnnnnnnnnnnnntcttagcttttatatcacttgcataaccaaytttctgaattaaatcctatgtgttgaaagattttgtgtgattttgtttccctgactgcaccccaactgataaaaataactgctgtgtcttctaagttctacaagagcagaagcacccggtatgtcccagctgcttagtgggcacgcagtaagtgtttctgttggatgaatgaaaagagccttacaatttactgacaaaatggaggctccctgcttgccaaaaataattctctattcatatttaaatcttctatcttagccagtaatttttaaaaaatcattgtcgttctcttctatactattttttcaaccttcttactgtgaaataaaacatagacagaaactcaaacaaagcaagtgaattattataggcaaattcccttgaaccaccacccaggacaagaaatagaatttttccagccactccaaaagcccttccatgtgtcctatctcaatcatagccacctctctgctttcatgggtaacaagtattctgatttttatagtgctcgctttgttgtttttttttatggttttattcat

SEQ ID NO: 293624 - DNA, 1092 bp, Homo sapiens
  misc_feature (1)...(1092): n = A,T,C or G
nnnnnnnnnnnnnnnnnnnnnnnntcttagcttttatatcacttgcataaccaattttctgaattaaatcctatgtgttgaaagattttgtgtgattttgtttccctgactgcaccccaactkataaaaataactgctgtgtcttctaagttctacaagagcagaagcacccggtatgtcccagctgcttagtgggcacgcagtaagtgtttctgttggatgaatgaaaagagccttacaatttactgacaaaatggaggctccctgcttgccaaaaataattctctattcatatttaaatcttctatcttagccagtaatttttaaaaaatcattgtcgttctcttctatactattttttcaaccttcttactgtgaaataaaacatagacagaaactcaaacaaagcaagtgaattattataggcaaattcccttgaaccaccacccaggacaagaaatagaatttttccagccactccaaaagcccttccatgtgtcctatctcaatcatagccacctctctgctttcatgggtaacaagtattctgatttttatagtgctcgctttgttgtttttttttatggttttattcatwtgattagtcaagccttcagctggggttcttagacagtcatgcttatttctaatcttttatttctaatttaatttgacttataactaaccccagtgtttttgttttatttcagcttcctttttcttcatccaagaaattctttaaaaatgtgaccattagttatcccgcccttttaggccaaattttttcagttcttcttgagagtggattataccatgctttctgtctggaaaatctcctgatagcaaaaacttactataatattcccccttgaaagtattcgggaaatccaggaaagctatgaaagacaagaaactagtcttaaaaaaatggttctgttttttacaaaattcaactgataaataagtwtatgtgacctgtttttagataacgcactgtattataaaattgccatttttatgggtccaaatagaatggcagctactttaagtggctcaacctggtaacttatcagacattttggatttatatac

SEQ ID NO: 293625 - DNA, 619 bp, Homo sapiens
gtatatttgtgttatattctcatggcaaatgtctttgaatcatcctcattgttaatcaagtaggagctcagtaaacactgttttatatctagccttaaatctccctgatggaagtacagaatcttagaaacaccggttccagctctctggctttgcatctacagttactttatctgggtatttgaagatttcttgactatgtgagtatatcctaagtaactaatatctgttttattttatgatatttactcaactactcactcctaagtaaaaagaaagatgtaaaaggaaaattaatttaaatgtatattttacagagaataatgattatccatggatgcatcactgaatttctttttccccagttttactgagctataattgactaataaaatgatacatatattaaatatttaaggtgtacaacatgactttggatagccttatacattgtggtatgattgcctcaatgcagctgatctccattatctcacataattatctttttktgtgtgtggtgagaacatttaagatctactctcttagcaagtttcaagtatacaatatattattatcaactatggtcatcaggctgtacattagctctccagaacttact

SEQ ID NO: 293626 - DNA, 661 bp, Homo sapiens
agtagagcttatacatatcaggttgcaaccaggtggtatcaggcccctgagttactatttggagctaggatgtatggtgtaggtgtggacatgtgggctgttggctgtatattagcagagttacttctaagggttccttttttgtcaggagattcagagcttgatcagctaacaagaatatttgggcacaccaactgaggaacagtggccggacatgtgtagtcttccagattatgtgacatttaagagtttccctggaatcccatggcatcacatcttcagtgcagcaggagacgacttactagatctcatacaaggcttattcttatttaatccatgtgttcgaattacggccacacaggcactgaaaatgaagtatttcagtaatcggccagggccaacacctggatgtcagctgccaagacccaactgtccagtggaaaccttaaaggagcaatcaaatcctgctttggygacaaaaaggaaaagaacacaggccttggaacaaggaggattgcccaagaaactaattttttaaagagaacactggacaacattttactactgaaggaaatagtcaaaaaggcaaataatgaaaaaatagtaaacattaagtaaatgctgtggaagtgaatttgtaaatattctacacatgtaaaat

SEQ ID NO: 293627 - DNA, 611 bp, Homo sapiens
gctaggtattgccaaattgaattaacaagggcaagacaagtatattctatctacaagaatctcactttaaatataaggctatagatacattcaaagttaaaggacttggtcactttgacacttgtcaaaagaagctgaagtaggtatattagcattacataaagtagacttgagaacrggaaagtttacaagagacataaagggatattacatagtaataaaggggtaatttaatccaggaaaaatagcaattctatatgtatattcttctaatattagagtttcaaaatatataaataaaaactgatagaattgaaaggataaaggtacaaatccacaattatagtgggaaaactcaaaattcctgtctctataaataatacaagtggacataaaatcagttagaagacttagaaagtactgtcaaccatttttacctcattggtaaaatattagaatattttccatagaatattttccaacaaacaataggaaaaattattttaagtttacgtggaactgtttagttaacattgagtattttctgtgccattaataatgctgcaaacattaaaaattgaaattgccgggtgcggtggctcatgcctgta

SEQ ID NO: 293628 - DNA, 611 bp, Homo sapiens
gctaggtattgccaaattgaattaacaagggcaagacaagtatattctatctacaagaatctcactttaaatataaggctatagatacattcaaagttaaaggacttggtcactttgacacttgtcaaaagaagctgaagtaggtatattagcattacataaagtagacttgagaacgggaaagtttacaagagacataaagggatattacatagtaataaaggggtaatttaatccaggaaaaatagcaattctatatgtatattcttctaatattagagtttcaaaatatataaataaaaactgatagaattgaaaggataaaggtacaaatccacaattatagtgggaaaactcaaaattyctgtctctataaataatacaagtggacataaaatcagttagaagacttagaaagtactgtcaaccatttttacctcattggtaaaatattagaatattttccatagaatattttccaacaaacaataggaaaaattattttaagtttacgtggaactgtttagttaacattgagtattttctgtgccattaataatgctgcaaacattaaaaattgaaattgccgggtgcggtggctcatgcctgta

SEQ ID NO: 293629 - DNA, 634 bp, Homo sapiens
tcagtgcagttggctattccctaacagtaaaattcccctcccattctaaacagttgagcagactctcagtacagaataaactattggtcatgggtcasagcccacagttctttgctctttgtcttattaatttttaaaaatatatgtgatgatcatctcctgaatttcaatttcctgaagacaatatgacaaatttattttaactattctgatgcagaaagctaattaagtaaactggttcagcaactgatcatgtttcactaatttcaaccatctgcctcaacatttgttcctatgtgtaccagctttcatagcttctttcctctaatagcaattaatgaaactgttaataagctacatatatcatacactgttataacaatttaccaaagggtagcattatgagacaaattatatttaacaattgtagaaaaatgactctgattatcaaatgtacaacatcaattagattttttaaatttatgcttctcaattaattatctaattaatttggtgcacattctatgtataatttgtaattttaaactcctggtcagattttgccatctatttttacatgctgactgcttatatgaggcacatattaatgaaacataacttccctgcaaattac

SEQ ID NO: 293630 - DNA, 590 bp, Homo sapiens
aaggcactttctggcaggcccccaggtttttaatggatttacagggtcaaatatggaggtagctttctttaagtcaccatttaatgcagaaaaatgttgatttcctttccccctttgacatcctgggcagggctaacaagatgatgggttaacagtgcaacttagggttttcagatttctmgaacagctgtgcagagccgaatctataggacatgtcctgggaaagcctcctgagctgggaggagctgaagtctttgttgccagggacactatttgtgtccttcctgttctatgatgcctaacaaagagctctaactcagggtgctgcactgatgcagactggatgctcacagaattgccagacttcataaaagggggctcagtacattggtcctcaattttacatgcttagcttagtgaacaagaaagtaagggacatcttcagggatcagaatatgcggaaaaaattaaaggctacagggaaacttgcaaaggttggcaagaaagacttgttccctcatatggatggaagaaaaacagaggtatgtgtaaaccaaaaatctggaattcaggtcttccacataacagcg

SEQ ID NO: 293631 - DNA, 628 bp, Homo sapiens
aggaaagtggggatctaaatggcaatgagtggtgagtgccttgagggaggcgcaaagccagtgctgaaggttcaaaagatgaaaagagagcatgtgtctggaggactgagaagagggagtgcagaggtggcatttcagctagacaatgaaggaactggaaactttctttctaatttcraattttgtttaaacaacctctgcagtttggatcacagcttaggagtccttaggagtttgagactgaatttgttcattctctcccctatatctgagcacaggtaatattgctcacggcactttccacccccatcttctcacccaccaactttctcccaatgaggtctccttgtgatcccagtcctgaacctgaatcagggagtcattatctaaggttatggtactcttgattttatggccacctggtgtggtttcctcacacttttctaggtttaaaagcaatctcattatttttaaagatgcttttcatttttatagtgatcacatctccatttctactgatggtcaccatgggttttgccaggcagccagtttcctgctggctctccctattccttcagtaacaaaagtctgtgaactccatctgaaagtgcctgctttaactggatca

SEQ ID NO: 293632 - DNA, 617 bp, Homo sapiens
tttaaattgtatcaatctcttctttctgtatatgtgtgtaacagatgtgtgtatgtgtgtatatgtatgtattttatttttttctgaaccgtttgggagaaaatcacatatatcatgttcttttaccccttaatatttcagtgtgtttgcttataaacaaggatattctcatgcaaacatattcaggaaatttaacattgatacaattctttaatctacagcccatattccaatttcgccaattatcccaataatgtcctatatgacatttttctcctccagtaaaggatccagttcagggtcacatattgcatttcgttaccatgtctttagttttttctagtctgcagtctttgtcttttatgacattggtcatgatttaaaaatacaggctagttattttatattttattttcctctacttgggtttgtctgatgcttcctcatgactacatagctctaagtgcactgctggtgcaaggatgtatttgttataygtaccttctttgccccccactggtttttagacttgacctgctcaaacctataatctataaagcattatatttctattaaaatacgtacatgtacattccataaatttttttaaaaatttg

SEQ ID NO: 293633 - DNA, 1175 bp, Homo sapiens
ggtcacatattgcatttcgttaccatgtctttagttttttctagtctgcagtctttgtcttttatgacattggtcatgatttaaaaatacaggctagttattttatattttattttcctctacttgggtttgtctgatgcttcctcatgactacatagctctaagtgcactgctggtgcaaggatgtatttgttatacgtaccttctttgccccccactggtttttagacttgacctgctcaaacctataatctataaagcattatatttctattaaaatacgtacatgtacattccataaatttttttaaaaatttgcataaaatacatcatcctamcatttcaaaagcaattgttgcctctgtactttataatggtttcaaagacaagtgaaatttacttaatggattcagtttatctaaaattatttaatcaattattttatcattgagtatggaaataattcctcagagaactgctgtaaagcgttaaagttaatgatttcttctcgccagtaaaactagaatcttcccaattttwgcttattgagcttttttaaaaactgtgtaatgggtattatccttgatttcaaaaagcaaaacctatcccatacataaaatttttcctttaagaatacacttcaaatttcagaacacaattgtatttatacttcaaagttacagagtttcaacagcgatttcctattgttagtatttcagaaagctgttttatggctggatagaaaatcggagtttttaatcctggttttgccacttagtagctttgccactagatttgggatcagttaaaattcgttagcttctctgagcttgttttcttctgtgtaaaatggatacgatatctttctttttctggtgaaggaacattgtgtcgtatgttgttgaataggttgatgagctggatctcagcattttaacaaggaaataacagtgtataaaattccaattcatgtaaatacttttaaaatatttagtacagtacctggcacatagtaactatagagtaaatgtttgctttttgtcatcattttgctwgttaattcaaagaatcttttatacaaattattaaggaaagtttttgcaaagataaaataactcaaattgtgaatgggatttttgagggaagagtggaataaccatgcaagttgcaatact

SEQ ID NO: 293634 - DNA, 604 bp, Homo sapiens
tgcctgcctcacatgattattgggagcattagatgagtttatgcattataagtcatttgacctagtgcctagcacttagtaaatgtaagctattaatagaaaatttattgctataaaattataaaaataataaactttaaactttataatcatttttgttataactcttcacttggctttcttgataccattcttcccaacattttctctgcctgatttttctgacttattctaaattcttcatcctcaggtctcctctctcttacctttttttcattattccctgtgtcagtgtcagcaccttctgctgaaactcactacagcgtatctctacaaaatctcttgcctttcttagggaggaaagtgacatgattcagccagtttttaggaagctagccaagtttgttaccactgtgaaatacagtttagaaaggcttagccaggcataaggcctgtaatactagagtcttgagaggttgaggcaagaggattgcygaagccaggagtttgagaccagcctgggcaacatagcaagaccccatctctaataaaaataaaaaactaactcggcaggtaaagtgcacctgtagtcctgcctactcaa

SEQ ID NO: 293635 - DNA, 1196 bp, Homo sapiens
ttgattgtgcatttaaggattaagtatatttgaaagataaagcaaaatattgaatgcattgggttttgaatcattaagttttagacaaaacggagtcatttgtagtaccaaattttttcagtatccaaactttaagaatttagattactcaccttgggataatcattaagaaaaaamtcagtgatactatttcttctccctttttaaaagaatctgggaagacaaccttgaaagtaatttcttacttgaatgctttttggctcagccattatagagcatataaatacataagagttagacagtatgaaagtttaccatcagagtttatactaaaaagatagtataactatatggaaagcattttaggtctaaatatttttatagtttataatgttaagtgctaaagcacatattcttttgtactgaaattttaaatccacaacaatattccttctataatcagttctcattaaaattttttttctttctttcacagaaaatgcttggacagaagagatgagtactatttccactaaggcctagaattgcctactgtacaaatagtcctgatcaggcaatatacgaawgttcctatgtattctcaatgtccactcaatgtttaaataccctgattgtctcaaaagcatctttttacagttgacttgattggatctggtccaaataagaaatttggttgatatgttwtgtaagtctcttttaatctatatcattcctccctccttcccaccccatttgtattagtctgttctcacattgctataaatacctgaggctaggtaatttataaagaaaagaggtttaattggctcacagttctacaggctgtataggaagcatgattctggcacctgctaggcttctggggaggcctcaggaaacttacaatcatggcagaaggcaaaggcgaagcaggcccttcttacatgaccggtgtaggatggagagaaaggtgggaggaggtgctacccatttttaaacaaccagatctcatgagaactctatcatgagaacagcaccaaagggggaatctgcccccatgatccaatcacctcccaccaggccccacctctaacattggggattacaattgaacatgagatgtgggtggcgatccagatccaaaccatatcactattcatgctatttgttgaaaaaaccaagtcatttgtcttatt

SEQ ID NO: 293636 - DNA, 633 bp, Homo sapiens
tgtccactcaatgtttaaataccctgattgtctcaaaagcatctttttacagttgacttgattggatctggtccaaataagaaatttggttgatatgttatgtaagtctcttttaatctatatcattcctccctccttcccaccccatttgtattagtctgttctcacattgctataaatacctgaggctaggtaatttataaagaaaagaggtttaattggctcacagttctacaggctgtataggaagcatgattctggcacctgctaggcttctggggaggcctcaggaaacttacaatcatggcagaaggcaaaggcgaagcaggcccttcttacatgaccggtgtaggatggagagaaaggtgggagraggtgctacccatttttaaacaaccagatctcatgagaactctatcatgagaacagcaccaaagggggaatctgcccccatgatccaatcacctcccaccaggccccacctctaacattggggattacaattgaacatgagatgtgggtggcgatccagatccaaaccatatcactattcatgctatttgttgaaaaaaccaagtcatttgtcttattgaatttcccatgctctgaatttggctaattgcatcattgtgg

SEQ ID NO: 293637 - DNA, 580 bp, Homo sapiens
tcttacatgaccggtgtaggatggagagaaaggtgggaggaggtgctacccatttttaaacaaccagatctcatgagaactctatcatgagaacagcaccaaarggggaatctgcccccatgatccaatcacctcccaccaggccccacctctaacattggggattacaattgaacatgagatgtgggtggcgatccagatccaaaccatatcactattcatgctatttgttgaaaaaaccaagtcatttgtcttattgaatttcccatgctctgaatttggctaattgcatcattgtggtgtcatttaacatactccccatcccctgtatttcctgtgagcatggttggatctagagacttgatcagattccggttcaatttttcagcagaacttcatggaaggagcttgtacttactattgatcacctcaggagacacaaaatatctcttctctagtgaattttcaaccgatcagtgaaacaaaaagttatttggattccaatccaggataataactctccatttatggtggaaagacaagattttttgagtcatccagacttgagacaaaacactga

SEQ ID NO: 293638 - DNA, 634 bp, Homo sapiens
ccctaggaaggttttctccaatagattagtcctgctttcctttacacttcacaatatacttgtttattagattgtaaatttctcaaggccagaaactcaccttaatctattcaattggtgcaaaagtgattgttgtttttgcaactacttttaatggcaagaactgcaattacttctgcaccaacctaatatatccaatgcttgatccataacgggctctccataaacaataatataatttttttaccaccatgaagccctccaaccctccccaaatgctgttaggttggacctctcaatcctatccttgtgtaattcgcttatgaaatgtaaatgtggcatttttacatttattcctatgaagttccaacagtmcttcacttcagtttatgatttttttaaccttttaataataataatcagtcacatttttgtcatttgtattttcaaccaagtctttaagaactatattgaacaagacacctatgactcacaaaccgctcctagtatgaagttttcacatgggaggttttcaataacatttttaagataaaagagaaacctactaaaagcagactatctgataaaatcttggcttcccctgctgacatgtgcagacttgaagacagaagaa

SEQ ID NO: 293639 - DNA, 580 bp, Homo sapiens
tcttacatgaccggtgtaggatggagagaaaggtgggaggaggtgctacccatttttaaacaaccagatctcatgagaactctatcatgagaacagcaccaaagggggaatctgcccccatgatccaatcacctcccaccaggccccacctctaacattggggattacaattgaacatgagatgtgggtggcgatccagatccaaaccatatcactattcatgctatttgttgaaaaaaccaagtcatttgtcttattgaatttcccatgctctgaatttggctaattgcatcattgtggtgtcatttaacatactccccatcccctgtatttcctgtgagcatggttggatctagagacttgatcagattccggttcaatttttcagcagaacttcatggaaggagcttgtacttactattgatcacmtcaggagacacaaaatatctcttctctagtgaattttcaaccgatcagtgaaacaaaaagttatttggattccaatccaggataataactctccatttatggtggaaagacaagattttttgagtcatccagacttgagacaaaacactga

SEQ ID NO: 293640 - DNA, 572 bp, Homo sapiens
aaagataaatgaacaaggctcaagaaaaccactttaaaaaattagaggagtgtttctcatgcaggagcaatttggctccccagatgggatgaccaacaattccagtctaggttgggactgaagagtttcccagatgatttcatttcctactttggttctaacaaattagcacaaacgtagggacttaaacaacgcagacatattatctcacagttctggaggtcagaagtctcactagattaaaatcaaggtggtgacagggtcatgttccttttggaggctctagragagaatccacttcttgccttttccaacttctagaggctgcctgtattccttggctcatggccccttccatcttcaaaggcagcaattacatcgctccaacctctgctcctgttgtcacgtttccttctctgactctgacactgctgcctccttcttacaaggatccttgtgattaccatgtgcccacccaaatcatccaggataatcttctcatctcaagatgcctaacttaatcacacccacaaagtccattctgtcatataaggtagcatattcacagactt

SEQ ID NO: 293641 - DNA, 1137 bp, Homo sapiens
gtgaaattgatgagctcctctctgccgagctgaggtgggaaaaagaagatggagggaaatggcaggtcttagacaagggcagcagtgagaggcatgcgtttctattcttggcatggaacaaacatttcagtttcctgtgggttgagtggctctcgtgaaaacgggctgggaggaagctgccctgtcagtgccatgctctgaggatctgtccaccaagtgagtgaactctggcagcaagggcaaactgccagggccaggtgctgtggaggctggaccagagtgggccagagcaagactttccaaaaagggaactgtgcagkggaggaagtgtcacatagcctcctaaaacttatttgaaaagtctgtgggcaaatcagcctctggatgcctgccgcaaagacagcatccacagcccatcaggtcattgcagcaaaagaagctgtaacaaccaacatgaggagattgggattgtgcccctactttgtctctggtccctcagaatgaaatgatgaaagaaaacagaagggcagaacacacaccttccgtgttcaatgtccttwagtggagaattttgaagcaggcatgtgaataaagaaggtaatggcactacccattgactaagtaattgctttacatgttacactgtggatgggggaaatccatgcagagggtgtttcatgttaggaaatatgccactctttccaaatgtgatatttttgagaattactgtgtgttaggccattcttgcattgctatatawaaaaaaaaaaaaaaacgaaaacctgaggctgggtagtttataaagaaaagagatttaattggctcactgttctgcaggccgtacaggaagcatggtgctagcatctgcatgatgtccggggagacctcaggaagcttacaatcatggcagaaggcaaagggggagcaagcatctcacatggtgacagtgggagtaaaagaaagagtcaggggttggggaggtgccacacacttttaaacaaccagaactcataagaactcactcactattgtgaggacagcaccaagtcatgaggcatcagcccccatggctcaaacaccaggccccacctccaacactggggactacatttcaacatgagatttgggcaggacaaa

SEQ ID NO: 293642 - DNA, 591 bp, Homo sapiens
ctgaaatgccaattttcccaagattgagaaatttctgctacttgctaacgaatctcaagttcctttatttagtttccatcaaagctagatgtgcattgttattacatatcctattgcccttcaaacagctccacctgtatgtcccccaaacattctaacctctaaatgtctaaaactgaacttgtttttcttatcaaaacctatttcccccttctgtgctcctcatctcaatgataccaccagtcatccaagttgtttccagccagagatctggaaatcagtttgacctcmtgcctgcctttctttgcttactgccacacatccagtcagcagttctttccattaaaaagctttcgaatcaattcctccctcttatttattattgtacatcttacctaatttattgctatatatacttcctaagttaatatctgcttccagtacctgtagtaatcagagtgcaggctctggaatcagacaatctgagttggaattcccactttggattccacaactttcttgtttctttcttaggcatgttgcttatactctctaaatttcagtttttcttcttgaatgttatcagtacta

SEQ ID NO: 293643 - DNA, 591 bp, Homo sapiens
ctgaaatgccaattttcccaagattgagaaatttctgctacttgctaacgaatctcaagttcctttatttagtttccatcaaagctagatgtgcattgttattacatatcctattgcccttcaaacagctccacctgtatgtcccccaaacattctaacctctaaatgtctaaaactgaacttgtttttcttatcaaaacctatttcccccttctgtgctcctcatctcaatgataccaccagtcatccaagttgtttccagccagagatctggaaatcagtttgacctcatgcctgcctttctttgcttactgccacacatccagtcagcagttctttccattaaaaagctttcgaatcaattcctccctcttmtttattattgtacatcttacctaatttattgctatatatacttcctaagttaatatctgcttccagtacctgtagtaatcagagtgcaggctctggaatcagacaatctgagttggaattcccactttggattccacaactttcttgtttctttcttaggcatgttgcttatactctctaaatttcagtttttcttcttgaatgttatcagtacta

SEQ ID NO: 293644 - DNA, 583 bp, Homo sapiens
ggttattgtgaatagtgatgctataaacacatttgtgtacaagattttgtgggaatatgttttcaaacaccttgggtatatacagctatggtaaaattattaggtcataagataactctgcttaattttctaaggaactgaataactgttttccatagaaatacctaatatttgtccttcttaaatttcatcattcatcaaatatcattcccctgctcagccagcctattaacttgttttgcttttttaatggaaaaakttaatttggtactctgactccttttcccagaaaggggggcttgtggggaggggtctggagtagagcagaaatgatcaatggctacaggacttggagcaaaagggaaacagatataggatccaagggaaaggtttgttcagaaaccaaagagacagaccagataaagcaacagatacagtatttggccagagaggcttaaaccaagtctgacagacaacctctggggtcaggaatgagaagcaaaggcaataagaggagaagaccagttgatgtgttacagagagatcccctgagacagtggtgtgtacagccaagaatccagca

SEQ ID NO: 293645 - DNA, 553 bp, Homo sapiens
atgctataaacacatttgtgtacaagattttgtgggaatatgttttcaaacaccttgggtatatacagctatggtaaaattattaggtcataagataactctgcttaattttctaaggaactgaataactgttttccatagaaatacctaatatttgtccttcttaaatttcatcattcatcaaatatcattcccctgctcagccagcctattaacttgttttgcttttttaatggaaaaatttaatttggtactctgactccttttcccagaaaggggggcttgtggggaggggtctggagtagagcagaaatgatcaatggctacaggacttggagcaaaagggaaacagatataggatccaagggaaaggtttgttcagaaaccaaagagacagaccagataaagcaayagatacagtatttggccagagaggcttaaaccaagtctgacagacaacctctggggtcaggaatgagaagcaaaggcaataagaggagaagaccagttgatgtgttacagagagatcccctgagacagtggtgtgtacagc

SEQ ID NO: 293646 - DNA, 572 bp, Homo sapiens
tggttcctaggttgctttccgaccgtgtagagcagagccaccctgtcagcctggactgctcatcctctggaatgtttagagaggaaaattctatttttttaaaagccactatacttttgaatttcttaattatagcagtttagtctgtcctttaacaagtatgggtatattataaakacataccaaaaatatgtggggatagaagacatgaaattataaaaataaaggtagtgtacagttaagtgctaagtcagaggaaggggaagtcactctggtctagagatgtcagaaaaggcttccgtttcaattagggttttccagagaaacaaaatctattttatatgtgtgtacaacacacacacacacacacagagagacttattttaagaaataagaaattggctcatacaatgtgcaatgtgggggctggcaagtctgaaatccattgggtaggcaggcaggcaggctggaaactctggaggagttaatgttgcaggtttgagatggaatttcttcttgggtaaacctcagtttttgctcttaaggccttcaactgatttgatgaggtctac

SEQ ID NO: 293647 - DNA, 497 bp, Homo sapiens
ctatgatgttcaagagaaaggaataaataagatgaatccttcaattgctctggctttcttcctggaagcaatttcctggcagtagctcaggaagagggaacccaaacagagcctggtggtcttgctgagtagagacagagatcataaatagtggacagaagggagctttacagtgaaaaaggatccagaaatctatatagaggtccttttcagactttgactatcaatttgtgcatgtaaaggaggaaactttatgaggtggaacaaagagctgggaaagagtaattattgggacactggaagccaaataactcaaagcttgcacaggattgggactgaatcaggttcccaccaactagagtgaagagactttgctgaatacmtggagaattcggtagacaccccagataggtcaaacttactttaatagggagactaaactagacctagagtaaggctactccagataaactccctgacaaaaatccttaaaagca

SEQ ID NO: 293648 - DNA, 232 bp, Homo sapiens
tgactgtactgggattaagctttgcctttgctctcagctcctcatgcctgagcccactcatctcccacagaatattcagccccattctagtaaccagaccaagccagagatgagagactagagaatcactcayagactttcaccatctcagctcagaaatggctcatgtcatttgtactcatgcttcattggccaaaaccatgcatgtgggtctgcccaattgcaaaggggc

SEQ ID NO: 293649 - DNA, 639 bp, Homo sapiens
attctcagaaataggatttcctaccctttaatataaattaatctgatgaaggacgggggattattgtgctggttctgctgaaaagaacctctttgcaagccctgtggggaattggctgacatcacagctcctatttctctgaacttagaatgcaggtacttggtgccttttgttctcaactgtgagttccagttgccagttctgggaaaacaggaagatcccaagtagcacttttgaccattgggtatcagtatcttaagatcttgctgcaacaacctgtctacttccccaattccagtgaagagtgaggccataccctgattgcctccctgcctcagacctagagccctacagtgggtcaggcttggttggccccagatgcagactgggttggtggcttggaagtcacagaaattcacgattcttgagattcatggagaatggctggcattagcattgggaagtgccaaggccaaatacctgggctacaggcgggctgagagggccatggaamctgactggaagccagaaatgggccaaagccaaggagacacacaaacattgggatatatttcaagagctaagagcagctagtcagaaattactcaggagccatgtatagaatggagactgagaaga

SEQ ID NO: 293650 - DNA, 653 bp, Homo sapiens
ttttaatggcattttttttagcttcaaaaaactgaaggttcaccctttatgaacatcccattgttctctatgggtctgagtagtgttctacaactccattgccstaatcttgcttcacattatacctttgattctgattcttggttttaagaaaagttccaatgtgtgttttatatggcttgaatagagttgcttcatatataccctgaaacagtgcaaggagagtacacaaggtccagataatctctgccctggataatctctgtctaatgtcaaaatgcatccctggaaaaagacagagtaaaatagcttcagaaagtccttatggggatgtgtcagctgtttgtcagccaggtacttttcctctccatttctgtgatggggtaatcagacctatgtaccaactatgcagaaagatcagtagttagtaaaaatagctgtataggacaaacagcagagaataccaaagaagaaaccactcaaaaaagcactgagtgtggtatttcaatcaaacaggaccccaaaatttatatttattcttatttatcagaaaatcaaaacattatgaaaaatttaggaaaacatgtaacttagcaattcccaaggtcaggagctaccctggcctttaatgctcaaataacaatagtttgcac

SEQ ID NO: 293651 - DNA, 1202 bp, Homo sapiens
ttttaatggcattttttttagcttcaaaaaactgaaggttcaccctttatgaacatcccattgttctctatgggtctgagtagtgttctacaactccattgccgtaatcttgcttcacattatacctttgattctgattcttggttttaagaaaagttccaatgtgtgttttatatggcttgaatagagttgcttcatatataccctgaaacagtgcaaggagagtacacaaggtccagataatctctgccctggataatctctgtctaatgtcaaaatgcatccctggaaaaagacagagtaaaatagcttcagaaagtccttatggggatgtgtcagctgtttgtcagccaggtacttttcctctccatttctgtgatggggtaatcagacctatgtaccaactatgcagaaagatcagtagttagtaaaaatagctgtataggacaaacagcagagaataccaaagaagaaaccactcaaaaaagcactgagtgtggtatttcaatcaaacaggaccccaaaatttatrtttattcttatttatcagaaaatcaaaacattatgaaaaatttaggaaaacatgtaacttagcaattcccaaggtcaggagctaccctggcctttaatgctcaaataacaatagtttgcacwagctcaatgtcacaaacctatgcatgtacccccctgtatctaaaataaaagttgaaatataaaaaaactacagctccttgaatagtcccaaaatgagatatcaaattctaaactatttttgatttctgtgtttaagtaacatgtttgtattatcagataatgaaaatttcagggacacagaagtatggttaattttgaataacattttagtaacacagtattattttcaaaaagatttagtagtggagtttagtgagaactcttcatataagaattaaagtataaattattattgcaaatattttttccwtatcactaaacatgaccatttaatgacattatttgataaaatttaactccatttagtggagatctaaacctaaatttaaattaggaaatcctgttataatctctcattccattcttgacttttgtttcatagcacttacttaacatcatctgtagttcatttgtgtgaatgtatgagttatctattgctatgcaacaaatctccccaaaatttactggcttaaaacaacacacaatta

SEQ ID NO: 293652 - DNA, 625 bp, Homo sapiens
taagcccatgataagagccagggttgcagcacaggagaggaataccaaagtcatgagacttggagctttatatgggctgctgattatctgcccatcatctcttccagagagagagagagagagagagagagagcttatctttgctctggaatttaagcaaatgtctcctggagagaggggtaggtggctccaggaaagataagcctctaaatctctccagaacagtactatatctctaatttcctaggtgtgtttgccattcaatcattctttaaccgagtttgccagtgttctttgttcagaaagcccaaacagtgcagaaatgtgaaaatattcatggagaattgcatcccaacagtaggtagtcagtaaaggttatcttctttcatgagtctgaaaacagtgctctttacttttaaaccttctcccacagatgcccatgccactgttgttgagagacaaaaagctcaccagccatgaggtacctcaaggtgaacagccctagccatgttatgtcatacctgcttccatttggtcatttcctgccttacaacacaacaatctgttggctgcttttttgggcttctttcayaaatataatttctgtagattagagattctggag

SEQ ID NO: 293653 - DNA, 606 bp, Homo sapiens
gtgagtgcccaagggtgagtgtgtatagaggtaaagtgtatatggtataaaaaacagggaggaagagagaaaatgagatggaggaaagcggtgatgagaaccaacagttactggagactatgttcccatctgccctttgccaacttgcctcaaggtctgggacctggtcagaaatggcatctgaggttactaatcacactcaccttcagaccaagttaacatcgtaaataacaagggtagcaatctcttattaccttggggtagtgggagcacatctaaggcacaagtatgaaatgaaagagaggaaaaaaaagtaggaaaaaattagggaaaagggaaggctaaataaaaagttcagcttttggagaaccagtaacaggcatagttgccactgctacacataaagtattcckcagagaagggaatgaaagaggggaatcccactgcacagttcgaacctttaattctgtccctactcaggctcagctttgagatttttagagaggctagagtaattcctagactgcccaggagggtagctgggatcctctttcttctgctggcatgattctctcctatctctgactgccatgaggtgtgcctact

SEQ ID NO: 293654 - DNA, 501 bp, Homo sapiens
tacagggtggggatgtctccctgtgttgcccaggttggtctctgactcctgggctcaagtgatccttctgcctcagcctcccaaagtgctgggattacaggtgtgagccattgctcttggcccattttaaccattttaaactatgcacttctttacaaggattaaatataatataaatatgtgttaattagcataataccttaagtgcataaggtacctaagtgcttsataaatgtacaagtatgcagatgtgtgtgggtgggggtaaagtatagaggagataccaaaccacttagaaaatagtgtcaaattgactcctctaaacagaggccaaggtgggattagatagatacacaggagatttattggagaaaatgcctgtgaaggataaagtggtagggagctgaagtaggaattgttttcagaccacaatatcagcttgacacatgtgaaaggagagagagaaggaaagaagattgggtaggaagagtctcaaatact

SEQ ID NO: 293655 - DNA, 570 bp, Homo sapiens
ggggtaaagctagaggacattatgctaagtgaaataagccaggcacagcaggataaatactgcatgattccacttatattaggtatctaaaatagtcagactcataagaagcagggagtagaatgataattttgttttggggcagagagaaatggggagttgctsttcaatatgtataaagtttcagttatgcaggatgaataagttctagagatctgctgtgtaatatcgagcctatagttaacaatactgtattctatgtacccttaggaacttgttaaggggcagatctcatgttaagtgttcttgacgctacaaaaaaaaaaaagcattcaatggtttaaaatttatataatatgtgtgttataaatgaattcaaattttgactctcattttctttgatgacggaaaatactcaatcttgcctcatattttagctcagtaagtttggtttaaaatgtagttccttgtaagtaaatatctggtccaccctaagatctgagaatacccaccttcttgacaggtatgtatgtgtctgtgatctaagttatcctggggacagagcagatg

SEQ ID NO: 293656 - DNA, 1105 bp, Homo sapiens
tacaaaactaagaataaaaacagataatagacacagatccacagaagatccagatactgaagttatcagccaaagatttaaaaataaccatagttaaaatagctatacaaacagaaaagccacaaagaaaaaaattcaaagcagaaaaaagtacaaagaaaaccatgcctatgcacgtgacgataaaagtactaaaaatcaaagaaaaaaagtcttaaaagcagccacagaataaaaactataaagaaacagccataagattaaacttatagctgaattcctaacagaaataggaaagtcagaataaatgcagtgatatcttcaaaatgctaaaagaaaattactaccgacctagaattctatgcctgatgaagatatccctcaaaaatgaagtaaaataagagcattttcagactactataaattgacagaatttgtcactaaaggaaatatgaaagagtgttctctagcaaaaggaamacaaatccagatgaaacttggaaaaagcaatggatagggtaaatgcgtgggtaaatctacatgaatattgcctgtatatattttattaaawtacccctactcaatcttttaatcaaatatatacttggtttagagggagtcatcccttccctcaggttaaactcaattcttgcawtcagcttgagtgatttttattcctgtcaagttcctatatgggctccccatggagtcatggaattaatctgtcttctacattctcggtgtacagtgtgtggagaattagaatgactacactatgaacatgacacacggagctgtcagtagtcatggcacatgcagaatcctgttgggcaggagtggtgagtactctatgctgacagtggagtcacttccttggttgagccatctgtctgacagtcctggttctgccctatgggagaatcttctcattatcccccatagccacatcttattaatatttgggagagcattccattcctatacagattttataaaccatctccttttgaggtggatttaggagcctgagggctgagcagttagtcactggctgacagcaagctaggccagcatttctttgcagcttccacgacctcgttagtag

SEQ ID NO: 293657 - DNA, 534 bp, Homo sapiens
tacccctactcaatcttttaatcaaatatatacttggtttagagggagtcatcccttccctcaggttaaactcaattcttgcaatcagcttgagtgatttttattcctgtcaagttcctatatgggctccccatggagtcatggaattaatctgtcttctacattctcggtgtacagtgtgtggagaattagaatgactacactatgaacatgacacacggagctgtcagtagtcatggcacatgcagaatcctgttgggcaggagtggtgagtactctatgctgacagtggagtcacttccttggttgagccatctgtctgacagtcctggttctkccctatgggagaatcttctcattatcccccatagccacatcttattaatatttgggagagcattccattcctatacagattttataaaccatctccttttgaggtggatttaggagcctgagggctgagcagttagtcactggctgacagcaagctaggccagcatttctttgcagcttccacgacctcgttagtag

SEQ ID NO: 293658 - DNA, 630 bp, Homo sapiens
tcagaagatagtttccatccatatccctttccatggattaattatacaagtctaaactgacatttgtctcaggggtcaaaaggctccatttagcacagcatttaggcagagggagagagagttgaaagagcactgcacagataatttgtggacagaaattttagtcctaattgttcctctaaygagatgattgaatttgtgcaaattactttaccctcatagatttcagtttccatatttataaattaaggggtttagggtctctcagagttgatttatgggagaggagatacatggactctggagaaactgctattccctgcccagaaaaatatttttaagaatatgtgaataaaatacatcacacacacacacacacacacacacacacacacacacacacacaatttagtacgtaatttcagaaggctcttgtgaggattaaatgaaataatgaatataaagtgcatttagtaggtattttaaaatgttacccacgtttctattccccatgttaggagggttctttagcttctaagtttttctagaagccatagaaaaaaggttttcaggtctcttttggaaaagaaatatttaaaagtatacaactatcaagttgcatgagatatt

SEQ ID NO: 293659 - DNA, 616 bp, Homo sapiens
gtttccatccatatccctttccatggattaattatacaagtctaaactgacatttgtctcaggggtcaaaaggctccatttagcacagcatttaggcagagggagagagagttgaaagagcactgcacagataatttgtggacagaaattttagtcctaattgttcctctaatgagatgattgaatttgtgcaaattactttaccctcatagatttcagtttccatatttataaattaaggggtttagggtctctcagagttgatttatgggagaggagrtacatggactctggagaaactgctattccctgcccagaaaaatatttttaagaatatgtgaataaaatacatcacacacacacacacacacacacacacacacacacacacacacaatttagtacgtaatttcagaaggctcttgtgaggattaaatgaaataatgaatataaagtgcatttagtaggtattttaaaatgttacccacgtttctattccccatgttaggagggttctttagcttctaagtttttctagaagccatagaaaaaaggttttcaggtctcttttggaaaagaaatatttaaaagtatacaactatcaagttgcatgaga

SEQ ID NO: 293660 - DNA, 566 bp, Homo sapiens
cttgataaaacattacttctcattaaatcatattgaggtcatctctgcattaaaattcagaaccaacaagtttgatcactgtataaccactttacacacacacacacacacacacacacacmcccacaccattttctctttcaaggctttcttgacactatattatcttagtctgtcttttaaattgactctttattggagaattaccagactatctatctttgactttatttttcttctgtgatcttactcaatggctttactctctatttagaaaattccaaagtagtttttatgtagtccaggcctctcttctgtatttctagctaccagctagacatatctacccagagcatttccttgtacctttatctcccactgagtctaaaattcaacttattaacaaaacttgctcttcttctagactaacctgtttctatgtgtgtttcaatccaagtcctgcccttgaaactaggatcaactaggtgggaacaagtctgggtaaggggttcctgggaacttgatgtggccaagaagaacagtattcatgggtcctttgacaggat

SEQ ID NO: 293661 - DNA, 566 bp, Homo sapiens
cttgataaaacattacttctcattaaatcatattgaggtcatctctgcattaaaattcagaaccaacaagtttgatcactgtataaccactttacacacacacacacacacacacacacacccmcacaccattttctctttcaaggctttcttgacactatattatcttagtctgtcttttaaattgactctttattggagaattaccagactatctatctttgactttatttttcttctgtgatcttactcaatggctttactctctatttagaaaattccaaagtagtttttatgtagtccaggcctctcttctgtatttctagctaccagctagacatatctacccagagcatttccttgtacctttatctcccactgagtctaaaattcaacttattaacaaaacttgctcttcttctagactaacctgtttctatgtgtgtttcaatccaagtcctgcccttgaaactaggatcaactaggtgggaacaagtctgggtaaggggttcctgggaacttgatgtggccaagaagaacagtattcatgggtcctttgacaggat

SEQ ID NO: 293662 - DNA, 514 bp, Homo sapiens
tttgaggaatatcttcaacaggaaagaaaacaaaatgaataggtgaatgggtctctgaagaaacagagataatgtaggaagsggggaaaaaagtacaacagagacctaaggaaaaatactaaatccatgaagcaagaaacaaaaacagaagcttcagaaaacatttgaagttatacaggtctcttggaaattaaaaatatgttgcagaaaaaattcaaaattcaaaagtgtaaaagaaatctcagaaaatagaaaaaagaaatcccaaagtgaacttattttactgctggtcaaaatttttaattgaaatgttttcttctttaatcataattgcccatttttcatattattcccttattctcatataactaggttttatgcttctttgagatggtcaaccttttaatcacttgacattctcctagtccattgggtcttcttcacttatcttcctacccagcttggaccccatggttggaagtctgagctattccatcttgatccccttttaccc

SEQ ID NO: 293663 - DNA, 571 bp, Homo sapiens
tatacccttctaggttctgtggctggtctaagaattaaactgacatagattaataggagaaaaataattacatatgtacacataggagtcccacagatatatgaaactaagcagccaggtgattgagactttcatattgtctgcggttacagaaaggaatargggtttggggctgctcaggggtggtggaggcaaattgtgggaaggctagaggaggaaatgtatagtgaataaaagttgcctgccttgttatacagataagagtctctcaggtgataaaagttgtcttcagggatggccatcttcctggaacaaatacctttactaatgaaaatttcctttataaatgtaaatttcctttataaaagaggaaatttatactttattttaggcagttgagataaagagttggttctcaatttcttttagctcaaaataatcagcatgccaaagcaacatattttagaatggcatgttctgaaccccttcatatgcatatatgtacacatttgttttcaacccagatcaggtaaatacaaacacttatcttgaaaccacactgcttttaggc

SEQ ID NO: 293664 - DNA, 1287 bp, Homo sapiens
agagattttgggccccagattcttagctagtttccctagcaaggccccaccgttggaaggtcactggggtgccagataacacagagacagaacatgaggaagaatttgtctggcagtttgctggaactgacagcaaactcacacatgactcaatttccctgccccctcaggagggtgtgtgaatggacagagttagaaaagagccttcttctgtaagctcattcaaagcggaggattctttgcttgttgtctgtagggagtgacagcaaaataaactgtatgaaggaatctaaatggtactgcttagttttttgtgttatagaaatacatgtaatttagaaatatatataaatttgaaagtgaaaaagaaatatgtggctctgtctgtggaataacagacacttaaattcaatctttatagctgagaagttagcacagagcctgcatctgcaggaaagtcattggtgccctgctaagagcaaagacgttccttttttggaccttggcasactgcccagatatctgagcaaagaatagtaacctatgttcacactataacattgtgaaagtcagcaggactctcccaccctcctgcttttcaactgcaatgttgcagaagagcagaaagaaccatwtgttcccttttagtgttaagcagtattccattgtatggacataccacagtatgtttatccattcaccggttgatggacatttgggttgtttccagtttggggcaattgtgaataaagctgctataaacatttgtgtgtatttgtgtgtacatgtgttttcatttctcttccctaagtatcaagaagtaggattgctgaattatttgatatgtggatatttaactttataagaaacaaagtgttttcctaggtgctgtaccattctatatttccaccagcaatgaatgaaagttccagttgctctgagtcttcctcagcacttggtattgtctgtttttttaattttagccattctggttggtgtgtaatgctgttgccttgtggttttcatttgtgtttccctaataactaatgaggttaaatatcttttatgtatttttttaaatctgtgtatcttttttggtgaaatgtctgtttaaattttggggctatattttaattaggtatattctttctattgaggtgtaggagttcattcatatatatatatatgtaattttgtatgtgtgtacatatatatatatwttgtagagtactattttaagtgctttacaaatattaatcttcttaaaacccctatgaagtaagcact

SEQ ID NO: 293665 - DNA, 346 bp, Homo sapiens
cctgactctgggtggacaagcaagaaaaagctgttctttccttcaggcggacaccagcctctaacgagggtggaaggtttggccagtggagcacgggctgggtttcaggccatactctgctcacttccttggcccagcccttttgtgcattgcacagatgacatccccatttatggcggccttacacctgtccaccatgtgcttttgggatgatctgtcttctgcagctaggcatygttcagaatatgaagggctattccagacaagattcacgggacatggactatcatgcaagtcctattctggactttaaggctcatgacaaagatgttaaaagtcaaacctg

SEQ ID NO: 293666 - DNA, 639 bp, Homo sapiens
gcaaaatgaagcctcaggtgctgatgtagaagctgcaccaagttatcctgaagatctagctaagattgatgaagctggctacactaaacaacagattttcaacacagacaaaacagccttatattggaagatgaagccatctaggatctgcatagctagggagaagtcaacgcctggttttaaagcttcaaaggacaggctgactgtgggtaagggttaaggcagctggtgactttcagttgaagccaacgctcactgatcattgtgaaaatcttagggcccttaagaattatgttaaatctactctacctgtgctgtataagcggaacaacaaagtctgcatgacagtgcatctgtttacagcatcgtttattaaatattttaagcccactgttgagacctaatcctcaggaaaaaaaagattcctttcaaaatattactgctcattgacaatgcacctggccacccgagtgctctcatggacatggacaaggagattcatgttttcatgcctrctaccacaatatgcattctgaagcttatggatcaagaagcaatttcaactttcatgtcttattatttaagaaaatacatcttgtaagactactgctaccgtagatagtgattcctcagatggat

SEQ ID NO: 293667 - DNA, 592 bp, Homo sapiens
aaaaaaaaaaaaaaaaaaaaaaagcaaccaaacaggtaaaatttacattacacatttccacacaaatctacgtttattctgtatctattattggcatctcttcattttatccatcaaaaaaaagaatgcagaaaaaaaaaagatgagtaagcaatgactgcccaatcccaaaacaagaaatacatgttagctataatacaagacaaaggacaagtgctattaaacaagcggtaattcaaaggtggcaagaagaagggaaggctgcgggataaggcagtatctgggctaagtcttgaaagatgtcaacctgaaggttactccactattcctgtttctaaagtgctgtggggttcaatgttaatataccatttatcacattatactagaatcatgtgcatgtctgtctaacccaatgattcttaagggggagatgaagaactgtcctccaggggacatctggcaatgtgtgaagccattttttttattatcacaactgcctggggtacagagtgctaccagcatctagygggtaagtcaggaatgctcctcaacatcctacaatgcagaggacagccccaaaacaaagaatcat

SEQ ID NO: 293668 - DNA, 552 bp, Homo sapiens
tttaataaatttgcagttttaaaaaaatttgctgaataccctattttctaaatggaatggaaaaaacacattgaatcagaaaactactagatgatttatgcyaaaactacactcgacaatatattacacaagaaaaaaaaaaaagctcagaactgagttctagttctggctacactgtggaattgtgtgagttacagcaactcaattttctcatgtcaacaaccggaaaaacattacttgcaggggcataagaatcagaagaaaaatattaaattttataaactattgagcactgtgcaatcccaagatcattgtgagtgctaagattatgagaatagatttgaaaaacatccattaaaattagcctagcacaattcctggcactcagtaagatcaatatatatttactgaatgaaaagttattttactttaaaatcattgcaaacacaatgacagaatggatcaaaacaaattttgaggtattaagagccttctatgaaaaagtctaaaccaattttaagcctatttatttccacaattccacaatgaatc

SEQ ID NO: 293669 - DNA, 590 bp, Homo sapiens
ctgggatttgagcccatgctggtcaccagcattcagcactgcctctcacttccactagccctatggcttataatgctgggaaaaatagtctacaaaatgagaacacaggccaggcacagtggctcacgcctgtaatcccagcactttgggaggctgaggcgggaagatcacttgaggccagaagttcgagaccaccatggccaacactgtgaaaccccatctctactaaaaaacaaacaaacaaacaaaaacaaaaattagctgggcatggtggtgtgtgcctgtaatcccaactgcttgggaggctgagaatcacttgaacctgggaggcggaggttgcaatragccaagttagcaccactgcactccagcctgggtgacacagtaagactctgtctccaaacaaaacaaaacaaaacaaaacaaaacaaacaaaaaaaagagaagacagcctcattctgcagtaacggtttgaatactccagccagtgttttaaggtgaattctataatcagtgttcctgatactgatggtcccagggaaagtaggggtgtctcggcatcattgacacccccttccctgcccctgtct

SEQ ID NO: 293670 - DNA, 515 bp, Homo sapiens
ttctagaaggcatatcaggactaggccttattcttcctttgtagtctccacagtgcctacgactgaggttgtagaaggaacacacatttctggtagaactgaaatataccaaataggtgctcacagttttaagaggcaactgcagcacacgatgctcagtgaagacagtgctgtccataaaaggtgaactttcctaaagaatacattagagctggtcatscacattaacaaagagcatctatgagcattcctattaaaactgactggaagccgggcgccattgctcacacctgtaatcccagcactttgggaggccaaggctggtggatcacttgaggccaggagtttgagaccagcctggctaacacggtgaaaccccatctccactaaaaatacaaaaattagcctggcgtggtggtacatgcatgtaatcccagctactcagaaggctgagacaggaggatggcttgaacccgggaggtggaggttgcagtgagccgacattgtgccactgc

SEQ ID NO: 293671 - DNA, 181 bp, Homo sapiens
cacaggcacacttttctccattgtttactactctgatctagacctgggttaaatttctaaaatrtataatacctttcatcattcttaagttctattatcaaataatggttagtgttatagaaagttattctccaaatacccaaagctttacatttacttaatatctgagaaaatatcacct

SEQ ID NO: 293672 - DNA, 600 bp, Homo sapiens
tttcccaagttttgctgaccaattggtgctttgcagagactgggctcacttctgcttcttgccacttccttaccttggctttgatgatgccagtggggtgggaagagaaagagatttgtctctcccagtctcttcagagaaaatttagagtggttctgaggcaatgggaagaaggaaggagtgagaatgggcatctgaagagagaggactcagccttttttttcttccatctctcaaattggaatatgcctttgagccccagggatccagagggggccaaatgtcccttagcctaagcagtaactctttctctggctaaaggctgacttttcacagcctaagatgtcaaagctagaaaacaccttccagataagctamatcaaacccctaattttagagaggaagtcactttactcagaggttaaaaggcaaagccatcctgcaaaaaatggaaccaccttgggtctcgtgactttccacagtccattgccttttcacagtctgcaaagaggaagaaatatagtagctactccttggcattgtggcaggcctccatcccaagcaagcacagcagtgttcaagaaggcacactcatttccg

SEQ ID NO: 293673 - DNA, 539 bp, Homo sapiens
acctccttagtccccctggtctgaactagttgagagagtagttttgaacagtcgtaaccgtggctggtgtttgtagttgacataaaggattaagaccgcaaattgtccttcatgggtagagtcaggaagcccggtggcgtggcacaacacactttggtcatttctcaaaaaccacagtcctcaccacagtttattgatttcaaattgtctggtactattggaacaaatatttagaataaaaaaatttcccagtcrgaactgtatctgtgttaatcatgcacacttgcaagcagatcactatgcctttatctcgcacaatccccatggaaggccccgaaacagactgacactttgaaaaaaatattttatttatttggagtctagtgcataaattggttctcgggatacttgattactttccagctattgaaattaggggagggggaaatgaggatgcaaacctaagaaggttctgggcgggatgatttgggcagggctttttgaaagcagcgcctgctttgctgtttttactgccttct

SEQ ID NO: 293674 - DNA, 1134 bp, Homo sapiens
cattccaaatgtacccacatattttcttaatttccccaaatcaagaacaaaagtagggactttaatcttattcctagtaactctatagataagacagaattgcctcagcataaaccacagggcactaaccactaatayaagaaacagaacatacatgtgtggtgtttctaggcctttaaaaggccagctatctctacagacagaaatatcacggtgattatgtgtgtcacacaacgatccaaactacaacacagtaaacataagcttgatattgtaaaatatatctcttcctaatagtcagctacttcatataagtaaagataggaattattgcttatgagatcaattgaattgttgggggagaaaaggaagggaatgtacttaagaaaactagacttgaagatatctgcataaattattcttgatgtctttgttccctcatatgaaagaaacttgtgcagaaaacatttcaaaataatgatcctaacatttttcatatataaatactggtaggctgaaaaatctaatgaatttaatatgagtaaatwattcattagacacaggtaatatttcccaacattcctaattacaaaactaaattttagaactagtctataactttgtcctatatttgaaaaacaacttaatccacaaaacaatccacccttggcactgagactataatttaaggagataataccaatgtgggggactgtgatttttagtaatgatacaatgatctgataatctcctactccagaataaactcatcaggatttcaacatgggtggaaatttattcctacttcaggagatcaaacaatgatgtcaattatcacaggaaaaaaaaaggtaaagctaaagaatttcaaatgcaggtctgagtgttaataataawttaaaaagtttcattcctttgaggactttccctatttctaaaagaacaatatgatcaaaatataataatatgatcaaaatattatttattttggtcacatcctattatgatgtgaacaattagcagtattttatcttttgtaagttgaattattttaatgcatacatattcaaaaccaaaatttccactcattgcatatgattgtcactaatggtgataactattcatataggtcat

SEQ ID NO: 293675 - DNA, 553 bp, Homo sapiens
atgacatgatttctctgtgtccccacccagatctcatcttgagttatatttcccataattcccactgttgtgggagggacctggtcagagatagttaaatcatggtagsggttttccccatactgttctcatggtactgaatgggtctcatgagatctggtggttatatggggagaaacttcttttgcttggctttcactctctctttgcttgccaccatccatgtaaggtgtggcttgctcctctttgctttctgccatgattgtgaggctttgccagccacatggaactgtaagtccaattaaacctcttcctttgccaaattgcccagtcttgggtataactttatcagcagcatgaaaacagagtaatacactgaccaataagtatgctttttattttctttccagctaaagaattactttttctcaataatatctgttagtttctattaaatgtctgtaaatgttaaacactatcttatgtgattctattcattatttacagtaagaaccacttctttttttttatttatttattttttgagacggag

SEQ ID NO: 293676 - DNA, 467 bp, Homo sapiens
attgtgccatccaggtggaaggcggttttctctccattaaattctggcatattyttttaaaaaatttatgagaacacaattcatgtaatttaatatttttacctggtgtggagaagaaaatctcttttcatatgtcagcctacttccttccaaggaaaaacggaaaccttttcttcttatgctgtcttcagattccgattttcggactctgtcatttttctcttcttctccagactgttctttctgtttctttttctttcttctgtttttcagctctttttcacttttggagctcaacttagatgctactgaagaactctctgaaaaaactcctatcccaccagcaccactgaagtctcttgattcagcagatgcggctgcagctgccgcctagaagggcgcaaagtatgtggaagttgcatataaacttaaaaagtaattatcatgttactgcttaattgagcttc

SEQ ID NO: 293677 - DNA, 640 bp, Homo sapiens
aataacggcaagtctgctaattggttttcctgttttaatatatgccaatgtctgttttatacaggcactagaaaaaagccgatttctctcaccttacccagtacttaactcagcactaagtggactgatttatataataacagaatctataaggtctactttgtggattcctctgtgattcataattgtcattattatatttattatgtctccatataaaagcaatcatatcatgattaatatcttctgggacttaagggcagttaaaaaagtctgtaaggaaaaagttgattttcactgaggatgtcttgaggcagaaatgtgtgtaagtgtgggaacagggtaaagaagtgagaaaaggataggtggggcatgctgcaaggagtgaatgacactgtgtggtaaaaatgtcataggaggaccttgaagatcaagcagacctggcttcaatgtcttgcctgacacttctgagctgaacgrtcttgggcaagttacttaacttgctaatcttcaggcacctcgcatgtgagaatgggctaataagagaacctgtctcacaaatttgcaaacattgaagaagatactgtatgtaacgcatttagtacagtacaaacaaggaatgaaaatcaattgatttact

SEQ ID NO: 293678 - DNA, 457 bp, Homo sapiens
atgtggcttcaagtggcagaatacctacctacaaccggcttgagcatagagagagattattggctcatgatacttgaaagtccagaggctggtatggcttcagacaggtccgcacccagggaatcaaatgaaatcatttggatccatcctctcttccagcttcacattgtacccagatgtgaagaatttagaggcttttctttcctcactcctttcctttcctcactaatggctttagtcatagatacactctcctgtcttgtgccacagtggcctccaggagctccatgtttacatccttacagttctagttcaattgaaaacagagtctgcctttctttaaacagtttccaagctctgatattccaatccactggctmtgattgggattcatgtccggtcttgaaccatgtttggtgaccaaaggactacagagtcttaaccaagtctaactaca

SEQ ID NO: 293679 - DNA, 624 bp, Homo sapiens
taggtaaaaaataaatctgattgtgtctgtacaaaaaaacctgttagaactaataaataaattcagtaaaattgcaggatacaaagtcaacatacaaaaatcagtagtgtttctaaacactaagaatcaactatttgcaagagaagtcaagacaacaatatcattttaaagcatcaaaaatattgaggaataaacttaatgaggtgaaatatctgtacaccaaaaactataaaacatggattaaagaaattaaataagacacacataaaaagaaagatatcccgtgttaacgagtggaaagaattaatgttcttaaaatacccagagtacttaaagtgatctrtggattcaatgaaatccgtataaaaattccaatgacataatagatattttttaaatcttaaaattcatatggaatcacaagttaccccaaacagtcaaagcaatcttaagtaaaaataatgaaacttggttgcatcacactgcctgatctcaaaatacattacaaagttgtagtgatcaaaacagcttggtactggcataaaaatcagcacacaaatggaacagaaccaaaagcccagaaataaatccatgcacttatggtcaataaatctttgacaaaag

SEQ ID NO: 293680 - DNA, 400 bp, Homo sapiens
tattaaacacattacataaatcttgattcatgtgggagaaatgacttacgtattatttctaagaggtaaaaataaagacataaacaatctgtaccatcatagccagcagaaatcgttcaaaaggcctttggactcagaatattggcttgctctgaggctgcaatcagaaggctcagccctgagctttggcagagccactgccatgttaatctgcttcattatatctctacaatttgttcactgcattaaggagcagtatttcccttgtgaaaggaaaacccatccttcactttgaaagctttacctttaaaaggtaaacaaatacagccagagacagagaccaacagctagaaagccaaagaaataataaaacacrgtatgtcatagtcagagctcattt

SEQ ID NO: 293681 - DNA, 607 bp, Homo sapiens
tgaaaaatctatctgctgtctatcctcatgttcagttatcaagtatatatcatttaaatttaagatgaamaaaacactacttaaatcccaaagactcattaaagtaaaactagtaaatgcattttatttatcaattatttccctgaaaatgcacattctttttaaattaattttttatttaaaaaagagcatcatgccattaaacaaaaaaaggaaaattttatttactgggaaattcttgctgatttttacatgggattgtgacaaaaaaaaggtcagatttttatttttattcacagtaaggagagattttatcttcagggatgattacaaggtggggaaagggcaaggatctcaagagttaggcaaagatttctcttttagagagaggagtaaacaaggctagaatgaactggatggggagaagagggatttaagggtggtatgatctgacagagaatgttccactctgagaccagcctgctaccttgagggactatgtaaggggagggggggtgtggctgcttcatcttgaaagtaagtcaaaattcagggatttggggaaagtagaaaatcttaaccaaaatttggttaataggcattttgt

SEQ ID NO: 293682 - DNA, 599 bp, Homo sapiens
ttttgttataaaatgtttactttttacacacattttaggacaagctatcaccagacacaaatcratacaaatgcatcaggggctgaacaatctcagtgagtgacacatattttgcaaacttctgccaaacaaaaggatggaataggttgtgcacaaatcaaatgagggagagttaaggaataacaaattttaaatatgaataattcagacatggtactgtattttctgtaaaagaaaatgaacatttagcaacacactaataaattttatctcttaagagattagtgtactgataaagtattcagagaactggagagctgtggacagcagatactaaaaacatcccagctttgcagaggtaaccagagccttccctgattattccctttgccagaggtccacaaagaatttgcagtgtgcccacctgcctgctgcacttccaactccaagctgcaaactttaagaacccaaagaggtgtccccagtgggcaaggggagcagagaagagaagcaatgttagagtaggtagttaggcagacatgagcaaggcagtagagagcccctccctcaggaatgtcaggcaaccatcagatgacggt

SEQ ID NO: 293683 - DNA, 599 bp, Homo sapiens
ttttgttataaaatgtttactttttacacacattttaggacaagctatcaccagacacaaatcgatacaaatkcatcaggggctgaacaatctcagtgagtgacacatattttgcaaacttctgccaaacaaaaggatggaataggttgtgcacaaatcaaatgagggagagttaaggaataacaaattttaaatatgaataattcagacatggtactgtattttctgtaaaagaaaatgaacatttagcaacacactaataaattttatctcttaagagattagtgtactgataaagtattcagagaactggagagctgtggacagcagatactaaaaacatcccagctttgcagaggtaaccagagccttccctgattattccctttgccagaggtccacaaagaatttgcagtgtgcccacctgcctgctgcacttccaactccaagctgcaaactttaagaacccaaagaggtgtccccagtgggcaaggggagcagagaagagaagcaatgttagagtaggtagttaggcagacatgagcaaggcagtagagagcccctccctcaggaatgtcaggcaaccatcagatgacggt

SEQ ID NO: 293684 - DNA, 599 bp, Homo sapiens
ttttgttataaaatgtttactttttacacacattttaggacaagctatcaccagacacaaatcgatacaaatgcatcaggggctgaacaatctcagtgagtgacacatattttgcaaacttctgccaaacaaaaggatggaataggttgtgcacaaatcaaatgagggagagttaaggaataacaaattttaaatatgaataattcagacatggtactgtattttctgtaaaagaaaatgaacatttagcaacacactaataaattttatctcttaagagattagtgtactgataaagtattcagagaactggagagctgtggacagcagatacyaaaaacatcccagctttgcagaggtaaccagagccttccctgattattccctttgccagaggtccacaaagaatttgcagtgtgcccacctgcctgctgcacttccaactccaagctgcaaactttaagaacccaaagaggtgtccccagtgggcaaggggagcagagaagagaagcaatgttagagtaggtagttaggcagacatgagcaaggcagtagagagcccctccctcaggaatgtcaggcaaccatcagatgacggt

SEQ ID NO: 293685 - DNA, 514 bp, Homo sapiens
ttggttttgaacatgttatgtttgagacacctattagacatcattggaggagttgaggagttaggtggctgtgcaaatctggagttcagaaaagggctgggctggaggtgttcaactttgggagctgtcagtgtacagctggtatttaaagtcatgacattggactaggctgccaaagagctgagaccctccctccaaatcacactagtaatgytgaactacctatcatttgaaaatggtaggaaaatggaaaacataggttttggtatcagaaaacgtagattcaaaccctatctctaaaatttactttttagctatatgatcttagtccaagttactccaattctttcgaatctcagtttctctatctgtaaaattataatcacagcttagacattaataatgataaaatgtatgacaagtatctagcaccagatcccatgctagtacttagtaggtactcaataaaggatatctatgacagtaatagctaaaattctagcagcaactgctg

SEQ ID NO: 293686 - DNA, 523 bp, Homo sapiens
aggtgggactctgccctgtcctagactccaggctgaatgaactactctcacagccgcctctgtgggctgttcctgcagagaaacgaagctccctggatgacctcggcctcgcgctcaccgcctgctccttcccttataacagctttagggctttgctttattttaaacagtggcacttccttttctctattgatttaaaaaatattttaaaattctagcatattaaaaaatctaaacaatattgaaaaagtggggaaaaaatctcccttactgccatctcctgatctcagttccactctacaaatgtaactactattaatcatttagcgaagattttttcagactttttctatatgtgtataaatgtctgtgtatgtttgggaagtttttctgacatctcagagttctgtatctatgtatctttgttctaaatcatygtccattccacattgcaagctgcgaaacggtaagataaatgtatttttaaattaatctacacagcacctgaccaaaggaataccta

SEQ ID NO: 293687 - DNA, 523 bp, Homo sapiens
aggtgggactctgccctgtcctagactccaggctgaatgaactactctcacagccgcctctgtgggctgttcctgcagagaaacgaagctccctggatgacctcggcctcgcgctcaccgcctgctccttcccttataacagctttagggctttgctttattttaaacagtggcacttccttttctctattgatttaaaaaatattttaaaattctagcatattaaaaaatctaaacaatattgaaaaagtggggaaaaaatctcccttactgccatctcctgatctcagttccactctacaaatgtaactactattaatcatttagcgaagattttttcagactttttctatatgtgtataaatgtctgtgtatgtttgggaagtttttctgacatctcagagttctgtatctatgtatctttgttctaaatcattgtccattccacattgcaagctgcgaaacggtaagataaatgtatttttaaattaakctacacagcacctgaccaaaggaataccta

SEQ ID NO: 293688 - DNA, 558 bp, Homo sapiens
tcttaaaactctcaagtaattcatattctttgggaactatcatggtaaataagacagcagtcatcaaaagactgcttgagataaaacccacgctcccccacatgctggttttgtgattcggggcaagtttcttaagtttcctaagcttctgtttctccatccgtaagatgaggctgaccccaractcacagggttgaactgtgtcaagcactcagcaaagggcctggcgaataagagggacataataaggttagctttggccactgtttactgctgctattattttaaaaagcaactcatctttcattgataatgaggtggcatagattggatttcaatactaaaataaagactagttctaatcggtgatttcagcttcctccctaaacaaacctttccttagacttgcttaacgcagggatctaaaagcttccacgagggttctttggatgtcctcctcccatcccccgccctcagcaacctcctaaagtgcagtagaacaggcacagggccaggacccgggaaagaaacaagtggtctgagtaaagcacacgctcc

SEQ ID NO: 293689 - DNA, 455 bp, Homo sapiens
cctttccggcaacaaacagatgtctagagaaggaagggtgcaccyctgctgccactgtggacaccctagggtagtgctaggtgcgggggttccccgtcagagtgcagggaaagcctgaagctcagttgccctgggagtcacgtgagggctcctgtctgtggcttcttacctggggatcccacagacgcgtgaggtttgggtacaggtaaaactgaattccttgggctgccccaggcaacgtcacccctcgaattaacaggaccaccagcatgaggtaaggaaatgtggccgtgaagtacaccacctggtcatgggcaaatgagagacaaggagcttgtgagtgaggaagcagcaggggcaggaggcaggggcaggaggcaggggcaagagctcctcagaaaaggtcaagggagtgttcctcctgctcccagctcatccacagctgtttagttctg

SEQ ID NO: 293690 - DNA, 669 bp, Homo sapiens
gagcagtaccacaaccaatgttcccacgaatagagaataacttttgataccttttgaaattatatcatatactagtttacattatttgacgtggactgtgttattaaattttaggtagcttggaactaaaattctaacttggctaaaatgaccaatgtttgtattcaatgttctttggaagaacatttgtcacatgtacaatacaaggctagtaacatactaaaaaggggagaacctgtaaactaacaacgagacaactcctaagggtaacagattaaggacctggaagttatcctgcatggctatgctaagcatgaactatatctagcacagaaagttagtgaatcatgatcactgaagacygcaacaataaagagaagtatgactactattcatcagatgggccagtgcagagatgcttctcctaaactggtggtaaccctgacgagtttcacacaatatcaagagcagtaaacagcctcagtggaggtggaggttatgggttcctcagtgagtcacactcacatagtcagggagcctccaatagtgataagcagttaagaaagctctaaagaaaccaatgataaaattccacttcaactcctagagttataaaaggctgaataaataccttattaaacatctgggaagtacacatctaggtgagaa

SEQ ID NO: 293691 - DNA, 616 bp, Homo sapiens
tgccatcccagggcagcacagatcctgcagtggcctcaatgagaaagttgctaaaacatcttaggactagaataatcaacctgaaaattctttcgttatgaaaaagcaggaaaaggttaaacaatcaccataataagccactataaccaatattttatggaataaattatttctagtatgaattagaaatactttgtttagatacatatgtaaacctgacccaaaaaaaatcacaaaagatcatattacattaatgacactcttgagcattcatcacacatccacccacagaaacaacgcaggaggtgaatagagatatagtaccacagagtattgctgggtgggtgagactggcaggaacggggatgggtaaggggctgtagagtactgaacaggctgtgaagaggactgcagaggaygaacaggctaaagaataacaggttggcaaacaatgttaatgtcagaataaaacgttagaagaattgcataaaacggaaatttacacttttttggcaatagctttaactacatttataaagtcatttaaaatataacaacataggaaacaacaaaaacaatacaaagtgaagcaactctaatacagtaaaactttcaa

SEQ ID NO: 293692 - DNA, 616 bp, Homo sapiens
tgccatcccagggcagcacagatcctgcagtggcctcaatgagaaagttgctaaaacatcttaggactagaataatcaacctgaaaattctttcgttatgaaaaagcaggaaaaggttaaacaatcaccataataagccactataaccaatattttatggaataaattatttctagtatgaattagaaatactttgtttagatacatatgtaaacctgacccaaaaaaaatcacaaaagatcatattacattaatgacactcttgagcattcatcacacatccacccacagaaacaacgcaggaggtgaatagagatatagtaccacagagtattgctgggtgggtgagactggcaggaacggggatgggtaaggggctgtagagtactgaacaggctgtgaagaggactgcagaggatgaacaggctaaagaataacaggttggcaaacaaygttaatgtcagaataaaacgttagaagaattgcataaaacggaaatttacacttttttggcaatagctttaactacatttataaagtcatttaaaatataacaacataggaaacaacaaaaacaatacaaagtgaagcaactctaatacagtaaaactttcaa

SEQ ID NO: 293693 - DNA, 607 bp, Homo sapiens
cttgctgcattcctgctgcagttggcctgattgtgcccctattggagatggaaaagtccgaatggaatttgcttaaaagaaattcattatgtattgtagaaaaaaaattgatgacactaacaattcactttgcaaaaagttttttaaactttacatagcaaatttattgttaaataaaatagcacttttcatctatttataaaataggttcaaaatcaaacagataaatttaaatacataaatatacaaatattcttgtggtaagtggcttaatggragaaaattctcctttgggttcctaaaacttttagttaccaaaggtctagatagctgaagtcacctttgaacaattttagttagttttgtttattgaagaatttaaaaagggtaaaaccacaaagaatgagggagagaacgaagaaaaaagacgagaatgtcttgtaaaattgaatgtacttgaaaactaacatagaacgatctagatgtctgaattttactgagatatatcaaaaagctgtttgactctgtatagactaaaaaaagtttgtttgaaaaagcataggaaagttttgtttttactgctttttaaaataataactaacataaa

SEQ ID NO: 293694 - DNA, 607 bp, Homo sapiens
cttgctgcattcctgctgcagttggcctgattgtgcccctattggagatggaaaagtccgaatggaatttgcttaaaagaaattcattatgtattgtagaaaaaaaattgatgacactaacaattcactttgcaaaaagttttttaaactttacatagcaaatttattgttaaataaaatagcacttttcatctatttataaaataggttcaaaatcaaacagataaatttaaatacataaatatacaaatattcttgtggtaagtggcttaatggaagaaaattctcctttgggttcctaaaacttttagttaccaaaggtctagatagctgaagtcacctttgaacaattttagttagttttgtttattgaagaatttaaaaagggtaaaaccacaaagaatgagggagagaacraagaaaaaagacgagaatgtcttgtaaaattgaatgtacttgaaaactaacatagaacgatctagatgtctgaattttactgagatatatcaaaaagctgtttgactctgtatagactaaaaaaagtttgtttgaaaaagcataggaaagttttgtttttactgctttttaaaataataactaacataaa

SEQ ID NO: 293695 - DNA, 573 bp, Homo sapiens
tttgctgactgtgaatttttggtaatacaaatataggtgtatatactttaaatttctataagactttacaacctttaaaattatttaaaatacgtttgagataaatccctgttttctgacactatctggaccaatgatgggctggttagttgaaaaaaggatcataaaaagtcctttacatagaaaacttaaaaatgatgtatgcttaatgtactgcatttttatgtaaattgattataaaaatcagcattaatttctaaatattttaatattgtgctaaggcctttttaaaaattctgaatgccctgcttttattccatcttcttgcctaaacttcatctgaaattccttatatataacttcctcatttagtttctttaaagtagarcaagactgtaaagatacttgtggagccaataaagcacaaatctcttttatatattttatgatccctctcaattttttagttttctcaagatgactgatttgaaaatgaatttaaataggttcacatttatgaagtcttttcaaaggatccagctgagtgttcatagaaacaactcttttttctac

SEQ ID NO: 293696 - DNA, 550 bp, Homo sapiens
ttatatataacttcctcatttagtttctttaaagtagaacaagactgtaaagatacttgtggagccaataaagcacaratctcttttatatattttatgatccctctcaattttttagttttctcaagatgactgatttgaaaatgaatttaaataggttcacatttatgaagtcttttcaaaggatccagctgagtgttcatagaaacaactcttttttctacatacctatttccataaatgtatataataattaattcaaatatatatttacaatgccaagagccagcaccataatgtactcattagtgggcacctggtaagcatgcaactcaagtgttgggagcagattacccaggcttcctagggacctaccatcatagcatcagttggtatattctgcagaaagacaggaagatactggttatctgataatgcagagtttcttctctcattacacatgaaaatagtctgttaggtaaactttggggaagtacattcttttgccatcatagtaagtggacatccccatttatgcagctaacaattg

SEQ ID NO: 293697 - DNA, 573 bp, Homo sapiens
tttgctgactgtgaatttttggtaatacaaatataggtgtatatactttaaatttctataagactttacaacctttaaaattatttaaaatacgtttgagataaatccctgttttctgacactatctggaccaatgatgggctggttagttgaaaaaaggatcataaaaagtcctttacatagaaaacttaaaaatgatgtatgcttaatgtactgcatttttatgtaaattgattataaaaatcagcattaatttctaaatattttaatattgtgctaaggcctttttaaaaattctgaatgccctgcttttattccatcttcttgcctaaacttcatctgaaattccttatatataacttcctcatttagtttctttaaagtagaacaagactgtaaagatacttgtggagccaataaagcacaaatytcttttatatattttatgatccctctcaattttttagttttctcaagatgactgatttgaaaatgaatttaaataggttcacatttatgaagtcttttcaaaggatccagctgagtgttcatagaaacaactcttttttctac

SEQ ID NO: 293698 - DNA, 557 bp, Homo sapiens
ctaccatcatagcatcagttggtatattctgcagaaagacaggaagatactggttatctgataatgcagagtttcttctctcattacacatgaaaatagtctgttaggtaaactttggggaagtacattcttttgccatcatagtaagtggacatccccatttatgcagctaacaattggatcttttgcaattcaagcctgtattccttgagttatggtccagtttctcattcacgagttttttttttttttttttttgttttttttttttttgagatggagtcttgctctgtcacccaggctggagtgcaatggcacaatctcagcttactgcaacctccacctcctgggttcaagcgattctcctgcctcagcctcccaagtagctgggactacaggcgcatgccaccatacccagctaatttttttttttttttgkatttttagtagagatagggtttcaccatgttagccaggatggtcatgatcccctgacctcgtgatccacccacctcgtcctcccaaagtgctgggattacaggtgtgagccaccatgc

SEQ ID NO: 293699 - DNA, 614 bp, Homo sapiens
gtgatttcatttattagctcatttaatctttaaaagcactcatgatgtaggtattattattatcgcgctttgcagatgggggaattgagatatggagtggaaaaatatcttgcccaagttcaaatgactggtaacagctggagctgggatataaattcaggctagagcctgaatttagctctgttaaattcaaatatggcacaatgcacaatgctctttaggttaaaagacaccaaacatgtattaaaatattgaacatgctgtggcagagactgtgaaatgcctaccggatactcactcaaactttcttccttagtatgacttctgatttaattttgggttttatagtgcctagttaaaagactgtatttcccagccactcttggagttagcggagaataaagaaatactaccagaatttgttagggaggaagtctgagatacctttcagaggggtcgggcagagagttgccgtacatagtttctgtccatcactgctccctttctgcttccttcctgcatatratagctggataactctagctgttacctgggaccacaaagaagccttgaggatataagtcatctgctaagggtagggaatcagaaggata

SEQ ID NO: 293700 - DNA, 961 bp, Homo sapiens
cacaccctcacctctcttatgactcacacttctaggaaacacttccttaaaaaccatacgtgtacacaggttctcttcataagatctgcttctggggaacccaacctagcataataatcaagaaactctaacaaaactcttaagccttctctcatgtagtgaaacagtacagaaaagttcagttcyatctcaactctacttgtttttcagagttgggggacccagtcctccaatgttaaaaaaaaaaaaaaagaaatttactaatattaaggaattttatggaatacagcaaacttatgtgtaattattatttttttttaaattttgaaggtgggatgagttcccttttaaatttattgcaggagaaacataactgaggagcagagacatacataggagaaatgaatatatcagcaattctgcaatggaagagactttcttttagaacattaattttgctttacaactaatggaatgtttwcacaccctcacctctcttatgactcacacttctaggaaacacttccttaaaaaccatacgtgtacacaggttctcttcataagatctgcttctggggaacccaacctagcataataatcaagaaactctaacaaaactcttaagccttctctcatgtagtgaaacagtacagaaaagttcagttctatctcaactctacttgtttttcagagttgggggacccagtcctccaatgttaaaaaaaaaaaaaaagaaatttactaatattaaggaattttatggaatacagcaaacttatgtgtaattattatttttttttaaattttgaaggtgggatgagttcccttttaaatttattgcaggagaaacataactgaggagcagagacatacataggagaaatgaatawatcagcaattctgcaatggaagagactttcttttagaacattaattttgctttacaactaatggaatgttt

SEQ ID NO: 293701 - DNA, 1131 bp, Homo sapiens
aactcagccatgagatggcatgctgaaatctccaggggagtgttaatgctggctttcactggcatcgacaatccacagcgagtgtgcagggcaaggagagtttttatttccaagtctaaaccgaatgaaatgcaattaattctgctgtctgggccgctggtgccctctacaggtcaaatagatgctatacagctttaggtttcacctgttaaaatgtcgttttagcgctaaaaraactctgggtcccattgcatagtagcttctttacagggtactgtcactcttattggcataaataatagaaatattgagtaaaaatcacctaaatagcctcattcatgtgtctagcagttggataggtgttagctgggatgatggtgatgacgtgtctcattcttcagcagcctagagtggttattcatatggtagcagtcacaggaacaattgaaaataccaaagagtatgttttatttatgcctttcagttgcttatttaaattttttatatagttgttatataattgtaatgcaacactcatatatcaatgtcttaagttattcagttawaactcagccatgagatggcatgctgaaatctccaggggagtgttaatgctggctttcactggcatcgacaatccacagcgagtgtgcagggcaaggagagtttttatttccaagtctaaaccgaatgaaatgcaattaattctgctgtctgggccgctggtgccctctacaggtcaaatagatgctatacagctttaggtttcacctgttaaaatgtcgttttagcgctaaaagaactctgggtcccattgcatagtagcttctttacagggtactgtcactcttattggcataaataatagaaatattgagtaaaaatcacctaaatagcctcattcatgtgtctagcagttggataggtgttagctgggatgatggtgatgacgtgtctcattcttcagcagcctagagtggttattcatawggtagcagtcacaggaacaattgaaaataccaaagagtatgttttatttatgcctttcagttgcttatttaaattttttatatagttgttatataattgtaatgcaacactcatatatcaatgtcttaagttattcagtta

SEQ ID NO: 293702 - DNA, 565 bp, Homo sapiens
aactcagccatgagatggcatgctgaaatctccaggggagtgttaatgctggctttcactggcatcgacaatccacagcgagtgtgcagggcaaggagagtttttatttccaagtctaaaccgaatgaaatgcaattaattctgctgtctgggccgctggtgccctctacaggtcaaatagatgctatacagctttaggtttcacctgttaaaatgtcgttttagcgctaaaagaactctgggtcccattgcatagtagcttctttacagggtactgtcactcttattggcataaataatagaaatattgagtaaaaatcacctaaatagcctcattcatgtgtctagcagttggataggtgttagctgggatgatggtgatgacgtgtctcattcttcagcagcctagagtggttattcatatggtagyagtcacaggaacaattgaaaataccaaagagtatgttttatttatgcctttcagttgcttatttaaattttttatatagttgttatataattgtaatgcaacactcatatatcaatgtcttaagttattcagtta

SEQ ID NO: 293703 - DNA, 566 bp, Homo sapiens
  misc_feature (1)...(566): n = A,T,C or G
acaattacttgtcttgtcttcaggctaaattcttgatttgtatttatttggcccggaggattacgtacataaacaaccatacccttttctcagggacaggacttctgatagtttctcagtcagaaaaccatcagaataaatgtatttctactgattagagaaaggtctactggtatataggaagtaatgaaaccttctccccagagagtcaargagtaggtgagcctttgaggaggttgtactgcatagtgttaagagcaccagacttcaagtcagatctgagggcccatatttgctgttccctgcttgtgtgaccttgggtacatctctctaccattttgaacctcaatatttttattagcaaatgaggagactcaaccacatgccacctaaggtcactttagttttataaagctatgagaaattatagctcagctgaggatttgcttattaagttgatgaacattaattaagtggcccctagagaaacaatgagcaaggttcatacatacacaaacaatgctgatacaatgtgcagcccatcataganaagatgtggatgcaag

SEQ ID NO: 293704 - DNA, 546 bp, Homo sapiens
tgtttcatgatattttgttttgcagcctcgttaaggcaacagctaaacgtacgctgatctggatactagaaataagagagtaaacaatgcaaaatgcttgctctcaagggacttacaatttagtaaataatatcaataagtaccctgaaagtaaatgcagtgaaggataccatgaaacacctaacctgcagactctggtgkcctggatcaagagtcatctaagctcagacctgaagaatgaagcagaatgagcaaactaaaaggactagagagaaggtacaatttgatagcgcaccaaaggcaaaggaagtaagatgtgcaaagacccaggcatgtgagaaagcagaagattttaaggtaattgtgagcaaatgcagtgaagagtttgaagaggggactgttgagagatgaaatgaaaatgatgaactgccaagtaattataattaacgagtgtaacatataagaagcacagcaagaatgggtgtgagattttaatatggtcaagtaagaagactattgggttgctgagtcacaagaccagagttt

SEQ ID NO: 293705 - DNA, 498 bp, Homo sapiens
ctgcactaaccatgttttggaaggtaagcaaattggtgaaatcttttactaaccgagtgcagctgactccactgtttccatggaaacctrtctcaggcaaggtattccaaaggctctttatttaagaaatatcaaatagccccagggagtcactagtcctgtcagaccgctatacccacaatagcaaagattatcccctgcccgtcagaaggggataatccttcctttggtttcatgactttctgacacctcttgagagcaataaaattccatcccgaagctttctcttcatttttctttcttgaagctaatagagtattcagagtacaaagcaggaggaaatcagggctgaaggatgcaggcattctgcctatagtgcctctatttacttacgtgagctgtctggaaatattaaacacaaagattcagaaggcttaggttttaatcactcctgcttactgcttacagtaatacttgagtcttgggttcttccttttt

SEQ ID NO: 293706 - DNA, 486 bp, Homo sapiens
ggcttataagataataagacttattagtaaaaagaacttatgcaatttacttacaaaaatggtctttaaaatgagtattgctatatgaaaagatggctgctttccacatgtcacttaaaagtttaattcgcaaactgaattttccattgttacagtcaaaatgttataatgtccattttcacatgtagagatcaatgaataatgcagacatctcacaactctttacttkaaatcctagttaatttgtgcaagttccaagcacagttgggacagtgttgattgtggtttaagaaaaatgaattagaagataaaagctctaaaaaacatggaagaatatctacacagaagagttagatgtcacaattatagatgtttccaccatgttatagggaccatcaagattcattttgcctaggagattagcaataaaaaattctaaacacttatttgacatacaaattttctaataaataaaatgaacaccat

SEQ ID NO: 293707 - DNA, 508 bp, Homo sapiens
ccaaagatgcctacatatacaagtgctaatcttgagaaggaaatgataaatgctaaagaggaaaagaaatactagacatyaatactgaggcaatatcatttcaagaaaactttagtacttttcttgttgtattcattcacctactgatttttctttgaagttaagaaaggttatctaattattcaacaagcatttaatggctcttggggagtgcaatatttacaacaatgacaggcatttttttctttacatttattcaatagtttagccataacatataataacattggagatatttgaacaaactgtttatatcacgcttacagttcttctgaattctcaagaactcactctacagagtaaatctgtgtcattctgcagccttgttttctcaggattttgaaggcgctcaggttttcctttattctaatctagtgtgggcatctgtgcaatcatgtaaggcaatgacaaagttatttatactccacttactttactttaaaaggga

SEQ ID NO: 293708 - DNA, 557 bp, Homo sapiens
tttgtggtgttctctctatttcctgaatttgaatgttggcctgtcttgctaggttggggaaattctccttgatattatcctgaagtgtgttttccaacttggttccattctccccatcactttcaggtacactaatcaaacataggtttggtctgttcacatagtcccatatttcttggaggctttgttgttccttttcattcttttttctctaatcttgtcttcatgctttatttcattaagttgattttcaatcactgatatcctttattccacttgattgattcggctattgatacttgtgtgtgctccacaaagttctcgtgctgtgtttttcagctccatcaggtcatttatgttattctctaaactgattattctagatagcaattcctctaaccttttatcmaagttcttagcttccttgcattgggttagaacatgctccttagcttggaggagtttgttattacccaccttctgaagcctacttctgtcaatttgtcaaactgattctgcatccggttttgttcccttgctggcaaggagttgagatc

SEQ ID NO: 293709 - DNA, 608 bp, Homo sapiens
ccggttttgttcccttgctggcaaggagttgagatcatttgaaggagaagaggcattctggtttttggaattttcggcatttttgtgctggtttttcctcatcttcatggatttatctccctttagtgttygatgttggtgaccttcgcatggggtttttgtgtagatgtcctttttgttgtgttgatgctattcatttctgtttgttagttttccttttaacagtcaggatgctctgctgcaggtctgctggagtttgctggaggtccactccagaccctgtttgcctgggtatcaccagtgtaggctgcagaacagcagagattgctgcctgtttcttcctccagaagctttgtcccataggggcacctgccagatgccagccagagctctcctgtatgaggtgtctgttgacccctgctgggaggtatctcccagtcagaaggcacaggtgtcagggacccacttgaggaggcagtctgtcccttagcagagtttgagcactatactgagagatccactgctctcttcagagctggcaggcaggaaggtttacatctgctgaagctgcacccacagcccctccttccttcaggtgctctgtccca

SEQ ID NO: 293710 - DNA, 618 bp, Homo sapiens
gaacagcacatgtcaaatttccctggcaccaagtaggttccccctaaaatgttaatttctttctatctatgttagcaccagcaatattaatttttgatagcctctgttaaattttaaaagaagtctcattgagctttgtgaaaaaggattatgccaaatagcatataaaccttcgattcacaaactgctgttttgtaagtaataataattcccagcacttataaagaaaatttgtaaagtttgaaagtgcttttgtttttttaaagtcttatcacacttgggttttatcaagactttcacaggtgtaaatgacagaaatgttccttaggattttgagagaaaaaatacacagagcttcaytggaaatagaatcattacatatgtttctgtgtgtgtacattgatgtgtataggtacaatattgtcctgtcctctttagaatatcaatcctcttttcatttgaggaaagaatattttccctatcctctcctcattgctttgtagggagagagactgaggtattgataatctttcacttgctacacgctggtcttggggaggcagtcagctggagaagttggtctgctatgtagagctaagttcctcttgtgtggactag

SEQ ID NO: 293711 - DNA, 485 bp, Homo sapiens
gtttgaaagtgcttttgtttttttaaagtcttatcacacttgggttttatcaagactttcacaggtgtaaatgacagaaatgttccttaggattttgagagaaaaaatacacagagcttcattggaaatagaatcattacatatgtttctgtgtgtgtacattgatgtgtataggtacaatattgtcctgtcctctttaraatatcaatcctcttttcatttgaggaaagaatattttccctatcctctcctcattgctttgtagggagagagactgaggtattgataatctttcacttgctacacgctggtcttggggaggcagtcagctggagaagttggtctgctatgtagagctaagttcctcttgtgtggactagactgattcaaagtctagactgatggagtagttagcagactaaaaccatttctttattataaactatgtcagtattagaggtgatggtttgttttccatatgccac

SEQ ID NO: 293712 - DNA, 589 bp, Homo sapiens
agtatcctttttgttcataaatataccatttagcctggaaactttatttgttgggccactgttttactcggtttgtgatttatggggttctctaaaccccaatatcctcatttctaaagtagagatataataccttcatctctaggctgttgcaatgcctgtatgtgtgtatgtgtgcgtgtataacttataatatcaaatatatgacattattctgttcctgagatggagtagatacttcagaaatgtttctttcatttttatttgtaataattgtactgtaaaataatgcatttaaaccttaaaatcagctattaaaatatgtttgtagggtyattgccactggaataatacaggttgccaatgtaaatctttgtaaaacaaaaagacttctcttctcatgattgattatacaagatcatgtaatttacttaatcacttatcttccaatacaaaagtactgtattctacacttaaattttcaatatattacattcaataaacattatgctatcacctttaaatgtatagggttaaactctcctctagtagttactatttaaacaacaaatgggaacttgaaaagaaa

SEQ ID NO: 293713 - DNA, 1119 bp, Homo sapiens
tttctttcatttttatttgtaataattgtactgtaaaataatgcatttaaaccttaaaatcagctattaaaatatgtttgtagggttattgccactggaataatacaggttgccaatgtaaatctttgtaaaacaaaaagacttctcttctcatgattgattatacaagatcatgtaatttacttaatcacttatcttccaatacaaaagtactgtattctacacttaaattttcaatatattacattcaataaacattatgctatcacctttaaatgtatagggttaaactckcctctagtagttactatttaaacaacaaatgggaacttgaaaagaaaatattttaaaacttactttcataaaatgttttactaacagatgaaaatctttttgatgaatataggaggaggggttttagagaagttagcttaagagacagattgccaataagagacagaaaaagatactagaaatgaattaagcccaattgttcactcctttctacctccatgccatttgcagtttttcctgttgacagagcagagtatgtttccttwtttctttcatttttatttgtaataattgtactgtaaaataatgcatttaaaccttaaaatcagctattaaaatatgtttgtagggttattgccactggaataatacaggttgccaatgtaaatctttgtaaaacaaaaagacttctcttctcatgattgattatacaagatcatgtaatttacttaatcacttatcttccaatacaaaagtactgtattctacacttaaattttcaatatattacattcaataaacattatgctatcacctttaaatgtatagggttaaactctcctctagtagttactatttaaacaacaaatgggaacttgaaaagaaaatattttaaaacwtactttcataaaatgttttactaacagatgaaaatctttttgatgaatataggaggaggggttttagagaagttagcttaagagacagattgccaataagagacagaaaaagatactagaaatgaattaagcccaattgttcactcctttctacctccatgccatttgcagtttttcctgttgacagagcagagtatgtttcctt

SEQ ID NO: 293714 - DNA, 583 bp, Homo sapiens
attttggttaagtgatttattctgatcaatccaatgtgattcaagtgaaaatgtgttagttctgggcctgaatgttaagcatatttctgcttgccctttgtgcctctgccatccacttgagaaaaatacagatccctgctcagtggttgaagaagaatgacaaagaygtggaacatggttactccagcctacacagagatacagatgaagcagagccacctagcccagcacagtctggatccaccaaatgctgcctgacctgtagatctgaaaggataaatgattactgtttaaaccacggagtctggaggtgttttattacacagcattattgtgacaattgctaaaaacaaaatgacatgtaaccaaaaaacatcaaaagaagattttaaatttatgaaaaaatagattgaaaaagaggtttcagagataagcaaggtatagttagtacaggaggaaatttaatttgtgatatgaagctatcaaatggaaatgaaacgttatattttactcatttatttcctgcttgtggtgctgatttttagcagcgtaattacttatgtgatttttttcaaacatgaat

SEQ ID NO: 293715 - DNA, 583 bp, Homo sapiens
attttggttaagtgatttattctgatcaatccaatgtgattcaagtgaaaatgtgttagttctgggcctgaatgttaagcatatttctgcttgccctttgtgcctctgccatccacttgagaaaaatacagatccctgctcagtggttgaagaagaatgacaaagacgtggaacatggttactccagcctacacagagatacagatgaagcagagccacctagcccagcacagtctggatccaccaaatgctgcctgacctgtagatctgaaaggataaatgattactgtttaaaccacggagtctggaggtgttttattacacagcattattgtgacaattgctaaaaacaaaatgacatgtaaccaaaaaacatcaaaagaagattttaaatttatgaaaaaatagattgaaaaagaggtttcagagataagcaaggtatagttagtacaggaggaaatttaatttgtgatatgaagctatcaaatggaaatgaaacgttatattttactcatttatttcctgcttgtggtgctgatttttagcagcrtaattacttatgtgatttttttcaaacatgaat

SEQ ID NO: 293716 - DNA, 467 bp, Homo sapiens
tttcttcatctttcttcctccttcctttcttattcatttatttatattgtttgtttactgcaggcctactatgtgcaagttgctagacttctatctcatgccattggacacactgcttgagcagaggaagctttggatttgtttaacataggcacgaaaaccgatcctattataagcaatatctgtacacagggattaatcaatcaacaaacatttattagaatttcaytgggtcttatgggatttatatatatatgtctatgtgaaaacaatgtatatattatgcctatataaaaacaataaagttaaaaagccatggtccctggcattatattgcttacaatctacataacatacttttagtgtgtgtataaatgcacttttattagagaataagataatatgatttgaaagaaaattacatttatgagacaacaaaaaccattcatttatctattttaccaaaa

SEQ ID NO: 293717 - DNA, 1037 bp, Homo sapiens
tttcttcatctttcttcctccttcctttcttattcatttatttatattgtttgtttactgcaggcctactatgtgcaagttgctagacttctatctcatgccattggacacactgcttgagcagaggaagctttggatttgtttaacataggcacgaaaaccgatcctattataagcaatatctgtacacagggattaatcaatcaacaaacatttattagaatttcattgggtcttatgggatttatatatatatgtctatgtgaaaayaatgtatatattatgcctatataaaaacaataaagttaaaaagccatggtccctggcattatattgcttacaatctacataacatacttttagtgtgtgtataaatgcacttttattagagaataagataatatgatttgaaagaaaattacatttatgagacaacaaaaaccattcatttatctattttaccaaaawagaaaggaattgaagtgtatcactacaaaaaaatcaataaatcaccaaggaagatagtaaaaaaaaaagwcaggaacatgaaaattacaaagcaggcagaaaacattgttttagcatggcagtaataagttcttacctatcagtacttactttaaatgcaaatagtttaaaatctccaatcaaaatcacagagtgaagtgaaataagcccaggcacagaaagacaaattttgcatgttctcactcatttgcggaagttaaaaattaaaacaattgaactcatggagatagaaagtagaatgatggttaccagaggctagaaagagtagtggcagcgggtgaaaaatagggatggttaataggtacaaaaatatagttagacacaatgaaaaaatctagtatttgatagcacatcacagtgactacagccaacaataatttgttgtacattttacaataactgagggaatacaactggaatgtttttaacacaaagaaagaatgaatgcttgaggtgatgtataccccatttattctgatatcattattacacactgtatgactgtatca

SEQ ID NO: 293718 - DNA, 1204 bp, Homo sapiens
atgccaaatcaatgacctaacttcactcttcaaggaagtaaaaagaagaataaacgaaggctaaagttggcagaaatacaggaataataaagattaatacatacgttaaaaaraaagtctgtcaggattcaaacagtaatcctgctatcaaagaaaagccctggaccagatgacttcacacgtgaatttcaccaaatatttaaagaagaattaataccaatgtttcttgaactacttcaaaatattggagaaaagggacacttctaaactcattttatgaggtcagcattaccctgattccaaagctacaaaaagatgttacagggaaaaaaaattacaggtcggtatcccctcagaaacatggatgcaaaaaccctcaataaaatactagcaagctaaattcaatagcacatttaaagactcatacaccatcagcaagtggaatttatactaggggtttaaggatgatttaacattgtaaatcaacatgatacaccacattaacagaatgaagaagaaataatcatctgaattaatgcaggaaaagcattcaacaaaattcagcattccttcaaaataaaaactctcagcaaacgaggtatagaaaaawataaagaagcttgatatttcaaccagtagcattcaatactgctcatttaattttggcaaaaacatgcaatcattgctgactgcataatgttagaacagtataggctaaacattaatagtctgatgtgaggttaacctactgttagaatgtgtgtgatcacagcagagcattcatttatttctttcacttttcttactccataaacattacgataggatcccttatgttacaaggaacaggacatgccatggtcaccaaggaatttattacctgtatgccagaaagtaacaaaactcagcaagctttctgagcctatggaaaaatagaagatcagttgtaaccatgwaagatgcaatagcaacttgaataacccaaaaaagtgctgcagatgggcattgcaccatcccctaagaagccagctctctcttgttggtcagcctagtgactccactctacttataaacctgttccatgtcagtttctccctccattatttgtgcctatactttcagttcctgtttctattgccctctcaagaaaccaagatgttccaagaaagagatcagaattcattctctgatcgctaacacagag

SEQ ID NO: 293719 - DNA, 594 bp, Homo sapiens
ataaagaagcttgatatttcaaccagtagcattcaatactgctcatttaattttggcaaaaacatgcaatcattgctgactgcataatgttagaacagtataggctaaacattaatagtctgatgtgaggttaacctactgttagaatgtgtgtgatcacagcagagcattcatttatttctttcacttttcttactccataaacattacgataggatcccttatgttacaaggaacaggacatgccatggtcaccaaggaatttattacctgtatgccagaaagtaacaaaactcagcaagctttctgagcctatggaaaaatagaagatcagttgtaaccatgaaagatgcaatagcaacttgaataacccaaaaaagtgctgcagatgggcattgcaccatcccctaagaagccagctctmtcttgttggtcagcctagtgactccactctacttataaacctgttccatgtcagtttctccctccattatttgtgcctatactttcagttcctgtttctattgccctctcaagaaaccaagatgttccaagaaagagatcagaattcattctctgatcgctaacacagag

SEQ ID NO: 293720 - DNA, 594 bp, Homo sapiens
ataaagaagcttgatatttcaaccagtagcattcaatactgctcatttaattttggcaaaaacatgcaatcattgctgactgcataatgttagaacagtataggctaaacattaatagtctgatgtgaggttaacctactgttagaatgtgtgtgatcacagcagagcattcatttatttctttcacttttcttactccataaacattacgataggatcccttatgttacaaggaacaggacatgccatggtcaccaaggaatttattacctgtatgccagaaagtaacaaaactcagcaagctttctgagcctatggaaaaatagaagatcagttgtaaccatgaaagatgcaatagcaacttgaataacccaaaaaagtgctgcagatgggcattgcaccatcccctaagaagccagctctctcttgttggtcagcctagtgactccactctacttataaacctgttccatgtcagtttctccctccattatttgtgcytatactttcagttcctgtttctattgccctctcaagaaaccaagatgttccaagaaagagatcagaattcattctctgatcgctaacacagag

SEQ ID NO: 293721 - DNA, 594 bp, Homo sapiens
ataaagaagcttgatatttcaaccagtagcattcaatactgctcatttaattttggcaaaaacatgcaatcattgctgactgcataatgttagaacagtataggctaaacattaatagtctgatgtgaggttaacctactgttagaatgtgtgtgatcacagcagagcattcatttatttctttcacttttcttactccataaacattacgataggatcccttatgttacaaggaacaggacatgccatggtcaccaaggaatttattacctgtatgccagaaagtaacaaaactcagcaagctttctgagcctatggaaaaatagaagatcagttgtaaccatgaaagatgcaatagcaacttgaataacccaaaaaagtgctgcagatgggcattgcaccatcccctaagaagccagctctctcttgttggtcagcctagtgactccactctacttataaacctgttccatgtcagtttctccctccattatttgtgcctatactttcagtkcctgtttctattgccctctcaagaaaccaagatgttccaagaaagagatcagaattcattctctgatcgctaacacagag

SEQ ID NO: 293722 - DNA, 354 bp, Homo sapiens
gaagacataatttacattttatcatctaatgtaaaatgttaaaaaagtagtttcaaaattatgaaaaatggaatagttttaagaaattatgtctctaatccgtacataagtacacgagcaatgcacacacacaraatggaaacatctaagatttgtcaataaacattaacttaaaaataatacctagctaaagagatacccaaggttattcatgggatagtacccaggctctatgcatcatgtggaaagctatgacatcataaattaaaagccaaataattttgaaaaattctattttagtactagctgtattatagttcattaaggtatgaggtctaatgtagacatgtttag

SEQ ID NO: 293723 - DNA, 592 bp, Homo sapiens
tttgtgggttttctttcatataagtttttatatattttgttatatttatacataagtatttattttgggggtgcttatataaacagtaatatgtttttatgttaaatttcatttgttgattgctggtatgtaacattaatatttaatattgattgaattttgaattttaatcttgtattctgcaacctttctttaattacttattaattccaggagtttttttgatcaattttttcatatttttctgtagaagatcatgacatctatgaagaaagacagttttattttttcttcccaaattgtatatcttttgtttactttttttgtctttttgcattagctaggatttccagtatgatgttgaaatagagtagtaagagggaacctttgtmtggttcttgaacttagcaaaaagctttgagttttttatcaggtatgatgttagctgtaggttgtttctagatgttctttatcaagttaaggaagtttccctctattcctcatttgctgaggttttttaaaaattattaatatcatgagtgggtacttgattttatcaaatgcctttctgcattcattgatataatcatgt

SEQ ID NO: 293724 - DNA, 541 bp, Homo sapiens
tcctccttatatcctgtgctggttactaagtattgtctttcagcttcaaatctcacacttgtgtactcagcttatatggctgggctgaaattctcgtttcttctctttcaattgggttgtccattaggctttacttgtaagagcagcaaaggttgaccaagaggagagaagagggacttttctattagtgaaagagggaattttctattagctgttctggagtaaacacttctagtagcaacagttgcttccaatttgtcatttttccaacactccctgaaagaggctctttctttcttttttaaatttttaaaaaatttccataggtttttggggaataggcagtgtttggtcacatgaataagttckttagtggtgatttctgagattttcatgcatccatcacctgggcagtatacattctacccaatttgtagtcttttatctctcatccccctcccatcctttcccccgagttcccctaaagtccattgcatcactcttacgcctttgcatcctcatagcttaggccccacttatg

SEQ ID NO: 293725 - DNA, 541 bp, Homo sapiens
tcctccttatatcctgtgctggttactaagtattgtctttcagcttcaaatctcacacttgtgtactcagcttatatggctgggctgaaattctcgtttcttctctttcaattgggttgtccattaggctttacttgtaagagcagcaaaggttgaccaagaggagagaagagggacttttctattagtgaaagagggaattttctattagctgttctggagtaaacacttctagtagcaacagttgcttccaatttgtcatttttccaacactccctgaaagaggctctttctttcttttttaaatttttaaaaaatttccataggtttttggggaataggcagtgtttggtcacatgaataagttcgttagtggtgatttctgagattttcatgcatccatcacctgggcagtatacattctacccaatttgtagtcttttatctctcatccccctcccatcctttcccccgagttcccctaaagtccattgcatcactcttaygcctttgcatcctcatagcttaggccccacttatg

SEQ ID NO: 293726 - DNA, 592 bp, Homo sapiens
tttcttcgacgtgcgatagaagcctagtctttaacttgttaatttcatggcccagtggcttgttaccagtggtgaatccacacaggttggcagcaaactcaacccttgcctcctcagaggacagaatttggccaaggagcagaagtaggtttaaggctgagggaaagatggagataacttttagagcaggagtaagagtttattgaaaagttttacagcgggagcaaggaagcaaagtaaacttggaagaaggcccaacaggtgacttgagagatccatgtgccctgttaaatccttgacttggggttttatacattggcatggttccaggattttcttttctcctctctygattcttcccttgtggtaggctgctgctgaactgctacatatgcggtgtcggtcagcactttggagggtgactgcatgcatcttgcatttactgaggctgtgtgcatgctctctagagatgattttcctttaccagttgaatacccacagaggaaggtcatacatctgccattttgcctcttagtgcacatgcttgagcctgctcatccaactcctgagatcttatcaggaagctgctgat

SEQ ID NO: 293727 - DNA, 592 bp, Homo sapiens
tttcttcgacgtgcgatagaagcctagtctttaacttgttaatttcatggcccagtggcttgttaccagtggtgaatccacacaggttggcagcaaactcaacccttgcctcctcagaggacagaatttggccaaggagcagaagtaggtttaaggctgagggaaagatggagataacttttagagcaggagtaagagtttattgaaaagttttacagcgggagcaaggaagcaaagtaaacttggaagaaggcccaacaggtgacttgagagatccatgtgccctgttaaatccttgacttggggttttatacattggcatggttccaggattttcttttctcctctcttgattcttcccttgyggtaggctgctgctgaactgctacatatgcggtgtcggtcagcactttggagggtgactgcatgcatcttgcatttactgaggctgtgtgcatgctctctagagatgattttcctttaccagttgaatacccacagaggaaggtcatacatctgccattttgcctcttagtgcacatgcttgagcctgctcatccaactcctgagatcttatcaggaagctgctgat

SEQ ID NO: 293728 - DNA, 592 bp, Homo sapiens
tttcttcgacgtgcgatagaagcctagtctttaacttgttaatttcatggcccagtggcttgttaccagtggtgaatccacacaggttggcagcaaactcaacccttgcctcctcagaggacagaatttggccaaggagcagaagtaggtttaaggctgagggaaagatggagataacttttagagcaggagtaagagtttattgaaaagttttacagcgggagcaaggaagcaaagtaaacttggaagaaggcccaacaggtgacttgagagatccatgtgccctgttaaatccttgacttggggttttatacattggcatggttccaggattttcttttctcctctcttgattcttcccttgtggtaggctgctgctgaactgctacatatgcggtgtcrgtcagcactttggagggtgactgcatgcatcttgcatttactgaggctgtgtgcatgctctctagagatgattttcctttaccagttgaatacccacagaggaaggtcatacatctgccattttgcctcttagtgcacatgcttgagcctgctcatccaactcctgagatcttatcaggaagctgctgat

SEQ ID NO: 293729 - DNA, 592 bp, Homo sapiens
tttcttcgacgtgcgatagaagcctagtctttaacttgttaatttcatggcccagtggcttgttaccagtggtgaatccacacaggttggcagcaaactcaacccttgcctcctcagaggacagaatttggccaaggagcagaagtaggtttaaggctgagggaaagatggagataacttttagagcaggagtaagagtttattgaaaagttttacagcgggagcaaggaagcaaagtaaacttggaagaaggcccaacaggtgacttgagagatccatgtgccctgttaaatccttgacttggggttttatacattggcatggttccaggattttcttttctcctctcttgattcttcccttgtggtaggctgctgctgaactgctacatatgcggtgtcggtcagcactttggagggtgactgcatgcatcttgcatttactgaggctgtgtgcatgctctctagrgatgattttcctttaccagttgaatacccacagaggaaggtcatacatctgccattttgcctcttagtgcacatgcttgagcctgctcatccaactcctgagatcttatcaggaagctgctgat

SEQ ID NO: 293730 - DNA, 1117 bp, Homo sapiens
ctgtctctaaaagtaccatatcattgtgcttggtatcagttggtgctggacaaattttgaacaagttatgtacaaaaccttttaaattttatattattttggaactttgcttctttgggtttgtggcatccgagccaccctgtttgactgtgagagctctctagtctgtgggctggcagtttgctgatcgtttaaagattctttcccactcaatccccactttttggtaaggtttttgtgtaaggtctgttaggtttacatcctgaagcttattggcttaaaatgtactcttctttgatgtagtctctttggggycaattgggagaaagagaaaccaatagtgcaaccattgtgatactgaatattaacaggtatctttttggaaataaagaaacagtccctccaaacaaacaaaacaaatactatagctattttcagatttcctagtagctttttttttgttcttagactatatcccgctaagaatacaccaacatattatgtttagaattactttgactaattctttttttcccctttctgtgaggataacattaccagtttgatatawggaaggaaacaaggcatgaacatcaattaggaggctgtggtggtccaggtgagagatgactgtgtcatggactagggtgggagtagggatggagggaagtgaaactatttgggaggtgtttaggaggtagcatcatgagacttgtaactgactaaatattgggtgtcgtgctgaggaagagggatgggtctagggttatatccagagttgcgtgtgacttgggcaacttagggacactctgatgctattcagagagatactgagggcttgggggcagggaatttaggggaggcaatgggggaagatgagctgggggacaaactgaactgagagtgcttgagatgaacaaacggagatgtctagttggcagctgatatatcagttaggacttaggttcatttgtggtcacagaaacccaaatcaccaacatgtgtttccttctgtcacatgcagttgtctgggcacgagcagctgtggwtggtgtggtggctcctcggggtcagcgtccagtctcccgctgtcatgctgctcggctgttcctagggt

SEQ ID NO: 293731 - DNA, 590 bp, Homo sapiens
ctacacaatatgtttaagatgtacattggttcactcaggtcatagggagataagagataaaagattgcattcctttgagtctctgattagcttttcactgaatacaacaatttacatatgagaggagggtagaggaatagtcacttatgcctaagtctggcttagtgaaacaacagggcagagaaagccatcagatatacagttgtctcttgtgaccagagggacaactttgagttttgtctgtcctttgtccacaaggaatttccttgtgggaaaattatgagggaggtatgtagctttttttatatttgtagctatcttatgtgggaataaaatgggaggcagatttgcctgacacagttcccagcttgactttccctttggcttagtgatttgagggccccaagatttattttcctttcatacctgtcttcagcaagaagcccattaggtcaatttagccagaatcctccatcakccctgatggtttcttatagtaattttccatccactgacccccaccctgctccttggctataaattcccacttgcccatgctatatttagagttgagctctgtactcaaactt

SEQ ID NO: 293732 - DNA, 479 bp, Homo sapiens
cgatgttatttgatgcaaacgttggaaagacagaatcttcttgatccaagagcttttagaattcaaagtctgattctggttatttctctgctcatttaagatagtgaaatgaacatttacattctggcaacctcagaagtacaacgaacagaggacaccagccaggtagggcaaaggcctgtgcrcccccttttgctgttacatgtttatcagatgcgtgctctgtttctgttgtattacattacttttctcttcaatgtctactgaggaagaacaagtagctcctcaggcaagtcaactgttaactctgcagtttttatttaatctcccaggaatgtaacccttaactttaaagaatgtagtgaccataaaacttataaggcatgtttcttaaggaaattgtacctgtttatttaatctatcagatatgaatgttatagaaaattaaatttgtccacttaagctgtagatgaactttt

SEQ ID NO: 293733 - DNA, 604 bp, Homo sapiens
cacatcctagagatttccatcatgccctgctcactctgccttttttcagattttactgctttttaaaaatctgtcctcaaacagaagccttttcttccccttgagtgttttaattgctcttctctggaccatgtccaggatcattatgtcttcacaagagcctgtgaccagacctacacactttcaggagcagacactgtggttgcaagcaaagagaaacattttgactatggagctctggggttgagggctgggctttgtgatcagacctgggttagaatccagactctcacaccttctagatatgtgacctttgtcagtgacagcatctctgctacagaccctaaagtggttgtgcataatgagtcagggagatgacaagacacgatgttcagtgcagaatctgaatatttactcattcaggtatacagtttgctgacggtgttctgtgtatggactcccatcttcagagaagccagctgcgatttcaactatacatatttgtgtgtgtgtatatataaatgtatgtatatatgtacatatatgtgtgtatatgtatagtatatatgtgtgtacatatatatrtagttgaaatcatagccga

SEQ ID NO: 293734 - DNA, 534 bp, Homo sapiens
tttttaatgaattatgaaatagaacagagaagattatggcctaggtaaaggtgggaacaaaggaaatagaaatgatcagatggatgcaggagactcagcaatgaaataatcacagaccctgcgattgaggactaaaaagatkcatgttttggctgagcctttagtttgatgatcttggtgagagatgcttgtacaaacctggagccagcttggggagaaagtgggtggatccaaggtcccgaattctaccatggaaacaaatttagaaacttggtttaagctagatgccaaattgattccacaggattgccaaatattaggagggcagggacaaagatactggcattagtgatgtgaggaggcatgagactccatgtggaaatggaggcttatggacatggattccttttgtaagggcctgccctcaggaagcctctctgtctgccaggtgaaacgtgtaagagggagccaaggaactaaagggatgatttaggcctgagtgccagagagcattgcaccaccactgatagaccc

SEQ ID NO: 293735 - DNA, 576 bp, Homo sapiens
ctccttattgaatatccctgagttggtaataattctcactgaaggtgaaagytagaagtaaacacagtactcccagtatgattcaatctgaatggagtaaaataagagaatgtagtgcattatggttccctgtgtgggggtagagcagatggcaagaagactaggcctggagaaaagcccactgtaaaaggatggggtgatactgaatcagaaaagaagacgaaacaatgagtttaaggaggataagaactgagaacttaaacagatctgctggcttagggagagtcattgggaagaaatgcaggagctatggaaatagtaggtaatgagccagcaggagggactacgtgttgtcctctctggttacaaaaggaaagggaaaaggacagtggctggtgggaggtggaacagacagaaggatcaagtaagaggttgtttacatgctaggaaagtgaggatggtgcataaggcagggaaaggattgtcaatagagaggaaagaatgcacgaagagggaaagactgaagttgctgcagccagagtcagatggagacagcaggtgagatgaaaggtaaag

SEQ ID NO: 293736 - DNA, 472 bp, Homo sapiens
actgtccatgagaaatcaggttaggaggctaatgaaacacggtgtgaaggcctaaactagggttctggcaataatgataggaaaaaatgttatgaaagggakaataaattgatttggttactgaataagacatagagaatgaaggagaagacagaagtcaagaatgagtcttgatcatcaatgaaatcatagcaatgttgatggataaataaaaattagaagagtcatagttaatgaggagaggagagcttaagagaacacagggagatatgcatagatacctggagacacagtctgatgttctcatcagtgatcaggtctaagtgatgagattcagaggtcatctataaggagagacgtatgactccttgagtgtggggaacaaggtagagaagcagaaggccatggtctgagccttgagtgacatcagagaaattttctatctgctagggaagtgggaagaaacatttca

SEQ ID NO: 293737 - DNA, 552 bp, Homo sapiens
aaaaagaagctgaaggcatcaaaacttagagatggtaaggaagtcgtyggtgctcttgggttgagtacctaagactggtgaaggggaagcactgtgtgtgtgtgtgtgtgtgtgtgtgtgtgtgtgtgtgtgtgtgtgtgtgtgtgtgtgtgtgtgtgtgtgtgaaggatggcctggaacaggcaaggaaacccagaaacttggagttctttcaggcaactgtcaaactcctttagctcccaggatgctgctctcaaggtgttgccagggtaggaccaagtgcccaaagacgctggccacatttttgaggttggtaaaacctggtctggaactcctggtgccacgctggcatgtaaacaggtatctactagcctctccattgtctcaagaccaatatatgctggacaatcttggccctagatggaactccataacaaatacatgaggggaagtgcattagaaagcatttccatttgtgtacaaacaatactttaaaaactgcttgcatttttgggagttgagtttggtggttgcctggaagaatgcccaacc

SEQ ID NO: 293738 - DNA, 584 bp, Homo sapiens
cttctgaatctccaccagggtcactttggcccccttgagtctactgaaactgacttccccctaggtaaactcagcggcctcattttctttatcctcctgagcgtttgctatcactaaccgctctttccttttgaaagccctctacttaggcgttgtcagtgctgctctccagaaaattcagtgagtccctatctcctttgtgggggtcttgggctcttctagtctgcgcgctgaggatttcctataggagtctttcttgatggctctctcctctgtatattttcactccctatacaggttccctgtttttcatgaatccaaagcccgtgtctccaatctaaccatgaacctgggctcccagagtgtgcccacagcctcctctagcagcaaattcagaactkttccccagtcagctcccttccccaccaccccacttccgcccatgctattgccatggctttcagattagaaaacttaaagtcatcattgtctcacttttcttttattaaaattttgaaatgacctttggcttccatctttcctacttatcccctgacccccatcacccctgatccaagtcctag

SEQ ID NO: 293739 - DNA, 494 bp, Homo sapiens
gtggttgagccagttggcagcaatttgggatgacagagagagccccttatcgtggcaatcctgggacaaacaaagactcttgctcaatagtagaggtgacaggccaaagtaacagaagccagcatcaaatggtagctcggactgcacagcctctagcaactaccccatgggtagtccaagaatgtttgggaggagggaactcagtaagacactgtgaagcaggtgggagctcaaaggtagcaaggctcaaagctatgattcacatgtcattatcygaacctacagactggtgagatgcaagactgagaatacattgttttgttatttttgttttacctttttatgtttgtttaaatacagagagtaatcattcagaccagaggagataataaaataaccctagcagatgctcataccttagatcaactcaggacaccctacagctgtgtgctctaagttcaggctcggtgtgtggggcaggcattccccaaaga

SEQ ID NO: 293740 - DNA, 583 bp, Homo sapiens
tgtccctgcacttctctgagccctgtcagacaagctggatgactcactatttcttaacaattccccatgaattcccccatcagagcatttctctgctttgcctaagatagactcttctctgcccagttctccaactgccacctgccaactgtaccccttcttgaaggcatagccagtcgccaccatgatatgttctctctttcccctcttcagacacatctctccttcttargccctttactgcctgtgtttggacctctcctggggatcttatctcactctgtcctcaaagtaaaaatgaccagaatccttgtctggcacccccatcacctctggcaccccctcttccccttcacaactggactgtgagtccctgaagagcagagaccaccaggtgttgttcatgtttgtgtctccttcagccactacccaatgcctgacacagagtaggcaccctgtggaagtgaaattaattggttagcatgtttcagaaagatctatctgtaaggttaaatggatatttatgggagaagaggctgggaagaggtgactgggaggtgaagggagaggaatggcggtaaag

SEQ ID NO: 293741 - DNA, 573 bp, Homo sapiens
gctctgtcctcattaatggattaatggtgttatcatgggagttagttattratggagcaggtttctgataaaagggatgagtctgccctgctttctctcttgctccttcctgctcttttccccttcctccttcccggctaggatgatacagcaagaaggtcctcaccagatgcagcccccaaccttggatttcccagcctccagaagagtaagaacaaaaaaaattttctttataaatttcttaggctgtggtattgtgttacagcaacacaaaacagactaagacactgactatgataaaaatgggatgatctaggccaggtgcggtggctcacacctgtaatcccagcactttgggaggccaaggtgggcggatcacgaagtaaggagatcaagaccatcctggctaacacggtgaaacccgatctctactaaaaatacaaaaaatgagccgggtgtggtggcaggcacctgtggtcccagctacttgggaggctgaggcaggagaatggcgtgaacccaggaggcggagcttgcagtgagaggagatcacgccactgcactctagcctgg

SEQ ID NO: 293742 - DNA, 602 bp, Homo sapiens
acccaacacatagtagcactcaaatatttgttgaatgaattataaaaatgactacttgtactgttaattttgtgtattctagtgaattaaatctcttcggcatcatttactcccttaggtatttgactttgtgtcaaatgttttggcaaggataaaattataacagactttcttgaacaaccaaaatataatctattaaggattttccttcacttttgataaaataagaaaaaaggaaattaaaaccttgcatcctaatgtaaaatagaattatatggtgtttaatatcagtgtcyctttagctattatattaaactactatagttaataaattttatcattattttgtatgttggtttttaaaaatttcataaagctataaaaagatacttggtcagataaagtttcctctgcttttaattttaataaagtattattatgtatatgatttctttttacctattatatatatgcatctattgttttctcactggtaaatatgggacggacattttgttagaaggttagaagtgagttaaattttcacattcctaagggtacttttgtcttgggttgttgaatatattttaaagtgtttataa

SEQ ID NO: 293743 - DNA, 602 bp, Homo sapiens
acccaacacatagtagcactcaaatatttgttgaatgaattataaaaatgactacttgtactgttaattttgtgtattctagtgaattaaatctcttcggcatcatttactcccttaggtatttgactttgtgtcaaatgttttggcaaggataaaattataacagactttcttgaacaaccaaaatataatctattaaggattttccttcacttttgataaaataagaaaaaaggaaattaaaaccttgcatcctaatgtaaaatagaattatatggtgtttaatatcagtgtccctttagctattatattaaactactatagttaatamattttatcattattttgtatgttggtttttaaaaatttcataaagctataaaaagatacttggtcagataaagtttcctctgcttttaattttaataaagtattattatgtatatgatttctttttacctattatatatatgcatctattgttttctcactggtaaatatgggacggacattttgttagaaggttagaagtgagttaaattttcacattcctaagggtacttttgtcttgggttgttgaatatattttaaagtgtttataa

SEQ ID NO: 293744 - DNA, 602 bp, Homo sapiens
acccaacacatagtagcactcaaatatttgttgaatgaattataaaaatgactacttgtactgttaattttgtgtattctagtgaattaaatctcttcggcatcatttactcccttaggtatttgactttgtgtcaaatgttttggcaaggataaaattataacagactttcttgaacaaccaaaatataatctattaaggattttccttcacttttgataaaataagaaaaaaggaaattaaaaccttgcatcctaatgtaaaatagaattatatggtgtttaatatcagtgtccctttagctattatattaaactactatagttaataaattttatcattattttgtatgttggtttttaaaaatttcataaagctataaaaagatacttggtcagataaagtttcctctgcttttaattttrataaagtattattatgtatatgatttctttttacctattatatatatgcatctattgttttctcactggtaaatatgggacggacattttgttagaaggttagaagtgagttaaattttcacattcctaagggtacttttgtcttgggttgttgaatatattttaaagtgtttataa

SEQ ID NO: 293745 - DNA, 614 bp, Homo sapiens
tttacaaaactaatcacattttccaaacctgcttccaccactacccgacctgttgctcctccttcctgtatttcctatacctcggagattagcctcacattgaatctacctcccaagagtcatgttgcttttaaaatccttcactaactccttgctccctacagaagaaaatccaaactatgtatcatggcattcaagaccctttgtggtaagttctctatctcttcagtcatacyactttttctgtgctacataataccaagttttctagccattctaaaatattcaaaggtccctggaatacaaaatcttccttatacctggaaagttatccctaccctactccatctgtaaaaaccttattcattctttaagactcaggtcaatgactgccttctcggtcaatattttcctgactctttttcaagaaaagttgagcaagcattccctctattttcctattattatagaactctgtgcttttaaaattcttgtattaatattaatatctattatgttgcctttttgtttgtttgcttctgtttccccccaatgactgatctccttaaaggcagagtttttgccttatccattgcttatatagtccttaaaat

SEQ ID NO: 293746 - DNA, 614 bp, Homo sapiens
tttacaaaactaatcacattttccaaacctgcttccaccactacccgacctgttgctcctccttcctgtatttcctatacctcggagattagcctcacattgaatctacctcccaagagtcatgttgcttttaaaatccttcactaactccttgctccctacagaagaaaatccaaactatgtatcatggcattcaagaccctttgtggtaagttctctatctcttcagtcatactactttttctgtgctacataataccaagttttctagccattctaaaatattcaaaggtccctggaatacaaaatcttccttatacctggaaagttatccctaccctactccatctgtaaaaaccttattcattctttaagactcaggtcaatgactgccttctcggtcaatattttcctgactctttttcaagaaaagttgagcaakcattccctctattttcctattattatagaactctgtgcttttaaaattcttgtattaatattaatatctattatgttgcctttttgtttgtttgcttctgtttccccccaatgactgatctccttaaaggcagagtttttgccttatccattgcttatatagtccttaaaat

SEQ ID NO: 293747 - DNA, 562 bp, Homo sapiens
cttttcaacacactgtacacctcatctatttatcttttccattgcctatcatcaatcatcaattctctatcatgaattcaattgtctttagggttacttacccaagattcttgctacttgttcaagkttgttctcatgggtaaggcttcccacatataatgattctgaggcaagtctctccactattttacaaaattcttaaatcttcttttttgaatacactctagtctgatggctaattcctctcaaacatgtttaccttttttcacctccccaaatatcattctgagtcagtcacaagtctgatataaagggagggtaaaagccaaaagggtgtgtaatttatcaaattgcttcttccaaattcatttctagtactgttaacaagctggctaatagtcaatattgtcagtgtcagagatttagcttaggtctctataaggatataaaagtcaagtaataattatcattccttttatgccaaaaacgtttgctaaatagattgtgttcttcttagcaatcacaatggtacacaagatttatgaagagaaacaagattagg

SEQ ID NO: 293748 - DNA, 562 bp, Homo sapiens
cttttcaacacactgtacacctcatctatttatcttttccattgcctatcatcaatcatcaattctctatcatgaattcaattgtctttagggttacttacccaagattcttgctacttgttcaagtttgttctcatgsgtaaggcttcccacatataatgattctgaggcaagtctctccactattttacaaaattcttaaatcttcttttttgaatacactctagtctgatggctaattcctctcaaacatgtttaccttttttcacctccccaaatatcattctgagtcagtcacaagtctgatataaagggagggtaaaagccaaaagggtgtgtaatttatcaaattgcttcttccaaattcatttctagtactgttaacaagctggctaatagtcaatattgtcagtgtcagagatttagcttaggtctctataaggatataaaagtcaagtaataattatcattccttttatgccaaaaacgtttgctaaatagattgtgttcttcttagcaatcacaatggtacacaagatttatgaagagaaacaagattagg

SEQ ID NO: 293749 - DNA, 562 bp, Homo sapiens
cttttcaacacactgtacacctcatctatttatcttttccattgcctatcatcaatcatcaattctctatcatgaattcaattgtctttagggttacttacccaagattcttgctacttgttcaagtttgttctcatgggtaaggcttcccacatataatgattctgaggcaagtctctccactattttacaaaattcttaaatcttcttttttgaatacactctagtctgatggctaattcctctcaaacatgtttaccttttttcacctccccaaatatcattctgagtcagtcacaagtctgatataaagggagggtaaaagccaaaagggtgtgtaatttatcaaaytgcttcttccaaattcatttctagtactgttaacaagctggctaatagtcaatattgtcagtgtcagagatttagcttaggtctctataaggatataaaagtcaagtaataattatcattccttttatgccaaaaacgtttgctaaatagattgtgttcttcttagcaatcacaatggtacacaagatttatgaagagaaacaagattagg

SEQ ID NO: 293750 - DNA, 562 bp, Homo sapiens
cttttcaacacactgtacacctcatctatttatcttttccattgcctatcatcaatcatcaattctctatcatgaattcaattgtctttagggttacttacccaagattcttgctacttgttcaagtttgttctcatgggtaaggcttcccacatataatgattctgaggcaagtctctccactattttacaaaattcttaaatcttcttttttgaatacactctagtctgatggctaattcctctcaaacatgtttaccttttttcacctccccaaatatcattctgagtcagtcacaagtctgatataaagggagggtaaaagccaaaagggtgtgtaatttatcaaattgcttcttccaaattcatttctagtactgttaacaagctggctaatagtcaatattgtcagtgtcagagatttagcttaggtctctataaggatataaaagtcaagtaataattatcattccttttatgccaaaaacgtttgctaaatagattgtgttcttcttagcaatcacaatggtrcacaagatttatgaagagaaacaagattagg

SEQ ID NO: 293751 - DNA, 468 bp, Homo sapiens
aatagctaccgaatgtctctctgtatagggcttttattagttcaggtcttacaaaataattcaaaacaaagcccctgaactataacytcatttgaaaagtccatctttgttttcaaaaggaatgggagtctccagaacagtcagcaaaatgactgttagcacatatttgagcatcattcatattgtcctgattgtcctatgctgatcagccttggctatggacaaagaagatattaaagcaagctggaagacaaggcatggttgacagttaaggaagatgaagtcaacaagagttcagggaaaactgagaccacttgagtcagggaagacttcacataggaaggggggagagacagaataggctgtatagaataaattaaaaaaaaaaaaaaaaaacagaacaagaaagaactcagggattggcagagtgagaatacattatgagtaaagacaggaactgacaggatg

SEQ ID NO: 293752 - DNA, 483 bp, Homo sapiens
agtttgtttttggttttcatcttagtgatttttctctttacaattagccagcaatcaatatatactttaaatatgaatacctagtagcttcattgataaggccatcaggtttctcttctgctaaatgctaaacaaaaaaaagtttgaataaagttactataatacaataaaaaatctaatgtcaacacaaaggattttactttagagacattttcttgcatctaataaaaacttcaacatgttctgttactgaatacacaaatccaaaactaacttttctagctaaaagcatttttcttccccatttgcaatttttttctacaagtgaacctgtggggttttatagggggaggaagagggcttaggatttcatactcctgaccttttcttttacttaaaaggaaaacccctttgattcacataaygtcataaaaacatagaagattacagttcagattttaggtattttccttcttacaaaac

SEQ ID NO: 293753 - DNA, 546 bp, Homo sapiens
gcaactgtttattttactgacctctccagagtcaggctaactccaaaaaatattttgacactgacttagagcccaagtggtagtttycatctctctggaggcaagctttgttgtctgttttttttttccccctcataatcctgtttacatccctaacgtcatcaacatcacaagcttcttctctgggaaattacacttttaccctcattacctcaaacctcaatagaggttccctgtcacaataaaaagctggctactgaggtttagaggcaactagattatagtaatactctctatttgaagccaactttacaaatgaattaaatccttgaatctaactttataaattatatacatttttctcatttagctttcataataattatgggagatggctattttcatttataaaggaagaaactaaatctaacaccctcatcatcacaggatactatattttatatacaatcacagggacttttttttttaattgaacacacacccatcaagtaaaatgacataattttaaagtctttgtgaaatctt

SEQ ID NO: 293754 - DNA, 546 bp, Homo sapiens
gcaactgtttattttactgacctctccagagtcaggctaactccaaaaaatattttgacactgacttagagcccaagtggtagttttcatctctctggaggcaagytttgttgtctgttttttttttccccctcataatcctgtttacatccctaacgtcatcaacatcacaagcttcttctctgggaaattacacttttaccctcattacctcaaacctcaatagaggttccctgtcacaataaaaagctggctactgaggtttagaggcaactagattatagtaatactctctatttgaagccaactttacaaatgaattaaatccttgaatctaactttataaattatatacatttttctcatttagctttcataataattatgggagatggctattttcatttataaaggaagaaactaaatctaacaccctcatcatcacaggatactatattttatatacaatcacagggacttttttttttaattgaacacacacccatcaagtaaaatgacataattttaaagtctttgtgaaatctt

SEQ ID NO: 293755 - DNA, 546 bp, Homo sapiens
gcaactgtttattttactgacctctccagagtcaggctaactccaaaaaatattttgacactgacttagagcccaagtggtagttttcatctctctggaggcaagctttgttgtctgttttttttttccccctcataatcctgtttacatccctaacgtcatcaacatcacaagcttcttctctgggaaattacacttttaccctcattacctcaaacctcaatagaggttccctgtcacaataaaaagctggctactgaggtttagaggcaactagattatagtaatactctmtatttgaagccaactttacaaatgaattaaatccttgaatctaactttataaattatatacatttttctcatttagctttcataataattatgggagatggctattttcatttataaaggaagaaactaaatctaacaccctcatcatcacaggatactatattttatatacaatcacagggacttttttttttaattgaacacacacccatcaagtaaaatgacataattttaaagtctttgtgaaatctt

SEQ ID NO: 293756 - DNA, 546 bp, Homo sapiens
gcaactgtttattttactgacctctccagagtcaggctaactccaaaaaatattttgacactgacttagagcccaagtggtagttttcatctctctggaggcaagctttgttgtctgttttttttttccccctcataatcctgtttacatccctaacgtcatcaacatcacaagcttcttctctgggaaattacacttttaccctcattacctcaaacctcaatagaggttccctgtcacaataaaaagctggctactgaggtttagaggcaactagattatagtaatactctctatttgaagccaactttacaaatgaattaaatccttgaatctaactttataaattatatacatttttctcatttagctttcataataattatgggagatggctattttcatttataaaggaagaaactaaatctaacaccctcatcatcacaggatactatattttatatrcaatcacagggacttttttttttaattgaacacacacccatcaagtaaaatgacataattttaaagtctttgtgaaatctt

SEQ ID NO: 293757 - DNA, 590 bp, Homo sapiens
caaaaatcattccatgccaaaagaccaagtttaatatttttttcataattcatcttggcctgaggctacaacaagtcctattgttatatactctgcctctagagaatgaggctgctaacagaccttggaatggtgcctggcacamaggctcaagaaatatttgttgaatgaattgtaattaacacctcctgttgtggggatacataaaagatgttacatgaaaaatgccatctaacatgcagcaacaaatctcttcccattaagcagtaaatctacttaacaatgatatatttttggcaaggcatctgcctctgaatgatcctatagtactgaaaattctttttaaactgaaatatttttcaagatattatattattgaccttatgaaagcttttttaacatatgaaattggggttatttggctatgagtttgtgaggcataaaaatgatatgacagaagaattacagatttgtttttgcatttccatgcctaaatgtaactaatacaatgttagtttcacaaggtaatgtgcaatgttttaaatgcatttacctctccaaaatattagaattcttcactcaaagctaac

SEQ ID NO: 293758 - DNA, 576 bp, Homo sapiens
ttttctcttgccagtgctgccatttaattaaattccagtaataagtcaatgcatttcctgagtggctagcactattttaaggcactagagaagatataaaacaaataaaaattttaaattaaataaataagaaaataagatttccttggcactgaaaaagcttacaatccaaaatataagtcaaatttcataacatagtcaaatgtgataagtacataagacaggttatttctagtttattttcacataatcaaaatcaagacttttcttaagatttaaattattgcckaaagaatgagacatcttaaggtatcattcctaacatctctcatcaaatccaaatccaactcataaatgttttacataacatatgcttaagtttccaaactaccaattcattttgcaatctctgaatatatgctgataacaaaagaatgagtttaattatgcctaaggaattcaaccagttacccaccacatatattagagctcaatgatggggcccagcttaataattcttaaatttcttaatgattattacttttgaaaaagtaagaaaatttcgactggttttta

SEQ ID NO: 293759 - DNA, 576 bp, Homo sapiens
ttttctcttgccagtgctgccatttaattaaattccagtaataagtcaatgcatttcctgagtggctagcactattttaaggcactagagaagatataaaacaaataaaaattttaaattaaataaataagaaaataagatttccttggcactgaaaaagcttacaatccaaaatataagtcaaatttcataacatagtcaaatgtgataagtacataagacaggttatttctagtttattttcacataatcaaaatcaagacttttcttaagatttaaattattgccgaaagaatgagacatcttaaggtatcattcctaacatctctcaycaaatccaaatccaactcataaatgttttacataacatatgcttaagtttccaaactaccaattcattttgcaatctctgaatatatgctgataacaaaagaatgagtttaattatgcctaaggaattcaaccagttacccaccacatatattagagctcaatgatggggcccagcttaataattcttaaatttcttaatgattattacttttgaaaaagtaagaaaatttcgactggttttta

SEQ ID NO: 293760 - DNA, 576 bp, Homo sapiens
ttttctcttgccagtgctgccatttaattaaattccagtaataagtcaatgcatttcctgagtggctagcactattttaaggcactagagaagatataaaacaaataaaaattttaaattaaataaataagaaaataagatttccttggcactgaaaaagcttacaatccaaaatataagtcaaatttcataacatagtcaaatgtgataagtacataagacaggttatttctagtttattttcacataatcaaaatcaagacttttcttaagatttaaattattgccgaaagaatgagacatcttaaggtatcattcctaacatctctcatcaaatccaaatccaactcataaatgttttacataacatatgcytaagtttccaaactaccaattcattttgcaatctctgaatatatgctgataacaaaagaatgagtttaattatgcctaaggaattcaaccagttacccaccacatatattagagctcaatgatggggcccagcttaataattcttaaatttcttaatgattattacttttgaaaaagtaagaaaatttcgactggttttta

SEQ ID NO: 293761 - DNA, 593 bp, Homo sapiens
ggctttgtgcacatcagactgatttttattttctcacctctttaatatgataatcattcaatcataaatagtgaattatcactctaaaggaaaaggaaaacaaaacatagataattccaaaatcacttgcccaaaaaaaatttacttgtaatctgtgtagaactagaagtaaaattatatactctatggcattactaattattcctcacactatttatttagkactgtataaaacctgggtcttaggaaaaatttttcctaaataataaattaaaacttgcttttgacagaaattggttcagtaccaaaccacataccctgattagtatgccacaacgcaagaaaaagaaaactgacagcaaggaaagtatttgatttttgaaagcatcacaggcccagttagtgacagggctgtctaaaagaatgagtgtaggagaaaaacaaggataatcaaactcattccaacgtctaaagctgtccacctactctgccaagatgtggtcccccaagcatcactcggtgtcaacaatgaaatacctgtcagctgtttacagtgattactcatgcaagatatagcaagggccacaagatct

SEQ ID NO: 293762 - DNA, 593 bp, Homo sapiens
ggctttgtgcacatcagactgatttttattttctcacctctttaatatgataatcattcaatcataaatagtgaattatcactctaaaggaaaaggaaaacaaaacatagataattccaaaatcacttgcccaaaaaaaatttacttgtaatctgtgtagaactagaagtaaaattatatactctatggcattactaattattcctcacactatttatttagtactgtataaaacctgggtcttaggaaaaatttttcctaaataataaattaaaacttgcttttgacagaaattggttcagtaccaaaccacataccctgattagtatgccacaacgcaagaaaaagaaaactgacagcaaggaaagtatttgatttttgaaagcatcacaggcccagttagtgacagggctgtctaaaagaatgagtgtaggagaaaaacaaggataatcaaactcattccaacgtctaaagctgtccacctrctctgccaagatgtggtcccccaagcatcactcggtgtcaacaatgaaatacctgtcagctgtttacagtgattactcatgcaagatatagcaagggccacaagatct

SEQ ID NO: 293763 - DNA, 581 bp, Homo sapiens
agggaggaaatttatcttttcctcgcctatcactagattcatggctgaggtctctctaacagaagaccaactatcaagagaaatttcaacatagaaatttatttagtaagttttacttgacacaggagccttcataaaacatacctgtgtatgttttctgttagttatgatatggaagaggatagtaatggagaagcataattagataaaacagtatgatctaataataaactgggaagaacttagcaaggcctgtttgctcagatttttctctgtgacccttcatattcagacttaaggatgttcttttcctctgtgtatagagagggcacctcttaaatgagggtcttatgacctgcatcagcggaaggtcagaaaatctttcctaggttttatgacctgcttcaggagagaaggtgagagtgaccttcctgattctgccattttctcaaatattgagttgccatattttgggatagcatgtcctgaaccccatcaaatgcttcatgaggatagtttttygtttgtttgttttggttttggtttatttatttgcatacagtaaagcatgcaaatgtgta

SEQ ID NO: 293764 - DNA, 581 bp, Homo sapiens
agggaggaaatttatcttttcctcgcctatcactagattcatggctgaggtctctctaacagaagaccaactatcaagagaaatttcaacatagaaatttatttagtaagttttacttgacacaggagccttcataaaacatacctgtgtatgttttctgttagttatgatatggaagaggatagtaatggagaagcataattagataaaacagtatgatctaataataaactgggaagaacttagcaaggcctgtttgctcagatttttctctgtgacccttcatattcagacttaaggatgttcttttcctctgtgtatagagagggcacctcttaaatgagggtcttatgacctgcatcagcggaaggtcagaaaatctttcctaggttttatgacctgcttcaggagagaaggtgagagtgaccttcctgattctgccattttctcaaatattgagttgccatattttgggatagcatgtcctgaaccccatcaaatgcttcatgaggatagttttttrtttgtttgttttggttttggtttatttatttgcatacagtaaagcatgcaaatgtgta

SEQ ID NO: 293765 - DNA, 581 bp, Homo sapiens
agggaggaaatttatcttttcctcgcctatcactagattcatggctgaggtctctctaacagaagaccaactatcaagagaaatttcaacatagaaatttatttagtaagttttacttgacacaggagccttcataaaacatacctgtgtatgttttctgttagttatgatatggaagaggatagtaatggagaagcataattagataaaacagtatgatctaataataaactgggaagaacttagcaaggcctgtttgctcagatttttctctgtgacccttcatattcagacttaaggatgttcttttcctctgtgtatagagagggcacctcttaaatgagggtcttatgacctgcatcagcggaaggtcagaaaatctttcctaggttttatgacctgcttcaggagagaaggtgagagtgaccttcctgattctgccattttctcaaatattgagttgccatattttgggatagcatgtcctgaaccccatcaaatgcttcatgaggatagttttttgtttgtttsttttggttttggtttatttatttgcatacagtaaagcatgcaaatgtgta

SEQ ID NO: 293766 - DNA, 581 bp, Homo sapiens
ggtgaagcccaatgtaaagatataaaaaaaaaaaaagatacaagaagtaaagggagaaatattcaatgaactagatagcataaataaaaaacaatcaaaactttaggaaataatggacatacttatagaaatataaaatgctctggaaagtcttagcaatagaattgaacaagtagaagaaggaaattcagagcctgaagacaaggtcttctaattaaccraatccaataaagacaaagaaaaaagaataagaaaatatgaagaaagccttcaagaaatctggaattatgttaaatgaccaaacctaagaataaccggcattcctgaggaagaagagaaatctaaacgtttgttaaacatatttgggggaataattgaggaaaacttccccagctttgctagagacctagatgcaaatacaagaagcacaaagaacatctgggaaattcatcgcaaaaagatcatcatctaggcacattgtcgtcaggttatctaaagttaagatgaaagaaagagctgtgaaacaaaagcaccaggtaacctataaaggaaaacttaccagattaacagcacatttctca

SEQ ID NO: 293767 - DNA, 581 bp, Homo sapiens
ggtgaagcccaatgtaaagatataaaaaaaaaaaaagatacaagaagtaaagggagaaatattcaatgaactagatagcataaataaaaaacaatcaaaactttaggaaataatggacatacttatagaaatataaaatgctctggaaagtcttagcaatagaattgaacaagtagaagaaggaaattcagagcctgaagacaaggtcttctaattaaccgaatccaataaagacaaagaaaaaagaataagaaaatatgaagaaagccttcaagaaatctggaattatgttaaatgaccaaacctaagaataaccggcattcctgaggaagaagagaaatctaaacgtttgttaaacatatttgggggaataattgaggaaaacttccccagctttgctagagacctagatscaaatacaagaagcacaaagaacatctgggaaattcatcgcaaaaagatcatcatctaggcacattgtcgtcaggttatctaaagttaagatgaaagaaagagctgtgaaacaaaagcaccaggtaacctataaaggaaaacttaccagattaacagcacatttctca

SEQ ID NO: 293768 - DNA, 581 bp, Homo sapiens
ggtgaagcccaatgtaaagatataaaaaaaaaaaaagatacaagaagtaaagggagaaatattcaatgaactagatagcataaataaaaaacaatcaaaactttaggaaataatggacatacttatagaaatataaaatgctctggaaagtcttagcaatagaattgaacaagtagaagaaggaaattcagagcctgaagacaaggtcttctaattaaccgaatccaataaagacaaagaaaaaagaataagaaaatatgaagaaagccttcaagaaatctggaattatgttaaatgaccaaacctaagaataaccggcattcctgaggaagaagagaaatctaaacgtttgttaaacatatttgggggaataattgaggaaaacttccccagctttgctagagacctagatgcaaatacaagaagcacaaagaacatctgggaaattcatcgcaaaaagatcatcatctaggcacattgtcgtcaggttatctaaagttaagatgaaagaaagagctgtgaaacaaaagcaccaggtaacctrtaaaggaaaacttaccagattaacagcacatttctca

SEQ ID NO: 293769 - DNA, 549 bp, Homo sapiens
taaagaagaaaaataaatcctaragttaatattcaatacatgatgatgtcacccttactaaagccaaagagggcattatcctatcattctcatcgctaagaactcttctcctcttggcacatgcttattcagttaaagataagccaagcctttcttttgtattttttttttaagagaacaaatttactttggttttgagttttattcctggccctgggtagcttatttttttgacccttattttccccaatttataaaatgaaatagttatcttcactccccaggattgttgtgaagagtaagtcaaaagataaaatgaggtgactcaggcaaaagtacctggccctgtgtagtgagtacattgtatgtgttacatatattcttattgctgagaatccacgaaagaatgaattaaataatgaggaccctttcatcagggtttttgagtgagttttttaaaatacaaggtagtagtttgtgtaaatactaaatccattggtacctgtgcagaatgtaggaaatggagttgctaattccaaaaaaacagca

SEQ ID NO: 293770 - DNA, 549 bp, Homo sapiens
taaagaagaaaaataaatcctagagttaatattcaatacatgatgatgtcacccttactaaagccaaagagggcattatcctatcattctcatcgctaagaactcttctcctcttggcacatgcttattcagttaaagataagccaagcctttcttttgtattttttttttaagagaacaaatttactttggttttgagttttattcctggcyctgggtagcttatttttttgacccttattttccccaatttataaaatgaaatagttatcttcactccccaggattgttgtgaagagtaagtcaaaagataaaatgaggtgactcaggcaaaagtacctggccctgtgtagtgagtacattgtatgtgttacatatattcttattgctgagaatccacgaaagaatgaattaaataatgaggaccctttcatcagggtttttgagtgagttttttaaaatacaaggtagtagtttgtgtaaatactaaatccattggtacctgtgcagaatgtaggaaatggagttgctaattccaaaaaaacagca

SEQ ID NO: 293771 - DNA, 549 bp, Homo sapiens
taaagaagaaaaataaatcctagagttaatattcaatacatgatgatgtcacccttactaaagccaaagagggcattatcctatcattctcatcgctaagaactcttctcctcttggcacatgcttattcagttaaagataagccaagcctttcttttgtattttttttttaagagaacaaatttactttggttttgagttttattcctggccctgggtagcttatttttttgacccttattttccccaatttataaaatgaaatagttatcttcactccccaggattgttgtgaagagtaagtcaaaagatamaatgaggtgactcaggcaaaagtacctggccctgtgtagtgagtacattgtatgtgttacatatattcttattgctgagaatccacgaaagaatgaattaaataatgaggaccctttcatcagggtttttgagtgagttttttaaaatacaaggtagtagtttgtgtaaatactaaatccattggtacctgtgcagaatgtaggaaatggagttgctaattccaaaaaaacagca

SEQ ID NO: 293772 - DNA, 549 bp, Homo sapiens
taaagaagaaaaataaatcctagagttaatattcaatacatgatgatgtcacccttactaaagccaaagagggcattatcctatcattctcatcgctaagaactcttctcctcttggcacatgcttattcagttaaagataagccaagcctttcttttgtattttttttttaagagaacaaatttactttggttttgagttttattcctggccctgggtagcttatttttttgacccttattttccccaatttataaaatgaaatagttatcttcactccccaggattgttgtgaagagtaagtcaaaagataaaatgaggtgactcaggcaaaagtacctggccctgtgtagtgagtacattgtatgtgttacatatattcttattsctgagaatccacgaaagaatgaattaaataatgaggaccctttcatcagggtttttgagtgagttttttaaaatacaaggtagtagtttgtgtaaatactaaatccattggtacctgtgcagaatgtaggaaatggagttgctaattccaaaaaaacagca

SEQ ID NO: 293773 - DNA, 1071 bp, Homo sapiens
actcaggcaaaagtacctggccctgtgtagtgagtacattgtatgtgttacatatattcttattgctgagaatccacgaaagaatgaattaaataatgaggaccctttcatcagggtttttgagtgagttttttaaaatacaaggtagtagtttgtgtaaatactaaatccattggtacctgtgcagaatgtaggaaatggagttgctaattccaaaaaaacagcacatatgctgaggaaagtataatacctaatatatatggtttaagcaatgtaaaattccatgaatatgttccttttcatcttaaaatttgtgatttaaaaaacattgatattactataaagaattattrttatttcccttgatttacagagtattgttacaatcacatttgaagtaccaggaaatgcaaaggaagaacatcttaatatgtttattcaggtgaatgcaatttttaactgataaatgatttatcaatggttttgttacatagttgttgctattagcgatggttggtcttattaaaatatgtcawactcaggcaaaagtacctggccctgtgtagtgagtacattgtatgtgttacatatattcttattgctgagaatccacgaaagaatgaattaaataatgaggaccctttcatcagggtttttgagtgagttttttaaaatacaaggtagtagtttgtgtaaatactaaatccattggtacctgtgcagaatgtaggaaatggagttgctaattccaaaaaaacagcacatatgctgaggaaagtataatacctaatatatatggtttaagcaatgtaaaattccatgaatatgttccttttcatcttaaaatttgtgatttaaaaaacattgatattactataaagaattattgttatttcccttgatttacagagtattgttacaatcacatttgaagtaccaggaaatgcaaaggaagaacatcttaatatgtttattcaggtgaatgcaatttttaactgatwaatgatttatcaatggttttgttacatagttgttgctattagcgatggttggtcttattaaaatatgtca

SEQ ID NO: 293774 - DNA, 1185 bp, Homo sapiens
atcgtgccaatgcaatccatgctgggcgacagagtgagaccctgtctcaaaamacagaaagagggattttagtataacattcagccagtgccatattgggaacccacaagaatgtactttaaaaaatatgtcaaagaacgtggtgagggctgtaatagctgctattcaggcagtaatgcagtgctgaagggacatcaagcaaatagtgtgatgcctgtgggtgcaatgttactccttcccttaggttgccaaaaaaatcaatacttcatagcattcctgaaacgaaaaagcttatgaaccattgtgtttagggcgtaagctatctattttgggctacccatcacagcttctctcctttggtagaataaagtgaactgaaccaccatgcctaaggtatttgccttatttcttcctcagctggttcatggttacattgtcaaagctggcaaagcattcaagacctgatttctcagaccgagtgtatgtgtgaatataatatactcatttgcacaaatataaaccctctgtcttaactgtgttctgcaaaaggcgtgataaatactttcaagttatatgtccttatcagtagaacwatcgtgccaatgcaatccatgctgggcgacagagtgagaccctgtctcaaaacacagaaagagggattttagtataacattcagccagtgccatattgggaacccacaagaatgtactttwaaaaatatgtcaaagaacgtggtgagggctgtaatagctgctattcaggcagtaatgcagtgctgaagggacatcaagcaaatagtgtgatgcctgtgggtgcaatgttactccttcccttaggttgccaaaaaaatcaatacttcatagcattcctgaaacgaaaaagcttatgaaccattgtgtttagggcgtaagctatctattttgggctacccatcacagcttctctcctttggtagaataaagtgaactgaaccaccatgcctaaggtatttgccttatttcttcctcagctggttcatggttacattgtcaaagctggcaaagcattcaagacctgatttctcagaccgagtgtatgtgtgaatataatatactcatttgcacaaatataaaccctctgtcttaactgtgttctgcaaaaggcgtgataaatactttcaagttatatgtccttatcagtagaac

SEQ ID NO: 293775 - DNA, 592 bp, Homo sapiens
atcgtgccaatgcaatccatgctgggcgacagagtgagaccctgtctcaaaacacagaaagagggattttagtataacattcagccagtgccatattgggaacccacaagaatgtactttaaaaaatatgtcaaagaacgtggtgagggctgtaatagctgctattcaggcagtaatgcagtgctgaagggacatcaagcaaatagtgtgatgmctgtgggtgcaatgttactccttcccttaggttgccaaaaaaatcaatacttcatagcattcctgaaacgaaaaagcttatgaaccattgtgtttagggcgtaagctatctattttgggctacccatcacagcttctctcctttggtagaataaagtgaactgaaccaccatgcctaaggtatttgccttatttcttcctcagctggttcatggttacattgtcaaagctggcaaagcattcaagacctgatttctcagaccgagtgtatgtgtgaatataatatactcatttgcacaaatataaaccctctgtcttaactgtgttctgcaaaaggcgtgataaatactttcaagttatatgtccttatcagtagaac

SEQ ID NO: 293776 - DNA, 404 bp, Homo sapiens
tatgaaccattgtgtttagggcgtaagctatctattttgggctacccatcacagcttctctcctttggtagaataaagkgaactgaaccaccatgcctaaggtatttgccttatttcttcctcagctggttcatggttacattgtcaaagctggcaaagcattcaagacctgatttctcagaccgagtgtatgtgtgaatataatatactcatttgcacaaatataaaccctctgtcttaactgtgttctgcaaaaggcgtgataaatactttcaagttatatgtccttatcagtagaactaatggaatacacacagtatattatatggggaatttcagagaaggaaggaaaagtcaaccttttatttggcatcaggatagtagtaaaacattctacttgtgca

SEQ ID NO: 293777 - DNA, 997 bp, Homo sapiens
atcgtgccaatgcaatccatgctgggcgacagagtgagaccctgtctcaaaacacagaaagagggattttagtataacattcagccagtgccatattgggaacccacaagaatgtactttaaaaaatatgtcaaagaacgtggtgagggctgtaatagctgctattcaggcagtaatgcagtgctgaagggacatcaagcaaatagtgtgatgcctgtgggtgcaatgttactccttcccttaggttgccaaaaaaatcaatacttcatagcattcctgaaacgaaaaagcttatgaaccattgtgtttagggcgtaagctatctattttgggctacccatcacagcttctctcctttggtagaataaagtgaactgaaccaccaygcctaaggtatttgccttatttcttcctcagctggttcatggttacattgtcaaagctggcaaagcattcaagacctgatttctcagaccgagtgtatgtgtgaatataatatactcatttgcacaaatataaaccctctgtcttaactgtgttctgcaaaaggcgtgataaatactttcaagttatatgtccttatcagtagaacwtatgaaccattgtgtttagggcgtaagctatctattttgggctacccatcacagcttctctcctttggtagaataaagtgaactgaaccaccatgcctaaggtatttgccttatttcttcctcagctggttcatggttacattgtcaaagctggcaaagcattcaagacctgatttctcagaccgagtgtatgtgtgaatataatatactcatttgcacaaatataaaccctctgtcttaactgtgttctgcaaaaggcgtgataaatactttcaagttatatgtccttatcagtagaactaatggaatacacacagtatattwtatggggaatttcagagaaggaaggaaaagtcaaccttttatttggcatcaggatagtagtaaaacattctacttgtgca

SEQ ID NO: 293778 - DNA, 470 bp, Homo sapiens
ctgacttcctttctaagccatatttaacagtttctaaattgaatgtaataaacactttataaagagaaatgagaagttatttaaagtgaggcttataggtccttgccactcagcatctggaaagcagttatacattggggagtgggggagaacttttaatgaatttaatagagaaaaagcactttaattaaatgctgtcaaagtagattgtattaatgatggtacacagaggaattttaagccagccaagtktatttagcaaatagaaatggggcttttgaagcctgcaagtatttatgtttccgcagttgcagtacatctagatgatggtgccaaatgaaactgttgagttattattagatatgattttatttattgtgtattattaaagtttcaaaagccttaggggaattaatctcattttcaaaatgaaataccacatttgatcagaaagggttaagaaaagagaa

SEQ ID NO: 293779 - DNA, 346 bp, Homo sapiens
tataaaaaataaataatacacggatggccaaagagcttgaaataaaaaagttaactggagtctactcagtgtttcgctggcaaatatttaacaactgggtctctaaagaaaaaaaaaaagccccaattggataatccaccagtttttgtagtgtgaataatcccaccatggccagtttcacgctgccaatggtataacaaccagcttttgaaattctaaaaatttaacaattggcttctgcmagccagagtaggctttctccagcatactctgactctactatagagaagcaagaccatgttcctcctctgacaagccacatactgcttcccagacttgctcactg

SEQ ID NO: 293780 - DNA, 517 bp, Homo sapiens
atgttttacttttttgtttttgtttggtttgagtaaattagagctcatcctatattccttctacaatgacactagtgtatgtaagtccactcctgtttacctgcatacatgggagggaaagaggtagaattccaggtggtcattcccggaagagtcatacatgtgaaaataggccattagtattctcagcacagaggttccactgaagggagtcctgggatcacagcaagttctgcatcttcactctacttgtcacttcatatcctaattcatcttctggtagcctgaattcatcttcctggtagtctctgaggaactcaacaccagagaatatttattttcccttgtttgagtccaccaaggccagcacagatctgctaatggrggagatgcctatttaatactgcaccaaagagtctcaagcatcatcactacatggttctttcacaactttgtggatgctaatgggtagcaaggacagcagaagtctcagagatgatacagaggctgaagtagc

SEQ ID NO: 293781 - DNA, 1101 bp, Homo sapiens
atgttttacttttttgtttttgtttggtttgagtaaattagagctcatcctatattccttctacaatgacactagtgtatgtaagtccactcctgtttacctgcatacatgggagggaaagaggtagaattccaggtggtcattcccggaagagtcatacatgtgaaaataggccattagtattctcagcacagaggttccactgaagggagtcctgggatcacagcaagttctgcatcttcactctacttgtcacttcatatcctaattcatcttctggtagcctgaattcatcttcctggtagtctctgaggaactcaacaccagagaatatttattttcccttgtttgagtccaccaaggccagcacagatctgctaatgggggagatgcctatttaatactgcaccaaagagtctcaagcatcatcactacatggytctttcacaactttgtggatgctaatgggtagcaaggacagcagaagtctcagagatgatacagaggctgaagtagcwcaggcatgctcccgttatcttgctgaatataaaattctatgctgacaccatccttgattcaattctgtgctcttttcagtaagaattatcccctttatccttaagattaatactaataacgctcagaagctactaacatttctcaggtgccttctatgcaatcaccatctcatataaacttcaaataaccccatcaatttgggattattctcgcaaactagtttcagaaattttaagcagcctctacaacgtcagagctccaattccagtgatggtcctagaattcaaacccagatcttctgaaggtccagtggcctttcctctctatccaaacacctcgccatgcttccagcagagataatgtttcagtctacttgtataagctctttgacaacttatactacttaagtattttttwaaaaagaagaaatggaggttaaaataaattatatttccatttggacgttttacattgtactgaaatattttttaagtaagacagtccaaaatgctttaacaatgactgtattagtatgtatttgtagatcgagtttgttaagtccagatccccagcaggtaggct

SEQ ID NO: 293782 - DNA, 646 bp, Homo sapiens
ctaagtctgtaatttattaagtaaaacacttgtctcacagatttgttttttgtggatacaataaaatttcacttgtggcaactttcacatcagaatacagtacccacataacacaaagtgagtagatacaacagagcattcttgaagccaaaacagtctgtgttcccttaactgcaatacctttgaccaagccacatttgagcatgtacaatagaggaaattagccaaaatcagattcctggcaactttaatgttttttgtttgtttgtttgtttttgcatacttaatctacgtaatgattatcccttcctccttggtgtctctaggaagtcttaggtactggaataagaggctatgcacaatccaagtcaaaatttataaaacacattagcaccaaaaagtgaaagcaaacagaactgaacaggttccctttggaaacgttttactagtagtgttcttcagctctgggcacatacatggtttctactcacacctcaagtacctggcactatgactatttcattcacaaagttctgggcccttcttattcctagtttccatgaatgttcygtaaaacaactgttggcaacctgccccaaaaatttactagctttggctactttgtcaaaacattggcaaaaatagt

SEQ ID NO: 293783 - DNA, 631 bp, Homo sapiens
ataaagtagttatgagtatgagtcatgaagtcagacttgctggattcgaaattgggctctaactggacaagtatcaattaatctccctatggcacagtctcctcacctgtaaaactaaaataattctgcttcccttatagggtcccctagagagcttctaactgtatgtgatacatactaagagtttaatcaatgttagccattgttaggatgcctagtatagtttctgaatacttaatatttgatgaataaatacataaacatcacagtacaatttttattttacatctacaactttaaatattcaagacactctagttatattttgctaaacgtcttctcatagagaaggcagaaaatataartaacttacaggaaatggaataattaaaactatttgacatagagaaggtataaagaaaaatgtaataaattatatgatgcaaaatgaccacatgaatattctaggtaacactaaattaaaatattcaatttatacttcagaaaagtaaaacaactttctttctctaagtaactttgctatctttaaaaatcagctttaatctgtatcactgttcaaacatgggtcataattattagtggatcataattaacatatcataactaactt

SEQ ID NO: 293784 - DNA, 623 bp, Homo sapiens
tccacagtaaaatcttattttatagacagaaatatttggtttcagttaaatatttgattcacttttgcttgtttatttgcttttaattcagtcaaagtaaagataaattcagatattaaattatgttttcaggttcttaataaggaaatattttatctatttcattttttggtggggggaggggcttgagaccgagtctcactctgttacccaagatggagtgaagtggtgtgatctccattcactgcaacctctgcctcccgggttcaagctattctcgtgctcagccttccgagtaactgggattacaggcatatgcygccaccacacccaactaatttttgtatttttagtagagacggggtttcacccatcttggccaggctggtctcaaactcctgacctcaggtgatccacctgccctggcttcccaaagtgctgggattacaggcgtgagccactgtacctggccatctatttcattttctactgaaaaaacatagaaccatcctcctatagaatgcattatttgaccaaacattaattttccaaaattttggtattttcatttttcaacaatttaattacatttgagtgactttattttcttgagatatatctaa

SEQ ID NO: 293785 - DNA, 564 bp, Homo sapiens
tcctttccgtcatggaaatctatcctcaaggaaataacttctcagtgttccatctgctattctactcctcctcagggattattctggccccctcccttccctacacatcaagctygaggatttgcccccacccaggactggcaaattagctttactcaacatgcccgagtcaggaaactaaaatacctcttagtctaaatagacactttcactgaataagtaaaggcctttcctacagggtctgagaaggccaccgcagtcatttcttcccttctgccagacacaattcctcagtttagccttcccacctcaatacagtctgataacagaccagcctttattagtcaaatcagccaagcagtttttcaagctcttagtattcagtgaaacctttatatcccttatggtcctctgtcttcaagaaaagtagaatggactaaaggtcttttaaaaacacacctcaccaagctcagccaccaacttaaaaaagactggacaatacttctaccactttcccttctcagaattcaggcctgttctcggaatgctacagggtacagccca

SEQ ID NO: 293786 - DNA, 588 bp, Homo sapiens
tgttcctccattttgtctttttcagattacataaaacagagcttcaactaccctctgccccctgccctcagccacctctaccccatccagcccaaccaaataaacatacaatttgagggaaagcagtgtgcttgctatgcaaactcagcttcaacacaaatgccctaactcctaactgagyagctatgtataaacatcctagagcccgcccctgtgcccactcctaccttcctacccctcacctaccacgtatggaagaatgggacttcctaaagggacagaaatatagtatgggatcatatatggtcagaagttcatatcctctgaccaacatgttcagcggattaagaaatcatagaattggccatggacggtggctcacgcctgtaatcccagcactttgggagaccaaggcaagcggatcacctgaggtcaggagttcgagaagagcctggccaacatggtgaaaccccatccctacaaaaaatacaaaaattagcagggcatggtggttggtgcctctaatgccagctacttgggaggctgagacaggagaattccttgaacccaggaggcggaggctgcagt

SEQ ID NO: 293787 - DNA, 351 bp, Homo sapiens
ggtcttcttccttacgcagaatctcagacaacaatccctgattaaatgggggaaaaaaacagaccaagtcacatttgcaggtatatgtgtgtggtttctgtcttccacccctctcctcctttgtttggtttaaccagctcgctgtgatgtcaagaacctcacactaattccttagggttctccgatatgaagtcaatgtgcttgccttccgggggatatgcattattttargactgttctattctgacactttatcatcactgtaataatcatcagtgtacagacatgccagctagcaaggtaggcacttgggaagaattgtgaaactgcaattaccaccaggtgcctcct

SEQ ID NO: 293788 - DNA, 632 bp, Homo sapiens
gttttaatatcaacctcatgatcaagaattgggttctttttaccaccctcacaattaattatgttaatgtttcatgccttaaaattagtctttataggagtccttagacaatcaataataatgatgataatgaagattaatcagactacatatgcagttcttaaaatgtcaaatacttttaacttatcactagttttaaactcattttaagttcattttatcctctgcagaaacctttgagttcattattttgcctgttcctgacttggtaactttggaaacttgcatgtgtctttgaagtaaattaggttgccatattaaagcttcctctctgatttctccccagctggttrgggaagaggacatcgagttaaactgtggttcttacagtgggagaatgttggtatctatgaatggttgctaccactttgctgttgagactatttaatcttcttttcacagggccaagacctagggtaaggcaagctagctgcctggggtgcaagatgtaagaaagcacacacttgtcaagccattctgtttacatttcatgccctagttgcttgttcacctcattctagtcccaccctgatctttaaaaaaagttttactcctggttgtctgccctgtct

SEQ ID NO: 293789 - DNA, 604 bp, Homo sapiens
catagctaaaaattggtccctgtaaaaatacagtttagaatttagtatacaattttgaaaagtaaagaagcagatcttctgtacttaccacatttaaagtataaaataattaaccttgaactttaaccaaatagccagcacaaatcttttttcaggtttagataatctccttgtcagggattcattgaagcccttgacaagscttccttgtagttaggcttttatccatttcagttttcttgattaggttatcttgagtcattagggggtttatttattttaatagacacttattggattcatgaaaagagaattcggtgacgaagaaacaagagctgaatattatctggctcatttcacacttcagaagagtctcaaccatctgaagagaaatcctttcacagttacaaaagtttgtttggggactttatgtgcttccatttagaaagcgaactgtctgtggttaataatatgagtttccttttgagatactcagaaaacatttccctttggttacatatgctgacattttctgtattgaagatgtgggtgagtaaatggccttttgcatttctgctgcaagaatctatgagtcattctcctg

SEQ ID NO: 293790 - DNA, 579 bp, Homo sapiens
ctttcaattgagttgaaaaaaaatctatgaaaatacttggaaaaagatttccaagcaaatgataagataccttgttttcattcttcctaaccttctaactctcccaagcttccagtttattgcaagaaaagatcaggtctgcgcaaatgtggcctctcacttgtaaaaacaaggcagtgttgtgttacagattagtttataaatccctggtggcttcacagttcagtgcctacagctgctgcagatgggcctgggtttttgtctcttcgcggtgctgcagccggcagttgaaggagaaaatggaatgatcaggttattaacatggaggccgcgaggaagaggctgcacaatgagaacagctggtgttgctgtcttggctgatgcagcagagataatcaaatcttgccttttttggggtaaaggcagaagacacagtggagagttagacaaacaatggcttatgatattatatggggtttttataatgcgtgtcaggaactttcattggcttacaagtgatgatatagaakttgttgaggtttgggaattatttttcacaaagtcattcgtgtttatgca

SEQ ID NO: 293791 - DNA, 579 bp, Homo sapiens
ctttcaattgagttgaaaaaaaatctatgaaaatacttggaaaaagatttccaagcaaatgataagataccttgttttcattcttcctaaccttctaactctcccaagcttccagtttattgcaagaaaagatcaggtctgcgcaaatgtggcctctcacttgtaaaaacaaggcagtgttgtgttacagattagtttataaatccctggtggcttcacagttcagtgcctacagctgctgcagatgggcctgggtttttgtctcttcgcggtgctgcagccggcagttgaaggagaaaatggaatgatcaggttattaacatggaggccgcgaggaagaggctgcacaatgagaacagctggtgttgctgtcttggctgatgcagcagagataatcaaatcttgccttttttggggtaaaggcagaagacacagtggagagttagacaaacaatggcttatgatattatatggggtttttataatgcgtgtcaggaactttcattggcttacaagtgatgatatagaatttgttgakgtttgggaattatttttcacaaagtcattcgtgtttatgca

SEQ ID NO: 293792 - DNA, 610 bp, Homo sapiens
tttctgtctcctttcccttccctcccccctcacatgtttgggagagaagccagaagttaacacatctttatgtcacttttcatctaaatatcattatctctgccagtgcttttgtgctatgcttttgtgttatcattggtcagtttccagggccaaagtcgcagagtgaattgcccaaacttaatagtttggcaattaggcttatgaatttgtagaggcagtctcttgcaatatccacagtgatcccagagttggggatgggggtgatgagggtacacagcacatactcacccttcaggacccatcctcccctttcccttcttggtscttttctgaccgaagtctcatccaccaccagggcaccttcttttagataattaaacccgtgtactcagccacacagagcagtggctttcagacttggagatttaattgaaattaaaattaaagaggggcccaatgtaggctttccaaccttttattttagaaaataaatttatttgaaaagttttagggaagctcctatttattgtcaatatcatttcataacatactctttgatatcagacagattaatgaaatggatagcctcagacaaaagatcatgtaa

SEQ ID NO: 293793 - DNA, 649 bp, Homo sapiens
aaagggctgccttttccatttgtgttcatgggctgggactcatttttttctactgatgagataatatttttcctrtggtggattggggctgctgtagaaatgaacccaggttgacaaatcatctaaagctttgaatggaaatctgtttcctggtgtgagctgctacacatgatttaagacaatgtctgttaagttgaagggaaaataatgagaaacctattacagaaatttgctgtgccatgagctttgttccagggtaagggagtctctggaagataggaaggctattgggtaagagcatgtatcctggaatcagggctggattcatgtcctggttgacaagcctctataaccttacctttatgagccccccttgtttggttagtaaaactgagtagtaatggttctgagttatataaagaggattaaatgattggaaattacataaaatgcttggcctaatgcctggcatgcaatgatgcaccataaacagtatcagctattattattgagatatgatgtgaactgaatgtgtgtgtgtgtgcctttgagggtgttttggaatttggatcctctgaagcaaagtatgctattaatatttttgcctcgaaaaaaatcaagaaggcatgcattcacgtataggcagcta

SEQ ID NO: 293794 - DNA, 554 bp, Homo sapiens
tattttaggccaggcacagtggcttacgtctgcaatcccagcacttttggaggccaaggcaggaggattgcttgagcccaggagttcaagatcagcctgggcaacatagtgagacctcgtctctacaaaaataaaaattaaaaaaattaacctggcatggtggcacacacctgtggtcccagctattagggaggctgaggtggaagaattgcttgagcctgagagtgcaaggcttcagtgagccatgattgtgccactgcactccagcctgtgcagcagaacaagaccctatcaaaaaaaaaaaaaaagattattttaaatgaggttatgctggtaaagatttaytaaacatttaagggttaaaatatttcagaaaagatgatctgataacaatgctgattgtacacaattgcatttatttgttactttccttcttcacaatactcagccaggtactgtgagatgtgcttattgctttggaagctgaggctgaagctctgtcaagcttgtctactaaaggcacgttataatataaaaagaaaccaaaaaaaatg

SEQ ID NO: 293795 - DNA, 1711 bp, Homo sapiens
aaaaaaaaaaacaaacacaaaaaaaacatgctttccactaaaaaaaaaaatcatacattgatgaatgttatttaatggttcatttgagtatcactccaaatcatctcagstacacgtctcagatcacatttcatctgaaatgagtcacacatttagttgcacctgaagtgaaaacctggagagttctttctcagtgtactgccctttctttacagctttgagtattttgtgttcatgcccgggttaggaaatcttgatggtgtctcctttcaattttttttctatgttgcaacctactctctatataaaaccaattccccatcccttgcattaaaggcttcagaatgtaaccccttcataaacagggagatttgattttaacttataaaccaatactttgtttcttggatacttcttcttcatctccaacttcatcttcagtgacctcagatccagtggtatattcttcttcttctgaaaacagtgactgttgtttctaagttaaaaaaaaatctattataaatgtaatattatgattttttattgaattctttcaaacatatttacctaaatttcttttgaatgaatcawtaggtaatatatatttaaaattgttatattattgttgtgttttattatgatttttagtaatcatttttataaatctattttatttcttctcttaccatgtcaaacttcatttgaaaaaacagtgattgttatagagttcacaatatacatttttaactaagaaaagtctactttaawattattttatttttaactggcaaataattgtatatatttatggaatacattgtcatgttatgatatatgtatacatgtggaataattaaatcaagctaattaacatatcatctcctcacatgcttgctacttcttcatggagagaacatttaaaatatattttctggcaattttgaaagctccaatatgttattattaactagagtcaccatgctgctcaatagatcactagaatgtattgctcctgtctaattgaacgcttgaaacttttgactaacatttcctctttcttcatccactgccctccagcctacaccagcctctggaaactacccttctactgctactcctatgaacttggcttttttggattccacatataagtagaatcatgcagtattwacatggcagtgcagatatctcctcaacacactggttcaattcctttggatatatacccaacagtgggattctggatcacatttggtaatttcwtttttttgtttttttgaggaactccatactattttgcaaaaatggctgtactaatttacattatcaccaacagcatacattttcaccaacacttctctttcatctttttgataacagccattccaacagctgtgaggtgatatctctgcagttttaatttgcatttccctgatgattagtgatattgagcatttttaatatatatgttggccatttgtatgtctttttgagaagtgtctatttaggtctttttcctattacaaattttagatttatttgtttttttgctattgagttgtttcagttctttatacattttttggatatcagatccttatcagatgtatggtttacagatattttctcccaatctgttggttgtcacttcactctgttaactgtttcctttgctgtgcagaagctttttagtttgatgtaataccgtttg

SEQ ID NO: 293796 - DNA, 541 bp, Homo sapiens
acatggcagtgcagatatctcctcaacacactggttcaattcctttggatatatacccaacagtgggattctggatcacatttggtaatttcatttttttgtttttttgaggaactccatactattttgcaaaaatggctgtactaatttacattatcaccaacagcatacattttcaccaacacttctctttcatctttttgataacagccattccaacagctgtgaggtgatatctctgcagttttaatttgcatttccctgatgattagtgatattgagcatttttaatatatatgttggccatttgtatgtctttttgagaagtgtctatttaggtctttttcctattacaaattttagatttatttgtttttttgctattgagttgtttcagttctttatacattttttggatatcagatccttatcagatgtatggtttacagatattttctcccaatctgttggttgtcacttcactctgttaactgyttcctttgctgtgcagaagctttttagtttgatgtaataccgtttg

SEQ ID NO: 293797 - DNA, 468 bp, Homo sapiens
cttggcgtccagcagcttgttaaaattaccatttgagtgcttccgctaggtctggctacagcagcttccaccacacccaggcaagcagaccccatgtctgcctcactggaggggcctggctgtctagattttggggtggctgtttgccctgcagtttcagttgtctgatgaagctaagaaagttgctgattttcagtttatcctttttctgatggtaaggatgggagtgacccaggctctttgcttaatagaatgaaaacaagaagtcatgtaagagatctatgaatatactttgagtttgccttctgccttctcttgggagggattcctctcaagtgcctgcgtgtgtttccagttgtttgccactttattcaccatgcatgaacctgcckgcttttactctaatccaaacaatggcaaaaaaaaaggtgttgactgatcagaagtagtaccaatattgggaaaaat

SEQ ID NO: 293798 - DNA, 604 bp, Homo sapiens
gcagcttccatgagagctgggagggctgcagggaaaggggctgatggctcaaatgccacacattctggtcaccattactaaatatttgtaaygagggatttactgtattagtccattttcatactgctataaagaactgcccaagactggtaatttataaaagaaagaggtttaattgactcacagttcagcatggctcaggcctcaggaaacttacaatcatggcagaaggtgacagggaagcaaggcaccttcttttttttattattatactttaaattctagggtacatgtgcacatggggataacaattcaagaggagatttggatggggacacaaagtctaaccacatcagtttatatagcagggaagaaatgtaacaatgtgtgggaaaacaggaactagggaggggcaaggaagcaatcatgatggatgagtggtccaacattccactgtttgaatgtggtgatctggtaagtttcagttctttgatatttcttttgagagtcctgaaggtcatttcctgaagaagaaactcagataaaacaaatagtttcaagctttaagaccggaagtgtcaatttcttttttttttttttctca

SEQ ID NO: 293799 - DNA, 277 bp, Homo sapiens
agtccattttcatactgctataaagaactgcccaagactggtaatttataaaagaaagaggtttaattgactcacagttcagcatggctcaggcctcaggaaacttacaatcatggcagaaggtgacagggaagcaagrcaccttcttttttttattattatactttaaattctagggtacatgtgcacatggggataacaattcaagaggagatttggatggggacacaaagtctaaccacatcagtttatatagcagggaagaaatgtaacaatg

SEQ ID NO: 293800 - DNA, 552 bp, Homo sapiens
caaaacctccaagagaatctgtctctcaggacggaggacaggaaaaaatcccctcacccatatgacacaggaagtgtggagagaatcctcataagatttttccccggtttttttccccctcctggccctgcccgaaggtcggttycagctacataatgtgctaccatagagttgagcacccaagaccccaagaggaaagtgggatcaggaaaggagggtttcacaaagagtgtgtggggtacccgcatagatttttctctctctttctctccacagtgatgtagcacagcatgggggttaaaactctagagagcaattctcaggggaaaatataatcaacagaggcccattccaacatgatccaggtgttgggatggttagagagactttaatggctctattacaacagcgatccatgaagaaaaggtgaatattttggaaacaggtggaaatataggacttttcttcagaaaaacagaaattacaaaacagaagccattgtgcattttaggactgcaatatgtgtgatctgaaatttaaaaaaattaccga

SEQ ID NO: 293801 - DNA, 552 bp, Homo sapiens
caaaacctccaagagaatctgtctctcaggacggaggacaggaaaaaatcccctcacccatatgacacaggaagtgtggagagaatcctcataagatttttccccggtttttttccccctcctggccctgcccgaaggtcggttccagytacataatgtgctaccatagagttgagcacccaagaccccaagaggaaagtgggatcaggaaaggagggtttcacaaagagtgtgtggggtacccgcatagatttttctctctctttctctccacagtgatgtagcacagcatgggggttaaaactctagagagcaattctcaggggaaaatataatcaacagaggcccattccaacatgatccaggtgttgggatggttagagagactttaatggctctattacaacagcgatccatgaagaaaaggtgaatattttggaaacaggtggaaatataggacttttcttcagaaaaacagaaattacaaaacagaagccattgtgcattttaggactgcaatatgtgtgatctgaaatttaaaaaaattaccga

SEQ ID NO: 293802 - DNA, 574 bp, Homo sapiens
acaggcaaatccataactcatattttatgcatctctcatttcaattaccaaatgtgtccatttcttccctttctctctgttaatctctcactaataaacaatcttgatgtatcagacaataaggagaatgcatcttatagatgcatcagtttgcatcagctctcatccagaaacctgaattccagaacaaataacatgggtggagtcagcacagagagctcggggactgctggtttatggcatactgtatgtgtgtgtgtgtgtgtgtgtgtgtgcacacgtgcacgagtctatacagtataatttccaacaagatattaacaaggctaatagagctgtcaatgaatgtggatcgtgtaatgatttgatgtttgtctttgctacaagggagagagaaaaggtccagtgccattacaytgggagggcccatcctagtgattgcattcatatgataaaaaagacactgatgtcactgacaattttgatggacaatggcttggtagaaagtccttgtctgtctttctatctcatttccagtgagtcacaactgaaatattaaaccaaagtagccaaa

SEQ ID NO: 293803 - DNA, 584 bp, Homo sapiens
caggacaggcagtagtaggaaaatgatgaatcttccagaaatcctcgagacttgttcattaatctgagaatgaaagagaaaatgtcagaaaacttgaaaaacattaattttgaacattaggtggactgaygggagcctggaattgcctcattacttgctgccccgtgcttaaggttgtaaaccaaatgaggtgaaggggcagatgtggccacagaggcaggtgtgggaccagcagtcaggagacctgtgttcctaccttggcaatgttgccccagccaggagattttgcatgaaaacaatcttacttctctggcttcatgttcttcctctggacaaatgtagctaataacagcttatgtccttggctcagagaaattgcagaaggcctaagaagtgatagttgttactagagtgatttatatagcagaaggggtttggaaagtacaaatccacatgctaatgaaatcatgggcgttggagagaatcatttggaaatgtaggaaccataacacctacccagcttgtccactaatctgggctactgatcatctaccccatgcatgtcctggctttctcacatcctg

SEQ ID NO: 293804 - DNA, 586 bp, Homo sapiens
aaaatgtttttacagttgttcacctcacctttaaattacatatgattccagtgatatttatattatatgacagtttttctcagcgtgtgatcctagagaagcaaaaatgtcgattctcaaaccccaccctggatctcctattgaatcaggaactccagagatgggacccaccgcaccttccagatgggaatgcacactaagtttaagagacactgctactccagagcatagaaaaggtttaagagtaccctgtgtgccgggggaggggtggtggtagtgatgcrttgttttgttatctctctcatctatcatttatctatctatctatctatctatcatctatcatccatctatcatctatcttaagtatatagattgtgcaagtttctaaattgctggaattttttgtagatttaaagatgaataggtattgaattttatcaagcattttcctgaatgtgataaaaggatttcatgaattttcttctttattctagtaatatgatgatttttacatgttaaatgttgcagtcttgccttaaaccttgtttgatcatgatgcattatacttttaagatgctgttag

SEQ ID NO: 293805 - DNA, 586 bp, Homo sapiens
aaaatgtttttacagttgttcacctcacctttaaattacatatgattccagtgatatttatattatatgacagtttttctcagcgtgtgatcctagagaagcaaaaatgtcgattctcaaaccccaccctggatctcctattgaatcaggaactccagagatgggacccaccgcaccttccagatgggaatgcacactaagtttaagagacactgctactccagagcatagaaaaggtttaagagtaccctgtgtgccgggggaggggtggtggtagtgatgcattgttttgttatctctctcatctatcatttatctatctatctatctatctatcatctatcatccatctatcatctatcttaagtatatagattgtgcaagtttctaaattgctggaattttttgtagatttaaagatgaataggtattgaattttatcaagcattttcctgaatgtgataaaaggatttcatgaattttcttctttattctagtaatatgatgatttttacatgttaaatgttgcagtcttgccttaaaccktgtttgatcatgatgcattatacttttaagatgctgttag

SEQ ID NO: 293806 - DNA, 601 bp, Homo sapiens
tttagttcagttttttggttgtttattgctaaaatatagacatacaactgatttttgtatcttgatcttgtatgttgcaaccttgccaatctgaaaattgatacattggtaactcaaagttatcaacattgttgatattagcttaactagtttctaatatattttttagcattttccgtaaacagaattatgcaggtggtatttatttctttttcttacttaaatgcctgactaaaacatccagcgcaatgttgaatacaagtggcaagagtagaccttcttgtcagttttctaatcttacaggaaaagcatttaatctttcaccattaagtatgatattagctatgagtttttagtaaatgccctttatcaggttgaggaagtttctttctattcctagttgtagaattttaaaaatctttaaattatgaaagcctactggattttgtcaaaagttcttctatgtctattgaaatgaacatataattttgatcatttatacacttaattgattgattttcttatgctaaaaagaccttgcattcctgggattaatcccrgttggttacagtatataatcctttatataacttgctgaatt

SEQ ID NO: 293807 - DNA, 555 bp, Homo sapiens
taaaagtagggtattgaagtctccaactctgattgcacactatttttctyttttttgtcaatattatgttcagatatattgagattttgttgttagctgtgtatatatttataattgttatatttcctttattgtctaaagtcttttaacttttgtaataatttttgactgaaagtccatttatttctgatactgtagctcccactctctttgggttactattttcacgaaatttcttttattttacttttaacttagttgtgtctttgaaattgagattcttacagacgacatatagatagatcatattattttagccatactgtcaatctctgactattaattgggggttttaatttctatttaaagtttaacttatatttaaattaattactgataagaaagaaattatttctgatattttgctatttatgtcctatatgtgttatgtctttttttgttcctcaagtattgctttctttgatacttaatgaatttttttagtgccctgtcatcattgctttctaatttcttttctgtacactttaaaagtta

SEQ ID NO: 293808 - DNA, 555 bp, Homo sapiens
taaaagtagggtattgaagtctccaactctgattgcacactatttttctcttttttgtcaatattatgttcagatatattgagattttgttgttagctgtgtatatatttataattgttatatttcctttattgtctaaagtcttttaacttttgtaataatttttgactgaaagtccatttatttctgatactgtagctcccactctctttgggttactattttcacgaaatttcttttattttacttttaacttagttgtgtctttgaaattgagattcttacagacgacatatagatagatcatattattttagccatactgtcaatctctgactattaattggggkttttaatttctatttaaagtttaacttatatttaaattaattactgataagaaagaaattatttctgatattttgctatttatgtcctatatgtgttatgtctttttttgttcctcaagtattgctttctttgatacttaatgaatttttttagtgccctgtcatcattgctttctaatttcttttctgtacactttaaaagtta

SEQ ID NO: 293809 - DNA, 556 bp, Homo sapiens
gcaaggccagagcaagattcttccatcttttatgaaagagccttttatgaaagaggccttccaaccaaaccaattctcttctggtctagtcactatgcacactttatgccagagagagtgtgagtgagtgagtgtgtgtgtgtgtatgtagcatttcctttgtggaaggtatactgctaagagttttatgtgctttatctccgttcatcttcataagaccctatgacctggatagaattattacctcaattttactgataagaaaattgaggtgtattgttatattacctattttacttgtttctgaggttctgttgaataagagatgtattaatgatagcttttggggggagaagaaaactacaaaattaaacatacatactgattttaacacacctatttgaaaagaatgtaaatgtgaaatagaggatatgtrtataattgtctccattttacagatagggaaaccaaagactaaggttaaattactgcagaagatgatgtcaaagactgtcttcctaaactacatgttatagtgcctctcactgtgggtgaa

SEQ ID NO: 293810 - DNA, 619 bp, Homo sapiens
gggtgagtggtgcggttcattttacctgggtaaaaaatgggattgggtttgaggcccaacttaggaaggttagagtttttcctaatatttaaggggttagaggycccccttggtaaagtccctcttggttaaaaatgaatttggcactgtgggatgttaaccgctattctcattgaactaatcttccttgtactctttgctgactatggtgggtgtcagaatttggcacatacaggatcactggacatgaggagcttttttctccccaaaggggcacagttgacaactgaagggactgctggtaaagatcccttcacgatgtgttgctgcaatgggtgagtctttctctgctctccccaatgttcttgccttccccaccccatcgcaggcaatgcttttctgtctctctctctcctttccatttcttcccaccttttctgtcacccagggcaactgtccactcttccatcttgcccagagaccacgtgttgaaactcctggttggaggtcattccaccctactttgagtggatcaaacatgacagggcccaacctggggcaagtttgagccttgccagtttgatattgggtactaagcagagtggctaatgtctaggtt

SEQ ID NO: 293811 - DNA, 619 bp, Homo sapiens
gggtgagtggtgcggttcattttacctgggtaaaaaatgggattgggtttgaggcccaacttaggaaggttagagtttttcctaatatttaaggggttagaggtcccccttggtaaagtccctcttggttaaaaatgaatttggcactgtgggatgttaaccgctattctcattgaactaatcttccttgtactctttgctgactatggtgggtgtcagaatttggcacatacaggatcacyggacatgaggagcttttttctccccaaaggggcacagttgacaactgaagggactgctggtaaagatcccttcacgatgtgttgctgcaatgggtgagtctttctctgctctccccaatgttcttgccttccccaccccatcgcaggcaatgcttttctgtctctctctctcctttccatttcttcccaccttttctgtcacccagggcaactgtccactcttccatcttgcccagagaccacgtgttgaaactcctggttggaggtcattccaccctactttgagtggatcaaacatgacagggcccaacctggggcaagtttgagccttgccagtttgatattgggtactaagcagagtggctaatgtctaggtt

SEQ ID NO: 293812 - DNA, 499 bp, Homo sapiens
ttgttttcctacaactagacggtcccgtatggggctgatggaaaacagtgacagatcatcaggcattagattctcataaagagcatgtgacctagatccctcacacatgcattcacaatagggtttgtgcttctataagaatctaatgctgctgctgatctaacaggaggcagagctccagtggtaatgcaagtgatggggagcagctgtaaatacagatgaagcttcactcactsacctgctgctcacctcctgctgtgtggcccagttcctaacaggttcctaacagttcctaacaggcccagttcctaacaggccacgaactagtactggcccatggcccaggagttggggacccctgctttgcatggtggagaatgctacaactcctgccactagattcaccaaactgtcatttcccagttctagttcaataaagcccagacagatacacatctagatccatcagctgtggccaaagaagtcacacatgaacatg

SEQ ID NO: 293813 - DNA, 588 bp, Homo sapiens
ctcctcttgctcctttggtatatttgatcgttactgttgtttggttttatgtaacataaccaaaataccactgcgatcatttgtaaagagaaatacaaatatcaaaggaaccagattttttagttccaatcactgacccactccatctgtgtaaactccccgaactcttaattgtgtgtacatttttataggtggsaatttggtatccattgttcctcactggaaaaatatccatttcattaggtagcattttagacttggaaagacctgtgaattattttcttccttctccaggacctcgcacagtcgatgcatctaagttcttcatttccagataagattattaagtggtatgtgggcttgccaggactcctacatagatcatgagggaggcagggttaaaaactctgccttacacatgccatcttgaatctcatattctgaaaggaagagttagctgctgctggaagagagaattaatctgcagaagcaaagaccacgaattgctgagactgaagagtctttctatcacaagcagattctgccatgtttggtggactgacagaccattttaggaaggttccagag

SEQ ID NO: 293814 - DNA, 578 bp, Homo sapiens
ctctgccttacacatgccatcttgaatctcatattctgaaaggaagagttagctgctgctggaagagagaattaatctgcagaagcaaagaccacgaattgctgagactgaagagtctttctatcacaagcagattctgccatgtttggtggactgacagaccattttaggaaggttccagagcaayagcgagatttttcataatgaagctaatcagccaccatggtggtgagagtcagcaggcaaaaagaggatttgccaaaaataaacagtgggaaatctttcctcacaatctgcctggagctggtggggagaaggaaagagatgcagacaagctttgttatgctgagtgaaagaagccagacataaagaccacttattgtgtgattccatttatatgaagtatttggaatagacaagtccatagaaacagaaagcagattagtggctgccagggaatgggggtgggcaaggatgggggatgagtgctcattaggtaagggatttcccttgggagtaatgaaaatggtctgaaactagatagtagtaattgttgcacaacattatgaatttgcaaa

SEQ ID NO: 293815 - DNA, 625 bp, Homo sapiens
agaaagaaaaaactggctccagttcttatggtcttccctttgtgctcccagtggggtataggacagcagataacagtctagaggtgaaagaggagaaagaggaatactccaagagtgagaaggaagatgaggcttctccctctcccaggattatgccaggacaggggccttcataggccactttgcacttgtgttagcaagtgcttgctcccatatgctcaaagagctagacaggcttggactgaaatctagctctggccctctccagctatgtgactcttgacaagccrtatcaccaaacattctggagtgccctactatgtgtgactgtccaaggccctccacacatcatgtgcttcaatcctcacaaacttcggaggcagagccattatctcctctaatttccaaatgaggaggctgagacttagtagggttaatgcagttgctccaaatcacacaggcagtgagaacagttaaggccgttaacctctagtttgtgtctccacttctaaaatggggagaatagtaactactttgcaagagcatcacaaggattaaaggtgctcactaaatggtggctgtcataaatgataaaactcacaagatcctaataaggtagcacaca

SEQ ID NO: 293816 - DNA, 625 bp, Homo sapiens
agaaagaaaaaactggctccagttcttatggtcttccctttgtgctcccagtggggtataggacagcagataacagtctagaggtgaaagaggagaaagaggaatactccaagagtgagaaggaagatgaggcttctccctctcccaggattatgccaggacaggggccttcataggccactttgcacttgtgttagcaagtgcttgctcccatatgctcaaagagctagacaggcttggactgaaatctagctctggccctctccagctatgtgactcttgacaagccatatcaccaaacattctggagtgccctactatgtgtgactgtccaaggccctccacacatcatgtgcttcaatcctcacaaacttcggaggcagagccattatctcctctaatttccaaatgaggaggctgagacttagtagggttaatgcagttgctccaaatcacacaggcagtgagaacagttaaggccgttaacctctagtttgtgtctccacttctmaaatggggagaatagtaactactttgcaagagcatcacaaggattaaaggtgctcactaaatggtggctgtcataaatgataaaactcacaagatcctaataaggtagcacaca

SEQ ID NO: 293817 - DNA, 576 bp, Homo sapiens
ttatttgtgtacatgtgtgggtatttaattcaaagtggttttatcaaatgtgtagagtcatgtgaccacagtcaagaaaaagaacagtgccatcaccacaaggatatgcaatcctctgtgttgctcctttataccaaacccgcttccgtcttcatctgctccatcccaaggtctgaacccatggcaaccaaccagtaatctgttctccattcctatagtgttayttcaagaatgttatgtaaattaaacaatataccatgtgacctcttgagattgacttttctcactcagcgtaattctgatagtggtgtagtgcaatatagaagtagtccattctcacaggcgtgtggagatatctcattgtgattttaatttgcacttccctaatgcctaatgttattgaacatatttcctggagtttatttttctctttttctagttttatgatctgaaaacattttttatctccataggttattggggaacaggtgatgtttggttacatgggtaagttcttcagtggtgatttgttaagatttttggtgcacccgtcacccgaacagtatacactgcacc

SEQ ID NO: 293818 - DNA, 515 bp, Homo sapiens
tcattgtgattttaatttgcacttccctaatgcctaatgttattgaacatatttcctggagtttatttttctctttttctagttttatgatctgaaaacattttttatctccataggttattggggaacaggtgatgtttggttacatgggyaagttcttcagtggtgatttgttaagatttttggtgcacccgtcacccgaacagtatacactgcaccctatttgtagtcttttaaccctcaccccttcccctgagtccccaaagtccactgtatcattcttatgcctttgcatcctcgtagcttagctcccacttataagcaagaatatatgatgtttgattttccattcctgagctacctcacttagaataatagtctccaatctcatccaggtcgctccgaatgccattaattcattcctttttatggctgagtagtgttccatcatatatatataccacagtttctttatccactccttgattgatggacatttgtgttggttccacgtt

SEQ ID NO: 293819 - DNA, 515 bp, Homo sapiens
tcattgtgattttaatttgcacttccctaatgcctaatgttattgaacatatttcctggagtttatttttctctttttctagttttatgatctgaaaacattttttatctccataggttattggggaacaggtgatgtttggttacatgggtaagttcttcagtggtgatttgttaagatttttggtgcacccgtcacccgaacagtatacactgcaccctatttgtagtcttttaaccctcaccccttcccctgagtccccaaagtccactgtatcattcttatgcctttgcatcctcrtagcttagctcccacttataagcaagaatatatgatgtttgattttccattcctgagctacctcacttagaataatagtctccaatctcatccaggtcgctccgaatgccattaattcattcctttttatggctgagtagtgttccatcatatatatataccacagtttctttatccactccttgattgatggacatttgtgttggttccacgtt

SEQ ID NO: 293820 - DNA, 617 bp, Homo sapiens
aaatataatttttgacgcctcagcctcacagtgaatctttttttaatttaattttttatttcaatagttttgagggtacaggtggtttctggttacatggataagttctttagtggtgatttctgagattttggtgcacctgtaccctgtatccagagcagtgtacactgtacccagtaggtagtcttttatccctcatctcccttctacactttccttccaaccaagtctccaaaattccattatatcattcttatgcatttgcatcctcatagcttagctcccacttataagtgagaacatttgatatttggtttttcattcctgagttgtttcacttagaataatgaccaccagctccatccaagttgctacaaaatacagtatttcattcctttttatggctgagtagtattccatagcgtatatacacctcattttctttaactactcattggttgatgggcacttacrttggttccatatttttgcaatcatgaattgtgcctcacagtaaatcttactacattatagatgctctgctccacccaggtttctctggagaaagtgctctttgctgagggaaggtctccaaaatcagctctttgctgagggag

SEQ ID NO: 293821 - DNA, 593 bp, Homo sapiens
tacaatcaaacatataatcgataaatcacagagaccaataaatcaggaaggattctaaagatgtgaaactgaggctcacagaggttataacttatgaccgagttgggattcaattccagggtatcttactccactccagagcactttccatgttccctctagaagagatggtggaattgaaagaatgaagggacaagaagagacacgacactgatatcagactttggttgtagaatgtatctttttggtggagatcatattttcctatttctttcactcaaatctactatagagagtgttgaaaggtatgataatgtctatgacagcaaaatggtatgatttgtgggggttgaggggagttggggatggttaatgagtacaaaaaatagaataagagctactatttgatagcacaacygggtgactataatcaataataatttaattgtacattttaaaataactaaaagactaaaattgggttgtctgtaatacaaaggataaatgcttgagggggtgaatatcccattctctataatgtgactatgatgcattgcatgcccgtgtcaaaacatctcatatacctcataaca

SEQ ID NO: 293822 - DNA, 579 bp, Homo sapiens
ccaggtcagtttcatgtactgtgcccctctccattccttccttattcagcacatatatctgagtggttactgtgtgcctggcactgctctaggcattgcacttgtcctcatggattttacactctatgggggaaagtcagaaaacaaataatatgtaatacataagatgctggtaagtgctatgaagaaaaatgaaatacagaagaggggttaaagggtgacaggggcgctattttaaatacaatgatcagggaaattctaatacagcaacatttgagcaaagatctaaaagagatgacgatgtgcatggatatttgtgggaaaagtgttccagacagacrgaagagccagtctagagccctggggcgaaatgtgttggtgtaatgaaggaacagcagaggccagtgtggctgaatcaggggagagtgatgggaagtgaggacaaaaagatccttggttggataatgatgttggttagatcatgcaggaccttcacggccacataaagacttctgacgtttaatccaagtgaaacgggggccaatggagagttttaagcataggagtaatgtagtctga

SEQ ID NO: 293823 - DNA, 571 bp, Homo sapiens
aggtctttattcattgtagaaatgtttgaatatgcagaaaattacagaggaaaaatcagatttactcataatctcagcattccaatataacacctcctttggtgtttaatggtatatttttgtaccatattttttctactttataaaaatataattgagatcatattgtatataaaactttgaaatctgctttttttgcttaatactggttcaaaaacatttcatgtaatttttaaaatccttagaaatgtaattttagtggctgtgtaatattaaatcatatgaatgtgacatcrtttcccagggatttcccagtaagtaattctgtgataaacatctttaagtttctctttctgcatttcagattatcttttgaagacaggtttctagggctccccagtgaaagttaaattgtttggttaattaaaagacaacataatagttagcaattttacctttaactatcttattgaatattgatatatcagcaaagaaatgacttttctatagctttatctcttataagacctttctgagttatgaaattgattttaaaaaaataatccaaatc

SEQ ID NO: 293824 - DNA, 505 bp, Homo sapiens
tgtaggccagaagagaataaaacaatattttttaagggataggggaaaagtatcaactttgaattctgtaaccagcaaagatatctttcaaaaattaaggtgaaatatagactttttcagacaaacaaatctgggagaatttattgacatcaggtttctaaggtccaaagagcttctttaacaagaaatgttcatcaagcaaaacaataaaaaataaatttaaaaaaggcaacaaatggaaatttgaatctacaaagtgttgaagaatgtttgagtaggaaatatgtggataaatataagagactttttttctaatttttgatctcttcaacatgtaattgactttcaaaacaaaaataacaatgtattgtgtgttttaaaatgtatatagaattaaagtggatgacaatagagccaaaggcaggaaaagagaaatggaagtayattgttgtaggaaccctatactacatgtgatgtggtattatttgaagatagattgtgataa

SEQ ID NO: 293825 - DNA, 608 bp, Homo sapiens
gttggccgggatagctttcccggaggtcgcgtcccccagcggaggcggcgggaatcgcggaggttttgtgctgcggctggggtctttctggccgtcccgcctctagatgccgggtggcagggagccggtggcggtcggccatgtgaaggtggccatcttggccggccagcgagggctcctcacggccttccttcggcgtccctgcccggctcgttgccggccccgggatatctgaggggcgcaggcccaccttctagtcgtttcctggtgaatggctctgctgaagatggccggaaagcagattaatgaaggtgctgccatcgatttaaacaatcgccctcctgcccgctcccctgcgctaaagtttctgagggatcctcacccttcgtggttcgtggacttaaaagtggaggcagcgctccagcctttccctccagagagaaaggaggccgctcccaagtccgtccttgccccgtggccttcctgttcctttgamgggggggggaatcgatgtttcaatcctctgttcaggagaatatggaacgaacatttcttttttggtgggtgggggctattcgttcccttgaatgtgcttaagcagatctctt

SEQ ID NO: 293826 - DNA, 1243 bp, Homo sapiens
caatcctctgttcaggagaatatggaacgaacatttcttttttggtgggtgggggctattcgttcccttgaatgtgcttaagcagatctcttgacggcgtggaatgggctgtttcatgaagctttcactttaaaatgtccacctgcgtttgtcccagttttgcccaataaaggaattacagggaaaaagagcgaaacaaaacttgagccagcaaggagtatggagtcccgtttggagggagcccgccttgggggcgggggtctctgcagcctgttctggggctgggcctcggtgcaggtctggtcgggctggtggcctggtggccctgagcggagcgcgtgacaagaacgccgggtttaatgaggttctcagggaacggcctgctcctagcatgggatgtactttacgctggggaggtgaaggagacccctagtaacagtctccagctgcctmctgctggcggcagtagaacaaggtgcattcccaagaacaatcctctccgtcggtgcaggaggaaaggtgggatttgctaaaggctcagtgggaaacaaaggaagcacttgggctgtgctgggggcatccacaaagaagataaagggctcctccccagactcagtgaccwcaatcctctgttcaggagaatatggaacgaacatttcttttttggtgggtgggggctattcgttcccttgaatgtgcttaagcagatctcttgacggcgtggaatgggctgtttcatgaagctttcactttaaaatgtccacctgcgtttgtcccagttttgcccaataaaggaattacagggaaaaagagcgaaacaaaacttgagccagcaaggagtatggagtcccgtttggagggagcccgccttgggggcgggggtctctgcagcctgttctggggctgggcctcggtgcaggtctggtcgggctggtggcctggtggccctgagcggagcgcgtgacaagaacgccgggtttaatgaggttctcagggaacggcctgctcctagcatgggatgtactttacgctggggaggtgaaggagacccctagtaacagtctccagctgcctacwgctggcggcagtagaacaaggtgcattcccaagaacaatcctctccgtcggtgcaggaggaaaggtgggatttgctaaaggctcagtgggaaacaaaggaagcacttgggctgtgctgggggcatccacaaagaagataaagggctcctccccagactcagtgacc

SEQ ID NO: 293827 - DNA, 621 bp, Homo sapiens
caatcctctgttcaggagaatatggaacgaacatttcttttttggtgggtgggggctattcgttcccttgaatgtgcttaagcagatctcttgacggcgtggaatgggctgtttcatgaagctttcactttaaaatgtccacctgcgtttgtcccagttttgcccaataaaggaattacagggaaaaagagcgaaacaaaacttgagccagcaaggagtatggagtcccgtttggagggagcccgccttgggggcgggggtctctgcagcctgttctggggctgggcctcggtgcaggtctggtcgggctggtggcctggtggccctgagcggagcgcgtgacaagaacgccgggtttaatgaggttctcagggaacggcctgctcctagcatgggatgtactttacgctggggaggtgaaggagacccctagtaacagtctccagctgcctactgctggmggcagtagaacaaggtgcattcccaagaacaatcctctccgtcggtgcaggaggaaaggtgggatttgctaaaggctcagtgggaaacaaaggaagcacttgggctgtgctgggggcatccacaaagaagataaagggctcctccccagactcagtgacc

SEQ ID NO: 293828 - DNA, 581 bp, Homo sapiens
ttgagaaggaggttcctaggctgtgtgtcttaagagcaccttctatgtgaagacagaccaagaagaaagaaatgtaggccacgtctccaaatttgtggcagttctttagggccaaagcttagatatctcggatggcctcagaggcaagctagttctagtgggatcagaaacaagtactatgtgaaccccctcattattaggctttttgtattttgtttttatttctatgtttttctcttttgatacttaaatctttttacagtcccaataaagaagtcctgaatggaagaatagatatggtacagtgaagaagacactgaaggagataataatatgatgacaatagctacactttattgtgacaggcactgttgtaatatctactactcacaacagctctatttctcttcctgttttacagatgaagaarctggcatgttattcgtccatgtcacacatcaaatcagtagtggagctagggccttgagcctggtctgacctctaaattcatgccccttcttatagccaaacaataaatactgcatactccctgaggtcgttaatattaacaatttggttta

SEQ ID NO: 293829 - DNA, 1104 bp, Homo sapiens
cgagaccggtgtggccccccgccctgctcttggacctgccaatctccagggtttgttttcttgagactcctgacgctgcctggcccgagtcagcactagggattcctgatctctgcatatcccttcccagccatccaagacagcaagagctgttgcttctcttctcaaatttctcccttggcttcttgattsagagtttcatcccagctatggtttaaaaaacaaacagcaaacaaacaaacaaactaaccacacactcaaacaaacctcagactgcacaatggaagcactgcctggaatcataaagatcatttgttcaatgtccctttttctcactgccaggccagtgctctcgtctgcaccatggaacccattatgacttgaacctttccagattgattccccataaacctaatgaagacattggaaaggtgagctgaggtaaggtcgtgaagaaactctaatggagccctatggagtttggagttttgacagcatactggggacaatgggaagccattgacagagaaaagcaggacagtgccwtttttctatgaactcgtggatatacatgaataaaaatctgtcttttctcttgctaatctcttttttcagcttagctcacagtttaattcatggtcaatctggctaacattgaatggatttattataaggtttgaaaatgagttttaatatcaatagcatttcaatgctaaactagagtttgccattctctcttaaaaggataaagtttcttggattattgttctgctcttagtaggaagttatgaaagtttgtttttcttttactttttgaataatctactgaggaaacaaggattctctgtcttatcagaataatttcctatgctttatgttatctttatcatgtttttgwttatttaagagaaccaaatctttttttctaaatgacctatgattctatttcatcaagtgttcaaactttttgacatttttgacaactttccaaatgcaattctaaatgaattcttcttaacttcaaactgattttgagatcaagacagcgcctgaaaaatctgaaagaatttattctcttgccttgtaaaaagagagatgttaaac

SEQ ID NO: 293830 - DNA, 558 bp, Homo sapiens
attgtctaaagcaaccaagtccaagattatggaacttttgggttcaagcagacctggatccagctgctcaacagccttcattaggaatttgttcctcccttgccagtttctcagccctgcttgctcatggaaaagagagtccagaaaacccaggttcacagtctcaggagaggcactctctcctagcatctatagaaacctttaaacggactcacgattggytgttcttggtcatgtgacactactatgagtgggtctcagtcccttgattgacagccccacctgaattacatgaagtgggaaagagaaaattcccatatggaaagagtctggtagtagaccaaataccaatatatctgctgtaaacccccaccaaagaatgggactcacaactggctggtacaatttgtaatatacataagaaaatagcagacaactacaagcttcagacaatgtaaccatgggcattatatggtctgaaagaaacagaggcaacgttgcagtgaaaatttcaggagactcaacagcctttccttaaacctatgaggcaaggttagt

SEQ ID NO: 293831 - DNA, 558 bp, Homo sapiens
attgtctaaagcaaccaagtccaagattatggaacttttgggttcaagcagacctggatccagctgctcaacagccttcattaggaatttgttcctcccttgccagtttctcagccctgcttgctcatggaaaagagagtccagaaaacccaggttcacagtctcaggagaggcactctctcctagcatctatagaaacctttaaacggactcacgattggttgttcttggtcatgtgacactactatgagtgggtctcagtcccttgattgacagccccacctgaattacatgaagtgggaaagrgaaaattcccatatggaaagagtctggtagtagaccaaataccaatatatctgctgtaaacccccaccaaagaatgggactcacaactggctggtacaatttgtaatatacataagaaaatagcagacaactacaagcttcagacaatgtaaccatgggcattatatggtctgaaagaaacagaggcaacgttgcagtgaaaatttcaggagactcaacagcctttccttaaacctatgaggcaaggttagt

SEQ ID NO: 293832 - DNA, 558 bp, Homo sapiens
attgtctaaagcaaccaagtccaagattatggaacttttgggttcaagcagacctggatccagctgctcaacagccttcattaggaatttgttcctcccttgccagtttctcagccctgcttgctcatggaaaagagagtccagaaaacccaggttcacagtctcaggagaggcactctctcctagcatctatagaaacctttaaacggactcacgattggttgttcttggtcatgtgacactactatgagtgggtctcagtcccttgattgacagccccacctgaattacatgaagtgggaaagagaaaattcccatatggaaagagtctggtagtagaccaaataccaatatatctgctgtaaacccycaccaaagaatgggactcacaactggctggtacaatttgtaatatacataagaaaatagcagacaactacaagcttcagacaatgtaaccatgggcattatatggtctgaaagaaacagaggcaacgttgcagtgaaaatttcaggagactcaacagcctttccttaaacctatgaggcaaggttagt

SEQ ID NO: 293833 - DNA, 548 bp, Homo sapiens
gtcaggtccaaatttggcttttctagaatgacaacttttcaaccccacacagctcatatcatctctcccctagattgcctccctttggcctattttcagaatctctttcttttcttttmtttatttatttatttatttatttatttattgacagggtctcattctgtcacccaggctggagtgcagtggcatgatctctgctcgctgcagcctcaacctcccgggctcaagtgaacttcccacctcagcctcccgagtatctgggactgcaggcatgggctaacatgcccagctaatttttgtgttttttgtagagatggggttttgccatgttgcccaggctggcctcaaactcctgagctcaagcgatccgcccacctttacctcccaaaatgccatgattccaggcacacaccagcactcccagcctattctcagaatctttgaataacttttccaggcacacaccaccgctcacagcctattctcagattctttgaataattgtcaactcactgcggagaaagatcaaaatgctagtctatggg

SEQ ID NO: 293834 - DNA, 548 bp, Homo sapiens
gtcaggtccaaatttggcttttctagaatgacaacttttcaaccccacacagctcatatcatctctcccctagattgcctccctttggcctattttcagaatctctttcttttcttttctttatttatttatttatttatttatttattgacagggtctcattctgtcacccaggctggagtgcagtggcatgatctctgctcgctgcagcctcaacctcccgggctcaagtgaacttcccacctcagcctcccgagtatctgggactgcaggcatgggctaacatgcccagctaatttttgtrttttttgtagagatggggttttgccatgttgcccaggctggcctcaaactcctgagctcaagcgatccgcccacctttacctcccaaaatgccatgattccaggcacacaccagcactcccagcctattctcagaatctttgaataacttttccaggcacacaccaccgctcacagcctattctcagattctttgaataattgtcaactcactgcggagaaagatcaaaatgctagtctatggg

SEQ ID NO: 293835 - DNA, 549 bp, Homo sapiens
tgctgtgggagggacctaatgggaggtaactgagtcacgggggcccgtctttcccgtgctattctcgtgatagtgaataagtctcatgagatctgatgggtttgtcaggggtttccacttttgcttcctcctcattctctcttgccaccaccatgtaagaagtaccttctgccctctatcatgattgtgagaccttcctcagccatgtggaactgcaagtccaattaaacctctttcttttgtraattgcccagtctcaggtatgcctttatcagcagtgtaaaaatggactaatacactccacctcctgggttcaggcaattctcccacctcagcctcctgagtagttgggattacaggcgccggccaccacacccagctaatttttgtatttttagtagagacatggttttgccatgttggccaggctggtctgaaacttctgacctcagacgatccactcaccttggcctcccaaagtgctgggattaccggagtgagccaccatgcctggccttggaatctggttttaaaacttgtatatattaa

SEQ ID NO: 293836 - DNA, 549 bp, Homo sapiens
tgctgtgggagggacctaatgggaggtaactgagtcacgggggcccgtctttcccgtgctattctcgtgatagtgaataagtctcatgagatctgatgggtttgtcaggggtttccacttttgcttcctcctcattctctcttgccaccaccatgtaagaagtaccttctgccctctatcatgattgtgagaccttcctcagccatgtggaactgcaagtccaattaaacctctttcttttgtaaattgcccagtctcaggtatgcctttatcagcagtgtaaaaatggactaatacactccacctcctgggttcaggcaattctcccacctcagcctcctgagtagttgggattacaggcgccggccaccacacccagctaatttttgtatttttagtagagacatggttttgccatgttggccaggctggtctgaaacttctgacctcagacgatccactcaycttggcctcccaaagtgctgggattaccggagtgagccaccatgcctggccttggaatctggttttaaaacttgtatatattaa

SEQ ID NO: 293837 - DNA, 580 bp, Homo sapiens
agacggagtggcctcattttgacaattccattatgcctcgaacagacaaatatggatgagctgagtgtcaccttagactacctactcagcattccaaggtgactctaaaggtgtcttttcttaaatctcagtatgttttcattcagttactaatgattstttctattgttgaattatactttgctatcttatctgcttttattcgcagtgaaattataattatagatactaaaatcaatgacttataacatcattgcagataaaatgcttattttatgctcttgatgaatttaaggatatacagatttccaaaatgtatgtattgtcgacttttaaggaacccagtaactaagcatctatatcatgtaactttaggaaaattggagaatttaatcagtagaaaacatcttttatttaggtaagctatttcaccatattgatataaatacgtctgcaggttttaatgtattaagtgagtgaagtctattaggagtttataaatatttttattttaaaaaatgtcaaaaatgtttgtttatattttaatctaaagggcctttaactttaattttcacatttc

SEQ ID NO: 293838 - DNA, 565 bp, Homo sapiens
ccttttagcagttcttgtagtgcttgcttggtattggcaaattcaacatttgtttgtctaaaaaatactttatctctccttcatttatgaagcttagttttgctggatacagaattattggctgataattattttgattaaggaggctaaagataggaccccaatcccttctggcttgcagggtttctgctgagaaatctgctgttaatctgataggttttcctttataggttacctgatgcttttgcctcacagctttaagattctttcctttgtcttgactttagatatcctgaaaactatgtgcctaggtgattatctttttgcaaagaatttcctgggtgttctttggacttcttgtaagtggatgtctaggtctctagcaagaccagggaagttttcctcgattattccctcaaataagttttccaagcttttagaattctcttcttcctcaggaacaccaattatttttatgtttggttgttttaacrtaatctcaaattcctttgaggcttgttcatttttaaaaattcttttttgtcgtttttggatttcattaatt

SEQ ID NO: 293839 - DNA, 609 bp, Homo sapiens
tatgtaagcatgtgtatataataaataagcatgttttatcatgaaaaattattgtgaacaatttagatctttaagaacttattaataatggaatactatttctaatttttctctttttcaacttgaaaaatattctcaaaattattaactaccctgaagatactttgtctttaggggaggagggctgaggaagaaggcatacataattacttcagtgtaatcctttatatcagagtaatctttcaggaactaaaatagcaattgttaataaaatttagtttctcattatagtctaaaagcaaaataaattctgaagtagtccaataacagaactgtatgacccctttagaaataaaatttatcatgaaatgctagttcttttaagtttgtattaagtttaaatggtaaaatgcatataatttaaattttatgtatttttatttcagaacattttttaaaatattaaaaattattttttagtcttgtagtcattacaaaattataaacgagttgtatactggttcctttttgaggtctacaaacatgctcgtgtatcttccaatgcaaaaaaaaaamccctcccttttaacctgctagtttttccagcct

SEQ ID NO: 293840 - DNA, 1264 bp, Homo sapiens
  misc_feature (1)...(1264): n = A,T,C or G
cggggttagccagtttgatccctttagggagctttttaaaaagagatatgagtatgatgataggagatgagagagtggaccaggcttacaagtttgctyattgagggtctactctccccttgtaaaaactctctttcttcttgctgctaatcccgtttaaatgcaacatcatgtagaacagaccagactttaaatcagcattaattaacacattaggccatgtgccaacccctcaagtgaggtctggcccgtgaccaggtgagggcaggagtgatgggacagagggcagaggccatggcaggtggtgagtgccctggaagaggagaccaggagggcacaagaattgacctcctctaccgtgaaattctccttgaactctttttttttctatttattttattgtgtaaaatttgtacatccaaaggtagtcatgagatggaattctgtggagaagtttataaaatacagattattcattatcctggagggtagattctgaactaaagagctttctttcagtcctgtgatctcaaggttttgcttttaaagaactgagtttgaattccttattgagtttgattgaaatgtgccttggtctcagccattgcacctccccagccctcttaacaaccatgaaggaagaaatgtawaaggggtcagttcagcaagaggatataacaatttaaaatatacatggacccaaccctggaacactcagatatataatgcaaatattgttagagctaaagaaagagactccaatacaataatagctggagacttcaacaccccactttcagcattggacagatattccaaatagaaaatcaacaaagaaacatcagacttaaaatgcactatagaccaaatggatctaatagatattaatagaacatttcatctaatgactatagagtgcatatccttttccacagcatatggatcattctcaaacatagaccatatattaggtcacttaaaaagccttaaaatatcccctcaaaattaaaataatatcaagcatcttctctgaccacaatggaataaaactataaawcaatcacaagagggattttggaaactatacaaatacatgcagattaaacaatatgctcctgaatgaccattgggtcaaagaagaaattaagaaagaaattgggggggaggagccaagatggccaaatatgaacagctncagtctacagctcccagcgagagtgatgcagaagacgggtgatttctgcatttccaactgcggtaccag

SEQ ID NO: 293841 - DNA, 649 bp, Homo sapiens
cggggttagccagtttgatccctttagggagctttttaaaaagagatatgagtatgatgataggagatgagagagtggaccaggcttacaagtttgctcattgagggtctactctccccttgtaaaaactctctttcttcttgctgctaatcccgtttaaatgcaacatcatgtagaacagaccagactttaaatcagcattaattaacacattaggccatgtgccaacccctcaagtgaggtctggcccgtgaccaggtgagggcaggagtgatgggacagagggcagaggccatggcaggtggtgagtgccctggaagaggagaccaggagggcacaagaattgacctcctctaccgtgaaattctccttgaactctttttttttctatttattttattgtgtaaaatttgtacatccaaaggtagtcatgagatggaattctgtggagaagtttataaaatacagattattcattatcctggagggtagattctgaactaaagagctttctttcagtcctgtgatctcaaggttttgcttttaaagaactgagtttgaattccttattgagtttgattgaaatgtgccttggtctcarccattgcacctccccagccctcttaacaaccatgaaggaagaaatgta

SEQ ID NO: 293842 - DNA, 536 bp, Homo sapiens
tttgcatctgacttctgacctaaactttagtgttattttcagctgttctttgacagggaatccaacagctgctgtttaataccacagacaacttgtgacacaggctgagtttctagcaataggattaatctaccaatgtggggcactgatttgaagctggctataattttcctgaacaggaggtgggggtagggaataaaaagcctgaagcacagtactttcctttttgtttttgtttttaattgcagcaaaatatatgtcttaataacttttaaccacacagaaaacattttcttgctgcaattaaaaggtaamagcaaagtattttgctttctcatggtattaataactgaacttggaaaccttgtccaatggagcagaatagtcacaaagaaaatctgaaatgataggcacctatttataaatgctggttgaaatattttttaaaaattcctaagaaatctgaggctctgagaaaatgtggctattccatctaaacttcatttagcaaagaacagtaagttttagaaaagcag

SEQ ID NO: 293843 - DNA, 536 bp, Homo sapiens
tttgcatctgacttctgacctaaactttagtgttattttcagctgttctttgacagggaatccaacagctgctgtttaataccacagacaacttgtgacacaggctgagtttctagcaataggattaatctaccaatgtggggcactgatttgaagctggctataattttcctgaacaggaggtgggggtagggaataaaaagcctgaagcacagtactttcctttttgtttttgtttttaattgcagcaaaatatatgtcttaataacttttaaccacacagaaaacattttcttgctgcaattaaaaggtaaaagcaaagtattttgctttctcatggtattaataactgaacttgraaaccttgtccaatggagcagaatagtcacaaagaaaatctgaaatgataggcacctatttataaatgctggttgaaatattttttaaaaattcctaagaaatctgaggctctgagaaaatgtggctattccatctaaacttcatttagcaaagaacagtaagttttagaaaagcag

SEQ ID NO: 293844 - DNA, 520 bp, Homo sapiens
attatttctgtcttaatatttaaaacagtattttgactatacatttttagtgaaatacatagtaaggaaacataaaaaagcaaaattatattaagttggattccatagtttgttaggggtaacattggaattattattttgaatctcttttaagcatatgataagatattacaaacaaataattatattaggaatgtttgaaagccaaattttcagtgtaaaaagggaagcgtaagtgaaaaattagagaatgtaagtaaagctctataatacctgaayaggaaatattagtatgaacctttgaaatttttatttcaaaattacatattttctagatttgtccattgaaaaggctaaaaagaaatgacagcccataatcgacgggtacattccattgactgagactgtgatcttaaatattattgctattggagaacaccaagaaccctggagaataactgaatgccgttgtgagaaaggaaatatatattaagaccctggaatgttccattgggcctaa

SEQ ID NO: 293845 - DNA, 563 bp, Homo sapiens
gcgattcttgcactgaaagagtttacaaatcagttgagacacacgtgaaagtaccaaagccatggctcttaaaatttcagtttacatcagaatccctctgagggcttgttaaagtgtagatttctttgctttaggtgttcgggaatggaaataatcacccagagttacagtatcctttgagggtgttgccctggacactacattttagcaagtcattccccgggttttttttctttttttctttttttttttaagatttaataagctttaacctcattttcaattatttttggtcattggcagaatttatgtcaagttggtatgtgccagggttggcaaactagtggtttacagctattgtgggtcttgattcatccaatgtcccttctgcttggctggtgaccttgccattccagctgtgcagctcctcccctgggagtctctgtgcctccycacaatccagaaagactacaggattcaagcttggtgctacagggccccccacaccctcacttcatggttgccatagtacagtgggttcttcttgcctgctgcacagataa

SEQ ID NO: 293846 - DNA, 573 bp, Homo sapiens
gtggttattgggaaagtttgagtcaaattatagatgtaaatcaacatcactaggcatcacagggataaccaaaatagaaataataaagtaagtgactaatattggagctaaacaatggtaatttataaataaaaaggaagtaactaaaaatcatgatcgtatcaagacaatatccttatttgtaaggcactgttgccctaaacagaaagaattcaaactctatctgtgaatatgtgcataggaggagtattttgacttcactgagtgttgtctgatagctggaattcttggtatggtcattctcaattatggctatacattagaattttaaggaacgtttttttaattatgatgattcatagatttcaatcctaccccaaatcaatcaagacagtatctctagggattcagacttggaattgagagttatttgtctgtgaaatggaggaaaggtcttgtattttaaactaatttaagtccattaaggcaagtctccattagcatactactacaaaattcatccaaactaggattctccygaatgaatcaggacatatgctcaccctagctgta

SEQ ID NO: 293847 - DNA, 520 bp, Homo sapiens
ttgtcaccacaggtacagtaaagaggcaggcaacatggtgccagtcaggcagagaacccatctgcataataaaagattagagtgggccaggcaccgtggctcacaactgtaatccccgcactttgggaggtcgaggaggcagatcacgaggtcaggagttcgagaccagcctggccatagtgaaatcccatctctactaaaaatacaaaaaaattagacgggtgtggtggcacgcgcctgtagtcccagctacttgggaggctgaggcagggaatcacttgaacctgggaggcgggggttgcagtgagcagagattacgccactgcactccagcctggtgacagagtgagagttgtctcaaaaaaaaaaaattagggtggggcagccagmttcttcgtgcactatgcaaacagcacacctagtcctaaccagttctttgagcactattcaaatggcacacctggtcccaccaacctttcatgccctatgtaaatcagacactgcctcctcaacctcatct

SEQ ID NO: 293848 - DNA, 561 bp, Homo sapiens
acaggctcatgacaccacatccagctaattttcatatttttagtagagatggggtttctccatgttagccaggctgatcttgaactcctgacctcaagtgatccacctgccttggcctcccaaagtgctgagattacaggtatgagctaccatgcccggccatgtaccacattttctttatccagtctatcattgatgggcattyaggttgattccatcttcatgtattttagattcccttaagtcgttttcttatttttacgcttctatgctgtcaccagataatatgctcagatctctcttttcatttattaatcatatcagctgtacctaatataatgtttaacccaattattcaatattacattcatatattgcatttttcatttttatttctggaagttccatttggtcatttttcaaatcttctggtcattattgcatagtgcctcaatctttactcatattttttattttttaatttctgtgtttattcattttaaacatatttgttttattgtcattttctgatgattctattatttcaagtcctttgtagtt

SEQ ID NO: 293849 - DNA, 561 bp, Homo sapiens
acaggctcatgacaccacatccagctaattttcatatttttagtagagatggggtttctccatgttagccaggctgatcttgaactcctgacctcaagtgatccacctgccttggcctcccaaagtgctgagattacaggtatgagctaccatgcccggccatgtaccacattttctttatccagtctatcattgatgggcatttaggttgattccatcttcatgtattttarattcccttaagtcgttttcttatttttacgcttctatgctgtcaccagataatatgctcagatctctcttttcatttattaatcatatcagctgtacctaatataatgtttaacccaattattcaatattacattcatatattgcatttttcatttttatttctggaagttccatttggtcatttttcaaatcttctggtcattattgcatagtgcctcaatctttactcatattttttattttttaatttctgtgtttattcattttaaacatatttgttttattgtcattttctgatgattctattatttcaagtcctttgtagtt

SEQ ID NO: 293850 - DNA, 565 bp, Homo sapiens
acctttcttttctcttgggtaaataacttggagtagaatgtctgggtcatatggtagatgtaggtttaacttgaaaaaaaggtcgctttttcaaatcagttgtaacattttaatttctgccagcagtgtgtgggagccttcacacatcttgctcttactctgactctcctgggtctctcttgtaatgacccgtgtgattacattgggcccacctgtaaaattcaggacaatatccctatgtcaagatccttaacttaaaaaatagcttcatagaggtataactgatatgcgataaagtgcatatttaatatatacaatttaatgagtttggacctaggcatatgcccatgaaatcatcaccacaatcaagataatagmcatgttcatcaccttcaccttgtgtccctttgtttttgggattcttaactgaatcacatctgcaagatcctttttgttctataaggtaatgttcacagattctgggaattagcatgtagacatctttggtggggtggagcagtcattattcagcctaacacagacccctactcctcaatcagagcag

SEQ ID NO: 293851 - DNA, 465 bp, Homo sapiens
gagcatatgtggctcaaccatgggaggtgtaggagagcacacacatctatttgtatctgtggagccttgtatttttctctattggttttgagatgtctctctgaagagtggcgattagactctagctctgtgctgggagggatccaggaatttggtcatgaatgtttacagtgaacttttcgtgggattcttctctatcccggtggaccacctgatgcctaagtgctaaacttgtgatcaggtgtccctgccacaagaagcttgtgtatcctggaagacaccctgtggctcttgtctgatctgtatccagtttattcctaccaagatagccattccttagcaccaccctggtggggaaagaagttaggtccaatctgttggtcgaatgagaaacagakaaggcaactcaacagaagacatgaaataacagaagcagtttattactcacagatcctggaaagaagc

SEQ ID NO: 293852 - DNA, 536 bp, Homo sapiens
gttgcccagcatgaggtatctttaatggagaacaaactctttcttcctgtaatatggcatgattaacagtctctgttccttcctgtgtccctagtgtttcttgtaacattggattgatcattaagtgttccccctgggagttcagcagcaggattttctgcaaaaccggatgatgagaagagactacaataataaaacctaactttttttttttatctgtaagtgaacctagagagrgattatctcttaataaaatgttcatagatttttttccttttttttatggagtctgcctgagatggaagcaaagacatcctcctgcaatgagtgtccctctgatagtagtgtcattgttgctattctgtgaaggcattttgaagtctcacatgtcatgcattgtgctgagaactttatcagttagttacatacttagtttaaccatgggactataatccttaaccttttttagagatgggaccttttgaaaatctgatgaaagctatggaccttgtttcatagcttatgctcataaatat

SEQ ID NO: 293853 - DNA, 636 bp, Homo sapiens
ttcagttttagaaattggggtaagagggacaactggtaaattctataatttatcagttaatataagatgagcttggcaggggcytaggtgctagaggaggaggtggtagttatgggagctatgtggtggggagggcacatgactagactgtgaggtcttttccatcacctgtaggcctgcagtggtgagaggagagagctgggtggtgctggtccatgggtaggtccccgataggcagtatagtatttcattttgtattcctattcttagaacaatgattgacacacaaaaggcactcaatatatgtctgttaaatgaatcaatgtcctctagtaattcatggcacagttagggagaagaactacatacacaatataaaaacctgtagaagttgaggaaggattagatattaagatcttaacagtggtcatttatgggggagggagaaggaaagaattattgttgtcttattttctttaatttttgcttctgtattttggcttttctctgcaaaagattatttatttattttgaatttaaaaagggcaattgatttaaacaatgaataaaaatatattaatatctttatatatgacagaaatctgaggattcagtttctttctgtctctctgttct

SEQ ID NO: 293854 - DNA, 1181 bp, Homo sapiens
ttcagttttagaaattggggtaagagggacaactggtaaattctataatttatcagttaatataagatgagcttggcaggggcctaggtgctagaggaggaggtggtagttatgggagctatgtggtggggagggcacatgactagactgtgaggtcttttccatcacctgtaggcctgcagtggtgagaggagagagctgggtggtgctggtccatgggtaggtccccgataggcagtatagtatttcattttgtattcctattcttagaacaatgattgacacacaaaaggcactcaatatatgtctgttaaatgaatcaatgtcctctagtaattcatggcacagttagggagaagaactacatacacaatataaaaacctgtagaagttgaggaaggattagatattaagatcttaacagtggtcatttatgggggagggagaaggaaagaattattgttgtcttattttctttaatttttgcttctgtattttggcttttctctgcaaaagattatttatttattttgaatttaaaaagggcaattgatttaaayaatgaataaaaatatattaatatctttatatatgacagaaatctgaggattcagtttctttctgtctctctgttctwcattaaatgtctttttggttgaattcctaatagtattatttgagtgcaattaatttaatttgagattcattctttataaataccaaaggaaaattttataaccttaatattgtatttcatactggaaactggagaaaaaagcaaacataaagttcccactacgtgcctattctatggctggcatgaagcctatattacctcattcagtttaatcaccatgaaaccctaggaagttggcattattgaacccattttaaagagcagctgaagatctcagagactgatatwgtcatcagatttttctaagtggcagaaccaggatttaaattctaatcagcttgactctagaacccaagatctttccaaaacaccaagaactttctggctgtgcctcctacaggctgagagaacttgggtatgttgtgcatactcaatgaggtaaactaagatgtgcttcgaatacccaaaggagatgcttctaggaacttgattaagtatatgagtcattgcaggctaagtttctcatgggaaggaagtatagcct

SEQ ID NO: 293855 - DNA, 608 bp, Homo sapiens
attattgatgaatgacaggtcctgggacagcttagataatgcccctgggaaagattcttttttcagctgcatagaaggtaaaaggaagtgcagtagaaccactcaagaagagtagaacctcttctctgtaatgatctccttctaacccagctctcttctgaattttcttatttttgatctctcctatcctaattcctggcagtcatccattccatttgctcacacattgccaaccatcgtctttctcctgatgctgatctttcagatcccagtgactcttgacactgtatccttgccttccaacctggtatgtcatggatttaatctttgaaatacctgcacatgcagcttctctggttctcaaaaagatgaacaattttaatgcctgcatcttttctgtaaaatggagatactaatacttcagagggrcatgagaagttactgatgccccctggaatgctttattatagtacaagaaacatagtaaacacttaagatgttagtgttagatattattattagcttcctttatattcctatgtttcctcacacctgggattacttatgctaaatctcatagtttatttctggcctcttttttctttact

SEQ ID NO: 293856 - DNA, 603 bp, Homo sapiens
tgttgagcatctttccccatgcttacttctcaattgtatgtcttctttggagaagtctctgtttacatcttttgcccttttttaaactggatttcttgttttcttattgttgaattgttagcattctcactatattctggatacaagtcaattagcacattttttcacatattttctctcagtctgtggcttgtttttctattttcttaatggkttctttcgaagtttttaatgtcagtgaagtccgtttgatcagttttttttttctctcatagattgtgcttttagtgtcacagctaagaaattttcacctaattggaggtcacagatatttttctccagtgttgtcttctagacattttatagctttaggtttaaattaagtctacggtccattttgcattaatttttttaatatatcatctgagtatacattgatgctcattttttgcatatatatattccattgttccagcaccttttggtgaaaagactatcatttctccacttatatttatactttttgtaattgtctcacagttcttggatattctagtctgtgtttttaatatatattttttaatctttgcattcagttttaga

SEQ ID NO: 293857 - DNA, 612 bp, Homo sapiens
tgactctttttaacaaagtgattaaagttagaactatttcaagtttttttaaatccctaatggaagcagcacatttactggcagtacagctctaaaagctaaccccaggagtgagtcttctttgtcgcctggcaacattatcgccagctaatcagaagctgtggttgtcaattctaaatgtcttctatttttaaagattaaaaattatattacttaacacacgcagtccayttggtagatcatatctttcaaaataaaaggaccaaaggagaaaatactataagggggaacctgtatggtgaagaatttggaaagcaatgtgcgtatactatgcctggcatacagtcaagattcaatttatatctgttgaatgagtgaatgaagggactaacttcgtcattacaaagaatagaagaatgaggtcttaaaagttaatccgctcagtcagacaacaggtaagaggcagagtgggtctcaaaacaaaacgcagcaaatcattctacaagggagctgctcactagaatggggaaaaaaccccaacttcgatttaatttagctcaacctcatatagaagcacaagccattctgcctacttccttctttcacaacaga

SEQ ID NO: 293858 - DNA, 485 bp, Homo sapiens
catgtgggtgagcaccattcaatccattgagggcctgaaaaaacaaagagttgggagaagtttgaattctctctctgcctgactgcttgagtggggcatccatcttctcctgccttccaactagcacttacaccattggctctccaggttgtcrggccttcagagttggactagaactcacaccttcggttcttctatttccagacctttggactcagactggaactataccattgactttcctgggttttcagcttacagatggcagaacgcaggacttctcagcctccataatcatatgaaccatttccttataataaatgtctatatctatgactttatctataccctatttgttctgtctttctggagaaccttgtctaataagctgttgttaagcttagagacaccaccacaatcattagcccagtacaggttggggcaggtatgaagagatcatgatacttactcaatcaccttatcca

SEQ ID NO: 293859 - DNA, 1110 bp, Homo sapiens
atcttttaactgaaaaagacaataactgaaataaaaatctcaatgaatgggctcaatagcagaatggaagaatagaggaaatagtgaatgttaagatagaacagtaggaattaaacagtatgaacaacagagaaaaaagttaaaaattgaataaaactagagtgacctgtgagtctatatcaaaaaatatgacttcagcttcattggagttctagacgaaaaggagaaagagagagagatggaagtagtattaaaagaaatagtggatgaaagtttcccaaatttggaaaagcaaatcccagcaaattccccaaaatcaaagctcagcaaatycccccaaaataagtccaaacaaatccatgctaaagcacatcataaacttttgaaaaccagagacaaacaaaaggccccaaagcaggaacatctacttataaaggaaaaacaactagaaaggctgtggatttctcattagaaaccagaggccagaagaaagtggcacatcattttgcaagtgctaaaagataggaactgcaaaccctgaawatagttcttttattgtatttacttaacttttcataattgattgtttagtttttggaaatttattatggtaacttgatgtaaaataagaatccatattttttaaataactaatgatcaagatcagtttatttagtcgttcwtccttatgctactgaccttaagtccacctttatcatgtactctatatgtttgggtctatttctaggatttcttttctgttgctttaatttgtttgtctagtgagagaaagccattgctttcatcatcatagacttaaaatatgtctatacatctgctagtgtaagttctctttcatcattctctttcccctaaaggtttctggttatttttgctcaatatatctacaaattatatctacaaattaactacaaattaacaatatatctacaaattaactctagaatccctttattagaatttgattagcattgcattaaatttatacattaatttaaaaagaactcttatcttttaaatactagatgctccaatgcagaagcataatctatttctctctctctctccctttctccttctctctctatc

SEQ ID NO: 293860 - DNA, 563 bp, Homo sapiens
gcggaatggggttatccctttcaaataaaacatttttgtgtgtgtgtgatgaaaaaatgtaactccaaagcctaagagaggagggtaatcagcatgtacagagattaaagggctatgattaatatattaagtcctatgcactggctgtcattcctacargccagtataataacacagtcatactcaggtagtttctggctctcactcactaaatcatcacataattcattggtctgacttttcttattccacgtttgacctctttttgttacataagcattgatgatgttgagctgagatcattccttctaatctttcactccatattcaccctcttctctgcctgtatgattgtcaatatattttctctcaattagattactctttactggagagccgtggaagcactgtgtcacagacactcttacaggctgtcagaaatcatttcctatctagattatgggtttgaaaacacccccatttcagagattaaaatgtttggctattttggaaatgaaagtagcctcagaaaaattaatgtgagattgctcccaatgtcacaa

SEQ ID NO: 293861 - DNA, 611 bp, Homo sapiens
tcatgtggtaactctatgtttaacattttgaggagctgccaggctgttttctaaagcagctacactgttttgcatgcccactagcagtccacgagggttctgatttctccatattctctccgacacttgttattgtgtttcttttactatagccatcctagtggatataaagtggtatcccattgtggatttgatttgcatttcccagatggctcatgatgttgaatgtcttttcatgtgaaaattggccatttgtgtatattctttaaagaaaaatytatttaggtcctgtgtccatttctaaatttgggttatttgcctttttgttattaaatagtaagacacctttatacattctagatacaagccccttatcagatatatagtttataaaatttttctgtcattctgtttttttttgtttttactttcttgatggtatcctttgaagtataaaagtttttaatttttgatgatacaaaggcagtctgaacaataaattctccccccagaatgccaatagcacaagcactataaaaggtcaggctaaaggtagatgatttatgttagtttcaaaccaatggttttgatgcttactgatttctgtatat

SEQ ID NO: 293862 - DNA, 546 bp, Homo sapiens
tacagaaaatggaaatgaaatacacttacgtgcatccaaactcttaggataagttttctcacctctaagtttcatgaatctctgggttatgatgaatcttattcttcatgaaagttatctccccacttcatatctatccttaatagaggtgtcatttatgtttgtaggtatgtatgtattttaataactcagttcttcttgactctaggtgcatatctaaagcatatgaaagcttttaaaaaagtacttaagaggtcctgatttaatggagtaggggaagggcacttgcrttttgcttgaaaccacctgaggtgttctaatgtgcagctgggattttaaatcactggactagctgggttggttcttaatttcttgaaatcaaaagagccatactaaaattcatgttactaatagtaaggaaaagtaaaattcaccactgctgcactatgatttagcaactaaattgcatgttactatttgtgagctagttattcctctaattagtggtcttcttgtggccaatgataatccaattaattagtttag

SEQ ID NO: 293863 - DNA, 546 bp, Homo sapiens
tacagaaaatggaaatgaaatacacttacgtgcatccaaactcttaggataagttttctcacctctaagtttcatgaatctctgggttatgatgaatcttattcttcatgaaagttatctccccacttcatatctatccttaatagaggtgtcatttatgtttgtaggtatgtatgtattttaataactcagttcttcttgactctaggtgcatatctaaagcatatgaaagcttttaaaaaagtacttaagaggtcctgatttaatggagtaggggaagggcacttgcgttttgcttgaaaccacctgaggtgttctaatgtgcagctgggattttaaatcactggactagctgggttggttcttaatttcttgaaatcaaaagagccatactaaaattcatgttactaatagtaaggaaaagtaaaattcaccactgctgcactatgatttagcaactaaattgcatgttactatttgtgagctagttattcctctaattagtggtcttcttgtggccartgataatccaattaattagtttag

SEQ ID NO: 293864 - DNA, 591 bp, Homo sapiens
acctaagttgcctatcaatagatgaatggataaagaaaatgtggtgtgtgtgtgtgtgtatatatatatatatatatatatatatatatatataaaaaatgaaatattatttagtcaaaaaaaaacaaactgtcattcacarcaacacggatgagctcagatatattaaatgaaataagccaggcacagaaagatgaatattgtattttctcactagtatgtggaaactaaaaagctgattttctactaatagagagtagagtggtggttattaaagggtggataagagagtggggagatggggatagccagaggttggttaaaggatactaaattacagctgtattggaaggacaagttctagtgttctatagcactatagggtgtttaggataaacaatttgttgtacattttgaaatagctagaagaatggactttgaatgttctcaacacaaagaaacaataaatgagatgatagatatgctaattaccctgaattgataattacatatggtatgcatgtatcaaaatatcacactatgcccataaaaaacatatagttatcgtgtatgtattaaaaataataataa

SEQ ID NO: 293865 - DNA, 550 bp, Homo sapiens
tggtgtatatatatattttgtaatatgtgtgtatatgtgtatgtgtgtgtttgtatatgtttgtgtgtatatatatatagccaaaaaaaatcaaataaactagttttcactcccactaaatcctcccttttgcatgcacacacacacactcacagacacacacacccttgactaatatctgcatatgtttagaaaaatacattattataagaaacatttgaatgtcaactttcagagctatatggatttcctcttttagtatatctctcttttcagagagaataggatagaagttagcatttttgagcttccatagaaggtaatgtttggactgtttgatgtaattggcagagtgttgaagaaacattccaagtaccatatttgacagataatctttagttgacctattttaagtagtgtatgtttaattttattaaaataatattacctttaaaattgtatatactttatattctaaagtgttcagggtactcaggtatgaaggacagtargtcctctgcaatgtattgctgcattgggtgcactatgt

SEQ ID NO: 293866 - DNA, 424 bp, Homo sapiens
atttgacaatctctttcagcttcatatgatatgaccttattcaagcttcattttgtttcagtagattaaacaagagctgtttatttttagttatttcgtgtgcaccatttgtcaaaatctctgcaagcatttagcaaatgatgagctgtaatttgcatacatcatgattttatatatatatatgttrtagaacataaggaggttcaatatatgtgtcttgttaagggaagaacaattatattttaattagtatttaaatggaaaaacatggaaaatctcaatagttttatatggattcatggatttggactacaatgaaatccatggtagcattaatcaggtgacagtttttattatactttgctgcctacccacctgtcttataatgctacaacatacatcaagataatttgatttagccaat

SEQ ID NO: 293867 - DNA, 574 bp, Homo sapiens
ttcttggagagtaagacactgtaacactctagagaggtatggttgaagtctggaatctgaaaaccattaggctgctcctcagagcttaatagaatctaactctaagaggacaaagtttcaaaaagcccctgatggttgttagatgccattgtrgtacgtatttagtagctagggaacattttaaaaaatgaaaatcaactcacatgctctccaacaggtaaattactaaacaaattgtggtgcactcataacctaaagtgtacttagaaataaaagggactattgatgcatgcaacagcctagatgtccagagaattatgctgagtgaaaaaagtcaattccaaaaagttactgattgtataatttgatatttataaaattattgaaataacaaaattataacagcttacatcatttttgtttcttgggtttatgttaaaagaaaagcaaaacactattttaatttaaaaaatgaaataaaattatagaaatgataaactgttagtgttgcctgaggttatgaaggtgtggggaatgtgagaaaagtaactgtggctgtaaaagggaggacgga

SEQ ID NO: 293868 - DNA, 623 bp, Homo sapiens
tggagaatgagaggaaaccaattcattttcttgagaactagtaaataatgtgaaatatcttgcctttatcctgggttttatatatgaactgtaacactgggtaaactaatggtagataaatgaaatcttctctttatagaataatttctaagaataagtgaaaagaatattagaattagaatgtcataattttgcaaccctcaaaagattactgaatacaggcactaaatttcagtgattgcaaacatcaccaaaagataaacaggcagacgtgatacacttcctgcagaaggaaaacatctacagcccgaccaaagtgatcaaacctcaatctaaacaagcctctggatttagttgcctattttcaggaaatacaggagacaaaggaatacgtaacactgcaccatgattatgaaatcaacaaactccagactgtgagaaatccagatttccccagagcttccacycataaatagtaagaaaatagaagacggagagaaaatctgcagattgaacagaagcttgaaaggcatcatgtttttaaaaattgagcaagattaaactatttatgtctaggaatgtgcatattgatattaaaactagaaaaacgtagaagaaaagga

SEQ ID NO: 293869 - DNA, 623 bp, Homo sapiens
tggagaatgagaggaaaccaattcattttcttgagaactagtaaataatgtgaaatatcttgcctttatcctgggttttatatatgaactgtaacactgggtaaactaatggtagataaatgaaatcttctctttatagaataatttctaagaataagtgaaaagaatattagaattagaatgtcataattttgcaaccctcaaaagattactgaatacaggcactaaatttcagtgattgcaaacatcaccaaaagataaacaggcagacgtgatacacttcctgcagaaggaaaacatctacagcccgaccaaagtgatcaaacctcaatctaaacaagcctctggatttagttgcctattttcaggaaatacaggagacaaaggaatacgtaacactgcaccatgattatgaaatcaacaaactccagactgtgagaaatccagatttccccagagcttccacccataaatagtaagaaaatagaagacrgagagaaaatctgcagattgaacagaagcttgaaaggcatcatgtttttaaaaattgagcaagattaaactatttatgtctaggaatgtgcatattgatattaaaactagaaaaacgtagaagaaaagga

SEQ ID NO: 293870 - DNA, 1050 bp, Homo sapiens
ttgtggtgggagaatttttaaaataytgttttagaaatatctcctccttcaataaaattgatattcggtacacagggaatggtgatttaatttgtcaacattatttacagctccatggccgatatcatatacaatattaatatattaagagtaaaaaaaactatgcatttattgcttacatatttatgagctaattatactactaatggaaaatgtctttcattgctgttagacttcgataaagatttttttaataatctttacttggcatttagtgagctataaatgtcttcataaatataaattcaatgctttcttgagagagcccatttaaaataataaatgcatgtgacaatgatcttgtttagaaaatatgagttttaaatactgawcttgcatcatgtgtattggtgtccctttgaccaaaatatgtcacatgggcaagtccagagtcaatttgaaaaagcattatcttgatgtcttaatgtgtagatgacagaagtgagtcattgcagcccattaatgtaacacttaatcctggtgtgttctgtgactccactgatgcatgtccctcctctgtctgtaaaatatggtcatactctctctgcacccccaacatcttacaagttcctagcattcgtcttcaagttcgtggtcttgttatctgtatagttctcactgatatatacatcactgatatatatatatcactgattatatacatatatgtggctatacatatagataaggcaatagatagataaggctagatagatagatagatagatacatagatagatagatacagagaagtttcttgcctgcagttcctttagtggcttcttattgttccagggacccacaaactgaaaaactgagttatataccttcatgctccaagcatataatggtgagacacatacaggataacwgtaatagaagctcccattcaaaaattcgaaacttcgaagtcaatcaccagtccataacaattctgaaaatagtttggtatattttctcagtactccccaatccatggacagaaaatga

SEQ ID NO: 293871 - DNA, 529 bp, Homo sapiens
tcctttcaccatctgcctttgcctacttcccgttacttttgaatttggccttctcagccttgtttgcctttgtatactcctcttgatccgccctctctactcagccytgctaatccatagcctgtagggggatcaaacaaaaaactgtgcatgttcatactcatcatgcagatttgatcatattaatcatactctctcatcatactcaaaacacacagtgaagaatttattcactttagttcccatatggtgaaagaaaaaaaggaactttattttccataaggaaccaacctaatcttattgtcaaactcccttaaatatggatacaatgatcttaattttacctacaggaaactgaagcactgagaaattaggtaacctgtccagttgaaagaacagaccctcccagtttaagacagcctctttatagttaacattatcttattggggtaaatatataactcttaaaaatttcaatattttatctgagttgtttctccctttacacaggattttgcttccagttctt

SEQ ID NO: 293872 - DNA, 228 bp, Homo sapiens
ttgatcatattaatcatactctctcatcatactcaaaacacacagtgaagaatttattcactttasttcccatatggtgaaagaaaaaaaggaactttattttccataaggaaccaacctaatcttattgtcaaactcccttaaatatggatacaatgatcttaattttacctacaggaaactgaagcactgagaaattaggtaacctgtccagttgaaagaacagac

SEQ ID NO: 293873 - DNA, 479 bp, Homo sapiens
aacatgatacaaaagagttctgtttcatatgaaatcagaatgtcaaagagatatcttcattcccatgttcattgcagcattgttcacaatagccagggaatggaatcaactaagtgtctatcaacagatgaatggttaaagactstgtgtgtgtgtgtgtgtgtgtgtgtgtgtgtgtgtgtgtgtgtgtaaacaatacaattctattctgccttaaaaaagaaggaagttctgtcatatgaaaaaacatggatcaaccaggaagacattatgctaagtgaaagaagccaggcacagaaaaacaaatattgcataatctcatttacatatggaatgtaaaaaaaatcaaactcatagaaacagaaagtaaaatagtagtcattaaaggctaggggatggaaggaatgggaggatattaatcaaacaacacaaatattcagttacacacaataaatacattccaaaaaacgattgcacat

SEQ ID NO: 293874 - DNA, 1294 bp, Homo sapiens
aacatgatacaaaagagttctgtttcatatgaaatcagaatgtcaaagagatatcttcattcccatgttcattgcagcattgttcacaatagccagggaatggaatcaactaagtgtctatcaacagatgaatggttaaagactgtgtgtgtgtgtgtgtgtgtgtgtgtgtgtgtgtgtgtgtgtgtgtaaacaatacaattctattctgccttaaaaaagaaggaagttctgtcatatgaaaaaacatggatcaaccaggaagacattatgctaagtgaaagaagccaggcacagaaaaacaaatattgcataatctcatttacatrtggaatgtaaaaaaaatcaaactcatagaaacagaaagtaaaatagtagtcattaaaggctaggggatggaaggaatgggaggatattaatcaaacaacacaaatattcagttacacacaataaatacattccaaaaaacgattgcacatwaatttggcttgaatttattwaaaaaaatacatattacaattatcagagaaataaaggttagaggttttacatatcagctttcacttaagatgtaaacctaaatgtgtgtaccaccagttcaagtaattttcctttagttattgggacttaaaggtaaagattgccatttgggatgagaataatatatgctaataccacacaacatttgaagtttttacttattctcttttttcattgtctctttcattgatgcctctggccaaacataagcgattggttaaacaacaggatgctacagttgttcactttggtgtggtttacattttccttctgtatttcagtttggtgaagtggagattaataccttagataataaatctggaacacagtaaaagtgtgcattttcagtgaatgactcaattcattgaaggaacaatgaagctatatgaaagctawttttacatatcagctttcacttaagatgtaaacctaaatgtgtgtaccaccagttcaagtaattttcctttagttattgggacttaaaggtaaagattgccatttgggatgagawtaatatatgctaataccacacaacatttgaagtttttacttattctcttttttcattgtctctttcattgatgcctctggccaaacataagcgattggttaaacaacaggatgctacagttgttcactttggtgtggtttacattttccttctgtatttcagtttggtgaagtggagattaataccttagataataaatctggaacacagtaaaagtgtgcattttcagtgaatgactcaatt

SEQ ID NO: 293875 - DNA, 358 bp, Homo sapiens
ttttacatatcagctttcacttaagatgtaaacctaaatgtgtgtaccaccagttcaagtaattttcctttagttattgggacttaaaggtaaagattgccatttgggatgagaataatatatgctaataccacacaacatttgaagtttttacttattctcttttttcattgtctctttcattgatgcctctggccaaacataagygattggttaaacaacaggatgctacagttgttcactttggtgtggtttacattttccttctgtatttcagtttggtgaagtggagattaataccttagataataaatctggaacacagtaaaagtgtgcattttcagtgaatgactcaatt

SEQ ID NO: 293876 - DNA, 455 bp, Homo sapiens
aatttggcttgaatttatttaaaaaaatacatattacaattatcagagaaataaaggttagaggttttacatatcagctttcacttaagatgtaaacctaaatgtgtgtaccaccagttcaagtaattttcctttagttattgggacttaaaggtaaagattgccatttgggatgagaataatatatgctaataccacacaacatttgaagtttttacttattctcttttttcattgtctctttcattgatgcctctggccaaacataagcgattggttaaacaacaggatgctacagttgttcactttggtgtggtttacattttccttctgtatttcagtttggtgmagtggagattaataccttagataataaatctggaacacagtaaaagtgtgcattttcagtgaatgactcaattcattgaaggaacaatgaagctatatgaaagcta

SEQ ID NO: 293877 - DNA, 549 bp, Homo sapiens
tgctgtcctctggacttaacgagtctccacaggattaaggtctgctctgacctctactcttggtgttcaactttgatttccactgaagcttagctggtcttgcctgtttcttgtgagcagcttgttcccacctgccatagacaagcaccaaaatgtccagtcgcaatccctctattgtgattccagacccttctagtctccyggttttcttcaaatattccatgatccccagaagtctagaatctctccgcttgtttttgtgcatcatgatgatgtctgcaggttctgggggctactctccagctcaacaacttatacatcttccttagctcttacccctctatacctcagaatgctgcattgaatacaggactttgcaattggcattggccctaatgttatgattttcttcttgttcctctaatcctcatctaccaaaataaaattttctggaagctttacttttggaatgataatattcctaggtcatatttctcaaccaatttccaccatagcacagggaacatctctttagtatgtgatttagta

SEQ ID NO: 293878 - DNA, 402 bp, Homo sapiens
aataaggacatagggatagcamttagaaggaaatagttgtatttccagttaacaatggtgtcagattaggtagtcagcaatggtggttatggggaaacagacccatatactatttatttgaaaatgtattgtagtatttgctggggatctgcatacaggaaaaaatgacttcctctagccaagaattgggcatctaccacatgactctcattaacacatgatttttccagcttctcttttagaaatctgggtaggacaccaaatttcactccttctgaaattactttgcagtccccaattttagagcatctggtactggctagcaaatgaactctaaaaggctattttaaaaggaagctaacatatatgtttgaaaagaggccaagtatacatttgaaaaca

SEQ ID NO: 293879 - DNA, 402 bp, Homo sapiens
aataaggacatagggatagcaattagaaggaaatagttgtatttccagttaacaatggtgtcagattaggtagtcagcaatggtggttatggggaaacagacccatatactatttatttgaaaatgtattgtagtatttgctggggatctgcatacaggaaaaaatgacttcctctagccaagaattgggcatctaccacatgactctcattaacacatgatttttccagcttctcttttagaaatctgggtaggacaccaaatttcactccttctgaaattactttgcagtccccaattttagagcatctggtactggctagcaaatgaactctaaaaggctattttaaaaggaagctaacatatatgtytgaaaagaggccaagtatacatttgaaaaca

SEQ ID NO: 293880 - DNA, 412 bp, Homo sapiens
atacccacagctgccatacagtagcttcccagggyacctacagctggggttaatgttaatgtgtggcccttctactatctatattataatcaatttcagtgctgcttaaacaaacagatccatgatgcacacacactacccctccccaacacacacacaacaacagtaacaacaataatatcaacaaccatctatgaagtcaaaaacttcaggatgagacccaggagtctgcactcagctctctaagttagactgataggaaatagaaagaaacacatgttagggcgagtagttacagttcttatactgttgagtaatattctttatgatagtggtttaattacgttgatttattgattttgctgcagttcagtttgaaagtgtttgggatgagtcataaccacaaaggggc

SEQ ID NO: 293881 - DNA, 412 bp, Homo sapiens
atacccacagctgccatacagtagcttcccagggtacctacagctggggttaatgttaatgtgtggccyttctactatctatattataatcaatttcagtgctgcttaaacaaacagatccatgatgcacacacactacccctccccaacacacacacaacaacagtaacaacaataatatcaacaaccatctatgaagtcaaaaacttcaggatgagacccaggagtctgcactcagctctctaagttagactgataggaaatagaaagaaacacatgttagggcgagtagttacagttcttatactgttgagtaatattctttatgatagtggtttaattacgttgatttattgattttgctgcagttcagtttgaaagtgtttgggatgagtcataaccacaaaggggc

SEQ ID NO: 293882 - DNA, 412 bp, Homo sapiens
atacccacagctgccatacagtagcttcccagggtacctacagctggggttaatgttaatgtgtggcccttctactatctatattataatcaatttsagtgctgcttaaacaaacagatccatgatgcacacacactacccctccccaacacacacacaacaacagtaacaacaataatatcaacaaccatctatgaagtcaaaaacttcaggatgagacccaggagtctgcactcagctctctaagttagactgataggaaatagaaagaaacacatgttagggcgagtagttacagttcttatactgttgagtaatattctttatgatagtggtttaattacgttgatttattgattttgctgcagttcagtttgaaagtgtttgggatgagtcataaccacaaaggggc

SEQ ID NO: 293883 - DNA, 579 bp, Homo sapiens
acaataatacaactgaagaagttatttaagaaattaaaatatatatattctatagtttttgcagtttatttttaaatttgaaaatttaaattattataaaacactgtccatattattgatatttttgtattatcataaaattgtaggaactttcttatacaatgttctttataagattgataatacaatgacttcttcttgttctcgttctccttctactccttctccttttcttcctccyccactgcctcctctttctctttctttttgtttactactcctgcatacaatgaattatcatttgcttttttagtatgctaatgatggtatattttgtggcctttgcaatatctgagctcttgcattcagtaattcctattcattttctttttctccctaatttaaatatttttccaagtctttcttccacttgatttctctgggttcacttactggttgttttttcacagagtttaatatgcaataaattcagtttttttaatgaattttgaaatgtaaatacttccacagccatgaacattgttctgagcaaaacttcatcatatctaatatttagta

SEQ ID NO: 293884 - DNA, 556 bp, Homo sapiens
acttcctaatagctgtaatagctagtttaggcaagaaggattcagcttcacttgctcactatggatttgaaaacaaaatcttacaggaataaatgaaattcattcttctggcttaatcataagagacttatttatttatttatttatttattatttattttaaggaaaatctgagaattgagaaaagctgtttacagaaaagataaacaactgtatagataataccacgttctggcaaaatattatcacctctaatattccttatgatttggggcattttatctaacattactgtggctccatatgttcaaaataaaagaaaataatcatacctccaacagccaraagatggtcatgaagccaaggttagaagttaactgtggaactactctactaggtagaaaacattgaggagacaaaaaatatttactattggaccattttggcagagtaccttataataggccttgaagcatccttctgatgacaccacatctggccacatttacaggaaacaagtcaaatcagtgtcttatactctcttatttattcattt

SEQ ID NO: 293885 - DNA, 531 bp, Homo sapiens
cattttggcagagtaccttataataggccttgaagcatccttctgatgacaccacatctggccacatttacaggaaacaagtcaaatcagtgtcttayactctcttatttattcattttgtaactaatcaaataattaagtaatttagaaacaagcaaataagtcataacaacatttgagaagaggtacttcctgtttctgtgtttttcctaatgaaataaatagattgcattctttcttggccagtcatgctctggacttaggttttcttcatttcttgcttctaattctttggggaaatggtgtttccttctattgaattataactttccttatgatgaatatggtcctattgaaaactggtttgtgtgcattttatgggttttaaacctttatacaaattttaatctgtttttagacatgctctgtaatcctttcctttaaatgtataagcaatgttgttaccaaacttttccctttgcttgcttatcgtgtcattaaccattcaaagagccttcagtaataacacaa

SEQ ID NO: 293886 - DNA, 1053 bp, Homo sapiens
cattttggcagagtaccttataataggccttgaagcatccttctgatgacaccacatctggccacatttacaggaaacaagtcaaatcagtgtcttatactctcttatttattcattttgtaactaatcaaataattaagtaatttagaaacaagcaaataagtcataacaacatttgagaagaggtacttcctgtttctgtgtttttcctaatgaaataaatagattgcattctttcttggccagtcatgctctggacttaggttttcttcatttcttgcttctaattctttggggaaatggtgtttccttctattgaattataacyttccttatgatgaatatggtcctattgaaaactggtttgtgtgcattttatgggttttaaacctttatacaaattttaatctgtttttagacatgctctgtaatcctttcctttaaatgtataagcaatgttgttaccaaacttttccctttgcttgcttatcgtgtcattaaccattcaaagagccttcagtaataacacaawtctttcttttatgagccttcccawactattctcccccttggcctacaaacagattgcctcctccaccaggacagttcagcattatatgactcagagggcaagtttctttccttgtactgttgaaaattaataccttgctaaggcatttcccccagattccattagctgtttgaaatttagatacagataaacagaatgaaagcacatgcttggcttaagttgaaggattttattgcttagttatgttagtgatgatgaatggtaatggctgtagtcattttttcttatgtaacatgaaaatatattttttacaatgttctccttgcacatttattttctgcaattcaaatgctcactatataacctctagcttaaggctattgcattttaagaaatggatgagatagagagacatggaataaaaatgaaactggtgagatagcacagtgcacttaatcattcctttgttcattctgtcatttattcaatcaacacatatttacagaggttctacctacaag

SEQ ID NO: 293887 - DNA, 521 bp, Homo sapiens
tctttcttttatgagccttcccatactattctccccctyggcctacaaacagattgcctcctccaccaggacagttcagcattatatgactcagagggcaagtttctttccttgtactgttgaaaattaataccttgctaaggcatttcccccagattccattagctgtttgaaatttagatacagataaacagaatgaaagcacatgcttggcttaagttgaaggattttattgcttagttatgttagtgatgatgaatggtaatggctgtagtcattttttcttatgtaacatgaaaatatattttttacaatgttctccttgcacatttattttctgcaattcaaatgctcactatataacctctagcttaaggctattgcattttaagaaatggatgagatagagagacatggaataaaaatgaaactggtgagatagcacagtgcacttaatcattcctttgttcattctgtcatttattcaatcaacacatatttacagaggttctacctacaag

SEQ ID NO: 293888 - DNA, 527 bp, Homo sapiens
atcaaatattttaaaattcatttgccttcacaatgacaaagtttagagacaaacagctmatcaaatcggtgatactgggccacaagaaagttgtgtttctagatgacatgcacctatttttcatatacttttttaaaattggattatcaaaaatttaacaaacattcattacaaacaggcagagcaatttccagtgtgactacctgaataccttctgtttgtaatcatcatctgaatgaagattcaccacatggttacctaaacaatgatgaattatttatacctttaatgaaacttgtatgttaaaatgttagtaattgcattttaaaaaaatagacacacaaaacagaagaaaatcatctgactgagaattaagatactgtgatacacataagacagcttttcacagctttatgatgtattgttgatttaatagcaattgcttttttatataaaatatattttatattagtacacattaattgaaatttgtcctcaaatttagaaatgtttcaatattttttaaa

SEQ ID NO: 293889 - DNA, 463 bp, Homo sapiens
ttgccttcacaatgacaaagtttagagacaaacagctaatcaaatcggtgatactgggccacaagaaagttgtgtttctagatgacatgcacctatttttcatatacttttttaaaattggattatcaaaaatttaacaaacattcattacaaacaggcagagcaatttccagtgtgactacctgaataccttctgtttgtaatcatcatctgaatgaarattcaccacatggttacctaaacaatgatgaattatttatacctttaatgaaacttgtatgttaaaatgttagtaattgcattttaaaaaaatagacacacaaaacagaagaaaatcatctgactgagaattaagatactgtgatacacataagacagcttttcacagctttatgatgtattgttgatttaatagcaattgcttttttatataaaatatattttatattagtacacattaatt

SEQ ID NO: 293890 - DNA, 527 bp, Homo sapiens
atcaaatattttaaaattcatttgccttcacaatgacaaagtttagagacaaacagctaatcaaatcggtgatactgggccacaagaaagttgtgtttctagatgacatgcacctatttttcatatacttttttaaaattggattatcaaaaatttaacaaacattcattacaaacaggcagagcaatttccagtgtgactacctgaataccttctgtttgtaatcatcatctgaatgaagattcaccacatggttacctaaacaatgatgaattatttatacctttaatgaaacttgtatgttaaaatgttagtaattgcattttaaaaaaatagacacacaaaacagaagaaaatcatctgactgagaattaagatactgtgatacacataagacagcttttcacarctttatgatgtattgttgatttaatagcaattgcttttttatataaaatatattttatattagtacacattaattgaaatttgtcctcaaatttagaaatgtttcaatattttttaaa

SEQ ID NO: 293891 - DNA, 605 bp, Homo sapiens
cttttttcccttatgctatggacatcaacttacactatgctgcaattactgaaatcgtgtatttcaaaagtcaccccttcgaattcctcaaaaagaaacaataaaaccttttaaaagccccmaattttctactaaatattttgtagaggctataaacttagtcattacattgcatatattatagtgaaacaccttaaaaattcttattaaatatttctgttctccaagaactctcgtcagttccataacaggtggtcctcctccacccccacccaccccattctttcttccccacgcgttacctggacttgacatctcctatcacctttttaccagaattgccaccagaaaactattaattcttttctgggaggcagtggtatgagggaactgaagctagaaaactcagattggtaaaataaatcttactgtagtgtttagcaaaacaaataacctctgagaaataatcacttaaaacagttcaggtattatcaattattatgaaaacaaaaatgtgtcttttcttaacttttacttcaagcatcttatcaaataatttttcccaacaatttcaatgcttctcaaatagttattttaggcaatac

SEQ ID NO: 293892 - DNA, 605 bp, Homo sapiens
cttttttcccttatgctatggacatcaacttacactatgctgcaattactgaaatcgtgtatttcaaaagtcaccccttcgaattcctcaaaaagaaacaataaaaccttttaaaagccccaaattttctactaaatattttgtagaggctataaacttagtcatkacattgcatatattatagtgaaacaccttaaaaattcttattaaatatttctgttctccaagaactctcgtcagttccataacaggtggtcctcctccacccccacccaccccattctttcttccccacgcgttacctggacttgacatctcctatcacctttttaccagaattgccaccagaaaactattaattcttttctgggaggcagtggtatgagggaactgaagctagaaaactcagattggtaaaataaatcttactgtagtgtttagcaaaacaaataacctctgagaaataatcacttaaaacagttcaggtattatcaattattatgaaaacaaaaatgtgtcttttcttaacttttacttcaagcatcttatcaaataatttttcccaacaatttcaatgcttctcaaatagttattttaggcaatac

SEQ ID NO: 293893 - DNA, 605 bp, Homo sapiens
cttttttcccttatgctatggacatcaacttacactatgctgcaattactgaaatcgtgtatttcaaaagtcaccccttcgaattcctcaaaaagaaacaataaaaccttttaaaagccccaaattttctactaaatattttgtagaggctataaacttagtcattacattgcayatattatagtgaaacaccttaaaaattcttattaaatatttctgttctccaagaactctcgtcagttccataacaggtggtcctcctccacccccacccaccccattctttcttccccacgcgttacctggacttgacatctcctatcacctttttaccagaattgccaccagaaaactattaattcttttctgggaggcagtggtatgagggaactgaagctagaaaactcagattggtaaaataaatcttactgtagtgtttagcaaaacaaataacctctgagaaataatcacttaaaacagttcaggtattatcaattattatgaaaacaaaaatgtgtcttttcttaacttttacttcaagcatcttatcaaataatttttcccaacaatttcaatgcttctcaaatagttattttaggcaatac

SEQ ID NO: 293894 - DNA, 583 bp, Homo sapiens
ctttcttccccacgcgttacctggacttgacatctcctatcacctttttaccagaattgccaccagaaaactattaattcttttctgggaggcagtggtatgagggaactgaagctagaaaactcagattggtaaaataaatcttactgtagtgtttagcaaaacaaataacctctgagaaatartcacttaaaacagttcaggtattatcaattattatgaaaacaaaaatgtgtcttttcttaacttttacttcaagcatcttatcaaataatttttcccaacaatttcaatgcttctcaaatagttattttaggcaatacaatttctacatattattacatgtattgttcagttttcattttgatttatccattatttctcaattgtttttcaattgttggtcttgatcatagatacccctgtccctgaataaagtgactgagtagcaggtagattgaaaatttaataatctatttaatatggtatctacaatggtctgttcagctttcatacttcccaaattgctactagttttccacaaaaacatgcattagtggtctgtaagaggacccacaacaaa

SEQ ID NO: 293895 - DNA, 496 bp, Homo sapiens
tatcagtaaacaatcaacagaatggaagaaaatacttgcaaactatgtatctgacaaagatctaatatctagaatcyataaggaacttaaatatctcatcaagcaaaaaccaaccccattaaaaaattggcaatgaaaatgaacagacacttctcaaaagaaaacatacatttggcttacaaacatatgaataaattccaacattactaataatcggagaaatgtgaatcaaaaccacagtgacatattatctcacataagtcagaatggctattattaaaaatacaaaagcaacaaatgttgatgagtctacagagaagaaggaatgcttatacgctcttcatggaatgtaaatttgtttagccactgtggaaagcagtttggagatttctcaaagaagtaaaaatagaactactattccacccagcagtcccaacaatgggtatgtatctaaagggaaataaattgttctaccaaaaagacacacgcccttgta

SEQ ID NO: 293896 - DNA, 491 bp, Homo sapiens
ctttgctcaaaccccttcctgacatttttatctaaatcaagaggaaagttccaagggtagacctcagagttgaatctgataactgacaagtctgtcttattataagacttgagattggtaggagaaatttgactcrggaaactgaacttttaaattttgaagtgtgctctgtagaactaaagtttagaaaatgcatataagagacagaaagaaaggtaaggaataattacgaatggaaagagctacctagataattccttattttcatatttcctatgaattaagtttacacatattttaaaagtagcatattcaagagcaattattgaactacttttctgcctttgaattcatgttcaagagaaatatggatgcacaatgtttatgcttgtgaattctggtcaagatattgctgtaactatatgtggaattcctctccaccttggttctaaatacctagcatgatagttgcagtacttttacaccatata

SEQ ID NO: 293897 - DNA, 491 bp, Homo sapiens
ctttgctcaaaccccttcctgacatttttatctaaatcaagaggaaagttccaagggtagacctcagagttgaatctgataactgacaagtctgtcttattataagacttgagattggtaggagaaatttgactcargaaactgaacttttaaattttgaagtgtgctctgtagaactaaagtttagaaaatgcatataagagacagaaagaaaggtaaggaataattacgaatggaaagagctacctagataattccttattttcatatttcctatgaattaagtttacacatattttaaaagtagcatattcaagagcaattattgaactacttttctgcctttgaattcatgttcaagagaaatatggatgcacaatgtttatgcttgtgaattctggtcaagatattgctgtaactatatgtggaattcctctccaccttggttctaaatacctagcatgatagttgcagtacttttacaccatata

SEQ ID NO: 293898 - DNA, 491 bp, Homo sapiens
ctttgctcaaaccccttcctgacatttttatctaaatcaagaggaaagttccaagggtagacctcagagttgaatctgataactgacaagtctgtcttattataagacttgagattggtaggagaaatttgactcaggaaactgaacttttaarttttgaagtgtgctctgtagaactaaagtttagaaaatgcatataagagacagaaagaaaggtaaggaataattacgaatggaaagagctacctagataattccttattttcatatttcctatgaattaagtttacacatattttaaaagtagcatattcaagagcaattattgaactacttttctgcctttgaattcatgttcaagagaaatatggatgcacaatgtttatgcttgtgaattctggtcaagatattgctgtaactatatgtggaattcctctccaccttggttctaaatacctagcatgatagttgcagtacttttacaccatata

SEQ ID NO: 293899 - DNA, 491 bp, Homo sapiens
ctttgctcaaaccccttcctgacatttttatctaaatcaagaggaaagttccaagggtagacctcagagttgaatctgataactgacaagtctgtcttattataagacttgagattggtaggagaaatttgactcaggaaactgaacttttaaattttgaagtgtgctctgtagaactaaagtttagaaaatgcatataagagacagaaagaaaggtaaggaataattacgaatggaaagagctacctagataattccttattttcatatttcctatgaattaagtttacacatattttaaaagtagcatattcaagagcaattattgaactacttttctgcctttgaatkcatgttcaagagaaatatggatgcacaatgtttatgcttgtgaattctggtcaagatattgctgtaactatatgtggaattcctctccaccttggttctaaatacctagcatgatagttgcagtacttttacaccatata

SEQ ID NO: 293900 - DNA, 561 bp, Homo sapiens
ccatgaagtttctagatcaaattctgggggaggcaaacgggggactggctctatcaaagtaaaaattaataaattcccctgttagtcacagctgaaacacccacaaaagtagatccaaaaaagtcacagtcattgcctagtgttgctacctaggaaagctggagggaakagagatgtccacacaactgggaccaaggtaagccatatagattcaggaactataactctggcatctctacaagatgtgaactctgtaactccaatataaatataagatcccaatttgcaggctggaaacaactagacacacatgggtgaacatgggaaatacaaagtaaatatatgcccatgcatacacaaacacctattcaagatgaattggcatatcaaggtctaaagcacagagaaaaaaactagtaacttaagaatactatttaaaaaactcagggagaaataattaacttacgaaggtatgcagataatgtagtattttttaaaaatgattataaagtgaatctacctaaaatactcagagaaataaaataagaagatcgtaaatca

SEQ ID NO: 293901 - DNA, 587 bp, Homo sapiens
acaaaagctgcaggagttccttcaccattagacctgccttccacgaaatcctaaagggaactcttcatgttaaaataaaaggacacaagacagcaacatgaaagcatgtaaaagtatgaagctcactgataagggtaaatttatagataaataaaaatatggyaattctgtaatggtgatgtataaataacttttaattctgaagtaggagttaacaaaaaagtataaaaataactacaacgattaaaataggtcaattgacacacaatataaaaaaatgtgacttgtgacatcaatgtaaaaaagtccgttgggagaaaaaaagtgtagtgtttttgtatgtgattcaagttaagttgttacctacttaaaacagattgttaccatgataaggtgttttatgtatggtaatcataagaaaatatagacataagatatgaaaaataaaatgagaaaggaatcaaagtatgtcactactaagaattcaataaaacagaaaagaagcaagaggagagggtaaaaaagctacaagacagcgatatgaactgtttatgttcttcttaaattcatatgttgagttctcaatt

SEQ ID NO: 293902 - DNA, 611 bp, Homo sapiens
ttaaaacagactcttaatagaagatgtttttaaagtctgttctgaggatcatctgtatctgcatcagcccgtctgtagtttgttaaaaatgtgctttccttagccccatctacctaaatcagaatgtgttggagccctaggatatgtacctctgacaagctccccaggcaattctgatgtacactgaagtttgacaaccacagatttccaaagtttggtgacaggcaattggtgagaggcaagtagatgattaacaggggctaaatcccagaaggaatatcagttgagtttcaatgggaaggccaaccactgcatcagggaacctgggagagatccagacaggtaactggcatcaggggtgtctgtctcacaggataatggcagggctccagactcaagtttgggcacagctccaatcccaaggaagaaatatatatctgsatggtgtcttgttggagcaatattggagcaagcatgggtggtaaaaagagaataagaagtaagcttggaattgagaacttaagagtcagcatttaactgtattaattgtatttaaaagtatttacaaatatttgcaaaaattcagtgataattttttttcaaagttccac

SEQ ID NO: 293903 - DNA, 598 bp, Homo sapiens
atgagaaatagatgcagatgaagttggagccagttaaaatatccattaagacatttaaaattgcattcaagaaaacaaaacataaaatatcactatgcaatattgaaaatttataagaagagtgaactttttaaacaatgtaggggaaaaatataaatgtacacaatatgttatttataagaagaaccatgtagaactaaygaagagtgcatttctcataaagataaatggtaaaattaaatttattaaataaaatgccctcagctgaagaaaagaatgactagcataaaaatcaagaagcttcaccagattcccagaaaaaaaatacttggctgaaggtcacagatttagccatagtgaatttttaaaactattgtaaagtgaaatatatatttgtatatatagagagagagagagacagaaaaaaacattataaaggaagggaaatgagagttttctgcaacatgaaatttgaattcatcttatattcacattcactcattatacccatatttttcaatgtatttgaagattatggaaaaaatgaaaattcagaaatcaataatatcttttggtgtagaaagactgttgcacattc

SEQ ID NO: 293904 - DNA, 598 bp, Homo sapiens
atgagaaatagatgcagatgaagttggagccagttaaaatatccattaagacatttaaaattgcattcaagaaaacaaaacataaaatatcactatgcaatattgaaaatttataagaagagtgaactttttaaacaatgtaggggaaaaatataaatgtacacaatatgttatttataagaagaaccatgtagaactaacgaagagtgcatttctcataaagataaatrgtaaaattaaatttattaaataaaatgccctcagctgaagaaaagaatgactagcataaaaatcaagaagcttcaccagattcccagaaaaaaaatacttggctgaaggtcacagatttagccatagtgaatttttaaaactattgtaaagtgaaatatatatttgtatatatagagagagagagagacagaaaaaaacattataaaggaagggaaatgagagttttctgcaacatgaaatttgaattcatcttatattcacattcactcattatacccatatttttcaatgtatttgaagattatggaaaaaatgaaaattcagaaatcaataatatcttttggtgtagaaagactgttgcacattc

SEQ ID NO: 293905 - DNA, 600 bp, Homo sapiens
ttggtcatttatgttttatctttaaaatatatatakagagagagtgacatccatgaaaatggcagagaaaggacttctgaaaatttgtctctcaataaagtcaactcaaaaactggcaaaagtttgtcagaagtaacattttcatcactgttgaaactaaccaaagtcatgcagcaacctgtggagcatttattgtattttattttttaaaaaaatgactgagcctctgtaagaagcatgaatttggtggcatttttatcttctcatagtcccattccctgatttcaaactcggatatatttttgccaaaaataaaatagcctgcattctggaaaaagcagaagcacgcgatagctcattcatagcctcatttccgattttatatatatatatataatctgatctgtgcagtacttgcctgtaagttttaattcaaaaggcttgttttcatttgacccaactggagcttgccaggcctaagagctttctcttagagggtatttctgaaatatgttttacaggcaagtgttttcaactttgcagctgcctgaggcaacagatagaaaagacaagccaaaagctgggcaaagaataactaaa

SEQ ID NO: 293906 - DNA, 1096 bp, Homo sapiens
cataattttttaaagtgttaaataatttgttaaaatgagaaagagagaggtcaaggatgactttaaagtgtttagtttgaaccactggagacagaatttccattaatttagataaagtagattccagaaaggtcaatttggggtagaattgtggtgaagagttcaattatagacaggtcaaatttgatttgcctgttagattatcaagggtagatgtcaagaaggtagtaaatatacttctgcattccagaataacataaggatatgcatttcagagttgttaacttataaaagagacttcagtcggatatgggatgtgtacagtgagagtgtgcagactgagaaaggtgatcaaggacagtgctcaaaggaaactgacagttaacatgaggctgaagagaagaataaaggtcaaaaaaaggagattgaaaacaaccaaccagttatgtaagggggaaaycagatgtacatagaattctagaagccaagtacagaaagaatttcaagggagttattaagtttttcaaatgctgctaataggtcaagaaaagaagcaagaawactaacctgccctttaacaaaaattataaaaggttaaaaagagtctataaaaatcttaccttatggtcagacattaaaaattgaataactatgtctacaaagttttattaaaactawgtttaacattaataacacactaatgtaaaggcgaaatctagcttatctggtataaacacacaggaagcattgtcagatataaaatggtgtttggctttctttggtctaaaaactaaaaaataggtgctaaaggaaatttctcagtaagaaggtaccgaggactataaagtccactgctgatgtccccacatttaaaacaaaaggtcaatttcttagaaattatatactttatcttccactttcctttccctcaaaactaaaagtcttttagcacatgtaccacccctagaatttccggtaaaccagcaccagcccaaagactatgttctcatcaaagggtggaaagaagaaaaactcgagccagcctgggaaggaacctaccttatgctgctaaccaccgagacttctgtttgtacag

SEQ ID NO: 293907 - DNA, 535 bp, Homo sapiens
actaacctgccctttaacaaaaattataaaaggttaaaaagagtctataaaaatcttaccttatggtcagacattaaaaattgaataactatgtctacaaagttttattaaaactaagtttaacattaataacacactaatgtaaaggcgaaatctagcttatctggtataaacacacaggaagcattgtcagatataaaatggtgtttggctttctttggtctaaaaactaaaaaataggtgctaaaggaaatttctcagtaagaaggkaccgaggactataaagtccactgctgatgtccccacatttaaaacaaaaggtcaatttcttagaaattatatactttatcttccactttcctttccctcaaaactaaaagtcttttagcacatgtaccacccctagaatttccggtaaaccagcaccagcccaaagactatgttctcatcaaagggtggaaagaagaaaaactcgagccagcctgggaaggaacctaccttatgctgctaaccaccgagacttctgtttgtacag

SEQ ID NO: 293908 - DNA, 380 bp, Homo sapiens
ggtctgcttcttgttgtttgcccataccaagtgcatgaccactaagactttgaatttgctctaaccctaccgggaccagtctttctcttcacctccacgttgaamttgctgtccttttttttttctttttttgcctggaacattctttccatctccacatgctaccttctcatcaatcaggtctaggcttgactttcaccacttcagagagaccttcccaggcctccttatccgatatattagctcctcccctccccactctgtcacatcatcctcttttttctatgtcttagtacttatcactctgaaattatctaattcgttcacaagtgtgtgcccacacctgagctgtcatgggagttccttgagggcagaagcct

SEQ ID NO: 293909 - DNA, 584 bp, Homo sapiens
aggactgaaccaggagtgttttttaatagcccagacatatcatgtgcacataataaacaacaatctcattcccattcccaaacatctattaaacacagatccatgatctcatggttctcagcacaggccttttcaagttttactgtgattgcctctacccttagcaggactaagatcagctgatggatacagataaaaggggtatgtgtgaaagatgacagactgtgaattcatacattaataaaaaccagaaatggraacaaagaccaaaccggcagtgaagggttccctatatctgccttctgatctcattccactctctccagctccatcttctaccctcaagagtctcttgctttatcccacttcgatattgcaggctaaaagataacattgctcaaaaccctgaaagataagggccccaggactcctcttcctgtgcccatctcatcctccaacccctcgtctgtccagcacatggtttctttcactcatacataccaatacctgaacacctattttgtgccaggcactgcagcaggagctttatgtgtcatcttatttaataccacaacatgtcagga

SEQ ID NO: 293910 - DNA, 584 bp, Homo sapiens
aggactgaaccaggagtgttttttaatagcccagacatatcatgtgcacataataaacaacaatctcattcccattcccaaacatctattaaacacagatccatgatctcatggttctcagcacaggccttttcaagttttactgtgattgcctctacccttagcaggactaagatcagctgatggatacagataaaaggggtatgtgtgaaagatgacagactgtgaattcatacattaataaaaaccagaaatgggaacaaagaccaaaccggcagtgaagggttccctatatctgccttctgatctcattccactctctccagctccatcttctaccctcaagagtctcttgctttatcccacttcgatattgcaggctaaaagataacattgctcaaaaccctgaaagataagggccccaggactcctcttcctgtgcccatctcatcctccarcccctcgtctgtccagcacatggtttctttcactcatacataccaatacctgaacacctattttgtgccaggcactgcagcaggagctttatgtgtcatcttatttaataccacaacatgtcagga

SEQ ID NO: 293911 - DNA, 569 bp, Homo sapiens
catgtcaggatgatactcttgtgcccattttgcagatgagaagactgagaataacctaggctaactagcttctgttcgaggctacacattaataaatggcagtgctagaacctgtactcaggtctgaggactccagagtcagactatgttatatctattgtgccttcctaattgatatggtttggctgtgtccccacccaaagctcaccttgaattgtaactccataatgcccatgtgtcctgggaggaacccagtggggaaatgattgaattatgggggtgggtctttcctgcactgttctcatgatagtgaatgagtcatgagatctgatggttttaaaactgtgagtttccctgtacaagctctcctctcttgtttgccaccatgagatgtgcccttcaccttccaccatgattgggaggsctcctcagtcacgtggaattgagagtccagtaaacctctttcttttgtaaattgcccagtcttgggtatgtctttatcagcagcatgagaacagactactacagtaaattggtaccagtagagtggggtgctgctgagaagataa

SEQ ID NO: 293912 - DNA, 569 bp, Homo sapiens
catgtcaggatgatactcttgtgcccattttgcagatgagaagactgagaataacctaggctaactagcttctgttcgaggctacacattaataaatggcagtgctagaacctgtactcaggtctgaggactccagagtcagactatgttatatctattgtgccttcctaattgatatggtttggctgtgtccccacccaaagctcaccttgaattgtaactccataatgcccatgtgtcctgggaggaacccagtggggaaatgattgaattatgggggtgggtctttcctgcactgttctcatgatagtgaatgagtcatgagatctgatggttttaaaactgtgagtttccctgtacaagctctcctctcttgtttgccaccatgagatgtgcccttcaccttccaccatgattgggagggctcctcagtcacgtggaattgagagtccartaaacctctttcttttgtaaattgcccagtcttgggtatgtctttatcagcagcatgagaacagactactacagtaaattggtaccagtagagtggggtgctgctgagaagataa

SEQ ID NO: 293913 - DNA, 581 bp, Homo sapiens
ctaagctttcaagtactcattcaagaatgacaaggcaagtcactttgactcttgggactagactacctaagatacacttacgctgcaaattttatgctcctctcttttagtagagtataatatattaggtatcgaagtgtagttttgcatttcatgaggtccccaaaaacaggtgatcatggggaatcactccgcatggtaagagttagaatatgtgaaacaagcaagtgcaagttacattaaaattaaatacttaaggaaaagataaagtcataaaagtgcttattttgagcccatttcagtcttaatactccctccagactgggtagaaycattgctcttatctgcgaagttgctatggaaaccgatcgcgctcttctccctctgcaatagtatttttctcaggcactctctatctctcaaaaatcttagcagtgaaacagacatcaaaccccagcggattaaaaaatgggatttgtgtttcttctccccgccctcaccctcctcctttcaaaggcatgactattgacaaattggtggctcatgaattctccctacaatgatcctttttctatgcagaa

SEQ ID NO: 293914 - DNA, 536 bp, Homo sapiens
gtctttgttcatagatgacattactgtctacgtagaaaatccccaaagagtcaacaacagcagcaaaatactcctggaacgaataagcaattatagcaaaggtcacaaggtacaaggttaataaacaaatgtcagttgacttcctatatgtcaaaaatgaacaactggaatttgaaatttcaaaacacaatatcatttacattagtgccaataaagaggaagaaatagttataaaacaaaatatgttcacaatatgaagaaatctataaaccctgatgagaaataaaagaagatctaaattaatattctgtggttgtagattagaagactctatgttattaagcatgtgaattctttccaatttgatctatggatttaaggcaatttcagtcaaagtccaataaagctattttgtggatattgataarcggtttctaaagtttatatagaaaggcaaaagcctagaatagccacacaatactaaagagaaaaaatagaatcatacgcaatggtgaaaagttgaaagcttttccttt

SEQ ID NO: 293915 - DNA, 546 bp, Homo sapiens
acacttcttgactttaaattatattgcagagctgtagtagtcaaaacagtatggtactggcataaactcatatacttagaaaaatggaatagagagcccagaaataaacccatacatatatggtcaattaatagtctacaaagtctccaaaaatagacagtgggggaaaggatagtatctccaataaagtgttaggaaaactggatgtccatttgcaaaaaagtgaaattggatctttatcttatactatatataacaatcaactcaaaatgaattaaagatttgaacataagatctgaaactataaaattcctatgagaaaactggggaaaagctccatgatattggtcttggcaatgatttttttaatatgrtgaaaaacacacaccaaaagcaaaactaaacaagtgggactacatcaaataaacaaacttctgcatggcaaagacaataatcaaagcaaaaaggcaacaaaccaaatgaaagaaaatatttgcaaacatatacccaataaagggtaaatatccaaaatatataaggaactca

SEQ ID NO: 293916 - DNA, 587 bp, Homo sapiens
ctaccagggtttggtggttagggaaaatggggagatttgccccaaaggtacaaacttttggttataagatgaataagttctggagagctaatatacagcattatgactatagttaattattgtatacttggaatgtgctaagagagttgatcttaagtattaacaccatatacataaacaaaaaggactgtgaagtaatgtgtatgttaattagcttaattgtggtaaccattgcacaatatrtgtgtatatcaaaacgtcctgttatacactttgaatatatacagttttttttgttaattatacctcaataaagctgaaaaaaaaaaacaaagaggactgatactatttgacttcaagtcctactattaagctataataattaggatggcatggtattgcaaaagaatacatacataaataaatagaagagaacagagtgcccagaaatagagccacacaaatacagtcaactgttgtttgacaaaggagcaaagaaattcaatggagaaaagaaatcatttactcaacactaaatgatgttagaacaattagacatccacgaacaacaaacaaatctagacaca

SEQ ID NO: 293917 - DNA, 587 bp, Homo sapiens
ctaccagggtttggtggttagggaaaatggggagatttgccccaaaggtacaaacttttggttataagatgaataagttctggagagctaatatacagcattatgactatagttaattattgtatacttggaatgtgctaagagagttgatcttaagtattaacaccatatacataaacaaaaaggactgtgaagtaatgtgtatgttaattagcttaattgtggtaaccattgcacaatatgtgtgtatatcaaaacrtcctgttatacactttgaatatatacagttttttttgttaattatacctcaataaagctgaaaaaaaaaaacaaagaggactgatactatttgacttcaagtcctactattaagctataataattaggatggcatggtattgcaaaagaatacatacataaataaatagaagagaacagagtgcccagaaatagagccacacaaatacagtcaactgttgtttgacaaaggagcaaagaaattcaatggagaaaagaaatcatttactcaacactaaatgatgttagaacaattagacatccacgaacaacaaacaaatctagacaca

SEQ ID NO: 293918 - DNA, 536 bp, Homo sapiens
aaactaaaacaacaatgatacactgctacgtatctattagaatggctaaagtccagaaaactgacaataccaaatgctggtgaggatgtggagcaacagagactcattcattgctggtgagaatgtgaaataatacagctgctttggaagatagattagcagtttattacaaagctaaaaatagtctcaccatgtgatcccacaatcttgatcctaggcatttatctgaattaaattttgtcccccaaaaaacctgcccacaaatgtttatagtagcttcatttataattgccccaaacyggaagtgatcgagatgaccttcaataagtgaatagataaaaaactgtggtatatccataaaatagaatattattaatcaataaaaatgagatatcaagcaatgaaaagacattgggaaaccttaaatgtgttttgctaagtgaaagaagccagtctaacaagatgacaaactgtaagattctaactatatgacactctggaaaaggcaaaactatagagacgttaaaaagatcagt

SEQ ID NO: 293919 - DNA, 617 bp, Homo sapiens
cgggggtgggtgaactattctgtatgatactgtaatgttggatatgacattatacagttgtcaaacccatagaattttataatataaagagtgaaccttaatgcatacaattaagaagtaatgtaygtggttaggggattctaggaaagaatctgtagtgtgacgagggattctgattgtgttgcaaatgtatgaaacaacctcactgaagggaggggtgataaaggtgctgacctaagtaattttggaagtgagtggagtctaagaataaagacaaaaggtattgcacataagcactgtactttagttgataaagttgtttcttatggggttacaggttaacaattctgatactgctatacatgtatgctgaaagtgaacaattaaacaaatggatgctggatggtgagatccaggtttctcatagttgctgtgggaatttacagataagcaagaggaggaggttagaatgatccaggtagggtaatggattaaagttagagacattagtcagccataatgtttaacttgatatagataccaatgtttacacatagaaatctttatagatagtaatatacacaaatttatttcttctgtcagctgagagattccaa

SEQ ID NO: 293920 - DNA, 1229 bp, Homo sapiens
cgggggtgggtgaactattctgtatgatactgtaatgttggatatgacattatacagttgtcaaacccatagaattttataatataaagagtgaaccttaatgcatacaattaagaagtaatgtacgtggttaggggattctaggaaagaatctgtagtgtgacgagggattctgattgtgttgcaaatgtatgaaacaacctcactgaagggaggggtgataaaggtgctgacctaagtaattttggaagtgagtggagtctaagaataaagacaaaaggtattgcacataagcactgtactttagttgataaagttgtttcttatggggttacaggttaacaattctgatactgctatayatgtatgctgaaagtgaacaattaaacaaatggatgctggatggtgagatccaggtttctcatagttgctgtgggaatttacagataagcaagaggaggaggttagaatgatccaggtagggtaatggattaaagttagagacattagtcagccataatgtttaacttgatatagataccaatgtttacacatagaaatctttatagatagtaatatacacaaatttatttcttctgtcagctgagagattccaawagaataattccaaataaattatgtagctactccaccctaaaggtggagggatacaatgctttactcctggagtgtgggctgcacacagtgacttcctttcaaagtgtacaatgtgaaaagggaagaaaaagtacagtaaagaacggtgacaaacattatgtcagccacatgatcattgtcaacatcagcagccataaattatgtcagtagtttgtactcttcatatgatgtgctgaaaatggcattttaactgtaatcttctcaaaaatgcagatwccgtgtcatgagaaaacaccagaaaaaaattctatagaagggcatcgtacagtgtacctgaccagtactcctcacaggtcataaaaagcagtctgagaaaccatcaaagccaagaaaatcctgaggagacacaacaataaaatgtaatgtgatatcctggatgagttctgggaatagaaaaaggaagttaggtaaaaactaagaaaatctgaataaagtttgaagttttagttaataataatatgtcattattggttcattccttttagcaaatgcatcatactaatgtaaaatgttaatgataggggaagcagtttgtggtggtgtgtatggga

SEQ ID NO: 293921 - DNA, 556 bp, Homo sapiens
agaagtaaagctttggatttataggcagccatgtcccccaccactggggtggcagaggaatctagtctttggagagaggggtggacatgagagatggaaagagactcctgtctacatgttcctatggctcagttgcatttctcttccttgagtatcactgtattctaataacctaatagatcctcatatcttccctttcaactcaagctaactaagtgtctcatatttgcaaagcaaaatgttccaagtacatgacttaagctccagctacagtgccctgaataagggtgggataatcataatagtaaatttccaagtggccaagtcttaactttgccttggccacactaatgtggtccrtgtggtcatttccaggctcaactttctgaagatgatggtcaagagacagaagtctctgaggaagaggaggtagctgtttagaaatgtttaaagggttgccatgtataagtcaaagtaggtgttctatgttgctccaacagacaaaaatgataccaatagtcaaaagttggaatgcagattttgactggacacaaca

SEQ ID NO: 293922 - DNA, 546 bp, Homo sapiens
agaaaaggcagaggaaattaaacccaaaataatgatgaacttatctatatttttcttttgttctgtcacatttaaaatgtttatgttttcttcatcacgtaattcatttatcattatgaaatacctgtctttatctcagtatgaaatactctctgtgctgaagtctcctttctgttatataacatagtcatggcggatttctcataattagtgtttgmgtggtgtatgttgttccattttccatccttttactttcaacttttctgtgtttttatgtttaaaatgtattccttgtcaaaaacatatactttggtcttcctttttaaaccaatacatacttgctgatgtatttgtgttttattccacctgctttttgtttttttgttcctccttttctgcctcttttatgtgtgaattaagtatttttagatattaatttttgtgttattttctgttagttatcattagttgcttttatgtctgtcatttttatatagatattactatatgcatctctaatttatcacatcggcaacaaaaattatt

SEQ ID NO: 293923 - DNA, 566 bp, Homo sapiens
ggtttcttacaggcttttaaaaattatgattttttagattatctggtttattcttgctgttagggtggrtgcaatattctctcttgactttctatatctctagtggaagtgggattcaacataggctttgtatgttgggttttatgctgaaatgggtacaagccaattctaattgactttttaatgaactctcctcaaattcttgatcatcatcattgaaaacagagtttcacacagggatgataaaatatttaaaaccattttttacaatcattcaaacatttgtaagagttatatttaaagactttaatagctattttttattgacaaatgctatgttaaattttattttgtaacaaggcaaatagaattcaaatgcgagctgtcttttgcatatcaagtatttgaaaataacaatggagctctaatttatagagcatgcatggcagagcattcaccaggaagttaactgggttgctagtgagagcaccatcagctacaaagaaacaattaacagatatatgagaaatagaaatttggagttacagaggaaatgaaattggtat

SEQ ID NO: 293924 - DNA, 684 bp, Homo sapiens
taatttaaaaataaaaacttgcattcatcaaaagatactattaggagtatgaaaagacagccaaagaatgggagatttttataatataaataactagaagggacacatatctagacaatatgaaaactcctaccaataaataagaaaaagacagacaagcttatacagaaataggaaagacatttgaataggcacttcacataaatgagtatccaaatgaccaatcaacatgaaaatgtggccagattcattaaagaaaatgcatattacaactacaataagctaccactggtataacttttttttttttttgagacagagtctccgtttgtcacccaggctggagtgaaacrgcatgatctcagctcagctcactgcaacctccgccgctcaggttcaagagattcttctgcctcagcctcctaagtagctggaattacaggcgcacactgccacacccggctaatttttgtatttttagtagagatggagtttcaccatattggccaggctggtctcgaactcctgacctcgtgatccacactcccttggcctcccaaagtgctgggattgcaggcatgagccaccacgcctagcctggtataatttttaacatggtagaattaaaaagccaaacataacctacacagaagtgtaaacaagaatgtaaagcaatagatgcag

SEQ ID NO: 293925 - DNA, 684 bp, Homo sapiens
taatttaaaaataaaaacttgcattcatcaaaagatactattaggagtatgaaaagacagccaaagaatgggagatttttataatataaataactagaagggacacatatctagacaatatgaaaactcctaccaataaataagaaaaagacagacaagcttatacagaaataggaaagacatttgaataggcacttcacataaatgagtatccaaatgaccaatcaacatgaaaatgtggccagattcattaaagaaaatgcatattacaactacaataagctaccactggtataacttttttttttttttgagacagagtctccgtttgtcacccaggctggagtgaaacagcatgatctcagctcagctcactgcaacctccgccgctcaggttcaagagattcttctgcctcagcctcctaagtagctggaattacaggcgcacrctgccacacccggctaatttttgtatttttagtagagatggagtttcaccatattggccaggctggtctcgaactcctgacctcgtgatccacactcccttggcctcccaaagtgctgggattgcaggcatgagccaccacgcctagcctggtataatttttaacatggtagaattaaaaagccaaacataacctacacagaagtgtaaacaagaatgtaaagcaatagatgcag

SEQ ID NO: 293926 - DNA, 547 bp, Homo sapiens
ttacacaaaaatttttcagaagaggaaacaaaagttcatgcttgcactagtgcgtctttaatgctaaaactagtttttaaataaaattttataaatctatccagttttaaattagtttgatcataaggtaagattttcataaactttttagaatgctttacaattttccattaaacaacagattaattttctaagcaaaccctgttattcgggcacttgggcccagattctggacctgcatcagygtgctttcatttgaatgttcgacctacaggaaaaaaaaaaaactaaataaatctccttcaaatcttagccaacttgcttcatatccacagaactttctgtacaaggtcaacccctcatgaaccctttattttaacttaaaacggtcctttaaccctctaaactaggcacaaaaacacattgtcttcttataatcttttgccaaaacacattctactttgcttacacaccttgtatgtaaaactgtttctccagtcgtctcaattatatattacaatgttaactcttagcaacttttattttt

SEQ ID NO: 293927 - DNA, 559 bp, Homo sapiens
gaacctctgcccacagggctggtatgaatgataggtagaatatggcagaagcgatgatatgctactttaaggattaggttataaaagactgttggattggaagactagacttaggttgcaaaagactgtggcttctgtcctgagttctctcttttgaattactcactytggggcagacaagctgccatatcatgaggacactcaggtggtctatggagaagctcacctggaggaaaagaagttttcagtcaacagccagcaaggaactaaagccttccaacaaccccatgagtgggtttagaagcaaattctactagttaagcctgagatgattgcttgacagcaacctcatgagaaagctggagccagaactaccctgttaagctgctcttagatttctgaaccacagaaactataagataataaatgttcactgtttttaaattactaagttttcaggtaatttgttacacagcattagacaactaatatacttttcttagctcctgggagatctgtttcatttaatgccccataagctttgtttcaaaaagcatcc

SEQ ID NO: 293928 - DNA, 559 bp, Homo sapiens
gaacctctgcccacagggctggtatgaatgataggtagaatatggcagaagcgatgatatgctactttaaggattaggttataaaagactgttggattggaagactagacttaggttgcaaaagactgtggcttctgtcctgagttctctcttttgaattactcactctggggcagacaagctgccatatcatgaggacactcaggtggtctatggagaagctcacctggaggaaaagaagttttcagtcaacagccagcaaggaactaaagccttccaacaaccccatgagtgggtttagaagcaaattctactagttaagcctgagatgattgcttgacagcaacctcatgagaaagctggagccagaaytaccctgttaagctgctcttagatttctgaaccacagaaactataagataataaatgttcactgtttttaaattactaagttttcaggtaatttgttacacagcattagacaactaatatacttttcttagctcctgggagatctgtttcatttaatgccccataagctttgtttcaaaaagcatcc

SEQ ID NO: 293929 - DNA, 605 bp, Homo sapiens
tgtttttaaattactaagttttcaggtaatttgttacacagcattagacaactaatatacttttcttagctcctgggagatctgtttcatttaatgccccataagctttgtttcaaaaagcatccacttccctcaacaagtttgaatatgcttttgtttcttctggttgaaaggaccagacccgaacccatgccaytacactcaatccttggggataacactccttggagcccagacaactcaccttaattcccatccctgttttcatcccatctgttctgctcaagtaattgcctagattcatattctactttgtatctgcatccactaggttccaagccatttgcctaactttaagctactggcaggctgtgcacttgactcttatcccctgagctgactgtccagacactcccctggccagctgggatccaacgcttgcctaaccttccagtcttatttttgaatctcacaggactaacttcaaatatgtcaccctttccaccattatcaaagtctcagccttaaggaacacttatacttttgttctccagattgacgttaaggctgccttatagcaagaacagatcatgttttttccaata

SEQ ID NO: 293930 - DNA, 547 bp, Homo sapiens
caagtttgaatatgcttttgtttcttctggttgaaaggaccagacccgaacccatgccattacactcaatccttggggataacactccttggagcccagacaactcaccttaattcccatccctgttttcatcccatctgttctgctcaagtaattgcctagattcatattctactttgtatctgcatccactaggttccaagccatttgcctaactttaagctactggcaggctgtgcacttgactcttatcccctgagctgactgtccagacactcccctggccagctgggatccaacgcttgcctaaccttccagtcttatttttgaatctcacaggactaacttcaaatatgtcacccttkccaccattatcaaagtctcagccttaaggaacacttatacttttgttctccagattgacgttaaggctgccttatagcaagaacagatcatgttttttccaatagtgaatatgccactaaaattcactggcatattcaccactggacaaatcattagcagtacttgctataaggcaggcttt

SEQ ID NO: 293931 - DNA, 218 bp, Homo sapiens
gagtcagaaagaatatgccaagattcacagtagcagccctaatggctgggttttgcaaaggctgagggtgtgtggggaggggcacttgctgaaatattagacatcrtgttttcatttgagtcctatgagaacacccatgctccctcctccagctgattagcctgctgaaaatatattaccttcatctccaaccaacataatttactaataacattgca

SEQ ID NO: 293932 - DNA, 541 bp, Homo sapiens
attcagacctagtcagatgagagtcttgtgatacctatccatgtccctccagagcaaaatgaggtcactaagtccctgggagtgtcacctctgtgcttggaggcaacaattcgacctaasattccagaatttgaggctttatctgccagactccattgaaattctgagttatactgacttcaatgtctctttttgttctttttttactgagttttatgggcagcggattcccctccctgttggatatgaggtgttgtggactctctgggccaaaaaccactcttggcccagaaggctcatatttggctttcagacaagcctggcagacaccgccaaggagttggctcacggcctgctctacagactttttaaaggagtggaaccaaaacaaggagaccttagaatgtaacagctaaacattgcaagttcgcttcacctcattcaaatgatgggagacatattccagtcaacgttaactgcatacatccatgtgtcgtgtacataatctaagggtctgcagcattctggaatcctggatgtc

SEQ ID NO: 293933 - DNA, 541 bp, Homo sapiens
attcagacctagtcagatgagagtcttgtgatacctatccatgtccctccagagcaaaatgaggtcactaagtccctgggagtgtcacctctgtgcttggaggcaacaattcgacctaagattccagaatttgaggctttatctgccagactccattgaaattctgagttatactgacttcaatgtctctttttgttctytttttactgagttttatgggcagcggattcccctccctgttggatatgaggtgttgtggactctctgggccaaaaaccactcttggcccagaaggctcatatttggctttcagacaagcctggcagacaccgccaaggagttggctcacggcctgctctacagactttttaaaggagtggaaccaaaacaaggagaccttagaatgtaacagctaaacattgcaagttcgcttcacctcattcaaatgatgggagacatattccagtcaacgttaactgcatacatccatgtgtcgtgtacataatctaagggtctgcagcattctggaatcctggatgtc

SEQ ID NO: 293934 - DNA, 576 bp, Homo sapiens
ttagaatacttaaaatccaccagcagctacattcaaaacagcagccacatgtaaagcagcagccacctctgatgctgctgccgcctctgactagtccacagggcactgccagcttaaagtgataggcccagacagcacccaggaggccactaaaggaccatgtgcggccttgaggtgctgaaggaaacagcacgctgttatgggctgactcatttggcaaygatgtaattggatacctttaatgagcacccaaataaacttttaaaaatttttacaatcacgcctttctcaccacttaaccaccactaatgatgtgtttattgtaaactttttaaaaattttacaatcatgcctttcttaccactggttttcaatatttctccacctttaaaaaaggagaaaagaaaaataatcatgtaataaaaatactaaaaagcttatttatggacctttgcatcccttttgctctttggtagaagaaaaaaaggggtaggggcctcaaacagtacctggtatgtagtaagtactcagtaaacactaatgttataaggttatgtacacaaagaatgagaaaat

SEQ ID NO: 293935 - DNA, 576 bp, Homo sapiens
ttagaatacttaaaatccaccagcagctacattcaaaacagcagccacatgtaaagcagcagccacctctgatgctgctgccgcctctgactagtccacagggcactgccagcttaaagtgataggcccagacagcacccaggaggccactaaaggaccatgtgcggccttgaggtgctgaaggaaacagcacgctgttatgggctgactcatttggcaatgatgtaattggatacctttaatgagcacccaaataaacttttaaaaatttttacaatcacgcctttctcaccacttaaccaccactaaygatgtgtttattgtaaactttttaaaaattttacaatcatgcctttcttaccactggttttcaatatttctccacctttaaaaaaggagaaaagaaaaataatcatgtaataaaaatactaaaaagcttatttatggacctttgcatcccttttgctctttggtagaagaaaaaaaggggtaggggcctcaaacagtacctggtatgtagtaagtactcagtaaacactaatgttataaggttatgtacacaaagaatgagaaaat

SEQ ID NO: 293936 - DNA, 558 bp, Homo sapiens
agtgagttctcacaaggtctgatggttttataaggggctcttccctgcttcgctcagcacttctccttcctgctgcctatgaagaaggtctcttgcttcctctttgctttccaccataattgtaagtttcctgaggcctccccagccatgctaagctgtgagtcaattaaacctctttcatttataaattacccaggctcaggaagttctttagagtagtatgaaaatggactaatacactgtgtcattaggacactttcagttgcaagaaagtgaacttactgagaagtttaaactataagttatcagttcatataacaagaagactagaggtaggaaggggactaggcatgctgcattacagtcacagcttcgtagctctgcaattccttccattacctcctgtgctggcttcatccataggcttgtagtaagrtaatgacagctagtcaatccatcctctggcaatctcagaattcaaagagcataggtccaatatgcaaatgcctatcaggcctctaatttatccctatttaatttgttcatattattggccaa

SEQ ID NO: 293937 - DNA, 519 bp, Homo sapiens
atttcaagtccaaaacttgtgtgctcacaaattcaggtactacctaatattctaaagatttccaatgattttcsttgattcttttctgctaatgtgtatgacaaatagggggaaaaaatcacgcttcaaatggtttacaggaatcacaaaaatagcatcctacacaccaaggaaattttgaatatttatacttttttgtctccacccacacagttactttgtgtagagaacacagctgttcatttgtaaatgattcctgatgtttggatgacctctggggtggtctgcagacatcatccccaccagcgattctaatgttttgatagatatctgagtgggttcactgatgaagcaggcagagccatgctgtggccccaaataaagacctacaatgtacctttcgtatttagctttcataaatcagccaaaaaggtttcaaaacttccaccttggtgttagcaaactacataataaagaatgataaatgacaacacaactgttcagaaagccacctgcatc

SEQ ID NO: 293938 - DNA, 401 bp, Homo sapiens
tactatgtacccacaaaaattattttaaaaaagaaaaatattgcattctctactgcactttcataaagggagggtgggccatgtgccaaaggcatgcagaagaaaagaggagtgggaaggagtgagcccctcagaaaggccatggggtccagagaagctgtgtagactcacacttcccaatgatattcttctgggtagagtgaatttgcaacagtgtcagtatcttatagctcaagtccactttagttggttggttgatttcttcaactaacttgctgatacctgcaatgccactatgcaggctttccatttagtgtaagactttacttgytattaaaataaaaatatggcaggcaggatactaagattttaggccaagaatagtgaaaggactagctggt

SEQ ID NO: 293939 - DNA, 594 bp, Homo sapiens
cttttcaccatgcaaatatatctgcatgttaatatcatccagtgagcattttgggggtgtctctaaactattcagtatcaagagagttaacagccatgtycctaaactcttaaaacactaatgggaccctacagaaaagatcaaagagatttcagaagaatgctcatctttttccccagaaaagagaagcgaatatagaggtaggtcattaggtttgcagatttggtacagccttcctgaaaaagagatgtgtgacatgcagaaaagagctgggatgcagaattgaggcagacagtcagtttacaaccttgaaaagaaagggctattgactaggaatctaaaggccaaaaatgcatgctctcttttgtctaaatgtcctctttttcagatccctaaatcacaaagagatacaaaatgggaatttttctaaaattcgacaataatttccaacagaaagcatctggctactccttttgcattctcacatgcattctcttttgctctcatcatagccacatgtgcaggtacacacacgtgcgtgcacatacatacacatatttctctgtttttttcacagtcatctacacctgtact

SEQ ID NO: 293940 - DNA, 594 bp, Homo sapiens
cttttcaccatgcaaatatatctgcatgttaatatcatccagtgagcattttgggggtgtctctaaactattcagtatcaagagagttaacagccatgtccctaaactcttaaaacactaatgggaccctacagaaaagatcaaagagatttcagaagaatgctcatctttttccccagaaaagagaagcgaatatagaggtaggtcattasgtttgcagatttggtacagccttcctgaaaaagagatgtgtgacatgcagaaaagagctgggatgcagaattgaggcagacagtcagtttacaaccttgaaaagaaagggctattgactaggaatctaaaggccaaaaatgcatgctctcttttgtctaaatgtcctctttttcagatccctaaatcacaaagagatacaaaatgggaatttttctaaaattcgacaataatttccaacagaaagcatctggctactccttttgcattctcacatgcattctcttttgctctcatcatagccacatgtgcaggtacacacacgtgcgtgcacatacatacacatatttctctgtttttttcacagtcatctacacctgtact

SEQ ID NO: 293941 - DNA, 528 bp, Homo sapiens
gctaagaatgctaatgttttgccttgaccaagaaaaagctctccataaatgacaaggaatcaccctcattggactatttaagtttaagtgtttttttttttttttctctaaaggggtaagttaaaccaaaacaatagagataggtcatcatataatacatactactgctttgagatcattaaagaaaaaaaaagttttaaaattgtttaatttccgaagtcctttctagttggcaaactcaactggagaaaagccatgagagtcaccgatraacaccaattcaggcagcagccagttgtagctaaatgcagtcaaagaaggtcagagcctttgccctcttgagactcagatggaaagggaagaaaaggaagcctgggctgggaatgaggacacccaaggaggttaagaagaaaagactacagcagagagagcttggcaagaaaggagcatgcagttgggattccaagcggcagcacccaagggcagctttgcttctcatcaaccatcacagtagagagcagtgcgagc

SEQ ID NO: 293942 - DNA, 611 bp, Homo sapiens
ttctcacttgtccatcttccccagaagaaaatgagcttctccagggtcacaccacgacttagtgtattagtccgttttcatgctgttatgaagaaatacccgagactgagtaatttataaaggaaagaagtttaattgactcactgttctgcagggctggggaggcctcagaatcatggtggaatgggaggcaaactcctctttcttcacatgacagcaggaaggagaagaattatagacaagtaaagaaggaagccccccataaaactatcagatctcatgagaacccacscaccaccatgagaacagcacaggggaaaccacccccatgacccaatcacctcccactgggttcctcctatgccacagagggaccatgggaaccacaattaaagatgacatttgggtggggacccagccaaaccacgtcacttagataatttttatccttagagcatgacctggtgctagcacacagtggacccttggaaaagaaagaacaaattaatgaatgtgatttgtactgcttttatttatgtgttattccataatgaaatggcaacatgaattatattaagcaaatcatttttactgtttatttaaaaggtttt

SEQ ID NO: 293943 - DNA, 609 bp, Homo sapiens
acttgttttctggttggaaataaaacagccaaactataagtaaaaaattagacaagctagttgcaatagtgacatatgctatgaagaaaaaaatagggtaaagtgatagatagccaccttggggctaccttaaatggctgaagaaagtcgcagataaactagaatagggatctgcaaacttttttctgtaaacagtcagatagtaaatattttaggctttgtggaccaaataatagtcacaacgattcaactctgctactgcgcacaaatggaaccatagacaatatgaaaatgaatagtcacagctgtgttccaataaaactttattacaaaccmaggtggatttgacctgtgggccacagttggttgacctcttgactagaaatctatttcatagatggcttgatggtcatagtcaagtggctcggctgtctttccagaacagcttttgcagatgttccaaagccaacctattactcaaagcaccttgcagagaaagttggaggacttaaacaacacaggcttacttggctctattttccctacccaagtgtataataattgaggatttaagagagtgcccttaggaaaagaaagaagataattacc

SEQ ID NO: 293944 - DNA, 435 bp, Homo sapiens
tgggggtgcttttccaggtgcctgagctgctggccgttcttccagaaccttctcaggatttgcaatttggggtgcctttgcttcacacccagctggaaggcaaagttactccaatcaagtcatccagcatgacatgggaaagacagatgagggyttctcaacacattcgtctcacagaaaacatttttcacacaacccttcaatgacataacccagaaaatgctaagtggaagaaaggagatattagcaggcatttttgaatgtaatgattaggaggaaataaaacaccaaatttggaataggataaatctggcttcaaagcatggtattcaatgtggttttgagcaaatgacttcactttaagcatgttgtttctcctcttctctcctgactttcctctttttcttctctttcgataagaacattttagtgaac

SEQ ID NO: 293945 - DNA, 570 bp, Homo sapiens
acagaagttagtaggcctctgggtatattagaattggagaatatagcctggaggtgccagtcaagtgcttcataaaggaccatttgagagcactgttgtttaaatatcttggggctttgttgaatcaggctttcttctattgcttgcactctagtccacctgccgtctgtaagggtaaaactccaccatgccaccctgctgaccttcagcacgtctgaataggccacataggtaaaggcttgagccactgctaatttgagtcttggaaggatgtcttgtgatcatgttccaagaaaaacacaacaggatggcaggtttgcaaagatctggtgaggcatttactcacttacttccatatctcccactgcaggctgtcataagacaattttctgtacctcctaggttctgatgaggtacggggcttccagccttgcctccctgatattagagttgtagaatataaaaccacttagttgcagtctaaaagkggctccacagcaaaagggtactctacagtttccaatgtagtcatctaagccctcttgttttgtttcagtgttatcatttttg

SEQ ID NO: 293946 - DNA, 588 bp, Homo sapiens
agaatactcatgaacagtgactcaagtatttggcagagataagttgaagtaaaccaagctgcatgggtcctgacacacaaggcctgccacaggaacactcagccccaattcagtatagttttctattgacttgactactctgtaagtaatttcaaaagatacaagaaatgttggttattgcattagtattaatgtcatatacgctctataaggaaaatgataaggcataaakgaggctaaattatgagcaatagttacacagttaatttgttatttgttaataacacagataggaatgatacatctttgttattgtcaggagcagcattcaccatgctccctcatatgtgaaggcaattatgaatgagcaattcaaggtctagtgtaataattgcagacagtttcttagtgaagagttacaaccattatctagtaatacctaaaaactgtaatgttttttaaagtttgtattttgaataatggcttattttaacttattagcctactaatgacgcactctgtttagcttcaacaaccagccagtaaatttccattcctaaggtggttccaagatgttatgatgaaaca

SEQ ID NO: 293947 - DNA, 581 bp, Homo sapiens
gtctctgcctcagtagttacattgccttcacctcttctgcctgtgtgtcaaatcttcctctgccttccttttatgaagatatatgtgatcacgtttagagaccaccagataacccaagataatctcctcatatcaaaatccttcatttgaatcacatctgcaaagatcttttccttgcccatatgagaaaatattcacagcttccaaggactagagcaytcataccttttgtggaggtcattgtcaaggctactacacaaattatcctttgttattactttatttcccagcaagagtaccttccagttcagacatggattggagaccattcatagttcttgcacagcatcctctctccctctttagtgtttttgcacttattctccttctgccttgaatgctattcttgatttacttaattcctccatattcttctccaatttagactaaaacaaacaaatgaaaaatgaacaaaacaacaacaacaaaatgctccattcagaggatgttgggactgatttctggtccttgtgttctgtgcacattcttgtaacctcgtattgcagggttttactttttct

SEQ ID NO: 293948 - DNA, 297 bp, Homo sapiens
cttccagttcagacatggattggagaccattcatagttcttgcacagcatcctctctccctctttagtgtttttgcacttattctccttctgccttgaatgctattcttgatttacttaattcmtccatattcttctccaatttagactaaaacaaacaaatgaaaaatgaacaaaacaacaacaacaaaatgctccattcagaggatgttgggactgatttctggtccttgtgttctgtgcacattcttgtaacctcgtattgcagggttttactttttctttctgaggtacaact

SEQ ID NO: 293949 - DNA, 452 bp, Homo sapiens
cgtttagagaccaccagataacccaagataatctcctcatatcaaaatccttcatttgaatcacatctgcaaagatcttttccttgcccatatgagaaaatattcacagcttccaaggactagagcactcataccttttgtggaggtcattgtcaaggctactacacaaattatcctttgttattactttatttcccagcaagagtaccttccagttcagacatggattggagaccattcatagttcttgcacagcatcctctctccctctttagtgtttttgcacttattctccttctgccttgaatgctattcttgatttacttaattcctccatattcttctcyaatttagactaaaacaaacaaatgaaaaatgaacaaaacaacaacaacaaaatgctccattcagaggatgttgggactgatttctggtccttgtgttctgtgcac

SEQ ID NO: 293950 - DNA, 581 bp, Homo sapiens
gtctctgcctcagtagttacattgccttcacctcttctgcctgtgtgtcaaatcttcctctgccttccttttatgaagatatatgtgatcacgtttagagaccaccagataacccaagataatctcctcatatcaaaatccttcatttgaatcacatctgcaaagatcttttccttgcccatatgagaaaatattcacagcttccaaggactagagcactcataccttttgtggaggtcattgtcaaggctactacacaaattatcctttgttattactttatttcccagcaagagtaccttccagttcagacatggattggagaccattcatagttcttgcacagcatcctctctccctctttagtgtttttgcacttattctccttctgccttgaatgctattcttgatttacttaattcctccatattcttctccaatttagactaaaacaaacaaatgaaaaatgaacaaaacaacaacaacaaaatgctccattcagrggatgttgggactgatttctggtccttgtgttctgtgcacattcttgtaacctcgtattgcagggttttactttttct

SEQ ID NO: 293951 - DNA, 624 bp, Homo sapiens
ttatttgttcatttgcaataaataccttaaaaatactgccttttctttttcaaattagatcccataagaaatgttagttatagcattaatgtgcttgggaagtatttatgtagcaaatataagcttcattacattgtcatgcaatataactttgtgatcctaattatatgtgtatttactatagaaagtagaagatcgagaaaaatatattgtgggcatttttaattaggttttaggtggaaatgttaatactatattttcaggatgataccttttactaaggaaatgtgaaaaagaaagttaatatgttgttgtagtaaaactaattactattcttgttagcatacagtatttcttcattgaaattttactgatttcattasctggtccattaagtgcaaattttcacttgtaataaccaaaatgaattagtgactttcttgttttgttatactgtaaacataacagaaaatctctgcatatatatatatatatatatatatatatatatatatatatatatacctgtatatatatgtctagcctgcctgctgagagcctttaggcattgctatgtctctgcagaaactcagaatatgccttaggtttccactgcggaaatta

SEQ ID NO: 293952 - DNA, 526 bp, Homo sapiens
agactcacttcctgctgttttctgtgttgtcatttgtcatttttattatgtgatggtgcttcaggggctatcagaaacaaagaaatgggtcccttttatgcttatctctgttcagacctaattgtcttttattttttaatttaaaagcagagtcggaagatggttatttcaactgattttttctgcatactttactccggctggtatctcttaagatttactgctttaattaattatagtttagacatsatgaaattatttagagtcaaaagcaagcctgattgtctttggaactttgataacgggaaactactgaaatatgatgaggggggtgtgtgtgtgtctgtgtgtgtgtgtttacctatataataaatatatgttatgtagcatatttacataattatatgtatagtttataaaactacgaaatatagtttatgccaaaggctgagtttatcttttttttattttaatctgtctcttgaggagcatttaaaatgtgctagcaggttgtataaaagacata

SEQ ID NO: 293953 - DNA, 606 bp, Homo sapiens
cctgccaggggtcaacaggtactcacaccctctgatatctgtaaactaaaaacagaattctaagcctgtcagttgactgaatggacccctcctctcagtcaaggccattccaaagtaaacctgaaaaactagtgcatccatgatgggaagaggggtgtcagacatgtctcattatacccgactccctttggaattaaggcacaactgaccagcattacattaaaacagagatcttaagagtgacaaaaagactctttaccacaataaaatacctaactctaaccgactctaatatagcatcacatggcagatagccagccctaaaagaaatcaaagtattcaccccaaaatatatttcattgatatatttgaaatggccctgcaaagctgccacttctggagaaaatctatattctgcagagaatcctcctctctttccaggtctttttgtgacacaggagagatttaactggcttgcaccttttagagtctgataagagacatttattgtctattctctctgaagccagctacctgaaggcttcatctacacaataagaacytgggtctccagagccctttaccttaacccagaaactcctttct

SEQ ID NO: 293954 - DNA, 597 bp, Homo sapiens
aaaattgtagtgactaatgggcaaaaartggtcaatatattaaaatcaacatagacagttattttattaactatggaaagaaaaaaaattgtccgtgtctctgatagttatttagaagagtacttgaaaggtatttttcaaaaaatatatttttaagatatggccttaaaaccaccagaaacttttatttctattattttaaacaaataagaaaaaaagtttctaaattatttatgctataatatgaaagttcataaagatgaagatttttgtaatgaaattatataattttataatagttctgaacttttttttcaagtgctctttctgtctataatacagtacactgaaagtgaacagtctttggtagcactatctttaaaccctcaacgttgcaaaactctccatattcccacagaattctcacttactggacttggcgcttgactgagagagtgaggcagagtaagtctatatatacatgttgggaaggatacttctttcattttgggtaaagtagaattgaatagcttttttgtttgtttatttcatccaaagcagatgactttggaccgtactggtgaaaaataaggtaag

SEQ ID NO: 293955 - DNA, 1195 bp, Homo sapiens
aaaattgtagtgactaatgggcaaaaaatgrtcaatatattaaaatcaacatagacagttattttattaactatggaaagaaaaaaaattgtccgtgtctctgatagttatttagaagagtacttgaaaggtatttttcaaaaaatatatttttaagatatggccttaaaaccaccagaaacttttatttctattattttaaacaaataagaaaaaaagtttctaaattatttatgctataatatgaaagttcataaagatgaagatttttgtaatgaaattatataattttataatagttctgaacttttttttcaagtgctctttctgtctataatacagtacactgaaagtgaacagtctttggtagcactatctttaaaccctcaacgttgcaaaactctccatattcccacagaattctcacttactggacttggcgcttgactgagagagtgaggcagagtaagtctatatatacatgttgggaaggatacttctttcattttgggtaaagtagaattgaatagcttttttgtttgtttatttcatccaaagcagatgactttggaccgtactggtgaaaaataaggtaagwaaaattgtagtgactaatgggcaaaaaatggtcaatatattaaaatcaacatagacagttattttattaactatggaaagaaaaaaaattgtccgtgtctctgatagttatttagaagagtacttgaaaggtatttttcaaaaaatatatttttaagatatggccttaaaaccaccagaaacttttatttctattattttaaacaaataagaaaaaaagtttctaaattatttatgctataatatgaaagttcataaagatgaagatttttgtaatgaaattatataattttataatagttctgaacwtttttttcaagtgctctttctgtctataatacagtacactgaaagtgaacagtctttggtagcactatctttaaaccctcaacgttgcaaaactctccatattcccacagaattctcacttactggacttggcgcttgactgagagagtgaggcagagtaagtctatatatacatgttgggaaggatacttctttcattttgggtaaagtagaattgaatagcttttttgtttgtttatttcatccaaagcagatgactttggaccgtactggtgaaaaataaggtaag

SEQ ID NO: 293956 - DNA, 597 bp, Homo sapiens
aaaattgtagtgactaatgggcaaaaaatggtcaatatattaaaatcaacatagacagttattttattaactatggaaagaaaaaaaattgtccgtgtctctgatagttatttagaagagtacttgaaaggtatttttcaaaaaatatatttttaagatatggccttaaaaccaccagaaacttttatttctattattttaaacaaataagaaaaaaagtttctaaattatttatgctataatatgaaagttcataaagatgaagatttttgtaatgaaattatataattttataatagttctgaacttttttttcaagtgctctttctgtctataatacagtacactgaaagtgaacagtctttggtagcactatctttaaaccctcaacgttgcaaaactctccatattcccacagaattctcacttactggacttggcgcttgactgagagagtgaggcagagtaagtctatatatacatgttgggaaggatacttctttcattttgggtaaagtagaattgaatagcttttttgtttgtttrtttcatccaaagcagatgactttggaccgtactggtgaaaaataaggtaag

SEQ ID NO: 293957 - DNA, 526 bp, Homo sapiens
aatcttaggaggcaggtcccactcttcaccattttcaaatgaagacaatatggctragaagctctagacattttgcatagtgtcatatagctgataagttttcaagctgaaactgaacccttatttttttttaactatttgtttttctgctacttccactgcctacgtgttctttttgacaaatcttggcaaaagaaggccagtgtgccctaccactcatcacacaaattggcttattcctacttatgtatataacatataacacattggccagaaataggaaatgaatgggtatagttaggtacctatatttatcctactatagagagaaggagaggaatagcaggcgggagtgacagaagagtagatgagccaactccttctcgggacagctgactccacagaccagggctaaaacagggatttgaattcacctaactctctagtgttagcctcagtaaaggaattcagaagcttattactgggggttacaaactagcaaagagatactttcagcccctgccaa

SEQ ID NO: 293958 - DNA, 526 bp, Homo sapiens
aatcttaggaggcaggtcccactcttcaccattttcaaatgaagacaatatggctgagaagctctagayattttgcatagtgtcatatagctgataagttttcaagctgaaactgaacccttatttttttttaactatttgtttttctgctacttccactgcctacgtgttctttttgacaaatcttggcaaaagaaggccagtgtgccctaccactcatcacacaaattggcttattcctacttatgtatataacatataacacattggccagaaataggaaatgaatgggtatagttaggtacctatatttatcctactatagagagaaggagaggaatagcaggcgggagtgacagaagagtagatgagccaactccttctcgggacagctgactccacagaccagggctaaaacagggatttgaattcacctaactctctagtgttagcctcagtaaaggaattcagaagcttattactgggggttacaaactagcaaagagatactttcagcccctgccaa

SEQ ID NO: 293959 - DNA, 526 bp, Homo sapiens
aatcttaggaggcaggtcccactcttcaccattttcaaatgaagacaatatggctgagaagctctagacattttgcatagtgtcatatagctgataagttttcaagctgaaaytgaacccttatttttttttaactatttgtttttctgctacttccactgcctacgtgttctttttgacaaatcttggcaaaagaaggccagtgtgccctaccactcatcacacaaattggcttattcctacttatgtatataacatataacacattggccagaaataggaaatgaatgggtatagttaggtacctatatttatcctactatagagagaaggagaggaatagcaggcgggagtgacagaagagtagatgagccaactccttctcgggacagctgactccacagaccagggctaaaacagggatttgaattcacctaactctctagtgttagcctcagtaaaggaattcagaagcttattactgggggttacaaactagcaaagagatactttcagcccctgccaa

SEQ ID NO: 293960 - DNA, 523 bp, Homo sapiens
taatccagtaatcagtaagaaagggtcatctagaaaatgaatacgatacatatctaattctgtaggtctatttgtgaaaaaccatggtacatgctcaaattttctgtatttgtttctgtagacaaaaataccctaaaaaacagcgattttcaaaatttaatgtgcatacaaatcacctgtggatctggttaaaatataaatttagattcagttagtttagggtggtgctgagtatctatctgcctttccagcaatctcaccaggttcatcaaatatacattagagtgtgagacacactgacttgaaaagatatttgcatgtatgtctagcaacttaaaaaaaaaaagtgaaatattgagtaaaatcgctccttcacacttacccagtayctattttgatcaagagatgtaacaaattgggggataaggagactctttggaattaacttgaactacaataatatgcagatatatatatatatatatatatataaataaataggtatgcttttgaagccaaatga

SEQ ID NO: 293961 - DNA, 1089 bp, Homo sapiens
agctgaagctccagactgcttgcctttgaatatttgaatatttctttatgtgaggggtcactggtaataattctattacttgtagccaaggaaaatcccaaaatgctctaaaaatcgtgataactgcttttcatcctaygtgtcaaaaacaagaacaatattaaatcacaattcactagaggacatttccaataaaatataattttacatacatttactttaatttttctaaggaaaatacaagcatccattaactcacagaccaatttccaaaggaagcaatttaaaaaaatttacccacgataatctgtttaaggaaattcacattttgggggcgaaaaagaaatcagtcatagagaattagtctcagtctatattttgaacatctgtatttatttcgtatgggtaatctaactttgaataatactgaggataataattgttgatgacgatgataaatgaaatcataactttacttttgaatatttatgtaacataccatgtacttttacataccaattatatttatacttataataacttgwagctgaagctccagactgcttgcctttgaatatttgaatatttctttatgtgaggggtcactggtaataattctattacttgtagccaaggaaaatcccaaaatgctctaaaaatcgtgataactgcttttcatcctatgtgtcaaaaacaagaacaatattaaatcacaattcactagaggacatttccaataaaatataattttacatacatttactttaatttttctaaggaaaatacaagcatccattaactcacagaccaatttccaaaggaagcaatttaaaaaaatttacccacgataatctgtttaaggaaattcacattttgggggcgaaaaagaaatcagtcatagagaattagtctcagtctatattttgaacatctgtatttatttcgtatgggtaatctaactttgaataatactgaggataataattgttgatgacgatgataaatgaaatcataactttacttttgaatatttatgtaacataccatgtactttwacataccaattatatttatacttataataacttg

SEQ ID NO: 293962 - DNA, 1741 bp, Homo sapiens
tttgtaggttgcctgttcagtctgatggtagtttcttttgctgtgcagaagctctttagtttaattaaatcccatttgtcaattttggctttgttgccattgcaaaatactggcaaaccgaatmcagcagcacatcaaaaagcttatccaccatgatcaagtgggcttcatccctgggatgcaaggctggttcaatatatgcaaatcaataaatgtaatccagcatataaacagaaccaaagacaaaaaccacatgagaaatattttccagcaccattttcagaagcttttcccccggaaaatgttgttccagctatagaaaaaatggcttgcaattataaaaatgtgatatgctctagcacatgtatcttgtaacatatgctgttcttttcctgtactgaccttcttctgctccaccaatcgggttaatttctattctttcttcaggggtcagctcaaaaattacttttcctggtaaatcttattctaaaatagtgttgagcccttcttcacagttctatagagtttgatatctacttgcattaaatcaattagtcataccatattgtagttttwtttgtaggttgcctgttcagtctgatggtagtttcttttgctgtgcagaagctctttagtttaattaaatcccatttgtcaattttggctttgttgccattgcaaaatactggcaaaccgaatacagcagcacatcaaaaagcttatccaccatgatcaagtgggcttcatccctgggatgcaaggctggttcaatatatgcaaatcaataaatgtaatccagcatataaacagaaccaaagacaaaaaccacatgagaaatattttccagcaccattttcagaagcttttcccccggaaaatgttgttccagctatagaaaaaatggcttgcaattataaaaatgtgatatgctctagcacatgtatcttgtaacatatgctgttcttttcctgtactgaccttcttctgctccaccaatcgggttaatttctattctttcttcaggggtcagctcaaaaattacttttcctggtaaatcttattctaaaatagtgttgagcccttcttcacagtwctatagagtttgatatctacttgcattaaatcaattagtcataccatattgtagttttwggtaatatttgaaggcgaggaagtgggattactcggtgaggattctataggtgtggccacattatatagctatgagagttgactggtggtggttgctggttaatctttgtttgttagtatttttatcacaatagagattacccagggaagtagggttaaatgattaagaataaggttaggagaaatggaataaggaaagagaaaaagtggagcataattaggcctttctgggcaggtacagtggttgaggctatgatctgaagttgggcagtgtttttggtgttgtcctttctattcagattagatttagtagaagggaggctatattttggcttgcaaggaagtttgaatatggtgttgcatggcgcattgwggttgaataaaatcctaatacattggaaaatttaaatatttgtgatgggtatttaagtttgaggttattagtgataaggttgagttatagtgctagtgagaagcctaggatagttgtgcccagaactgtgagctttatatggagaggcataattatttggggaattgatattggggagatattgttggagattaaaaatctggcaaaaatgctacc

SEQ ID NO: 293963 - DNA, 563 bp, Homo sapiens
gccaattagcaggaaggacctagttaggttttgatggtaaggtaaagattgaagaaagacagagagttggcggctctacagcaacacaggtttattgccagcactacgtgcggaggtgggggaccagcttaatgccagagcccactgctgcttacaggctggggtaatttataggttcggggttggtggtctttgtggtacgtcttgctgtctgggaggatgttcagaaggatatcccttcagttgtgcctttgcccggcagggtgttataagaatgttcctgtgctttgtggtcaggtggttaggcaggrtggttctcatggcccgaacctctgtggaatgtttcactctgattagggtctgcaaagtggcgcttacaaaatggtgcagcttggaccaacaatacctacgcctttccattcgataaagagttggaataggttgttggcagtgactagaattagtatagtaatgagaaaaatgagtagatatttgaagaattgatttatgttggggcctgagtatatatatacaatattgagaattctataatacatcatgtg

SEQ ID NO: 293964 - DNA, 568 bp, Homo sapiens
tgtttttaaattctttgtataacattaccttgaaaatgggatatattttcccaatgtaatttccaagtacatttttaaacacttacatgtatctgaaaaacaagtgtgacacaactgtctcaataatcttgacttggacctaaatagagagtcagttattggaattttaaaaatgcattaaaatttgggggacagtttagataatctagaaataagatcaataaaaagtcatgaatagcatctattttctttcctttttaaatttggcataaataaaagatgttgaggttgggtcccttttccctacacagagtagtgaactatttcaagaacattttcataacttagtcrtatttctcttgcattcatattcacaattgttggggcattgacaatctttagttatatagcagtagagttaacaatttccagatcctgaaggtatatctgctttaaactaaaaatgccacatgatacagacattatttctaaatccgaacaagcattttaaatggtcatcaataccccattaacttaatgatgatagttttcctcattacctatcatt

SEQ ID NO: 293965 - DNA, 589 bp, Homo sapiens
gtgaatgccccaaccgtggaagtgggaaagggagacccttctctccgaacacacacctccactggagaagctgaagcagaagctgaaggcctgtttgctggagaagtttcgactttacctggagctgagtcaatttagagascccagcaaaatataggggtagaggtggcagcagaaaggccacgggagctcactttgtcccctgtcaggctattactgcctgataccacagggatctattgggggggtgaccacaggaacagggggtaaaactccacagggggaaggacatctctagctggacttagtaataatttgaatggggccaggagcctcctggccagaactcaggggaaggtgcaaatctagtgtgcagactacaggcaagggaagaaccaagcactttactttcgcagctggaaggagggtaaccagggcaagttttcaaatctgtcactgcctccacctgaaacagactcagggctgttgcaggcggcccagtgggagtgagaccggcctttcagtttgtgtggaagctgggtgaggcctgtgactgctgactttgccccacttccctgacaacctgcat

SEQ ID NO: 293966 - DNA, 583 bp, Homo sapiens
gcccacatgttagcaggtaatagccagcagcattggactgtgccactccaggattgtatatcttcaatggtaaccaaatatcagaactagaaattgatctcccaggaacccctgaatggcaattctatacttctgtgacctcttgaatctcaggctgttcacgtacaaactgagacatatgcagacttccctttggatgcaaagagaagtctcatatatggagccagaagttgactttgaaatctgagagcagaaataaattggaaatagctagcatataaagagatttgattctaattaatagagaccttcagctactatagtatcagcctcaacccagactgaattcaaaagtgtgacagtatccaaggttaaaattttccagctatgcctttagagagattcctgaaacyataaacaagtaggcattgatagatatcattttaagggactttggccaacagaatctatcatactattgtctacagagaactgaacgtatttgaagactttattaagttgttatgatacctaaagaaaggaatagcgctgtatgtatagaccacctacttgaataaataat

SEQ ID NO: 293967 - DNA, 583 bp, Homo sapiens
gcccacatgttagcaggtaatagccagcagcattggactgtgccactccaggattgtatatcttcaatggtaaccaaatatcagaactagaaattgatctcccaggaacccctgaatggcaattctatacttctgtgacctcttgaatctcaggctgttcacgtacaaactgagacatatgcagacttccctttggatgcaaagagaagtctcatatatggagccagaagttgactttgaaatctgagagcagaaataaattggaaatagctagcatataaagagatttgattctaattaatagagaccttcagctactatagtatcagcctcaacccagactgaattcaaaagtgtgacagtatccaaggttaaaattttccagctatgcctttagagagattcctgaaaccataaacaagtaggcattgatagatatcattttaagggactttggccaacagaatcyatcatactattgtctacagagaactgaacgtatttgaagactttattaagttgttatgatacctaaagaaaggaatagcgctgtatgtatagaccacctacttgaataaataat

SEQ ID NO: 293968 - DNA, 582 bp, Homo sapiens
tatacaccttcatacattcatgattaaccccttcttacttcacattgagatagctttgtcgtatatctaaatgtttttccaaatatatcacagaaacattcgtctgaggaactgtatgtgtgtgtatgcgttacaagagacgggtgtgtgatgtgttcttgccacaacttgtagcaatattatcatcacatttatattcattgctgatgtgcaccagagggaacaggttacctaggataatcagtaaggcacaccaaagagaccagctttcaaactgtcaacaaatctcaaagaaccaaagggtatcaaaatatgtgttctgttaatgtggaggtcgtttcctataaaattgagggaacttgatatagaggtggatttacagctaaatatgaacatgaaggatcaaggaagttacttcttttcccatttgctattccctgttgacagacagcatggtattatagttgttataacaggtattatggaatttcgagtttaggattaaaactaaaattggcttycgttcacgactctgtaattattaactgtaagataatactgctctgatttcattttccttat

SEQ ID NO: 293969 - DNA, 423 bp, Homo sapiens
tgtcagcctgctgatgctattaatgtctggctaatgattctttctttaaaaacaaaatctgaggctaggcatggcggctcatgcctgtaatcccagcactttgggaggccgagatgggtggatcacctgcagtaaggagtttgagacaggcctggccaacatggcaaaaccccttctctactaaaaatacaaaaattagccggtgtggtggtgagtgcctgtaatcccagctacttgggaggctgaggcaggagaattgcttgaacccaggaggyggaggttgcagtgagctgatatcgcaccactgcactccagcctggacaagagcgaaactccatctcaaaaaaaaaaaaaaagaaagaaagaaagaaagaaaggaaaaaaatctgagtgcatgtgactgtcctacatgcatatgacaca

SEQ ID NO: 293970 - DNA, 423 bp, Homo sapiens
tgtcagcctgctgatgctattaatgtctggctaatgattctttctttaaaaacaaaatctgaggctaggcatggcggctcatgcctgtaatcccagcactttgggaggccgagatgggtggatcacctgcagtaaggagtttgagacaggcctggccaacatggcaaaaccccttctctactaaaaatacaaaaattagccggtgtggtggtgagtgcctgtaatcccagctacttgggaggctgaggcaggagaattgcttgaacccaggaggcggaggttgcagtgagctgatatcgcaccactgcactccagcctggacaagagcgaaactccatctcaaaaaaaaaaaaaaaraaagaaagaaagaaagaaaggaaaaaaatctgagtgcatgtgactgtcctacatgcatatgacaca

SEQ ID NO: 293971 - DNA, 369 bp, Homo sapiens
ggatgttaggtttttcattcctgagtcacttagcttatgataagagtctccaatcccatccaggttgctgtgaatgccattaattaatgtctttttatgtctgagtactattccatcttacatatctaccacagtttctttatccactcattgattgatgggcatttgggctggttccatatttttgcaattgtgcaattmttaactatttcaaattgccatctccaatgtcagctctaatctgttgtgtcagaatcctccaaatgacaataaacttaaaaaatagagacatatttctgtttctccctgtctctcttttacatgagggcaatatgctgatgatagagtggattttgcttgatatgatat

SEQ ID NO: 293972 - DNA, 608 bp, Homo sapiens
tttgagccatgaggaatacccaggcaaagtgaaaggaagcaaatggattattgcaaaaattgagataagagatgattagggcatggttagagtagcagcaattggcgtgaaaaaaattagtggacttgagatgtattttggagctgtaaccagaatttgctggtgggctggatgaatacaggragaatacaacaagcatgactacggagtttttggctcaaacagctgataagacagtggtgttaattttagaacaaggagcattggccgattaataaacctgggtagaggagtcatttgttccattaagttcttgttaaattttaagaagtagataaataaatctaaaacaggcagttaatagagttttggggtctagagggcaagtagaatatttgaacttcaagaggaaacaggataattcttccatttaacaggagaaaagactaagatcatagttcaggcacaggatagctttgagatttgggggtaagaatttgagctcctccttgaatacttttattttctcaatcttgacatgagacccgtggctgagtaagaagacgtacaggagttaaatattaaggaaaaaggttaaaagtgtaaat

SEQ ID NO: 293973 - DNA, 543 bp, Homo sapiens
cagcgcaggaaaggccctccccataattcaatcacctcccaccaggttccttgcaaaacatatgggaattgtgggtgttacaattcaaggtgagatttgggtggggacacagccaaaccatatcaatgggaaagaaagaaaggtcaccagaagaatctaagaggttacttgaactgagcagtgtcattggctcaggtttctcttcccttccacactacggctttgactaattcagaagaatctgcatttaagtagaaatcagaagaaccaagttatcaaagaatcttcagtttcttttgaattcataatgtcagatgttaaagtagtaggcaatgccatatcttaaacattctcagagaaagacttttggataagcaccttyttgatcaataaaatgttctgcagccatgcttcttacagtttaacaagaatatgaaccacctggtggatttaatttaaatatatattttgattgaaaaatctgaagaaatcatgcatttctagcaagatcctgtgatggcaactctgtgttttgatcacatg

SEQ ID NO: 293974 - DNA, 601 bp, Homo sapiens
ttctccttttttgatacgtaatgtatttagtcatggaatcacagaggtgtgccatcattcctgacttccaaaaaaaactaaaaaaaaaatcttacgttgaaaaattaagggaggagaattattagaaagaataatcctgataagaaaaaagagaagtaagaaaaaaaaggagagttaagaaagaggaggaaacaggttctaaatctttttaccttagtcacttcaacactgttcttttaaaatatcatgtttcaccaccatccatcctgatgctatttgagaatcaagctctaacaacttggcatttcacacacatagtctcatttaatttcacaatgactctgccagacttttataaaayggaaaaatggagttcagagaggttaagttacttgagaaacctaaaaattggcagagatcttataagaagccaagtcttttgtctttaaaacctaaatactgtgttcatgactctattctggaggaaaaggtggccaatgcctaccaaaaacaaaaccaaacaaaaaccttttcctgtttgacagccttgaccagggcacttctctttggaacttcaaagatgatacttttttttggcagt

SEQ ID NO: 293975 - DNA, 561 bp, Homo sapiens
attaagaaaggggaaccagtctgggaaaaaataaaggtgataacctgccctgagacccattaagtagctttagagaactacaactatgtaggtttcagtcaacgagttaaagaaagaatcacctatgggtataacgaatgtataagacgcaggcagtgaaaccattcgatctgaaggatgcagccttataactgaccactgtcttagagatgaaaatatgaaaataacgggcccagctctaccacagctagaatttactgtgcaggttataggccttggccttctgcatcctccatcctgtctaaaattgaaattgctgtcaatgaaactcataagttacaaaccaaataaacttaagtacccagaggtaagtctgtttcttagaagctaagaggtttacaaaactgggaagacttagaattaaatatcagagtgattaaattaatccrgtttgtagagtgggcatctttgtgtaacatttggaaacgctctttgtgtggttgttatttagagtgtttaaaatatttaacagcatgggaaagttagcaaatattaccaatt

SEQ ID NO: 293976 - DNA, 984 bp, Homo sapiens
agggatggtaatatagaatttaacctccctcctccttcaagtaaaggaagggtggcatgagggttgagagggctacacgatcatcatgcacatgaatgattagaaagtctcaagcaggtatgagggataaagattttttttttactttaatttctgggacacgtgcagaatgtgtgggtttgttacataggtatacatgtaccatagtggtttgctgcacctatcaacccgtcgtctaggttttaagccttgcatgcctttggtacttgtcctagtgttctccctcccgttggccccgaccccctgtcaggcccctgttgtgatgttcccctccctgtgtccrtgtgttctccttgttcaactcccacttatgagtgagaacatgcactgtgtggttttctgttcctgtgttagtttgctgagaattatggcttccagcttcatccatgtccctgcaaaggwgaagaagatgttgcatttctaagtaaacctagtgaagaaatgccaaatccatttcctacctacttggtgaaagttggtaccaatttatttctaagagtgaattgtaatgttattatacgtatatcttaaatgttttctttcctttagtaaataaaatttaactggagtaatcctcaagttggacagacacttgtattttgcatagtctccagataawtttatgtgataatgaagaaagatacgttagtggcttttagcatgatgtgatttaaaagcaaaagtcttatttttaaatctcgccttttgaatggaatacaattcttcaacagtgaccagacaacataaaataccacaaggcttatattaccttgttccataccataaaaatattaaagccagctgatgctgcactaggtaattttgacatctacattttcaagctactgcatattacacttaactgcagtctattttccataatatatttttcccacttgttagtgctgattccttatgttttcc

SEQ ID NO: 293977 - DNA, 603 bp, Homo sapiens
tagcttggtttcatctccttccaggcattccagtaattcacctcatggtaaataaataatggtgttttctaggagaagaccccttatttttgaaatatttttagaattttcctggtttaggaatgcttaagttaaacagtyttagcctctatggacttaccagactctaaaaaacatcatttatgctggagtataaagtggagatattttacaacctgtatactccctgctgtgtgaggtactctgagttatctaattagtagcctcatctatgactctgtccccaggaataaattcagtatgaggaaaaatgacctacaaaaccatgtttgctatcataggcatcttcttgctttgcctgttactcttcagtgtttatatccttgaaattatcagtaaagcttgacactggaaaagagctctgattcatgagtttgatttgatagtctcatcttttgttttagctcagtctatttgtctttgcagtactcaatcactcagaggactagcttgtcagtctttactattctccttgaaaatttatctatttttccttcttactttatctttttataaatacaaataatttgtaagcaacatttt

SEQ ID NO: 293978 - DNA, 572 bp, Homo sapiens
ggcagtaattaatgttatacattctcctatacaatacttaagtatgatatctatcaaaaggcataatacagaaaaaactcttttaccacaaaataaagtacacattgctgaaggttaaaatctttaaaaaygatttaaatctctcgagtaaaatttaaaagaaagaaagaaagaaaaatcttactgtttatcactcgtttttccaaatgcagtggtttgatgagtgaactctatgatcatgagggaagtacagaatatctgcttaataccttctgaaatacatcaagaaatataccagctttttaccataaaatgaaatcaagataaagggttattgcttgaaaaaatgtaaaagttttagcaaacttcaactcaacttggcacaatattctgtaaaagcactataaaaagaaacttgtcgaaggactccgttggcaggtgtggcaaaacaactttctgaaagtgagaaagtatgtcctcgggcaaaccatcatgacatggaaaatttcaaaagcatcaaacacaacaggaacatttttcactttcttgagtcactttattcgaactacctg

SEQ ID NO: 293979 - DNA, 572 bp, Homo sapiens
ggcagtaattaatgttatacattctcctatacaatacttaagtatgatatctatcaaaaggcataatacagaaaaaactcttttaccacaaaataaagtacacattgctgaaggttaaaatctttaaaaatgatttaaatctctcgagtaaaatttaaaagaaagaaagaaagaaaaatcttactgtttatcactcgtttttccaaatgcagtggtttgatgagtgaactctatgatcatgagggaagtacagaatayctgcttaataccttctgaaatacatcaagaaatataccagctttttaccataaaatgaaatcaagataaagggttattgcttgaaaaaatgtaaaagttttagcaaacttcaactcaacttggcacaatattctgtaaaagcactataaaaagaaacttgtcgaaggactccgttggcaggtgtggcaaaacaactttctgaaagtgagaaagtatgtcctcgggcaaaccatcatgacatggaaaatttcaaaagcatcaaacacaacaggaacatttttcactttcttgagtcactttattcgaactacctg

SEQ ID NO: 293980 - DNA, 568 bp, Homo sapiens
cagaataaaaatatcaactcctagatatatctctatatcggctgaacagctaatacaactagcaggtcatataagaaagaaataacagattatgaggaaggaaataccaattaggttaacaggtaattaaaaacaacaacaaaagccagaaatgcttaataaataatccattagaataaaaccatattcaatctgtgtttattagctgtctgaataaaaacaaaggtagaggaaagatattttcaaattaaatgaaaatctaagtttgctaccaataaatackcatttaaaatatgtctaaatatatgattcacaaataagaaaaatactttcaaataatttctgagatgtagtaaatattcaagaaaatgaaaattataggtgtgtctaagtaattattagatatataaaaatgatagtaaatatctaaataacagggttaatcaaaatagacttaaaaaaataaaataaaatagccttaaaatgctagataataatagtatacatttagtaaagtgctaactgtaaaataaaatatgcatcaaatttaggcttttaaatatatgca

SEQ ID NO: 293981 - DNA, 568 bp, Homo sapiens
cagaataaaaatatcaactcctagatatatctctatatcggctgaacagctaatacaactagcaggtcatataagaaagaaataacagattatgaggaaggaaataccaattaggttaacaggtaattaaaaacaacaacaaaagccagaaatgcttaataaataatccattagaataaaaccatattcaatctgtgtttattagctgtctgaataaaaacaaaggtagaggaaagatattttcaaattaaatgaaaatctaagtttgctaccaataaatactcatttaaaatatgtctaaatataygattcacaaataagaaaaatactttcaaataatttctgagatgtagtaaatattcaagaaaatgaaaattataggtgtgtctaagtaattattagatatataaaaatgatagtaaatatctaaataacagggttaatcaaaatagacttaaaaaaataaaataaaatagccttaaaatgctagataataatagtatacatttagtaaagtgctaactgtaaaataaaatatgcatcaaatttaggcttttaaatatatgca

SEQ ID NO: 293982 - DNA, 524 bp, Homo sapiens
acgtgtattccagaacttaaagtataatattaataataatagtaataataaagagccaatgtgaaatggtgtatgttctgttaaatgtttggactatttaaagtgagaataataaaaaatttgaccagaaatttattaaatttgtgagctcctaaaagaagtagaacttttgggtaagaaacactaaagcctaaagcgactgaatgacccttaactctttctaatcttggaaagctctttygctaaaactaatctctatgagcaattttgttggatttctttaaattttaatttatgtgggtacatattaggtgtgtatatttatagggtacatgaggtgttttgatacaggcatgcaatggataataatcacatcttataaaatggggtattttttttggatttttaacagacaaatgcaagagagatttacatcagattttaattatttgtcatttaacattttgaactttaacctgttttggtttgggacatttttatctccatgaggtgtttcaatatac

SEQ ID NO: 293983 - DNA, 524 bp, Homo sapiens
acgtgtattccagaacttaaagtataatattaataataatagtaataataaagagccaatgtgaaatggtgtatgttctgttaaatgtttggactatttaaagtgagaataataaaaaatttgaccagaaatttattaaatttgtgagctcctaaaagaagtagaacttttgggtaagaaacactaaagcctaaagcgactgaatgacccttaactctttctaatcttggaaagctctttcgctaaaactaatctctatgagcaattttgttggatttctttaaattttaatttatgtgggtacataktaggtgtgtatatttatagggtacatgaggtgttttgatacaggcatgcaatggataataatcacatcttataaaatggggtattttttttggatttttaacagacaaatgcaagagagatttacatcagattttaattatttgtcatttaacattttgaactttaacctgttttggtttgggacatttttatctccatgaggtgtttcaatatac

SEQ ID NO: 293984 - DNA, 525 bp, Homo sapiens
tgtgatgctataaagaaatacctgagattgagtaatttataaagaaaagaggtttagttggattgttgttctgcaggctttacaggaagcacagtgctggaatctactcggatgcctaaggaaacttacaatcatggtggaaggcaaagagggattaggcatatcacatggagagaccaggagaaaatggtgtgggagaagtgtcacacactttaaacaaccagatgtcatgactaactcactcactgtctcaaggacagcacaaaggagatggtgctaaaccattcataattcacccccgtgagmcaatcactttctaacaggacccatctccaacactggacattacattttaacgtgggatttggaggggacatccaaactagatcactctgtaattcctgggcctggtctatttaatatctctggttctattattattcatgactcccagtataacagtaagtgatttttttttctaaagctgccttatattattttctcattttccaaatgagcaattca

SEQ ID NO: 293985 - DNA, 595 bp, Homo sapiens
atgtcatgactaactcactcactgtctcaaggacagcacaaaggagatggtgctaaaccattcataattcacccccgtgagacaatcactttctaacaggacccatctccaacactggacattacattttaacgtgggatttggaggggacatccaaactagatcactctgtaattcctgggcctggtctatttaatatctctggttctattattattcatgactcccagtataacagtaagtgatttttttttctaaagctgccttatattattttctcattttccaaatgagcaattcacaacgaattttctytggtttcctcaattgtgatataggtataataataactagtatatactttttttttacaacacagaagataacatgtaaaaacacctcacaatttataacagtttgtgtttataatgcaatttattttagtttatgtaacaactgattaaacatttaaaaatcatatagtaagttttgagttatacatcttaccatgacatatatatttactaacatatatttactaacatataaataaatattggattaatttgagaggaccagtaagtgtggcataata

SEQ ID NO: 293986 - DNA, 573 bp, Homo sapiens
tcttttccctctttccctgatctctatatttgtgagaccaggaaccatatactttttccttatagtctcaaatacttggccatcatgtaatatagaggaatttaaaaaatgaaatcaaataatttatataagtaaacaaaaataatttaaataattatatgtatatcaatcaaataaagtcagaagatataaacatatcaaagttacaatatattaaaacaatgaaaagcagtaaatctcaaagagtttttctgctaataaattctcaactataacttataacacgaatctagtaacttttctattttaatacaagaaaaaatatatttaaaactttcccttaataaaataacttcaacaaatttatctttcttcctttagagtaccrtctttaaaataatctctgtggtcatttactgaccagagtgagttgcctctgttaggtttttatgcttcatcagagaaatggacccagaatgcttttctctactatatctatgaagatcaatgacctttccttagcagctcttagctgatttacacagagcagaaagaaacaaaaatcctccttct

SEQ ID NO: 293987 - DNA, 562 bp, Homo sapiens
agcatagtttgggaacttgtttagagattcattcatttgtttcatttatccaaccacccacccatccatccaatattatttgaatacttactatgtgttaggaacttttctgggtgctggatgcaataatgaatgggttcttctgcatctctcttcaaatgctagaaacttcctgcaaggtaatgagggagttatgagcctccatatggttttataagaattcaaggtccagactcagactaggtttgtaggaagacatgaagattcatcactctagtcaccatcaatgtttactcttaaaaaaagttcccaagraagattttaatttttttcatagagggcttatgatttttttctgggaatttaaaatttttcattgtttttatgaatagaatcttctttttatttgtaatttacaattagttgctgatagcatacatgaagttgttgaaatgtaattagtttcaaatagtttccctcactgagccctattattctaatacctcttagttattttgcttttcttggttttgttttgttgttagttactaaacataaaatc

SEQ ID NO: 293988 - DNA, 621 bp, Homo sapiens
actggcaacgatgagattggaacagcactstggctgtcaagtagttcactaatgcagcaaataaatagcttctcagttttcttgtttgcgtagacatgaccaggagatagtagaactggatgaaagatctccccacctattttgagatgtgcttacacagaaggccccaaatttcattgctcaacccgtttcccttggtcatagggaaagtattttcagattctgccactgatgctggtagtccttgttctcagtgttgtggtgagttttaccatttttctctgttttctcatgtattttaaagcgggtctgggacagattatttcaggggctgctagccacatgctttttaaaactggaactctttaatttcatacaagaagttgtcaggaggtagatcaggctgtgaagtttgtctatgtaaagccagatatacccatctttattattaagtttttaattttaaaattatcatacagtaaaattgacttttttttggtgtagagttctatgaattaaacacataaatagatttgtgttaccactacccagaattacacaacagttcatcataccaaaatctctcctcaggctctggtcacaccctcacctcaccccatc

SEQ ID NO: 293989 - DNA, 546 bp, Homo sapiens
ggctgagcttcaggtttgtttgtttgcatatggatggatggccaattgttccaacaccacttgttgaaacgtgtctttattgatcagctaataaatacgtttacattttttaaagtgatattatttaaaagcagcagttttgacctttctgacaacaycagttagtcaataatcagtttgacaaccaatcagttaggcactccatcatttagttactcaacaagcagatctggagggcctgccttgtgtctggcattttgcaaggtgccagggtttcaaaagtgcctggaacatggtttgttttcctttaagattttacagcgtatgcaggaaaatacagtaggataaacttcccatatggatttgtgtacaaaagaagactatttccttttatgtcatgacttctagagattatttaatatctgatcagcacttgtatgagtgcccaactctttaatttttggcttcttttccttaagtcactgaactaatctttaaacacataaatgcttaaaggagtacactctgtgagggaagctgaaggtg

SEQ ID NO: 293990 - DNA, 602 bp, Homo sapiens
gaagctgaaggtgaatccttctgcaaagggaaataactatgtgttcattttgtgtgtaaacactctccatttcccagatttaaagtgtggacttttgagcggtggattttcataaaaggggcacatcagcaccaaatataccactcttttcccatgcagaggctaaagcagcaagacacatctcctaaatgcactgtagacaaagacagtgctggggcccataggtcatgtaattctggttatgtttgataaacttatgatcagaataatattgagaactagaaagttgatgatgttctttgaaggttagagtcaataaataaagttggcttttgagggagtagctgtaggagatctagattcaggtcatgaggcattaattatctcttctgtctgaaccagaaagcctctttcctcttccctatctcctttcattttacctgacactccagagtggttagaytggtaatgggataacgtggaggaagctggattccagtttgggtggtatttatgccagtgagcttgggctgccatgccttggtgccttccacacactgtttattttagtgtatggagaaagccagtaggaagctagaaga

SEQ ID NO: 293991 - DNA, 624 bp, Homo sapiens
ctaatttttgtaattatttttttgtagagatggggttttgccatgttgcccaggctggtctccaacccctgggctcaagccatccacctaccgcagtctcccaaagtgctgggattacaggcatgagccaccacacctggccaaagatgttttaacttcggccatccacagagagcacctcaccagaacttctgcaaccacgaagcccacagattttacattgctttagacttctgggattacaatggctttttygggctactcagttgcttatgttagactgaaagtgactgatgtcctgagtggaaagcctcaggccacccggatgcccacgaatatgacacataaagcaactagtgctgtgctgtgttcctgaggtgaatggggtgttggaggccgactgtcacaacagagtttggtggatttttcttcacatgctctttatcttctagttctgtgctcctacaatagtcacacccgcctcctttgtctctctcaatacgtgaggcatgcattcaatatacttcaggttggatgatgaaaagcctgaccgaaacctcagttgatcattactcctatatgctgtgaagaatttgtgacagctacttagaggggaaaaagaga

SEQ ID NO: 293992 - DNA, 1237 bp, Homo sapiens
cagagaccatttcattttgtttaagctcacatggctccattgctgaacttcaggctcaacttcttactgcycctttgctttctagaatggagtaccagagtgaacccagaatgcaagattcctgtaggcaggagctgtgtactgttgaccttaccctgtgtatataagaactcaccacattggttggggaataaaattctaggatactcaaagcccaggttccatctcctttaaccaatgctatggaggttatgtgtgtgtgatctctgaagttcaaatcccttcttcttcactgactatgtgaccttgggtaagagtgatgaacttgaataagagatgatgagtgggcctctcaacccttagtttttcattctgtaaagtggggataataataaaatagaaaccacttcctagtgttgttctgagaattaatagaggtcaaacatgtaaaagcacttagctcaacttctggtctaaagcaagtgtttaataaatgttggatattattattgctgagttagcatcacaacattttatacatgagtaacagacattgttataattcttgtaatgaatctagatgaattatgtggtagtcatcagaatgttttaatacatwcagagaccatttcattttgtttaagctcacatggctccattgctgaacttcaggctcaacttcttactgcccctttgctttctagaatggagtaccagagtgaacccagaatgcaagattcctgtaggcaggagctgtgtactgttgwccttaccctgtgtatataagaactcaccacattggttggggaataaaattctaggatactcaaagcccaggttccatctcctttaaccaatgctatggaggttatgtgtgtgtgatctctgaagttcaaatcccttcttcttcactgactatgtgaccttgggtaagagtgatgaacttgaataagagatgatgagtgggcctctcaacccttagtttttcattctgtaaagtggggataataataaaatagaaaccacttcctagtgttgttctgagaattaatagaggtcaaacatgtaaaagcacttagctcaacttctggtctaaagcaagtgtttaataaatgttggatattattattgctgagttagcatcacaacattttatacatgagtaacagacattgttataattcttgtaatgaatctagatgaattatgtggtagtcatcagaatgttttaatacat

SEQ ID NO: 293993 - DNA, 1030 bp, Homo sapiens
tggtctctctcatcctatccatggagttcagaattaagactgttttagaggagcaagaccagtgttcttcaagtagatagtgaacatttaggagagcacctgtctggatgcttgacatatagactataaatacagcagagggattggtggggtctgaagtagtttgaggaaagccttatggaacaaataagccttgagctcgactttaaaggatggctggtattttgaggccaatgacaaaccatttaatgtagaacrgcatgagcaaaggaagaaaggtaagacttcattcatttattcgttaatacatccatccacttaacaaatattgaacacctactgaattagataattataggaaataaaggtaaggcacagttccctgaactaaaagaatttacagtctggaagatggaatacagcaagcatagaaataactgtgttacaagggaaawgcacactgtcagggctattggtcacagcattgtggctgggccaccaccactgccgcagccatctcatctatccttttgtccatgggtctgtctcccccaattcaaagtctgggtgggagtgtctgtttggctgcactgggtcaaatgttcttgccctggtatgtttgcacacatgtgaaggggttgggggtggggaaggtgaaaaaggaggacattcctgcttcagtttttggagtgggaaaaggtgtcctatctctcaccagactaatcagtgtagaattggatgttgggattcaaatgttggacagccaacaaatgacaagtgcccatggcataaattatctgaatttctagcgcagagwaaaggctcatgtgagacaaaaagagaaaaaataatgtaaagagatgccaccaattagcaaagtaaatggatttagcaaacaaatgtttctcagaaccattatggcagtggttctcaaacattgagtgcatcagaattaatgaacacttacttaaaacaagtttgtaaacctcacctcagacttattgaatgggactccactggaaatagggac

SEQ ID NO: 293994 - DNA, 635 bp, Homo sapiens
cagtctggctacagcggctttgtggagctgcagtgggctcacccagtttgaatttcccagaggcttcgtttatactgtgatggggaaaaccacctactcaagcctcagtaatggyggacacccctccctccaccaagcttgagaatcccaggttgacttcagactgctgtgctggcagcgagaatttcaagccagtggatcttagcttgctggactcatgggcatgggatctgctgagctagaccacttggttccctcgcttcagctcccattccaggggagtgaacggttctgtctcgctggtgctccaggtgccactggggtatgcaaataaactcctgcacgtagctgggtgtctgaccaaatggccgcccagttttgtgcttgaaacccagggccctggtggtgtaggcaccagaaggaatctcctggtctgcaggttgcgaagacttcaggaaaagtgtagtatctgggctgggatgcaccatccctcatggcacagtccctcatggcttctcttgtctaggggagggagttcccggacccctttcactttctgggtgaggtgattccccattctccttcagctcgctttccatgggctgtgtccactgtctaatcagtcccaataagat

SEQ ID NO: 293995 - DNA, 562 bp, Homo sapiens
tttctgggtgaggtgattccccattctccttcagctygctttccatgggctgtgtccactgtctaatcagtcccaataagatgagccaggtatgtcaattggaaatgcagaaatcacccgccttctgcattgatcttgctgggagctgcagaccagagctgttcctattcggtcattttgccagctacctattcagtattttacccagattatctcatttcaacttcacaataaccctagcaggtagttctcttgtgtccattttacaagtaggctaaatgctgcacagaagtgttaagtaatttgcctgaggtcacagagtgagtaagaagtaggcacaggatttgcatttcacactgatcccaagcccacatgtttatgcctgagcagagggcttcctggtaaggactaagaattcaaatactgatgtttgcagacctgggtctcactgaactttgtagatcctagggatcggtcccatggagaacacagagacagaaaaatgataatcatatccaaagaggatgggaaacttgaagatgaaaacactaatgtgatctca

SEQ ID NO: 293996 - DNA, 634 bp, Homo sapiens
ggcatgttctcagattagtgctcactgagcccaatatccgayatgttctttatttgtgtggaaataccacccagtgggacctgacattttggaaagatgatcctgtggccctgcaaatcacaagtcacatgaaaagtgtgtatgcactgcactgaacttgttaaggaatgaagacagcttgaaacacaaagatctgattttagttgaacagaaaattcaattaaccagggaatcctttttgttgaaaattcaccttttcccctaaatatagtggtttatgtatcagtgtaggaggaggttggggggagttttagggaacagggatgggaggaggtcagtctctaatgcatacactattgaaaggaaaggtgtaatcaagtgttctatgtgtaacaaaagctataagtcacctgaatgagtttggattcaacataatgaaaaacaggagagtttcagaaaaagaagagtagcatctgcccatctgagtggtgggtcccatcaggaggcagagagatatacaaaagtctgcttgtatccatgatcctttgatcctttatttttataggggataagacagtaacttttctactgacccacagaaagatttctaagagaagcccagaaacagccctgg

SEQ ID NO: 293997 - DNA, 572 bp, Homo sapiens
tgatgctaactccctgtgaacactccactggggtgccctgggcagcacaacattatyacatccagaactgagctcattttgatctattcccatgacttaacgctaatacataagtcttacgaaggcctttaaaatgtaagcctttcttacctctctggagttattttagtccccatgtaagtactagagtcccccaaattttctcacacacacacatgcgcacacatgcacacacacattcctgctgctccctctgcttggaactctctctccctttacctttaccactttcttagtctagttctactgatttggcccagacatcatttcctcaagaaggctcctccattactcttcccagcctgttttaggtgtccctcttaagtgcttcttgtttgctctgtgcttaaggtctttatttgttccacacgtaaaatatttcttgtttctttatctgggttctccactagactgtgagctcctccagggcaggggcatgataggggccatttaaatgaatagtttgccttctaattcctccctaccctgctgccaatttcatgtctagtcaa

SEQ ID NO: 293998 - DNA, 572 bp, Homo sapiens
tgatgctaactccctgtgaacactccactggggtgccctgggcagcacaacattatcacatccagaactgagctcattttgatctattcccatgacttaacgctaatacataagtcttacgaaggcctttaaaatgtaagcctttcttacctctctggagttattttagtccccatgtaagtactagagtcccccaaattttctcacacacacacatgcgcacacatgcacacacacatycctgctgctccctctgcttggaactctctctccctttacctttaccactttcttagtctagttctactgatttggcccagacatcatttcctcaagaaggctcctccattactcttcccagcctgttttaggtgtccctcttaagtgcttcttgtttgctctgtgcttaaggtctttatttgttccacacgtaaaatatttcttgtttctttatctgggttctccactagactgtgagctcctccagggcaggggcatgataggggccatttaaatgaatagtttgccttctaattcctccctaccctgctgccaatttcatgtctagtcaa

SEQ ID NO: 293999 - DNA, 579 bp, Homo sapiens
tttgctgaattaacgaataatgaaatattgaatggtaatgcactcagaagtgtgcagattactttactgcacaaattttgcttgactcactgccagaaagtctgccacatcctgaatgaggcagatgttattgactcaggtaagagtttgaagttgcatctcaggaactagcccaatgttggaggaggaggtaagacagataatctctttatttaagcagaaagttgtgtttaataactgtgaatatctcccagtttttagcgcagccagagcttcctgtcatgccatatcacttcacagagagacctggggtgctcacttaggctccagaaagttatcatgtgcctggagaataacctgacatcccaggaactcccctactggagaaactcaaccagctcatttatcaacctaaagcctcttgggtggaggygctactatctatgtgtgtctgagacccttggctgtcatccttccagactgggccacctgctttttaggtggaaaagttgttggcgtttcatgcatgtatgtggggtaccagttggtgctggaaaaaaaaggcacttagaacctgtg

SEQ ID NO: 294000 - DNA, 1219 bp, Homo sapiens
tttgctgaattaacgaataatgaaatattgaatggtaatgcactcagaagtgtgcagattactttactgcacaaattttgcttgactcactgccagaaagtctgccacatcctgaatgaggcagatgttattgactcaggtaagagtttgaagttgcatctcaggaactagcccaatgttggaggaggaggtaagacagataatctctttatttaagcagaaagttgtgtttaataactgtgaatatctcccagtttttagcgcagccagagcttcctgtcatgccatatcacttcacagagagacctggggtgctcacttaggctccagaaagttatcatgtgcctggagaataacctgacatcccaggaactcccctactggagaaactcaaccagctcatttatcaacctaaagcctcttgggtggaggtgctactatctatgtgtgtctgagacccttggctgtcatccttccagaytgggccacctgctttttaggtggaaaagttgttggcgtttcatgcatgtatgtggggtaccagttggtgctggaaaaaaaaggcacttagaacctgtgwtatgtacagataaattaagctaagaatgacaacatatttcttgtcagaaaaaaatgtaagtgcaaagaagccagtgaagtaatatgttgaaggtattaaaaaaaaaaaaaccttaacaacatatgattctatacccagcaacaatatcwtttcaaacttaaggtgtaaaataaggacatttttagacatataaaacctgaaagaattcatcaatagcagacccacactaaaagatatgttaaaggaattcctttgggaacaaagaaaatgacttaagatagagatatgaatcaaaggaatgaaaagcatcaaaaatggtaactatatgtgtaaatatatgagattttttcttattatttagctttatatcaaagtgtttaagaacaaagaatattaccagagattaaaaaggcaattttatgatgcagagctgaaaaatttcaccactccctcttccagtaattatttttaagtagaccgaaagtcaggaaggatacaatggacttgaacaacactattgacctattaagcaaactgacctaattgacatttatagaacactccaccactccacctagtaacagaatacacattattttcatgtgtatacagatcatttatcaagataaatcaaatttt

SEQ ID NO: 294001 - DNA, 639 bp, Homo sapiens
tatgtacagataaattaagctaagaatgacaacatatttcttgtcagaaaaaaatgtaagtgcaaagaagccagtgaagtaatatgttgaaggtattaaaaaaaaaaaaaccttaacaacatatgattctatacccagcaacaatatcatttcaaacttaaggtrtaaaataaggacatttttagacatataaaacctgaaagaattcatcaatagcagacccacactaaaagatatgttaaaggaattcctttgggaacaaagaaaatgacttaagatagagatatgaatcaaaggaatgaaaagcatcaaaaatggtaactatatgtgtaaatatatgagattttttcttattatttagctttatatcaaagtgtttaagaacaaagaatattaccagagattaaaaaggcaattttatgatgcagagctgaaaaatttcaccactccctcttccagtaattatttttaagtagaccgaaagtcaggaaggatacaatggacttgaacaacactattgacctattaagcaaactgacctaattgacatttatagaacactccaccactccacctagtaacagaatacacattattttcatgtgtatacagatcatttatcaagataaatcaaatttt

SEQ ID NO: 294002 - DNA, 639 bp, Homo sapiens
tatgtacagataaattaagctaagaatgacaacatatttcttgtcagaaaaaaatgtaagtgcaaagaagccagtgaagtaatatgttgaaggtattaaaaaaaaaaaaaccttaacaacatatgattctatacccagcaacaatatcatttcaaacttaaggtgtaaaataaggacatttttagacatataaaacctgaaagaattcatcaatagcagacccacactaaaagatatgttaaaggaattcctttgggaacaaagaaaatgacttaagatagagatatgaatcaaaggaatgaaaagcatcaaaaatggtaactatatgtgtaaatatatgagattttttcttattatttagctttatatcaaagtgtttaagaacaaagaatattaccagagattaaaaaggcaattttatgatgcagagctgaaaaatttcaccactccctcttccagtaattatttttaagtagaccgaaagtcaggaaggatacaatggacttgaacaacactrttgacctattaagcaaactgacctaattgacatttatagaacactccaccactccacctagtaacagaatacacattattttcatgtgtatacagatcatttatcaagataaatcaaatttt

SEQ ID NO: 294003 - DNA, 639 bp, Homo sapiens
tatgtacagataaattaagctaagaatgacaacatatttcttgtcagaaaaaaatgtaagtgcaaagaagccagtgaagtaatatgttgaaggtattaaaaaaaaaaaaaccttaacaacatatgattctatacccagcaacaatatcatttcaaacttaaggtgtaaaataaggacatttttagacatataaaacctgaaagaattcatcaatagcagacccacactaaaagatatgttaaaggaattcctttgggaacaaagaaaatgacttaagatagagatatgaatcaaaggaatgaaaagcatcaaaaatggtaactatatgtgtaaatatatgagattttttcttattatttagctttatatcaaagtgtttaagaacaaagaatattaccagagattaaaaaggcaattttatgatgcagagctgaaaaatttcaccactccctcttccagtaattatttttaagtagaccgaaagtcaggaaggatacaatggacttgaacaacactattgacctattaagcaaactgacctaattgacatttatagaacactccaccactccacctagtaacagaatacacattattttcatgtgtatacagatyatttatcaagataaatcaaatttt

SEQ ID NO: 294004 - DNA, 576 bp, Homo sapiens
ggaactcatttttctgagaacaattgtgtctgtgcactacatatgctatagtttggatgtttgtccctgcccaaatctcaagaagagttgtagtctccagtgctggaggtgggggctggtgggaggtgtttggatcatgggggcggatccctcatagtttggtgcgatcttcatgatagtgagttcttgcaagatctggtcatttaaaagtatgtggcacctcccccttctctctctctttctctgtctctctggcacttgctcctgctttcaccatgtgatgtgcctgctctcccttcaccttctgccaggattgtaarcttcctgagggctccctagaacgagatagatgccagcaccatgcttcctgtacagcctgaagaatcatgagccaattaaacctgttttctttataaattacgcagtctcgggtatttatagcaaggcaaaaatggcctaatacaacaaataatatatgtataaatatatattccctaaatacattttgagaatttaagatttaagttgctaagtgagagtttattggcgaaaaccagagttgttctaagcatacta

SEQ ID NO: 294005 - DNA, 558 bp, Homo sapiens
tattttgatgaatagagaataatgtattttaattagcatactaataactttgtgagtaaatttttgcttctcaagtacggggaacagcatgccttcytaatgaggttgatctgcagaccaacttccattatttatctgcttcatagatactttttctttctttaaatacaagacaaatcaggaagatctctgcctccatttttataaattttgagttagtggagtctaaattcatgaaattcaactaccatatggtatcatacaataaatcaagagtttttcaacaactgtaacctggcttagacttttctgaagcaatctacagctcttcatactgttttctacacgtaagcgagatggtaatgttcacaaagtaatccagcattgatgcagatggtaattgcaaaatgtagaaaagaaaaattctgaattcactaaaactaggtacaaagaacatgatagcacatggctgatacacagcagctgggattgacacacattgggccaggtggaatcacctccctccacacaccctttatctcaggtttcctggtgacc

SEQ ID NO: 294006 - DNA, 558 bp, Homo sapiens
tattttgatgaatagagaataatgtattttaattagcatactaataactttgtgagtaaatttttgcttctcaagtacggggaacagcatgccttcctaatgaggttgatctgcagaccaacttccattatttatctgcttcatagatactttttctttctttaaatayaagacaaatcaggaagatctctgcctccatttttataaattttgagttagtggagtctaaattcatgaaattcaactaccatatggtatcatacaataaatcaagagtttttcaacaactgtaacctggcttagacttttctgaagcaatctacagctcttcatactgttttctacacgtaagcgagatggtaatgttcacaaagtaatccagcattgatgcagatggtaattgcaaaatgtagaaaagaaaaattctgaattcactaaaactaggtacaaagaacatgatagcacatggctgatacacagcagctgggattgacacacattgggccaggtggaatcacctccctccacacaccctttatctcaggtttcctggtgacc

SEQ ID NO: 294007 - DNA, 979 bp, Homo sapiens
tatttttattatggtaaaatacacataacataaatttaccattttaactatttttaagtgttcatttcagtggcattaagcacattcacactgtgatgcaatcatcaccaccaaagtagtttaaagagtctttatcactgggamtcagggtaggtctgagtccttggccagagctgtgggctttgaacccagtcagaaaaaggaccttaactaagctatgactaacccggctcaaataaaacagtacagtaatttctcagtgtcaatgagggattggctccaggagttccctcagataccaaaatctgaggatgcacaaggccctgaaatgaaatggtgtagaatttgcatgtaacctaagcatatactctcatatcatacatgttcactacagacttttttctgaatatttttgaacagagcttacttgaaaccacggatgtggaacccacagagacagagggctgactgtatttaaaatgaggcaaawtatttttattatggtaaaatacacataacataaatttaccattttaactatttttaagtgttcatttcagtggcattaagcacattcacactgtgatgcaatcatcaccaccaaagtagtttaaagagtctttatcactgggactcagggtaggtctgagtccttggccagagctgtgggctttgaacccagtcagaaaaaggaccttaactaagctatgactaacccggcwcaaataaaacagtacagtaatttctcagtgtcaatgagggattggctccaggagttccctcagataccaaaatctgaggatgcacaaggccctgaaatgaaatggtgtagaatttgcatgtaacctaagcatatactctcatatcatacatgttcactacagacttttttctgaatatttttgaacagagcttacttgaaaccacggatgtggaacccacagagacagagggctgactgtatttaaaatgaggcaaa

SEQ ID NO: 294008 - DNA, 496 bp, Homo sapiens
tggagaaaatacagacaagctggagtaatggactgaatggaacaggatattacaatgaggtaagtgtcaaggtctgcatataggttcaaaaatcaattgtacaataatacatgagagaaaccaartttaagagcaacgtctacagacatttttctggcaacaatagggtcagaaataattcataggatcatgtgctcacagacacataattctaagctatattaaaagatgtaggaaatctacaataagcgtggtaatatttctactttgacctgcactgatcaggcgatgatctaaaagaagcattttatgccttcaataaatatttattgagtgccttctaagttactaggtactgtgttaggccttcgagatctggtggagaacaaaaaagacacagtccctattgtcacaaagcttaacagcccaggaaatgcaggtaaagtaaaatgtgctcagagaatgaagaggaacttaaaactatgtcttagagcaa

SEQ ID NO: 294009 - DNA, 496 bp, Homo sapiens
tggagaaaatacagacaagctggagtaatggactgaatggaacaggatattacaatgaggtaagtgtcaaggtctgcatataggttcaaaaatcaattgtacaataatacatgagagaaaccaaatttaagagcaacgtctacagacatttttctggyaacaatagggtcagaaataattcataggatcatgtgctcacagacacataattctaagctatattaaaagatgtaggaaatctacaataagcgtggtaatatttctactttgacctgcactgatcaggcgatgatctaaaagaagcattttatgccttcaataaatatttattgagtgccttctaagttactaggtactgtgttaggccttcgagatctggtggagaacaaaaaagacacagtccctattgtcacaaagcttaacagcccaggaaatgcaggtaaagtaaaatgtgctcagagaatgaagaggaacttaaaactatgtcttagagcaa

SEQ ID NO: 294010 - DNA, 496 bp, Homo sapiens
tggagaaaatacagacaagctggagtaatggactgaatggaacaggatattacaatgaggtaagtgtcaaggtctgcatataggttcaaaaatcaattgtacaataatacatgagagaaaccaaatttaagagcaacgtctacagacatttttctggcaacaatagggtcagaaayaattcataggatcatgtgctcacagacacataattctaagctatattaaaagatgtaggaaatctacaataagcgtggtaatatttctactttgacctgcactgatcaggcgatgatctaaaagaagcattttatgccttcaataaatatttattgagtgccttctaagttactaggtactgtgttaggccttcgagatctggtggagaacaaaaaagacacagtccctattgtcacaaagcttaacagcccaggaaatgcaggtaaagtaaaatgtgctcagagaatgaagaggaacttaaaactatgtcttagagcaa

SEQ ID NO: 294011 - DNA, 496 bp, Homo sapiens
tggagaaaatacagacaagctggagtaatggactgaatggaacaggatattacaatgaggtaagtgtcaaggtctgcatataggttcaaaaatcaattgtacaataatacatgagagaaaccaaatttaagagcaacgtctacagacatttttctggcaacaatagggtcagaaataattcataggatcatgtgctcacagacacataattctaagctatattaaaagatgtaggaaatctacaataagcgtggtaatatttctactttgacctgcactgatcaggcgatgatctaaaagaagcattttatgccttcaataaatatttattgagtgccttctaagttactaggtactgtgttaggccttcgagatctggtggagaacaaaaaagacacagtcyctattgtcacaaagcttaacagcccaggaaatgcaggtaaagtaaaatgtgctcagagaatgaagaggaacttaaaactatgtcttagagcaa

SEQ ID NO: 294012 - DNA, 555 bp, Homo sapiens
aaaaaaaaaaaaaaacaacaaaacagcttttacctatcaatttacttctgagatcttgcttatgatgtaattaacaaatatcttttaacataaggaaagagcacagattctctcattgttttcactttaaaatacatgccaaggctcataataatttttaggtctcaaaaacatataaracatcaagtatattttctttcttgaagtatattctcacaaatctagaagacattgttatggctcctactcactttatagattactaactgccagacagaaatcttctataaagaactgctgactgaatatgccaataagtaatcatgtctcaacaatgatgtgaggataaactacgatgagtgaaaatgtttggaattcctaaagaagaaaatgtgctgagtcatggaaagtactgatgtatagtttctcaactaaatgatggacagcaaagaatactgtgactcctataaataactctttgtttttattttaaagaaattacactaatatatatctttttgttttccacaattgggaagtgatatctgtcatgtt

SEQ ID NO: 294013 - DNA, 1111 bp, Homo sapiens
aaaaaaaaaaaaaaacaacaaaacagcttttacctatcaatttacttctgagatcttgcttatgatgtaattaacaaatatcttttaacataaggaaagagcacagattctctcattgttttcactttaaaatacatgccaaggctcataataatttttaggtctcaaaaacatataagacatcaagtatattttctttcttgaagtatattctcacaaatctagaagacattgttatggctcctactcactttatagattactaactgccagacagaaatcttctataaagaaytgctgactgaatatgccaataagtaatcatgtctcaacaatgatgtgaggataaactacgatgagtgaaaatgtttggaattcctaaagaagaaaatgtgctgagtcatggaaagtactgatgtatagtttctcaactaaatgatggacagcaaagaatactgtgactcctataaataactctttgtttttattttaaagaaattacactaatatatatctttttgttttccacaattgggaagtgatatctgtcatgttwaaaaaaaaaaaaaaacaacaaaacagcttttacctatcaatttacttctgagatcttgcttatgatgtaattaacaaatatcttttaacataaggaaagagcacagattctctcattgttttcactttaaaatacatgccaaggctcataataatttttaggtctcaaaaacatataagacatcaagtatattttctttcttgaagtatattctcacaaatctagaagacattgttatggctcctactcactttatagattactaactgccagacagaaatcttctataaagaactgctgactgaatatgccaataagtaatcatgtctcaacaatgatgtgaggataaactacgatgagtgaaaatgtttggaattcctaaagaagaaaatgtgctgagtcatggaaagtactgatgtatagtttctcaactaaatgatggacagcaaagaatactgtgactcctawaaataactctttgtttttattttaaagaaattacactaatatatatctttttgttttccacaattgggaagtgatatctgtcatgtt

SEQ ID NO: 294014 - DNA, 587 bp, Homo sapiens
  misc_feature (1)...(587): n = A,T,C or G
aaatgctccacagctgtagatataatataagatactagcagcaccaggaaaatagattcagtctctgacataactgggctccaccatgtccaagctgaagtagcagcaactgctcgccagaatggatttaganatgaaaacatgaatgaagcctcctgctggagctttgttccttgatttttttcacttaataaacaacacaccttctgagtaaaataatctattttaatgactccaaaaatagtatttgcaaatagagttgaagccttctagtgaggacctatgttgaagtggaagaagtatttggagtatgatttcccaagtaggtgtggtcagaaacgggggcggctggaaaggtggagaatcacctgtgatagaaacagagtacaacaaaacatgctctctgctttctgctgtattcgttaaatrgcctttattgtttttgctaagaaaggtcaattaatcatccaaagtgctatctgacagaaattaacaatcagctgtgacaaatatccagtaagagctcacaacaacaaagggttttgtttttctctttccatataccattgaaaaaggaggcattggca

SEQ ID NO: 294015 - DNA, 619 bp, Homo sapiens
aaagcacaggggtgctaggctggaaatgtgagccaagatggcataaagatttcaacccaagtctgattgcaaagtccagcttccttctgttataccagtggttctttcattcaataaatatttgttgagtacctgtgatgtgctaagcagtgtcctaggcacaaatttcctgttcacatggagtttatattctgtcagggagtcagataatgaacctgagaataaatagatcaatacgaattttaagtagtaaaatgaaacagagtaatgaggtagagagtgagttgggtcattgagaaaggcttttctgaggaagcgatcctccrgggaagcctgaatggtgaaacagaggccatgatgtcaagtgcaaaggccctgagacagaaataagtttggtgcactcaaaaaaccaaaagaaagcctgggtagctagcacatgggagtgagagagtgagctgtgagctgagatagctgggaaccagatgaagctcttgtaggccaaggaaagaaattggggatcaattgtccttgtagaaagatgctattcaagggtatcaaaaatcagattggctgccttaagaagaaggaacaaggggcaaaagtagaagtagggagacca

SEQ ID NO: 294016 - DNA, 619 bp, Homo sapiens
aaagcacaggggtgctaggctggaaatgtgagccaagatggcataaagatttcaacccaagtctgattgcaaagtccagcttccttctgttataccagtggttctttcattcaataaatatttgttgagtacctgtgatgtgctaagcagtgtcctaggcacaaatttcctgttcacatggagtttatattctgtcagggagtcagataatgaacctgagaataaatagatcaatacgaattttaagtagtaaaatgaaacagagtaatgaggtagagagtgagttgggtcattgagaaaggcttttctgaggaagcgatcctccagggaagcctgaatgrtgaaacagaggccatgatgtcaagtgcaaaggccctgagacagaaataagtttggtgcactcaaaaaaccaaaagaaagcctgggtagctagcacatgggagtgagagagtgagctgtgagctgagatagctgggaaccagatgaagctcttgtaggccaaggaaagaaattggggatcaattgtccttgtagaaagatgctattcaagggtatcaaaaatcagattggctgccttaagaagaaggaacaaggggcaaaagtagaagtagggagacca

SEQ ID NO: 294017 - DNA, 417 bp, Homo sapiens
ccctccaggtctcagcactccagggggtcctgctgttgagaggccctaggtccctgggtgccagaactggagaggcctgcaaattccagaaaaaaaaaggggagaaggagccttgtcaatagtgagacccaactagaactaggattctatctcctctcctgctttctttccattacttcccatyatctccaagaaggtgggcgaggaccctagcatgcctttcttaaggaaatagatcatagtaacagtgccattctagctaatcttcttatacacatttatgactcctgttttaattaactagccaagagccagaatggcttcataagtgaactagggctagtttcggaaatttcaacctaattctgccctcacaatccctacctctagacccaacttacatggttccttcagcac

SEQ ID NO: 294018 - DNA, 1581 bp, Homo sapiens
tctgctgcaacttgagtaaacttgaactagtaaataggagtaatattatgttttaacaattcatttatgagaaaaaaatatgcataacggtgggggaagtccactggcaggagttcccttattcattcagcatgaataacagtgaagacacaattacaactccacattttagcaacagcataaaccaaaccaggcagtaagtgggcaattcccttctgttccaatacrctccaattaacacaaactgaggaaggaataaatttaagcaggaacagcttatcaacatacaattagcactcaataatttatccctgtaatgccagatcaaataaaaacattgtgtcataaatcacttactcaagcaagccaccaacccctatgcttaaatgatcttttggttgatttgttttctattcaccacccttatgccacaataggtttttctttctttatttatttctgagacccaagacagccwggtgtagacaggggcccaagaaatgcaggcacctctaggagacaggaaaagcaaggtacagattctcccctagggcctccagaaggagtgcagcctcccaacaccgtgattttagctcagtgaaagtggttttgaatttctgccctctgaaatggtaagacaacacattatgttgttwtaagtcacatagtttgtggtaatttgttacagcagcaatcagaaacattctctttgaggtgtctagctctttatctcttccaagctaaagagcgtaagtttcattccaaaacttaagttctgatgtagtctgcacacctggaaatatctaaggagctcagaaggcaccaatcactgagaatggaaggcattcaatttccagaaacctggatgtgaagatcttctacttagccctctctagcttttttttttcgttccattatagaaattttctaatatatacaaaagtagacagagtagcatcaaaatccactgtatacccaccatctagcttcaacaattatgaactcatgggcaatcatgaatcttctgtatccctwaatatagcagtgactcctgtgggtttctagtatgagtagttggtataagggctattaaawaatcatgaacttgaaatgatgctgttctggaatttcagcctcatcaaggtaggtgttgttattgccacattgcagatatattcagtcttataaaggttaattgacttgcctaaggtcacagagcaagagagtggtaaaattaagaattgaattccaggtctctgtggctccaaggtctatgttctctatatcggtcaatagattcggtaggaatgatgactgataaacagagtcagtcgaaggctgagagctgagagtaaatttgttatagctaatcttccttgatcctttagtgacctacgtacaatgtaatcagggcagatcttgtagctatttcaggtttagatttagtgtgtatgaaagaaacagaagcaacaagggggtcagagaggagaacaatgaggaatccagagaggagtttcagatgcaggacgtagcaaaggaactaactaactaggtgaatgctgtaaagaacagaaaaaaatg

SEQ ID NO: 294019 - DNA, 1115 bp, Homo sapiens
ccttgcttttcaaacctacaaatttggttgctttaagggcagaataaaattttttcctatgtcttctctcctgatttaaacctatatgatgaaaaagtggtagctttatttataatgtgctactaatcttgtatcactttacaaccatcaattcttatcacctcctgctggaggagacagtgtagatttatataatccacaggcagataggcaatactttcacatttgtctgagctatgaaatttgctctctggaaaagtgtttgttaatgaaaggaaggcaaattacattttatatatcaaaagtgtcattgtccttattcaaagatgctgctgcagccaccagctagagaatggagttgggaacagttgtctccagagtagctagagggcaaagaacacatgytttgaatgtttctttagcccatttgaaagtcaaactggagagaggacatctcaatgtttatatcattttcctttaagactcagaagtctcaagtaggcccttgagaaggtgatggcaagctagcttgttcttccagacttctgactaatatgattacaaatacggggtgatawcaggaggcgatgtgcttgcttaagtatatgctgtaaaaggtcccagagatttacaagggactgctccacgctaaaccaggcaccatctgataaacaagcaattttagctgcaggctaaatgatgctctttgaggctttgatttacaatgctgaagatgatatatttgtggtttgaggataggttctgctatgggcttgctgtgattactcacccatgagcagaattcagggctcaagtcttcaacttggaggtcagaaaattgccagtggaatgaaagagagttgataaggttaattgagatgctaaatagwtataaaaaaaacttattaagtctgtggtttcaaactcttcttaagctttctggggaccacagtttttgttagtttgcttaaatcccagagatataaaaataatctgcaaaattgatctggtggtctcattttactttcattatatttaaaaagcaaaaacaagcttagtttattatttgctgacatttaaaaataagaaaaaaatgttcaatgtagcatttatgt

SEQ ID NO: 294020 - DNA, 573 bp, Homo sapiens
acttattaagtctgtggtttcaaactcttcttaagctttctggggaccacagtttttkttagtttgcttaaatcccagagatataaaaataatctgcaaaattgatctggtggtctcattttactttcattatatttaaaaagcaaaaacaagcttagtttattatttgctgacatttaaaaataagaaaaaaatgttcaatgtagcatttatgttattgctcgatagctaaggaatctgaaggcaactttgaagcaaatcaaatctcctgtaagaacaccgaggaatagacttacaatactcgaacctgaattaagaactgtgggagtgcttttaaaactcatggttccaagagatgatttggcaaactcctttgccaagaagttttgtatttaataaatatttgagtgtccactaatattggcactgtactagaacaaagataaataaaatgtcgtctctctcctttggaagtttacagtccagtggacaaaaccatagataatttcagtaaaatgtgagatgtgttagagctcagtagaatggcgtgggaggatagagaagacaaattaa

SEQ ID NO: 294021 - DNA, 573 bp, Homo sapiens
acttattaagtctgtggtttcaaactcttcttaagctttctggggaccacagtttttgttagtttgcttaaatcccagagatataaaaataatctgcaaaattgatctggtggtctcattttactttcattatatttaaaaagcaaaaacaagcttagtttattatttgctgacatttaaaaataagaaaaaaatgttcaatgtagcatttatgttattgctcgatagctaaggaatctgaaggcaactttgaagcaaatcaaatctcctgtaagaacacygaggaatagacttacaatactcgaacctgaattaagaactgtgggagtgcttttaaaactcatggttccaagagatgatttggcaaactcctttgccaagaagttttgtatttaataaatatttgagtgtccactaatattggcactgtactagaacaaagataaataaaatgtcgtctctctcctttggaagtttacagtccagtggacaaaaccatagataatttcagtaaaatgtgagatgtgttagagctcagtagaatggcgtgggaggatagagaagacaaattaa

SEQ ID NO: 294022 - DNA, 573 bp, Homo sapiens
acttattaagtctgtggtttcaaactcttcttaagctttctggggaccacagtttttgttagtttgcttaaatcccagagatataaaaataatctgcaaaattgatctggtggtctcattttactttcattatatttaaaaagcaaaaacaagcttagtttattatttgctgacatttaaaaataagaaaaaaatgttcaatgtagcatttatgttattgctcgatagctaaggaatctgaaggcaactttgaagcaaatcaaatctcctgtaagaacaccgaggaatagacttacaatactcgaacctgaattaagaactgtgggagtgcttttaaaactcatggttccaagagatgatttggcaaactcctttgccaagaagttttgtatttaataaatatttgagtrtccactaatattggcactgtactagaacaaagataaataaaatgtcgtctctctcctttggaagtttacagtccagtggacaaaaccatagataatttcagtaaaatgtgagatgtgttagagctcagtagaatggcgtgggaggatagagaagacaaattaa

SEQ ID NO: 294023 - DNA, 543 bp, Homo sapiens
gaaccgggtcgcagagcaggaggggagtggcgggcaagagagcattcccgcctgagctccacctcctgtcacttcagtagccacattagattctcataggagcaccaaccctattgtaaactacgcatgcgagagatctaggttgcacgcttcttatgagaatttaattaatgtctgatgatctgaagtggaatagtttcatcccaaaatattccccacccccgacccaccctgatccatagaaaaattgtcttccacaaaaccagtccctggtgccagataggttgcagattgctgctttaaagggtcataagaaataatctaaaaggaaaagatatctaaaaggaatttcattttaaagttttaagcaaaagaaagtaatttttccagagtagttataagttggtaaaatcagaagtattatttggaaaataccttttaaaaaattttgaaagmggtattagctgataggttcttgccttatacttaactggatgtttaggaagagaatctataactctaagaaatatcctaaggcaaaag

SEQ ID NO: 294024 - DNA, 644 bp, Homo sapiens
ttgcactttatttcttttcttttctttctttcttccttttgagacagggcctcactgtgtcacccagactggactgcrgtggcatgattatagctcactgcatcttcaaactccctggctcaagcaatcctcccactgcagcctcccaagtagctgggactacaggcacatgccaccatatctggatattaaaaaagttttttttttgtagacattggcctcactgtattgcccaggctggtctcaaactcctgagctcaagtgatcctcctgccttggcctcccaaaatgctgggattacaggtatgagccaccacgcccagtctacattttcttatttgtgtaatcttaggtgatttttgtaaaataaatgcaagtaaaaaaagagatctattgggttctgtctttgtaaggtcatttattgttatgggctgaattgcattctcccaaaattcatatgttacagtcctaactcctagtacctcagaccttgactgtatttgtcaataggcctttaaagaggtaattaaagtaaagtaaccctaaaagttattagggtggggtgtgtatctgagtgatgtctttgaaggaagcaattaggattaggacacaggcaacacagaaaaccatgtgaggacacggcc

SEQ ID NO: 294025 - DNA, 650 bp, Homo sapiens
atgcaggactccccaaccttgattttataatggtgactgcattttgtaggtggaatcatttctaccgaaatcattttgaaacacaagaatattgatcagtactgtttcactctgatttagtaaatcagaaagcctccccctacccccagcccccactttcacataccttctgggaggtgcctcagtatagacttggtatctgtgaaggactgagttcatgaatatgcacagaagcacttaaaccatgcctcttatttctataatatctgaaaatggcttcataaaagttaagtcaggagaacactgtttacatgacacttcttaactcatttttaatgtttatttttaatttcaaaaacttgttgcctatttggttttcagtactgcataacactgactttcttaaattagtcatagttgcmataatttacttaaatttggtaatgtcacatttgggttggggtttcagtgggaatagtaacttgccgctagtgagaaatggcattgaatactaaagactcaatatgaacaggctttatagacccttagagaaactgttgccttaatgtttggtgcaatttctagtagtgcataagtgaatttagtcttatgataagtaactttgagctgtttttagcttagtaagaatt

SEQ ID NO: 294026 - DNA, 522 bp, Homo sapiens
gttagcagtgttggaagtctgactacagttaagcagagtgagactacctaaacaacctaactttaaaaggataacatcactaaagaaagacttyacaagtgagtatcaggattttcaaatataatttttatgtttcaggttccctttcttctttttcttaatgactctgggtgatctggaaagacctagaggttgtgtttctgagagtgttctctgccacagagtagtttcctggtattagtgtgacttgcagctcattctgcaccattcactaaatgcctcttatcccttgttgacctacctctgggactaaagtgacatgtgggttttcagtagttttcagtttttgggctatgccctttgtattcagtcaaaccacattttgtcatgagccagtaactcttgggttttggttgtccaactacataatcaccatgactgtaaccatcagattctaaactgatactttcattccagttatatatactttttgagtaccctaatgtagctcaaaccctacag

SEQ ID NO: 294027 - DNA, 552 bp, Homo sapiens
ttcaaatataatttttatgtttcaggttccctttcttctttttcttaatgactctgggtgatctggaaagacctagaggttgtgtttctgagagtgttctctgccacagagtagtttcctggtattagtgtgacttgcagctcattctgcaccattcactaaatgcctcttatcccttgttgacctacctctgggactaaagtgacatgtgggttttcagtagttttcagtttttgggctatgccctttgtattcagtcaaaccacattttgtcatgagccagtaactcttgggttttggttgtccaactacataatcaccatgactgtaaccatcagattctaaactgatactttcattccagttatatatactttttgagtaccctaatgtagctcaaaccctacagcagcaacctgaatycttaaattagtacttttaaggaattgtgactttcctaaggtcctagattgtctctaggttataataaaacatttctttaatctcaaacagttctttcaatttccagtctcccaatggaagatgtataac

SEQ ID NO: 294028 - DNA, 579 bp, Homo sapiens
tgtaggagaggaaaatttttctactgtcctcttagggttttcagctaggattgacgtaagacagattaaacaggagaaaagcaaattttatttacatatacacgggagcccccacaaggacaatgaagacccaaagaagtggctaggcctaagcasttatacagtagtttgaacaaagggtggaaattgtggaaaagtaactaggaagataagttagtttaacaaagtttgtacagatttctctcagcctcaattccctgtctctggtgataagcatgttgtttcttttgtactggtatagggagggtatcttccacttgggagtttcatctactgctttcgggaagaaaaggggagattagagtgcccttcctatacctgctatttctcaagtgcctctatttcaaaacaactaagatgccaaggcagcatattttggagtggcatgtcctgaattccttcactgtcatctctacttagtttattagtttagctttgctaaagtcaaaagtgactgtgcattatcataaccatgcttacaaatgcttttggttgactttggatacacccaatttgttc

SEQ ID NO: 294029 - DNA, 584 bp, Homo sapiens
aaaaacctttctggcattctatggcatgtggtcacaaagagagcagcttctactctgtaggagaaagagactccatcttcttacttgttgttgggaaaagctgagtgttgggagaagctgaggcagggtttgcatttctgacataatgtaaaaagagtcctggaacatgtccgggggccagggtctaaaacccctcgtggcctttggaacactgaattctgtgctaaagggtggaagactaccctgacgcaccatcatctaagcccagggcataaaacccctcgtagattggaaagaatccagggctcagggcataaaatccctcatggcctctggaatgtgtctagacttgctggctccttgcttctagccctcccaggctcctagatcaattgtgtcttagaattggccatataaatgttaaaccgtcacagctgtaaatcatgtgcttaatgcaacgctccctttcaaccccacattctcaccatctgtttctttgtttgatcaccaataaacagtctgggcttccagagctcggggcctttgcagcckccatactcgcgttggcccccagacccacttta

SEQ ID NO: 294030 - DNA, 387 bp, Homo sapiens
agcaaattgtgaaatatcaaactgatggaaaatggtatatgcattttaaatgactacatataaaaatctgagaaacttaaaatatgactagaaaggcagaataaatatcatatgtgcagtaagatactgtatagtatgcagtatatgctgacaagctaaaagaaaaaatgaaaggtaaaataatttctattatttttattgttttttacaataatagaataaaatgaaatgaaaaaamccaacacaagaataatgtttattgtattcgatgggcctgacccacatgagttacacccgatttttagttcttggtttcctagaatggtttttacaaatggtcttcctgcctaactgcaatattatcaaaatacaaaataattgatactt

SEQ ID NO: 294031 - DNA, 562 bp, Homo sapiens
ctcaccttttcaccagaacataaagctcaactctggacacacttgacactggacttaaggactgttgtaataataccagattccaagtccatttcttttgaattggtgcactgtacacatrggacttaaacagatttatttgggtttaatttaagatttttctttctgcctttgtatctaataaactatttttcatctctttccccaaggttttcaaatagctggaaattcatgaatacttcacattttcatttgagtttgaagattataaatttagaatttaaaaaaaatttttcatttaaaaatagaacacttgcagtgaatttaacatgtgcaaagaaagacatttgattttgttggtaattcagtaagataactaatgtgtacttcaaaaatacaggtaatataaaattttggagtgagcactgtaatagcccccagttttgagtcttttaaaaataaagttgctatctaagaactgttttccccttatagtccaatacaaattttaatggtaatattgtggaacagaaatgagagtgtatctaaagctttgttcatt

SEQ ID NO: 294032 - DNA, 474 bp, Homo sapiens
ctgcccccctcaaccctggcattcgccttcatatctcttctttgctctgaggatgaagcttctatttatttcagctcctgtttcctgagcagggctaccatgtactgttgtgcaggttgtacacagcagccagttagggttgatctccggactgatcctgagatcctccctgtggccayctcacctaactctatcccaccatgtaacccttccagacgcatttgcagaccccatgcctgtgaaacagagggcaggatcctattcaggcagctgctttatcattgcactgggtggatcctgcttccacagggaaggcagaaaagatgtgctcctctacctcctcagcctctctgcctccggtgttctcaccttcaccccctccacctccactcccatccccatttacactagggaggaaatgactgcaatagcttaaagcagggtccttccctgccgccctcctgcctgtaatcc

SEQ ID NO: 294033 - DNA, 490 bp, Homo sapiens
cgccttcatatctcttctttgctctgaggatgaagcttctatttatttcagctcctgtttcctgagcagggctaccatgtactgttgtgcaggttgtacacagcagccagttagggttgatctccggactgatcctgagatcctccctgtggccatctcacctaactctatcccaccatgtaacccttccagacgcatttgcagaccccatgcctgtgaaacagagggcaggatcctattcaggcagctgctttatcattgcactgggtggatcctgcttccacagggaaggcagaaaagatgtgctcctctacctcctcagcctctctgcctccggtgttctcaccttcaccccctccacctccactcccatccccatttacactagggaggaaatgactgcaatagcttaaagcagggtccttccctgccgccctcctgcctgtaatccagcagsgctcaaaatttccaagatgattttctggagtcc

SEQ ID NO: 294034 - DNA, 584 bp, Homo sapiens
ttaacagtcaatgctcccagcagctaggggagaggtgcacaggctgggaaaggctgtctgggtggggcacaatgacatctgcaatggtgggacatgctcggcagagacaaggacccacatgtgtaaggagcatgtcatattcagagcttagggctgctgggctataaactgcaagggtctcagtgagcactaagtgagatgacacaggtgaaaataccatacayccataagacatcagctaaatgtcccatatctgtatttttcacagagttgatgcacaggaccaggtgaggcacagcagacatgaaatgttactgtatataagctagaaaatcactgtgtaagtgctaattatttaagataggtttttgaatgagtacattcaacaagcatttatggattatgtactgtatgccaggctctgtactaggcacaagggatatggcagaaactaatacagccttgctccatgcccttctggagctgatggtccagtgagggaaacagacattacacaatgacacaaatatccggaggagtggacctgtggcagatatcgcaactgtggtgagtactttggaaag

SEQ ID NO: 294035 - DNA, 608 bp, Homo sapiens
ggtaaaatgatttacagatttaaaggtcagtgcttccctcactttatttttctcttcttctccttttgagagtcagacgctgaagactgagacattccagagtaaccacacatatagaagaaattagaaagtcaccatgccagaggaaagcacaggcttgggaaacagctgagaaggctttacgttgacaccttcggctgatctttggcacaaagacagcctacaataataaaaataaataaataaaataaaataaaataactaaaccaaaatcctgcaaaccctggggagaagggagaatctgatttccagagtcactacattataaaatccaagtgtccagttttcaacaaaaatgttacaaagtayacaaagacacaggaaagtatggcccttttgaaggaaaaaaaaatagatattgtctctgaaaaaataactgatggtggatctacttgaagaagactttaaaacaattagctcaaagaactaaaagaagacatggagaaagtcaagaaaacaatgtatgaacaaaattgaaatatcaataaagaaatggaaaacccaaaaaggaattctggacctgaaaagtacaataactgaaataaaaa

SEQ ID NO: 294036 - DNA, 574 bp, Homo sapiens
tacttgccttataagaaataaatgaagttcctagggctaaaagcaagtgaacgagatgaaattttaaatccacatgaaagagcaaaacrcagcagtaaaggtaatgatgtaattataaaagatagtgtaaatgcatcttttttctctcaactgattttaaaagtcattttataagataatatgtatataactgtattattgtacctataacatatagaaatgacagtaaccacacaaaggaggtgggtgtgaacagagttgtactggagcaagatattacaccattatgcctgtaatcccagtgctttgagaagccaaggcgggatgatcacttgaggccaggagttggagaccagcctgagcaacatagtgagaccccatctctacaaaaaaattttaaaattagccaggcatgatgatgcacacctgtagttctagcttctcaggaggctgaggtgggaggatcacttgagttcagaagttcaaggttatattgagctgttatagcaccactgtattccagcctgaatgacagtgcaagaccctgtctctaaagtaaaaaaaagagaagaaa

SEQ ID NO: 294037 - DNA, 615 bp, Homo sapiens
ggtagataggtagacagatggatggatagatagatagatagatagatagatagatagatagatagatagagaaatggatctgctgcaaggacctggcctttcacagtcatgagggctggtcaagcagtctctgtaaggcctttttgctgtgtctgatgctggaactcraagcccacaggcaggtggtcaggaagagaagatacctatagactgggggagcaaggacaagctggagcccacgaggacagactgagagctgtcagtgcttgttgcttctggccttggtggtatgaatgtctttctgaagccaaggcccccaccatggcactaaacatacacacctggcctatggaggtggggcagcggaaggaggagccagggaaggtggaggcccagatggctgccccacaaagatgggcagagcccgcaggtaatcgactccacaaatgggctgtgaaatgcctgctgcatccctctgcccccacccaccaagtctcccgcaagaatctctcttgtaatccaacctaacggaaacacccaggagcaggaattctgagaagcatggatcagctcagccaagttgacatgttgcaaagttactgggcctcaaaaata

SEQ ID NO: 294038 - DNA, 530 bp, Homo sapiens
tccagtgaaggacccagtgtttggagagaggcgtaaatgcgtgagcagccaggccctcctggagggagtagaggaaaaaggactccaccgcagaccctttcgtttctgtgtctggaggtgccacgtgctgacaactgccatagctcctggcttttctaaccctggtcctggatttagaaaagtcttagcaccagcagccatgtacagatttgttccataacttgctctttcattctrggtgagaacaacatccagctaccccaactggtaactgtcattttggacaagtcgcttcacctctctgagctgcagtttcctcatctattttctctatctgagaaaataacaaaggacactttgttatgatacaagcaagggacttcagattggtgatgtcatccagaggagactagaaaccaacagaatcctccgaaaacgctgtgcccacaatctttgccctctttacaaagtaacacagatactccttgccacccagagccgggtggtgataaaatgaagctctctttgta

SEQ ID NO: 294039 - DNA, 597 bp, Homo sapiens
catgctgcttggtgacacaggcaccaaggtgtggcccactagtttatctgagacaagggcatgacatggtcccaggtatggcccactggttaatctgagccatagtggatattctctccgtctgcgttacactcagggctccacgcgtttcaactctttctgtctatactcaagcagctgctttcctagaacctacggcaggaggtatgggaaggttgggagtttccagaatcacccacagacccatggccagccccagcagacccccccgacccgcagaccttgggctcctctttcccctaaggtgggtttccttccgaggcttcatgccagttcctggaagctggctttgagcacagccaccttagtcaatcaggcatgtttttgcctcatcaaaagcctttggagaagggtcaggctcctatgccctttcttccctgagtaacatcagggagcaggtgtgtatcttggagaagaggcacagctcctccacctggctgcattcaaatcccagcaggaatgactgtgacaggcagcagtgacacccaagtcctccccaacygcacccagcccaggcccttccacagtggcctgtca

SEQ ID NO: 294040 - DNA, 599 bp, Homo sapiens
aacagattgcagatgtttggaaacagatgttatcctaatgttaaggcaaaaccatgaatatttatgacaattattgcccagatcaaattacctcgcttaaccagggaggcaggcatgttctaacagctttggccgggacctggtgagggaaagacagaaaagtattgatgaacttttggttgcacttgaattttccttcacctgggatccatttttttttctgtcttcctgtggacctraaaacagagattggttgttatggaaccaatttagggattttcctgctgctcgtattaattggccaagtcaggattttccatcgtttttttccgcactgtgtcttagagaagggcctgccaaggtctctccaacctaagcagccatgggtacttcccaggctgtaggaggaaggctgggcttctctgcctttctccccgcccacctgccaggacccagggagccagcagaggccaggtggggcctcaggggcaagtggaattggcagatgtccctacaggaggttgagagggctccaggctgactcactgccaagcagagctgatttttttcctgccagccaccccggcagaaatgccagc

SEQ ID NO: 294041 - DNA, 568 bp, Homo sapiens
ggcatcatgaggaatcatgaaaggaagagagggaggggaggatgagggtggaagagagctaaaaactcagccatcctaacaagaaatcaataggtaatgctaaaatggataaatcgataaagtagacattaacatattrctccacagcaagggtcagcacaagaagaaacagctaaaagagtcaagaatcaaaaacaaatccagggccaggagtggtggctaatgcctgtaattctagcaccttggaaggccgaggcgggaggatcacttgaggccaggagttcaagatgagcatgggcaacatagtgagaccccatctctactaaaaatttaaaaaatttgccagatattgtggtgagtaccagtagtccagctacttgggaggctgaggagagaggactgcttgagcccaggagttggaggctgcagcgagctatgatcgcatcaccacactccagcctgggcaacagagagagaacctgtctgaagaaaacaaaaaagccattgctttgtgtatgttggcagggaaggggctgacagggctcctgcataagccttttagtaatag

SEQ ID NO: 294042 - DNA, 960 bp, Homo sapiens
ggcatcatgaggaatcatgaaaggaagagagggaggggaggatgagggtggaagagagctaaaaactcagccatcctaacaagaaatcaataggtaatgctaaaatggataaatcgataaagtagacattaacatattactccacagcaagggtcagcacaagaagaaacagctaaaagagtcaagaatcaaaaacaaatccagggccaggagtggtggctaatgcctgtaattctagcaccttggaaggccgaggcgggaggatcacttgaggccaggagttcaagatgagcatgggcaacatartgagaccccatctctactaaaaatttaaaaaatttgccagatattgtggtgagtaccagtagtccagctacttgggaggctgaggagagaggactgcttgagcccaggagttggaggctgcagcgagctatgatcgcatcaccacactccagcctgggcaacagagagagaacctgtctgaagaaaacaaaaaagccattgctttgtgtatgttggcagggaaggggctgacagggctcctgcataagccttttagtaatagwacgactccttcctacccacgaagacttcacgcccagggcgacatgggttgatggtccacatactcattccttgggaggtttaatctgttttattgaattttcagattctcaaatcaatacccataataatgcccagcagaaataaaatctcgctccaggtattttgccagwtggttgatatttacacatagcaggtttcccttcacggcttcagatagcttaataagtctcgccacaggcagtatatcccagcagttggccagtgcacgggccaggaaggggccactgccttccaggggtctcactccccagcctccgtgctcagaaacgctttctgcaggccctggtgcacatcattagacctctccacagcctcctcatttgtaaaatg

SEQ ID NO: 294043 - DNA, 623 bp, Homo sapiens
ttgcgccagtgcacttcagccagattttatctaaaaaaaaaaaaggggggcaagggtccttatgtgatatctctcagttcttcccttttgcaaatctgaatttgtatatctgggcctggtaacccgttttcctggggagcccatcgccagctgtgtggagatagcagccttaggggagcaggaatgctggctgtggccaggcttcttggacaagctttcagtcctgtgaaccctgggccgtttcctcatagcagggtgagtgtgatgatcccgtggcctcatggctgtgtttctgggcagcgtctccagctgtctgagatggcagcagtgtcctattgaaggagctccagggtctttgtgagggaggagagtgatgggatcctagagtggcsggttgaatgcctccaggcattgagtgagattctccttcaagggcttgtgaggcatttaaagtacactgaggccgagctgcacttggcctcaataagcacatgatgtttgattaagattggagattgcctacgctttagaatctgaccacctgtgaccactggaactcacctagagtgggggctcctgctgagcactggccctctctccgtctcctgccccatctcccacct

SEQ ID NO: 294044 - DNA, 548 bp, Homo sapiens
ggtttggcccctctccctgtgcatatgctgagcagcctcgtgatgacatgctgaaaaggaggaaagcttgcatggccaggctggctggcttcagagaggacagctccatctgtctgctccgggttcctggcctctttggcgagactgggactggctccctacaggacactgtcaagtattcttattctgtgtctctgcagccgcctccctcctcctgcaggcagccttttccaggccattagcccagctacgggccatctgccacccttgctgaagccccacaagtttgtctgggggacagggctgggacagcatatctctaggaggcctgagccyactacactcctcaggccctgggagactgaaacaaagtcctcgtcagagtcctggggtgtgtggctctgagaattacagatgtcctcacatacctgtcagaggaggctgtgggtgacacctaggtccccaggcaccgctgctgagctgctgtttgaccttgggccggtctcaccctgcctgggcctcagtttctccattgcagaaggatgggg

SEQ ID NO: 294045 - DNA, 580 bp, Homo sapiens
ttatgaattgtctttaaaaggttcataaaaattatccattatattcatgattttgtatctctacataattgactcatttttgaactaaattaaatcttgttatcccacacagagtcaataaaagtaacacttttatttcataattcagcacttttcaaaatacacattttaacctacaataatctaaatttaagattcagtgccatgagaggagttagaataatacataatcaagataaagtrttttacaatcaagcagttctatctttatgtcttgtcttccacatttataaaccatgtgactttgaggtacttaaaatctcttggctttatttttctcatttgtaaaataggaataataattacacttccttcaaggccacaatgaactatgtttgtgccactgcactccagcctgagtgacagagtgaggccctgtgtcagagaaaaacaaaaaaagaaagaaaaataaataataattgcacctccctcaaagattggatgggagcaataaaagatcatgcagaaaaagcaaatcaactggcatgtaagtgctaaataaatattgaatttttaaata

SEQ ID NO: 294046 - DNA, 580 bp, Homo sapiens
ttatgaattgtctttaaaaggttcataaaaattatccattatattcatgattttgtatctctacataattgactcatttttgaactaaattaaatcttgttatcccacacagagtcaataaaagtaacacttttatttcataattcagcacttttcaaaatacacattttaacctacaataatctaaatttaagattcagtgccatgagaggagttagaataatacataatcaagataaagtattttacratcaagcagttctatctttatgtcttgtcttccacatttataaaccatgtgactttgaggtacttaaaatctcttggctttatttttctcatttgtaaaataggaataataattacacttccttcaaggccacaatgaactatgtttgtgccactgcactccagcctgagtgacagagtgaggccctgtgtcagagaaaaacaaaaaaagaaagaaaaataaataataattgcacctccctcaaagattggatgggagcaataaaagatcatgcagaaaaagcaaatcaactggcatgtaagtgctaaataaatattgaatttttaaata

SEQ ID NO: 294047 - DNA, 561 bp, Homo sapiens
gtgcatatggaaaaaagtgagtcttcacctacttcatactgaagtattccaactattttgtagatctaatgtgaaaagtttaaaaaaaaaatctccttagatggaagaatgtaaacaggacagcaaatgcatgaaccataaattaaaaattgttaaatctaattatattacaattaaaggtttatttttaatcaataggaaaaattaaaagagtaaaaaggcaaatccaagagtaggaaaatacttcagattgagaaagagagagagagacacagtggttaggagagagagagagagatagacataagtgtatctcacaatgcatttgtatmcagaatacataaagaacttctataagtcaataagaaagtagaaacccagttaaaaatggaaaaacttgctgattaggcactgatcaaaagagaaaaactaaaatgctaccaaacacgacaatgtgcttcacctcattagtcaattacaactaaaatggattactaccacacaccccagaataaccctaacatgacgggttaataaagatgcaaagcaagtagaattctc

SEQ ID NO: 294048 - DNA, 561 bp, Homo sapiens
gtgcatatggaaaaaagtgagtcttcacctacttcatactgaagtattccaactattttgtagatctaatgtgaaaagtttaaaaaaaaaatctccttagatggaagaatgtaaacaggacagcaaatgcatgaaccataaattaaaaattgttaaatctaattatattacaattaaaggtttatttttaatcaataggaaaaattaaaagagtaaaaaggcaaatccaagagtaggaaaatacttcagattgagaaagagagagagagacacagtggttaggagagagagagagagatagacataagtgtatctcacaatgcatttgtatacagaatacataaagaacttctataagtcaataagaaagtagaaacccagttaaaaatggaaaaacttgctgattaggcactgatcaaaagagaaaaactaaaatgctaccaaacacgacaatgtgcttcacctcattagtcaattacaactaaaatggattrctaccacacaccccagaataaccctaacatgacgggttaataaagatgcaaagcaagtagaattctc

SEQ ID NO: 294049 - DNA, 407 bp, Homo sapiens
taagactttgctacaactcaggcctgtgaccctggtaaccaatcagtcagtctataataggttcttttttttctcacagatctttttcaattgagtaaactccttagttgttttgtttttgaatactgagtgtttagtatatgatagagccatttcatatatgatagttgccattgtagaattggatagtccattttyacataatttcacttctgtataaagatgcaatttttctgctattaaatcagtaacttagcatgtgtgtcagagtgtgtgtgtgcgtgtgtgtgtgtgtgtgtgtgtttaggcactagcaaaagagttaagtctcctggacctaaggttttcatctgaaaatgtcgtatatgatgttctagtttaagtaagtgagtgggagtggttgctag

SEQ ID NO: 294050 - DNA, 407 bp, Homo sapiens
taagactttgctacaactcaggcctgtgaccctggtaaccaatcagtcagtctataataggttcttttttttctcacagatctttttcaattgagtaaactccttagttgttttgtttttgaatactgagtgtttagtatatgatagagccatttcatatatgatagttgccattgtagaattggatagtccatttttacataatttcacttctgtataaagatgcaatttttctgctattaaatcagtaacttagcatgtgtgtcasagtgtgtgtgtgcgtgtgtgtgtgtgtgtgtgtgtttaggcactagcaaaagagttaagtctcctggacctaaggttttcatctgaaaatgtcgtatatgatgttctagtttaagtaagtgagtgggagtggttgctag

SEQ ID NO: 294051 - DNA, 599 bp, Homo sapiens
gttgccatttttacagttgaatgcataaacttttataagaaaccgacgagggctgggcatctcatttgcgtaaggcacaaatttctgctagctccaccccatcctcctagtgtgcttgcaaacccttagcttgagtaactccatattgctttgttccccttactgcgcatgtagcagggaatggaattttccatcatagacatgtctgggcaagtcacctgtgtaggctttcttatctgtgtggctgtgggaatgtcttargcaagcctccctgtgcaagttcccttatctatctatacctgtaggctcttcttttgtttgaaagaattcaatctaagacccaccctaactgcctgcctgactggtttcttcctttctcctctctcacttttacagtacttctctgagaataaagattaatataaatgtttatcttcagcttttctggttatccgtaactactctattattcataaagtcaaataggttttataattctaacttttaaaaataaccaaagtgacctgacttcaactactcttgttgacattatacttaattcaaatcagctaaaatatttttaaactcaaaagaaaaag

SEQ ID NO: 294052 - DNA, 564 bp, Homo sapiens
aagtcttacaatagatgactgtgtgggaatccactcagacatcaaaagttgttataaagattatttaaatgaaaacatttgagatactgaagatgaagaaatcttaccagaacttactttatccaattaaagcagagctcccagaaaaatacagctgccattaaccccatccaaggagtttcttscaaattcagctgccatgaagacagcgtactctttcgcattagcattgataaatgaaaatgaaattctaagctcccaactgactgaacagacccactcttggctgaggggaccccagagtaactttcaaaactgagttctcagctttgctaggatgggatgatggggttaagatacacatcgttataccccctcctttgctaaccatgatgaggctttcttccctaaggatttaacagaaaccagccctttcaaagcctccaccactgatatcaacctctccttcttgcctgatagagaccacccacgatggagaggttctggccagcgtacagaggatgcacagagcgagttttcatgtcctctgcttcaccttttaat

SEQ ID NO: 294053 - DNA, 564 bp, Homo sapiens
aagtcttacaatagatgactgtgtgggaatccactcagacatcaaaagttgttataaagattatttaaatgaaaacatttgagatactgaagatgaagaaatcttaccagaacttactttatccaattaaagcagagctcccagaaaaatacagctgccattaaccccatccaaggagtttcttgcaaattcagctgccatgaagacagcgtactctttcgcattagcattgataaatgaaaatkaaattctaagctcccaactgactgaacagacccactcttggctgaggggaccccagagtaactttcaaaactgagttctcagctttgctaggatgggatgatggggttaagatacacatcgttataccccctcctttgctaaccatgatgaggctttcttccctaaggatttaacagaaaccagccctttcaaagcctccaccactgatatcaacctctccttcttgcctgatagagaccacccacgatggagaggttctggccagcgtacagaggatgcacagagcgagttttcatgtcctctgcttcaccttttaat

SEQ ID NO: 294054 - DNA, 1144 bp, Homo sapiens
aagtcttacaatagatgactgtgtgggaatccactcagacatcaaaagttgttataaagattatttaaatgaaaacatttgagatactgaagatgaagaaatcttaccagaacttactttatccaattaaagcagagctcccagaaaaatacagctgccattaaccccatccaaggagtttcttgcaaattcagctgccatgaagacagcgtactctttcgcattagcattgataaatgaaaatgaaattctaagctcccaactgactgaacagacccactcttggctgaggggaccccagagtaactttcaaaactgagttctcagctttgctaggatgsgatgatggggttaagatacacatcgttataccccctcctttgctaaccatgatgaggctttcttccctaaggatttaacagaaaccagccctttcaaagcctccaccactgatatcaacctctccttcttgcctgatagagaccacccacgatggagaggttctggccagcgtacagaggatgcacagagcgagttttcatgtcctctgcttcaccttttaatwatggctgaaatttcaggatgaaagctatgaaatctctatttgtgtttgtgtatctawtaatgtatgttatgtatatgtgatattttcttaactccagagagcattgcaaaattcatttatgaaatcctctaaaagtgctctattctaacttggcttggaaaaaaataagcatttataaataaatattcaccaaactcctagaaatataggaactgatcaaatgtttcttaagttaacatgatttggataaaacttagttaaataagattaatatagtatttttggtgtaataaaacaactatatcttcaaaattatcattattgaatataaaacaagcataaattcctattctgcttgagttctagtcaaataagctaatattatacttactagaaacataaaatcttaaagcttatagatttgattctaattaagttgtcattcttatgaaaaacattatttttttatgctgaaaagatacacatatatttagagttagccagctggactcagtttaggtgatcccaattttgttacaacatcgaaagcatcataatcaggagcaagtcgaacatatg

SEQ ID NO: 294055 - DNA, 579 bp, Homo sapiens
atggctgaaatttcaggatgaaagctatgaaatctctatttgtgtttgtgtatctaataatgtatgttatgtatatgtgatattttcttaactccagagagcattgcaaaattcatttatgaaatcctctaaaagtgctctattctaacttggcttggaaaaaaataagcatttataaataaatattcaccaaactcctagaaatataggaactgatcaaatgtttcttaagttaacatgatttggataaaacttagttaaataagattaatatagtatttttggtgtaataaaacaactatatcttcaaaattatcattattgaatataaaacaagcataaattcctattctgcttgagttctagtcaaataagctaatattatacttactagaaacrtaaaatcttaaagcttatagatttgattctaattaagttgtcattcttatgaaaaacattatttttttatgctgaaaagatacacatatatttagagttagccagctggactcagtttaggtgatcccaattttgttacaacatcgaaagcatcataatcaggagcaagtcgaacatatg

SEQ ID NO: 294056 - DNA, 453 bp, Homo sapiens
cttagcaatagaattgaacaagtagaagaaggaaattcagagcctgaagacaaggtcttctaattaaccgaatccaataaagacaaagaaaaaagaataagaaaatatgaagaaagccttcaagaaatctggaattatgttaaatgaccaaacctaagaataaccggcattcctgaggaagaagagaaatctaaacgtttgttaaacatatttgggggaataattgaggaaaacttccccagctttgctagagacctagatccaaatacaagaagcacaaagaacatctgggaaattcatcgcaaaaagatcatcatctaggcacattgtcgtcaggttatctaaagttaagatgaaagaaagagctgtgaaacaaaagcaccaggtaacctrtaaaggaaaacttaccagattaacagcacatttctcagcagaaaccctgcaagccagaag

SEQ ID NO: 294057 - DNA, 583 bp, Homo sapiens
accatgatcaaggggtttcataccagggatgcagggatggtttaacatacacatgygcgtagccaaagcaagactaagcaaaaagaacaaatctgaaggcatcacattacctgatttcaaacttatactataaggccatagtcaccaaaacagcatggtacggttataaaaataggcacatggaccaatggaacagaatagagaacccagaaataaacccaaatacttacagccaactgatcttcaacaaagcaaacaaaaacgtaaagtggaaaaaggatacccttttcaacaaatggtgctgggataattggctagccacatgtaggagaatgaaactggatcctcctctctcactgtatacaaaaatcaacccaagataaattaaagacttaaatctaagacctgaaactataaaaattctaaaagataccattggaaaaatcattctagacattggcttaggcaaggatttcatgaacccaaaagcaaatgcaataaaaacaaagataaatagctgggacttaattaaactaaagaacttttgcacagcaaaaggaacagtcagcagagtaaacagaca

SEQ ID NO: 294058 - DNA, 583 bp, Homo sapiens
accatgatcaaggggtttcataccagggatgcagggatggtttaacatacacatgcgcgtagccaaagcaagactaagcaaaaagaacaaatctgaaggcatcacattacctgatttcaaacttatactataaggccatagtcaccaaaacagcatggtacggttataaaaataggcacatggaccaatggaacagaatagagaacccagaaataaacccaaatacttacagccaactgatcttcaacaaagcaaacaaaaacgtaaagtggaaaaaggatacccttttcaacaaatggtgctgggataattggctagccacatgtaggagaatgaaactggatcctcctctctcactgtatacaaaaatcaacccaagataaattaaagacttaaatctaagacctgaaactataaaaattctaaaagataccattggaaaaatcattctagacattggcttaggcaaggatttcatgaacccaaaagcaaatgcaataaaaacaaagataaatagctgggacttaattaaactaaagaacttttgcasagcaaaaggaacagtcagcagagtaaacagaca

SEQ ID NO: 294059 - DNA, 583 bp, Homo sapiens
accatgatcaaggggtttcataccagggatgcagggatggtttaacatacacatgcgcgtagccaaagcaagactaagcaaaaagaacaaatctgaaggcatcacattacctgatttcaaacttatactataaggccatagtcaccaaaacagcatggtacggttataaaaataggcacatggaccaatggaacagaatagagaacccagaaataaacccaaatacttacagccaactgatcttcaacaaagcaaacaaaaacgtaaagtggaaaaaggatacccttttcaacaaatggtgctgggataattggctagccacatgtaggagaatgaaactggatcctcctctctcactgtatacaaaaatcaacccaagataaattaaagacttaaatctaagacctgaaactataaaaattctaaaagataccattggaaaaatcattctagacattggcttaggcaaggatttcatgaacccaaaagcaaatgcaataaaaacaaagataaatagctgggacttaattaaactaaagaacttttgcacagcaaaaggaamagtcagcagagtaaacagaca

SEQ ID NO: 294060 - DNA, 580 bp, Homo sapiens
aaggagaaaatctttcataatatatacatctgaaaaagaacaaatatccagaatctacaatgaactccaacaaatcagcaagaaaagcagtcccatcaaaaagtgggctaaggacatgaatagacaattcttaaaagaagatatacaaatggccaataaacatatggaaaaatgctcaacatcactaatgatcagggaaatgcaaatcaaaaccacagtgcgataccaccttacttctgcaagaatggccataataaaaaaatcaaaaaaatagtagatgttggcatggatgtggtgaacacggaacacttctacactgctggtgggaatgtaaactagtacaaccactatggaaaactgtggagattccttaaagaactaaaagtagaactaccatttggtccagcaatcccactactagrtatccacccagaggaaaagaagtcattatacgaaaaagatacgtgcacacgcatgtttatagcagcacaattggcaattgcaaaaacgtggaaccaacccaaaggcccatcaatcaatgcgtggataaagtaactgtgatatatatgcatacaatgga

SEQ ID NO: 294061 - DNA, 580 bp, Homo sapiens
aaggagaaaatctttcataatatatacatctgaaaaagaacaaatatccagaatctacaatgaactccaacaaatcagcaagaaaagcagtcccatcaaaaagtgggctaaggacatgaatagacaattcttaaaagaagatatacaaatggccaataaacatatggaaaaatgctcaacatcactaatgatcagggaaatgcaaatcaaaaccacagtgcgataccaccttacttctgcaagaatggccataataaaaaaatcaaaaaaatagtagatgttggcatggatgtggtgaacacggaacacttctacactgctggtgggaatgtaaactagtacaaccactatggaaaactgtggagattccttaaagaactaaaagtagaactaccatttggtccagcaatcccactactaggtatccacccagaggaaaagaagtcattatacraaaaagatacgtgcacacgcatgtttatagcagcacaattggcaattgcaaaaacgtggaaccaacccaaaggcccatcaatcaatgcgtggataaagtaactgtgatatatatgcatacaatgga

SEQ ID NO: 294062 - DNA, 580 bp, Homo sapiens
aaggagaaaatctttcataatatatacatctgaaaaagaacaaatatccagaatctacaatgaactccaacaaatcagcaagaaaagcagtcccatcaaaaagtgggctaaggacatgaatagacaattcttaaaagaagatatacaaatggccaataaacatatggaaaaatgctcaacatcactaatgatcagggaaatgcaaatcaaaaccacagtgcgataccaccttacttctgcaagaatggccataataaaaaaatcaaaaaaatagtagatgttggcatggatgtggtgaacacggaacacttctacactgctggtgggaatgtaaactagtacaaccactatggaaaactgtggagattccttaaagaactaaaagtagaactaccatttggtccagcaatcccactactaggtatccacccagaggaaaagaagtcattatacgaaaaagatacgtgcacacgcatgtttatagcagcacaattsgcaattgcaaaaacgtggaaccaacccaaaggcccatcaatcaatgcgtggataaagtaactgtgatatatatgcatacaatgga

SEQ ID NO: 294063 - DNA, 580 bp, Homo sapiens
aaggagaaaatctttcataatatatacatctgaaaaagaacaaatatccagaatctacaatgaactccaacaaatcagcaagaaaagcagtcccatcaaaaagtgggctaaggacatgaatagacaattcttaaaagaagatatacaaatggccaataaacatatggaaaaatgctcaacatcactaatgatcagggaaatgcaaatcaaaaccacagtgcgataccaccttacttctgcaagaatggccataataaaaaaatcaaaaaaatagtagatgttggcatggatgtggtgaacacggaacacttctacactgctggtgggaatgtaaactagtacaaccactatggaaaactgtggagattccttaaagaactaaaagtagaactaccatttggtccagcaatcccactactaggtatccacccagaggaaaagaagtcattatacgaaaaagatacgtgcacacgcatgtttatagcagcacaattggcaattgcaaaaacgtggaaccaacccaaakgcccatcaatcaatgcgtggataaagtaactgtgatatatatgcatacaatgga

SEQ ID NO: 294064 - DNA, 612 bp, Homo sapiens
gtttattcaggtgaatgcaatttttaactgattaatgatttatcaatggttttgttacatagttgttgctattagcgatggttggtcttattaaaatatgtcacttgatacagaatctcctgtgggaaaagaatgtgagaaacaaggacaatcactgcatggaggtcataaggctgaaggtacagtttactgttgcagactttcggacaaagtccttttcttggctgttataaaaactatatttggttttaaacagaaacactggttttagtacaaatcatctttgtctactttcatttttctttattattttcrtgactgaaaaggagctttggaaatcactgcataaggcttgatttatttgcacaactttctttagggttgcagctagaacaaacctgtgtgctttgaaatgttaccttctgctctctgttcccaagtacagagaaataatgttgcaaatctcacttctgctgaacattatgcttcctgatgcatttagcagacactaaacatttgtcatactctaaacaaagttacaaaggactagaagaattcttgttctgtatttagaaacccactcacgttacttgatatttgggtatttaagtc

SEQ ID NO: 294065 - DNA, 660 bp, Homo sapiens
atttaacattcatacagttatatataatatccttttttttaaagaatggtatttcacaaaaatatcttttgaaattggctttggagtttacatatactgaacatgaaagtttataataatgatgatacaactttcaacattgtcattttttcttagaacttcagctgattgcagagatataatgattacattgttattaaatttttttaacacaagtaagtgtcaccattttatgacatgaaataaaaggttatgactgttattgatgttgatgttgacgacctgatcacctggctgaaggagtgtttgtcaggtttctccattgtaaagttactcttttcccccatttcatactgtgctctttggaaggaaatcactatgcacagcccacactaaaggaatggggagttgtagtgtactttyttgggagtggtctacatgattaattgaaattcttctgcaaaggacagttgtccctttcgctttattagttcgatcatttatgtttatcagtgtggacacatgaatattttatactttgggttacaatttaatactgctttattttgttgctcaaattatcccagctttgaccattgggaactctttccgttatctcctgttcccgcctttgacatacccccatcaatgtgggttttg

SEQ ID NO: 294066 - DNA, 660 bp, Homo sapiens
atttaacattcatacagttatatataatatccttttttttaaagaatggtatttcacaaaaatatcttttgaaattggctttggagtttacatatactgaacatgaaagtttataataatgatgatacaactttcaacattgtcattttttcttagaacttcagctgattgcagagatataatgattacattgttattaaatttttttaacacaagtaagtgtcaccattttatgacatgaaataaaaggttatgactgttattgatgttgatgttgacgacctgatcacctggctgaaggagtgtttgtcaggtttctccattgtaaagttactcttttcccccatttcatactgtgctctttggaaggaaatcactatgcacagcccacactaaaggaatggggagttgtagtgtactttcttgggagtggtctacatrattaattgaaattcttctgcaaaggacagttgtccctttcgctttattagttcgatcatttatgtttatcagtgtggacacatgaatattttatactttgggttacaatttaatactgctttattttgttgctcaaattatcccagctttgaccattgggaactctttccgttatctcctgttcccgcctttgacatacccccatcaatgtgggttttg

SEQ ID NO: 294067 - DNA, 660 bp, Homo sapiens
atttaacattcatacagttatatataatatccttttttttaaagaatggtatttcacaaaaatatcttttgaaattggctttggagtttacatatactgaacatgaaagtttataataatgatgatacaactttcaacattgtcattttttcttagaacttcagctgattgcagagatataatgattacattgttattaaatttttttaacacaagtaagtgtcaccattttatgacatgaaataaaaggttatgactgttattgatgttgatgttgacgacctgatcacctggctgaaggagtgtttgtcaggtttctccattgtaaagttactcttttcccccatttcatactgtgctctttggaaggaaatcactatgcacagcccacactaaaggaatggggagttgtagtgtactttcttgggagtggtctacatgattaattgaaattcttctgcaaaggacagttgtccctttcgctttattagttcgatcatttatgtttatcagtgtggacacatgaatattttatactttgggttacaatttaatactgctttattttgttgctcaaattakcccagctttgaccattgggaactctttccgttatctcctgttcccgcctttgacatacccccatcaatgtgggttttg

SEQ ID NO: 294068 - DNA, 660 bp, Homo sapiens
atttaacattcatacagttatatataatatccttttttttaaagaatggtatttcacaaaaatatcttttgaaattggctttggagtttacatatactgaacatgaaagtttataataatgatgatacaactttcaacattgtcattttttcttagaacttcagctgattgcagagatataatgattacattgttattaaatttttttaacacaagtaagtgtcaccattttatgacatgaaataaaaggttatgactgttattgatgttgatgttgacgacctgatcacctggctgaaggagtgtttgtcaggtttctccattgtaaagttactcttttcccccatttcatactgtgctctttggaaggaaatcactatgcacagcccacactaaaggaatggggagttgtagtgtactttcttgggagtggtctacatgattaattgaaattcttctgcaaaggacagttgtccctttcgctttattagttcgatcatttatgtttatcagtgtggacacatgaatattttatactttgggttacaatttaatactgctttattttgttgctcaaattatcccagctttgaccattgggaactctttccgttatctcctgttcccgcctttgacatrcccccatcaatgtgggttttg

SEQ ID NO: 294069 - DNA, 589 bp, Homo sapiens
aaacaacctccaaatttcagtggctcaaaaatcttcttcctcatttatttacatctcatgactggtcaggtgagaggtagctctgtgctgtgtcatcctaacacaggaatccagaaggaaggagggaccrtcaataagatccccattgctatagaaaagagaaaaaagcatgcggaatagaacgctgtttcttggagatttctcctgaaaaagtcacatgttatttcttctcacctccattggcaaaaaaaaaaaaaaaaaaaaaaaaaaaaaagtcatgtggccatgggaaaatttaagtaggtgggatggaacagtcagaatgcattcataaaaaatgaactgaaaatatttggagaacagcaccaatgactatcatgaatgccaacatacatccctaacaacccagtgctgttaccctccaaactttttatgtcttgcaaagtattagaacttcatatctgaagccataccactcagagggaatgcaatacatattgacatctcctttaggatgtccatagagaattcaagaaaagaaataatttaaaagtgcttttgggtacagctatttagcactagggggtaa

SEQ ID NO: 294070 - DNA, 589 bp, Homo sapiens
aaacaacctccaaatttcagtggctcaaaaatcttcttcctcatttatttacatctcatgactggtcaggtgagaggtagctctgtgctgtgtcatcctaacacaggaatccagaaggaaggagggaccatcaatragatccccattgctatagaaaagagaaaaaagcatgcggaatagaacgctgtttcttggagatttctcctgaaaaagtcacatgttatttcttctcacctccattggcaaaaaaaaaaaaaaaaaaaaaaaaaaaaaagtcatgtggccatgggaaaatttaagtaggtgggatggaacagtcagaatgcattcataaaaaatgaactgaaaatatttggagaacagcaccaatgactatcatgaatgccaacatacatccctaacaacccagtgctgttaccctccaaactttttatgtcttgcaaagtattagaacttcatatctgaagccataccactcagagggaatgcaatacatattgacatctcctttaggatgtccatagagaattcaagaaaagaaataatttaaaagtgcttttgggtacagctatttagcactagggggtaa

SEQ ID NO: 294071 - DNA, 1179 bp, Homo sapiens
aaacaacctccaaatttcagtggctcaaaaatcttcttcctcatttatttacatctcatgactggtcaggtgagaggtagctctgtgctgtgtcatcctaacacaggaatccagaaggaaggagggaccatcaataagatccccattgctatagaaaagagaaaaaagcatgcggaatagaacgctgtttcttggagatttctcctgaaaaagtcacatgttatttcttctcacctccatyggcaaaaaaaaaaaaaaaaaaaaaaaaaaaaaagtcatgtggccatgggaaaatttaagtaggtgggatggaacagtcagaatgcattcataaaaaatgaactgaaaatatttggagaacagcaccaatgactatcatgaatgccaacatacatccctaacaacccagtgctgttaccctccaaactttttatgtcttgcaaagtattagaacttcatatctgaagccataccactcagagggaatgcaatacatattgacatctcctttaggatgtccatagagaattcaagaaaagaaataatttaaaagtgcttttgggtacagctatttagcactagggggtaawaaacaacctccaaatttcagtggctcaaaaatcttcttcctcatttatttacatctcatgactggtcaggtgagaggtagctctgtgctgtgtcatcctaacacaggaatccagaaggaaggagggaccatcaataagatccccattgctatagaaaagagaaaaaagcatgcggaatagaacgctgtttcttggagatttctcctgaaaaagtcacatgttatttcttctcacctccattggcaaaaaaaaaaaaaaaaaaaaaaaaaaaaaagtcatgtggccatgggaaaatttaagtaggtgggatggaacagtcagaatgcattcataaaaaatgaactgaaaatatttggagaacagcaccaatgactatcatgaatgccaacwtacatccctaacaacccagtgctgttaccctccaaactttttatgtcttgcaaagtattagaacttcatatctgaagccataccactcagagggaatgcaatacatattgacatctcctttaggatgtccatagagaattcaagaaaagaaataatttaaaagtgcttttgggtacagctatttagcactagggggtaa

SEQ ID NO: 294072 - DNA, 516 bp, Homo sapiens
ataaaaaatgaactgaaaatatttggagaacagcaccaatgactatcatgaatgccaacatacatccctaacaacccagtgctgttaccctccaaactttttatgtcttgcaaagtattagaacttcatatctgaagccataccactcagagggaatgcaatacatattgacatctcctttaggatgtccatagagaattcaagaaaagaaataatttaaaagtgcttttgggtacagctatttagcactagrgggtaagagtagagatagattgtaaagataataatagggttaggcataggattaggatctgggtcagagtcggggccggaagtatggttagaggtggggtcatggtcagggtcaagatcaaagtcagggttaaagtaagggtcagaattaaggaccagggtagggatcaggatttaggttcaggctcaaagtcttgggacagggttagggttaggattagaaccagagctttgttctcaggacccacctgaggatgggtcacc

SEQ ID NO: 294073 - DNA, 557 bp, Homo sapiens
gcaaacattccagagtttgggtttccaataattctttgtgattctttaaaaggtaaagtatttttttcccataaaacatagcaacatttaaaatcacccgtagaatgtcctgcyatttttgtttctgtagtttcctcattttctgcaaagcctcgctgaggaaattgactttgaatatccttttacactcttctgttttagaaagcattgtggtaaaacattgaatcatcatggtcataagttctgttcacattctttcttgctttgaatattttttcccagtggccaatatttgattctgttgtatcatggctaaaaggtaggcatggcaacaaaataaagacaggaagtctttggaataagtgatcccatcacaatgaatcaatttgccattggaacatatttttacaaagtcactcttttgaaaatatttagctatgaattaaaacagagtctgtatggttaatatttttcctggtctaaagtgaacagcattttagagaatgaactcaggacacaaccacagcacaagaaaaacgtgataattaagtttacac

SEQ ID NO: 294074 - DNA, 540 bp, Homo sapiens
ttacataatttgtcacagttaatgaaccaatactgatagactattattaactgaagttcatatttcatttggattcccttagttctatcttactctgacccaggatcccatccaggatcccgcatgacatgtagacatcacgtgggctcttcctggctgtgacagtgtgtcaggctttccatctcatgatgaccttcatagcactgaggaggattggtcaggaatgttgtagaatgtcccccattgtcacttcatgttctcaaggtgaactgtcacctttgatgttcacttggatcatytggaagagctaatgtttgtcaggtttctccactgtgaggttatttctcctccttgtccatactgcatgtgttcttttggagcaagtcactatgcagatcctcactccgtaaggagttggctccaccttcttgatggctgagtgtctacatcaattatttggaattcttttgcaaaggagatttctatgcaactccatttgcttattcaccgaggtatacaaatacagacacctagataatt

SEQ ID NO: 294075 - DNA, 540 bp, Homo sapiens
ttacataatttgtcacagttaatgaaccaatactgatagactattattaactgaagttcatatttcatttggattcccttagttctatcttactctgacccaggatcccatccaggatcccgcatgacatgtagacatcacgtgggctcttcctggctgtgacagtgtgtcaggctttccatctcatgatgaccttcatagcactgaggaggattggtcaggaatgttgtagaatgtcccccattgtcacttcatgttctcaaggtgaactgtcacctttgatgttcacttggatcatctggaagagctaatgtttgtcaggtttctccactgtgaggttatttctcctccttgtccrtactgcatgtgttcttttggagcaagtcactatgcagatcctcactccgtaaggagttggctccaccttcttgatggctgagtgtctacatcaattatttggaattcttttgcaaaggagatttctatgcaactccatttgcttattcaccgaggtatacaaatacagacacctagataatt

SEQ ID NO: 294076 - DNA, 540 bp, Homo sapiens
ttacataatttgtcacagttaatgaaccaatactgatagactattattaactgaagttcatatttcatttggattcccttagttctatcttactctgacccaggatcccatccaggatcccgcatgacatgtagacatcacgtgggctcttcctggctgtgacagtgtgtcaggctttccatctcatgatgaccttcatagcactgaggaggattggtcaggaatgttgtagaatgtcccccattgtcacttcatgttctcaaggtgaactgtcacctttgatgttcacttggatcatctggaagagctaatgtttgtcaggtttctccactgtgaggttatttctcctccttgtccatactgcatgtgttcttttggagcaagtcactatgcagakcctcactccgtaaggagttggctccaccttcttgatggctgagtgtctacatcaattatttggaattcttttgcaaaggagatttctatgcaactccatttgcttattcaccgaggtatacaaatacagacacctagataatt

SEQ ID NO: 294077 - DNA, 596 bp, Homo sapiens
ttctatgcaactccatttgcttattcaccgaggtatacaaatacagacacctagataattactttaagctttagttattattcaacactacagtattatgttgcacaattcattcctgtgttggccatcagtagctgtttttattggctcttatttttctttgatatgttttaatttttttagtacttactttctgatacttccagattatcctggytcctatatttactgtcccagttctagtatcagacatttcttcaaagagcctgattcctttcagaatggtaggaaaacttacatctggctgctgaatgagcacattgtatcttctccctcattggcaatgctaggaagtatatgtgtgtgtctaacctacctatacacacctaattataaagttttctatgtagaactgtgtgtgtctatattaaactaaacataagtttacgttgatgtctccacctctgatctactatcacatgaatcattctagccttctcgccttgctaatttgtaacctcccacttcaacagtaagaaacctggttcccaccatctgcgacttatgtaagtcattgttttattccagatacagac

SEQ ID NO: 294078 - DNA, 596 bp, Homo sapiens
ttctatgcaactccatttgcttattcaccgaggtatacaaatacagacacctagataattactttaagctttagttattattcaacactacagtattatgttgcacaattcattcctgtgttggccatcagtagctgtttttattggctcttatttttctttgatatgttttaatttttttagtacttactttctgatacttccagattatcctggttcctatatttactgtcccagttctagtatcagacatttcttcaaagagcctgattmctttcagaatggtaggaaaacttacatctggctgctgaatgagcacattgtatcttctccctcattggcaatgctaggaagtatatgtgtgtgtctaacctacctatacacacctaattataaagttttctatgtagaactgtgtgtgtctatattaaactaaacataagtttacgttgatgtctccacctctgatctactatcacatgaatcattctagccttctcgccttgctaatttgtaacctcccacttcaacagtaagaaacctggttcccaccatctgcgacttatgtaagtcattgttttattccagatacagac

SEQ ID NO: 294079 - DNA, 596 bp, Homo sapiens
ttctatgcaactccatttgcttattcaccgaggtatacaaatacagacacctagataattactttaagctttagttattattcaacactacagtattatgttgcacaattcattcctgtgttggccatcagtagctgtttttattggctcttatttttctttgatatgttttaatttttttagtacttactttctgatacttccagattatcctggttcctatatttactgtcccagttctagtatcagacatttcttcaaagagcctgattcctttcagaatggtaggaaaacttacatctggctgctgaatgagcacattgtatcttctccctcattggcaatgctaggaagtatatgtgtgtgtctaacctacctatacacacctaattataaagttttctatgtagaactgtgtgtgtctatattaaactaaacataagtttacgttgatgtctccacctctgatctactatcacatgaatcattctagccttctcgccttgctaatttgtaacctcccacttcaacagtaagaaacctggttcccaccatctgygacttatgtaagtcattgttttattccagatacagac

SEQ ID NO: 294080 - DNA, 577 bp, Homo sapiens
atttgagaatccagtaggaaattcagttaatcattmcttccctgttactcaactaccttaacattgtcaggtttacctgaacataaacttcattttcttaattgttcttagaacgaagggatatgtttattgaaatcagtaattaagaatattttgggacagttatgatttacttagccagtgaagcagtttctattcccaaatccaggcaaagagaacaataagattaaacgtagcctaagagatttcctttttgtcaaataatgtgattttgctatgtatagaggagatgtctatatgtaagggcatatttatgaccagtagttcctaaaattaaggggactattattgtgttactcaaggtatcagttgtataggatacattatgtcatatttcaaacaatgtttataaagagattagtataattaacctgtatgtacttctcctctgggccaaccttgtgtcttctttgtctgctgacagtcccctccccactgaattattttgaatcaaatcccagatagtctatcattgtattgtatttttgaatatttctctaatagataataattccat

SEQ ID NO: 294081 - DNA, 608 bp, Homo sapiens
ttctccaccccctgatattaggtacaatataacagtggggacgtgcaccccctgggatattgggagtaatattaatcycttcccctgtggatgttaggaacaatatcacagaaggggtgtatacccccagcgatattgggagtaagatcatcctctcccaacttggatattaggaacaatatcacaggggaagtgtataacccctgcgatattgtgagtaatatcatcctctcccaaaagggagattaggaacaatatcacaagaaaggtgtacacctcttctgatatttgtggtaatatcatctcctcccctcattgatattaggaacgatatcacaaggtgtgtacagcccctgcgatattgggagtaatattattctctcttcccctggatattagaaataatatcacaggcggagtgtacagccaaccccctgcgatattgggggtaatatcatcctcttttaacctggatattaggaacaatatcacagggggcttgtacacttcttttgatactgggagtaatatcatcctctccacaagtaaatagtaggaaaaatatcaaagaaggtgtgtacaccgcttgtgatattgggagtaatatc

SEQ ID NO: 294082 - DNA, 608 bp, Homo sapiens
ttctccaccccctgatattaggtacaatataacagtggggacgtgcaccccctgggatattgggagtaatattaatcccttcccctgtggatgttaggaacaatatcacagaaggggtgtatacccccagcgatattgggagtaagatcatcctctcccaacttggatattaggaacaatatcacaggggaagtgtataacccctgcgatattgtgagtaatatcatcctctcccaaaagggagattaggaacaatatcacargaaaggtgtacacctcttctgatatttgtggtaatatcatctcctcccctcattgatattaggaacgatatcacaaggtgtgtacagcccctgcgatattgggagtaatattattctctcttcccctggatattagaaataatatcacaggcggagtgtacagccaaccccctgcgatattgggggtaatatcatcctcttttaacctggatattaggaacaatatcacagggggcttgtacacttcttttgatactgggagtaatatcatcctctccacaagtaaatagtaggaaaaatatcaaagaaggtgtgtacaccgcttgtgatattgggagtaatatc

SEQ ID NO: 294083 - DNA, 608 bp, Homo sapiens
ttctccaccccctgatattaggtacaatataacagtggggacgtgcaccccctgggatattgggagtaatattaatcccttcccctgtggatgttaggaacaatatcacagaaggggtgtatacccccagcgatattgggagtaagatcatcctctcccaacttggatattaggaacaatatcacaggggaagtgtataacccctgcgatattgtgagtaatatcatcctctcccaaaagggagattaggaacaatatcacaagaaaggtgtacacctcttctgatatttgkggtaatatcatctcctcccctcattgatattaggaacgatatcacaaggtgtgtacagcccctgcgatattgggagtaatattattctctcttcccctggatattagaaataatatcacaggcggagtgtacagccaaccccctgcgatattgggggtaatatcatcctcttttaacctggatattaggaacaatatcacagggggcttgtacacttcttttgatactgggagtaatatcatcctctccacaagtaaatagtaggaaaaatatcaaagaaggtgtgtacaccgcttgtgatattgggagtaatatc

SEQ ID NO: 294084 - DNA, 608 bp, Homo sapiens
ttctccaccccctgatattaggtacaatataacagtggggacgtgcaccccctgggatattgggagtaatattaatcccttcccctgtggatgttaggaacaatatcacagaaggggtgtatacccccagcgatattgggagtaagatcatcctctcccaacttggatattaggaacaatatcacaggggaagtgtataacccctgcgatattgtgagtaatatcatcctctcccaaaagggagattaggaacaatatcacaagaaaggtgtacacctcttctgatatttgtggtaatatcatctcctcccctcattgatattaggaacgatatcacaaggtgygtacagcccctgcgatattgggagtaatattattctctcttcccctggatattagaaataatatcacaggcggagtgtacagccaaccccctgcgatattgggggtaatatcatcctcttttaacctggatattaggaacaatatcacagggggcttgtacacttcttttgatactgggagtaatatcatcctctccacaagtaaatagtaggaaaaatatcaaagaaggtgtgtacaccgcttgtgatattgggagtaatatc

SEQ ID NO: 294085 - DNA, 473 bp, Homo sapiens
taaagggattaaagattttttaaaaaatttatctctgagccttaggtctttcaactttaaaacgaagataaaaaatctatgtctttggcttatgaggattaaaatgtgaaaacacattactccagtkcctggcacattataaacacataatacatggtagctattttaaaatattttattataaacttatgtagtgctcatctggaggcctaggaaagtgttattgaaagtattttaaatcttagtatcttatatttatcatttatagggtatagtagattaagaaatacttcacgtattttgaaagattgggctggaaacatacccgaagaagcattctttttatttctcatgtacatgtggacattatacattttaattaagtgttattatatgagccaaattccctcctcatgggtgttagtaggagttgacctcgaagaagggaggatttggttgtggatttatgactc

SEQ ID NO: 294086 - DNA, 528 bp, Homo sapiens
atgcatatagtttactctggcttgcctatttctattgcaaggctctgtttccaaacgaatatctttttcttgtggagagcctctctctgtttgttatttagggtgacaagagaaatgtgaacatttgagagctcaggtaaaaggccttagtctatagtgaaacttttttgcacccttagatgcttacttccactacaacttgcaggtgggccttgaaaagttcttggaataagtttgagcttcgatcttgtcyggttcatttagcatagattctcaaaatgtggtccctggaccacagcattagcatcgcctggagattgttagaaatgcaaatcatcgggcctcattccagaccctcagctggaaactctaggggcatggccagaccctctatagctgaacaagccatccaggtggttttgatgcagctaaagttctggaacaactaatgtagccccatttggaaaacttggctgtacaggcctccctagctggtaagctgctagcattttttgtttgtttgtttgt

SEQ ID NO: 294087 - DNA, 528 bp, Homo sapiens
atgcatatagtttactctggcttgcctatttctattgcaaggctctgtttccaaacgaatatctttttcttgtggagagcctctctctgtttgttatttagggtgacaagagaaatgtgaacatttgagagctcaggtaaaaggccttagtctatagtgaaacttttttgcacccttagatgcttacttccactacaacttgcaggtgggccttgaaaagttcttggaataagtttgagcttcgatcttgtctggttcatttagcatagattctcaaaatgtggtccctggaccacagcattagcatcgcctggagattgttagaaatgcaaatcatcgggcctcattccagaccctcagctggaaactctaggggcatggccagaccctctrtagctgaacaagccatccaggtggttttgatgcagctaaagttctggaacaactaatgtagccccatttggaaaacttggctgtacaggcctccctagctggtaagctgctagcattttttgtttgtttgtttgt

SEQ ID NO: 294088 - DNA, 546 bp, Homo sapiens
cccagaactgaggggtcctgataacacattatttcaccctcagccgtgcaaattcattatttttatggataaaatagctttaaaaaactaatttacattgaaatgttaaaatatttatatagagattattgggaatcccctcctaaagcccaaacataaaaactaccaaaaaaaaaaaaattccgtgtmggctaagattgcaaatgactgatggaatgtaatttaaattaaacatggaaaatatatttcctctttaataaagatctaaattctattctttttaggagccttcagaaatgaaattcaactattaaaaaaagtatagagaagcctttagaaaagaaacttttcttttgctgtattatataataaagaactttgatgagaatagttctaaagtgtttaataatcgatcacactgatgtttctaggtattgtggggaacacctagaaattaaatcttcatctttggcagatcagaggcctattatttttaggtaaaacaattaaaatctgcttttaataaatcacaaattttgcaagtta

SEQ ID NO: 294089 - DNA, 546 bp, Homo sapiens
cccagaactgaggggtcctgataacacattatttcaccctcagccgtgcaaattcattatttttatggataaaatagctttaaaaaactaatttacattgaaatgttaaaatatttatatagagattattgggaatcccctcctaaagcccaaacataaaaactaccaaaaaaaaaaaaattccgtgtcggctaagattgcaaatgactgatggaaygtaatttaaattaaacatggaaaatatatttcctctttaataaagatctaaattctattctttttaggagccttcagaaatgaaattcaactattaaaaaaagtatagagaagcctttagaaaagaaacttttcttttgctgtattatataataaagaactttgatgagaatagttctaaagtgtttaataatcgatcacactgatgtttctaggtattgtggggaacacctagaaattaaatcttcatctttggcagatcagaggcctattatttttaggtaaaacaattaaaatctgcttttaataaatcacaaattttgcaagtta

SEQ ID NO: 294090 - DNA, 546 bp, Homo sapiens
cccagaactgaggggtcctgataacacattatttcaccctcagccgtgcaaattcattatttttatggataaaatagctttaaaaaactaatttacattgaaatgttaaaatatttatatagagattattgggaatcccctcctaaagcccaaacataaaaactaccaaaaaaaaaaaaattccgtgtcggctaagattgcaaatgactgatggaatgtaatttaaattaaacatggaaaatatatttcctctttaataaagatctraattctattctttttaggagccttcagaaatgaaattcaactattaaaaaaagtatagagaagcctttagaaaagaaacttttcttttgctgtattatataataaagaactttgatgagaatagttctaaagtgtttaataatcgatcacactgatgtttctaggtattgtggggaacacctagaaattaaatcttcatctttggcagatcagaggcctattatttttaggtaaaacaattaaaatctgcttttaataaatcacaaattttgcaagtta

SEQ ID NO: 294091 - DNA, 546 bp, Homo sapiens
cccagaactgaggggtcctgataacacattatttcaccctcagccgtgcaaattcattatttttatggataaaatagctttaaaaaactaatttacattgaaatgttaaaatatttatatagagattattgggaatcccctcctaaagcccaaacataaaaactaccaaaaaaaaaaaaattccgtgtcggctaagattgcaaatgactgatggaatgtaatttaaattaaacatggaaaatatatttcctctttaataaagatctaaattctattctttttaggagccttcagaaatgaaattcaactattaaaaaaagtatagagaagcctttagaaaagaaacttttcttttgctgtattatataataaagaactttgatgagaatagttctaaagtgtttaataatcgatyacactgatgtttctaggtattgtggggaacacctagaaattaaatcttcatctttggcagatcagaggcctattatttttaggtaaaacaattaaaatctgcttttaataaatcacaaattttgcaagtta

SEQ ID NO: 294092 - DNA, 594 bp, Homo sapiens
tagtaagtgcttttcaaagttgggcccaatacatgaaaaagccagaaaaacatacctgcattagttttgcccatcaccttcttatgctggcctcaggagatttattaacagcattcaatattttaggkaggctggatgtggtggctcatgcatgtaatcccagcactttggaaggctgaggtgggaggatggcttaaggccaggagttcaagaccagcctggtcaacctagtgagcccctcggtctctctgaaaagaaaaaaaaatttaggtatcctgtggctacctccaaaaacaaactccagaggaactgaattttttttttatttcatgtgttgggataatggcttcttttgcagttacttacgaagaatttaagggtcagtaaaaatattttttcatccttaataacatgaattctctaatttgtatgtgatataatgctagatattgtgccaaaagtgttacatagacataatccgtgcccattttcaaagataatactaatatagagaataagaatcattattattgtagtaattattattttagtaatagtagtaataatcaaaacaattacatcaaacacttatta

SEQ ID NO: 294093 - DNA, 594 bp, Homo sapiens
tagtaagtgcttttcaaagttgggcccaatacatgaaaaagccagaaaaacatacctgcattagttttgcccatcaccttcttatgctggcctcaggagatttattaacagcattcaatattttaggtaggctggatgtggtggctcatgcatgtaatcccagcactttggaaggctgaggtgggaggatggcttaaggccaggagttcaagaccagcctggtcaacctagtgagcccctcggtctctctgaaaagaaaaaaaaatttaggtatcctgtggctacctccaaaaacaaactcyagaggaactgaattttttttttatttcatgtgttgggataatggcttcttttgcagttacttacgaagaatttaagggtcagtaaaaatattttttcatccttaataacatgaattctctaatttgtatgtgatataatgctagatattgtgccaaaagtgttacatagacataatccgtgcccattttcaaagataatactaatatagagaataagaatcattattattgtagtaattattattttagtaatagtagtaataatcaaaacaattacatcaaacacttatta

SEQ ID NO: 294094 - DNA, 594 bp, Homo sapiens
tagtaagtgcttttcaaagttgggcccaatacatgaaaaagccagaaaaacatacctgcattagttttgcccatcaccttcttatgctggcctcaggagatttattaacagcattcaatattttaggtaggctggatgtggtggctcatgcatgtaatcccagcactttggaaggctgaggtgggaggatggcttaaggccaggagttcaagaccagcctggtcaacctagtgagcccctcggtctctctgaaaagaaaaaaaaatttaggtatcctgtggctacctccaaaaacaaactccagaggaactgaattttttttttatttcatgtgttgggataatggcttcttttgcagttacttaygaagaatttaagggtcagtaaaaatattttttcatccttaataacatgaattctctaatttgtatgtgatataatgctagatattgtgccaaaagtgttacatagacataatccgtgcccattttcaaagataatactaatatagagaataagaatcattattattgtagtaattattattttagtaatagtagtaataatcaaaacaattacatcaaacacttatta

SEQ ID NO: 294095 - DNA, 1196 bp, Homo sapiens
  misc_feature (1)...(1196): n = A,T,C or G
tagtaagtgcttttcaaagttgggcccaatacatgaaaaagccagaaaaacatacctgcattagttttgcccatcaccttcttatgctggcctcaggagatttattaacagcattcaatattttaggtaggctggatgtggtggctcatgcatgtaatcccagcactttggaaggctgaggtgggaggatggcttaaggccaggagttcaagaccagcctggtcaacctagtgagcccctcggtctctctgaaaagaaaaaaaaatttaggtatcctgtggctacctccaaaaacaaactccagaggaactgaattttttttttatttcatgtgttgggataatggcttcttttgcagttacttacgaagaatttaagggtcagtaaaaatattttttcatccttaataacatgaattctctaatttgtatgtgatataatgctagatattgtgccaaaagtgttacatagacataatccrtgcccattttcaaagataatactaatatagagaataagaatcattattattgtagtaattattattttagtaatagtagtaataatcaaaacaattacatcaaacacttattawggaactgacgaggttattctataaaggaacctgggatgtgtgacttagaattactgtgaatactaaggacaggctgggggcaaagcaacttacaactaggtttttatttttagtgtgtatatagccatttctaccatgtatgcctgaggaaaaaagtgaccaccgtaaaaattttgagtatctactcatttttaagawcactaggataactgactatttatgaatgattttttctaaagtgaagtgtctttttattaaccacaaagtagcccttaatctgacagttgtgcgaatttttgcatatacgttttattgccgtatgagtggcatatatgtgatctatcgtctgaaggaaatcgacgactatcttttaaagcaagtttgtttttccgttgntaatgttttctggttccagatgtatntgggtatgcttatgtcctgttntagaaacaatatactttgtatacttgtctaaaaagttaatttttacttttaaactttgtcttcctcatctattatttatttcagatccataaatggactaggacaaatcttagaaacacaaagatcaaggtactttaaaaaagctattcctattaat

SEQ ID NO: 294096 - DNA, 569 bp, Homo sapiens
  misc_feature (1)...(569): n = A,T,C or G
catatacgttttattgccgtatgagtggcatatatgtgatctatcgtctgaaggaaatcgacgactatcttttaaagcaagtttgtttttccgttgntaatgttttctggttccagatgtatntgggtatgcttatgtcctgttntagaaacaatatactttgtatacttgtctaaaaagttaatttttacttttaaactttgtcttcctcatctattatttatttcagatccataaatggactaggacaaatcttagaaacacaaagatcaaggtactttaaaaaagctattcctattaataacaaatcattttagttattaataataaacattaartaattgacaaatatgcttgattctaatataagaaagatctaagtgcatttaaaaagaattggatccaaaatgttgtttggaatgctcttaataagttagtttggcatatttggctagtacatttgcctgtcttcaaaactaagattacaaagccatgataacactgtgtaagtgtttgcttactgaggaagaaaagacttccaaacactcgagagggtaactcagtacaga

SEQ ID NO: 294097 - DNA, 569 bp, Homo sapiens
  misc_feature (1)...(569): n = A,T,C or G
catatacgttttattgccgtatgagtggcatatatgtgatctatcgtctgaaggaaatcgacgactatcttttaaagcaagtttgtttttccgttgntaatgttttctggttccagatgtatntgggtatgcttatgtcctgttntagaaacaatatactttgtatacttgtctaaaaagttaatttttacttttaaactttgtcttcctcatctattatttatttcagatccataaatggactaggacaaatcttagaaacacaaagatcaaggtactttaaaaaagctattcctattaataacaaatcattttagttattaataataaacattaaataattgacaaatatgcttgattctratataagaaagatctaagtgcatttaaaaagaattggatccaaaatgttgtttggaatgctcttaataagttagtttggcatatttggctagtacatttgcctgtcttcaaaactaagattacaaagccatgataacactgtgtaagtgtttgcttactgaggaagaaaagacttccaaacactcgagagggtaactcagtacaga

SEQ ID NO: 294098 - DNA, 433 bp, Homo sapiens
cttgattctaatataagaaagatctaagtgcatttaaaaagaattggatccaaaatgttgtttggaatgctcttaataagttagtttggcatatttggctagtacatttgcctgtcttcaaaactaagattacaaagccatgataacactgtgtaagtgtttgcttamtgaggaagaaaagacttccaaacactcgagagggtaactcagtacagaaatctgaagtatattgaggaatcttaatttgaagtgttttaaatggctttttaatatttaaaaagccttcttagtgttttatagttgccaaaaaatacatggagtctttaccttgaagttcctgacaaattcttttattaaattttgactttcattttctctaggttctgttcctacaacatctgtgaagtgtatttctgtagattaaattctgttt

SEQ ID NO: 294099 - DNA, 565 bp, Homo sapiens
agcaacaggtcgggtagtggtggaagcaggtttggaaaatgtgattagttttgtaaacgtttttgagtttgaagtgccactggggaaggcttttggaaatttatttccagagttcaagactgagctatcattgcagtttgctcagctatttactgagctatctactgtcaatttggatagtatctacagtttgcattgtagatactggatacttggattggctggtgcaccctgtttgtgagactcactggagtttgaagagatgaccactggaaaatatccctaagcagtagctgcaattccacccccaccttggagagccaaaaccctcttcgttttcactctcctgtccttggtcttargctacttaaagcagcctttagacatagggaaaaattgaaagcctctcttttaagaaaaacattaggtacttctggaatagagagttcaagaaattaggagaaaaatgaacttttgaagctttttctttcccttttttgtttacttcattctcttactcagttttaaaatgctggtaatggtcttttttttctttttttttttt

SEQ ID NO: 294100 - DNA, 423 bp, Homo sapiens
agagccaaaaccctcttcgttttcactctcctgtccttggtcttaggctacttaaagcagcctttagacatagggaaaaattgaaagcctctcttttaagaaaaacattaggtacttctggaatagagagttcaagaaattaggagaaaaatgaacttttgaagctttttctttcccttttttgtttacttcattctcttactcagttttaaaatgctggtaatggtcttttttttcttttttttttttcttggygattttaatgctttggaaaagatctcatggttttatctccaaaggaggaaattaatttgatgccatggaaattagttttctagtcgtatgccttgaatgagtgaagaatttctttttcatggtggtactaaatttggggaatgctatagaaactttcatctggatgct

SEQ ID NO: 294101 - DNA, 564 bp, Homo sapiens
atatttaccattattactaatctcctgtattgcaagaattacagtttatattttcgtagaccatcactgtagctaaagggtcttygggccataggtgatattccataaaggttggttaaattgatctgtggtttttgactatggaaactcagaactccctcaaaatgtacaaaacagatttacctgctaaataaatctcttcaaagctgaccccaggtttaattgaattaattccaatgaatttgtcacaatgatggagaaaggaaacttagagggccccacagttgtttgctggtaaaatgagaagtttggattcgatcaatgtttcccaaaatattttcctcagaatgttagtgcccctcgaatcctgcacaaagcaagagtttcatgaccaagtagcttttaaaactcctgtacactctactcccattcttcacaatgcacactttcatattaaaagttctgagaggtcctcaacagaagacatcacttaactttttttttttttttttaagacagattctcactcggtcacccaggctggagtacagtggccaccactcc

SEQ ID NO: 294102 - DNA, 564 bp, Homo sapiens
atatttaccattattactaatctcctgtattgcaagaattacagtttatattttcgtagaccatcactgtagctaaagggtctttgggccataggtgatattccataaaggttggttaaattgatctgtggtttttgactatggaaactcagaactccctcaaaatgtacaaaacagatttacctgctaaataaatctcttcaaagctgaccccaggtttaattgaattaattccaatgaatttgtcacaatgatggagaaaggaaacttagagggccccacagttgtttgctggtaraatgagaagtttggattcgatcaatgtttcccaaaatattttcctcagaatgttagtgcccctcgaatcctgcacaaagcaagagtttcatgaccaagtagcttttaaaactcctgtacactctactcccattcttcacaatgcacactttcatattaaaagttctgagaggtcctcaacagaagacatcacttaactttttttttttttttttaagacagattctcactcggtcacccaggctggagtacagtggccaccactcc

SEQ ID NO: 294103 - DNA, 564 bp, Homo sapiens
atatttaccattattactaatctcctgtattgcaagaattacagtttatattttcgtagaccatcactgtagctaaagggtctttgggccataggtgatattccataaaggttggttaaattgatctgtggtttttgactatggaaactcagaactccctcaaaatgtacaaaacagatttacctgctaaataaatctcttcaaagctgaccccaggtttaattgaattaattccaatgaatttgtcacaatgatggagaaaggaaacttagagggccccacagttgtttgctggtaaaatgagaagtttggattmgatcaatgtttcccaaaatattttcctcagaatgttagtgcccctcgaatcctgcacaaagcaagagtttcatgaccaagtagcttttaaaactcctgtacactctactcccattcttcacaatgcacactttcatattaaaagttctgagaggtcctcaacagaagacatcacttaactttttttttttttttttaagacagattctcactcggtcacccaggctggagtacagtggccaccactcc

SEQ ID NO: 294104 - DNA, 568 bp, Homo sapiens
agctttgtctcttttctggatatatttaacaagaggctagaacagagtccaaaatgtcagaaatgtttgaacattccatagaaatgaaggaggtgtttccaaatgacctatgtttctatggcaataaatagaacttgtgctgcgttggatgggtcaggagtaaggaatataaacagtgtaagtatgactattccaggcagaaatctaccttgtaagaacagctttgtgcagtgagctcaacaacattgatcagttagcagtccggttcagtacaacattgatcaggtagcaagccggttckgcagtgccagtcggagacacagatggggacaatcaaagaagatgcaggtcaggacaaggatgcagacatgtacctgtcactaccatggacttcagcagcttcttagcaggtttatgattaaagaagaaagacatcgttgatatgtaagcatgttacaattaatttgctgtttagttattagcaaactacatccagtttttagtttttaggtttttttttcttttttcttttttgaaacagtttcttgttctgtcatccaggctggag

SEQ ID NO: 294105 - DNA, 904 bp, Homo sapiens
ctcttctccgactctgcgcacatcccgcacctgctcatttttctttcggacattctcttacccggccctgtagattccaaggcrgctcccagttttccatattgttcccaacgcgttcactgcccacagtccccacacaaacttctttcgcaggctcacaacatagtccctctgccccgtgccctttttgcaatagtctgccagtcccctaagtcttagctctgcctatttaacagtagtggtgtctcagaacacacacacacacacacatacacacacacacacacacacacacacacacacgatccctgacatatttggcaagagtaggccctgaaggtttttaatatwggacaggagctataggctgctctctcttcccctttccttgttccatacaagtactaacgaggccaggccctgcttagcttctgagacgagattgggcaccctcagggcactgtggccatagtgtcctgccctttcctttcatgtcatctcaacacaggggtcggttagcacagggaagtaactccaataagagaggatacaacagggctcctcagtcatttgtgtctcttcaaatgtcattgccttctttctgtgtacaagcgcattctggtttcagtggaaagtgaggcctctccagatggttagtgccccgctcactcagtcactgactaacaaccctgcctctactcacagcatgctgagtttcctgcacwtcccacagcatggctccccaggggcatggagaagattatgtgaatggggcggcagggaacggcagccacacacatcacgtgtggctcctctgctcctgtgcatgcccccttgtcctacaggacttcgctgacgaaacagaagtgtaaagatatcgttattaatgtgacagcagagtgtt

SEQ ID NO: 294106 - DNA, 461 bp, Homo sapiens
ttgtggcctaacatatggtctatcctggagaatgttctatgtatgctagagaagaatgtatattctgctgttgttggatgaatgtaggtctggtaggtccatttggtctgaagtatagttcaaatttagtgttgtcttgttaattttttgtctggttgatctctccattgttgcaagtggagtactgaagtcccctattagtgttatattgctgtatatttcttccttcatgtccactaatatttgctttacatatttaagtgcttcaatkttggatgcatatatgtttacaattgttatgtcctcttgataagatgacctctttatcattaaatcatgaccttctttgtctcttggaacagctttttactggaagtctgttttatctgatataagtataggcatccctgctctcttttggtaactgtctgttttcatggaatatctccttctatcccttt

SEQ ID NO: 294107 - DNA, 461 bp, Homo sapiens
ttgtggcctaacatatggtctatcctggagaatgttctatgtatgctagagaagaatgtatattctgctgttgttggatgaatgtaggtctggtaggtccatttggtctgaagtatagttcaaatttagtgttgtcttgttaattttttgtctggttgatctctccattgttgcaagtggagtactgaagtcccctattagtgttatattgctgtatatttcttccttcatgtccactaatatttgctttacatatttaagtgcttcaattttggatgcatatatgtttacaattgttatgtcctcttgataagatgacctctttatcattaaatcatgaccttctttgtctcttggaacagctttttactggaagtctgttttatctgatataagtataggcatccctgctctcttttggtaactgtctgttttcatggmatatctccttctatcccttt

SEQ ID NO: 294108 - DNA, 494 bp, Homo sapiens
aaatgcatggcatccttagatgtatcctgatttgaataaaacagctataaataataatattttggggattattgaaaaatttgactatagattagttttcaggtgatattggagaattaatgttattattgttaggtatgttagcatggtcatgcagcaatgtgtctttctttttaagagatgcatacaaaaatatttgggtgtgaaatgttcttgtsctataatttgctttaaaattcttcagaaaaaaaaagataagcaaaatagaaaaacaagataatgggtacatgttatctatttcttattctccctatttttttgtgtgttcaatttttaaaagaaatttactccatacatatatcccaccccctccactaaggaccctcaaactataaattgctgtgaatataagaaaaagtgaaacaattctatgattttgagagaaagtcaacactgtaggaaaaagagagcccaggatttgggctaaaaatcat

SEQ ID NO: 294109 - DNA, 537 bp, Homo sapiens
ccacaaaaacttaggaagcccttccatagcacagagtcaatgctgaggaacaactgcccagccaggkgctacattttccaacccacccttgcatctaggtgtggccacatggtgcatttggacaatgggtgataaactagtatgagaataagaacagaagtaatgtgtgtttcttctaggctgaggatatcagaaaacagacatatcatctctacactgcttatttctctttctacagattcagtacaggtaatcatgtggctctaggcaatgccagagtcacaagagggaaggaaactgagtccccatcccatttggtagacaagagtctttgcccaccagggacatcctcattggactattgtgtgagtgagaaataacattctattgtttttaaggcaataaaaattgcctacatttcaggtttatttattacaaccacccacattttcttaagcagtagcgaaagaaacataaacaatagtttaatgccaaatcaaaaatgtcaaatgcaaaattattttatgctatcacagt

SEQ ID NO: 294110 - DNA, 537 bp, Homo sapiens
ccacaaaaacttaggaagcccttccatagcacagagtcaatgctgaggaacaactgcccagccaggtgctacattttccaacccacccttgcatctaggtgtggccacatggtgcatttggacaatgggtgataaactagtatgagaataagaacagaagtaatgtgtgtttcttctaggctgaggatatcagaaaacagacatatcatctctacactgcttatttctctttctacagattcagtacaggtaatcatgtggctctaggcaatgccagagtcacaagagggaaggaaactgagtccccatcccatttggtagacaagagtctttgcccaccagggacatcctcattggactattgtgtgagtgagaaataacattctattgtttttaaggcaataaaaattgcctacatttcaggtttatttattacaaycacccacattttcttaagcagtagcgaaagaaacataaacaatagtttaatgccaaatcaaaaatgtcaaatgcaaaattattttatgctatcacagt

SEQ ID NO: 294111 - DNA, 560 bp, Homo sapiens
ctgacagaggggcagttgctctgggaaggggtccagttcaaacagcatatagagtggaaggaataaggaaaaaaaaggcaaacagagatgaataggaacatcctgatttcaccttctatttatccaactagaaaaccagagcatgctgaaataacrgaaacctcaggctgtggttcaggcaaggggcatcttcgcaaaaagcatccccaggctgggtagtgaagagctctgggttgtaacctagattttgctgctaacttgccccatgtttttggtaaactatctctctcattgggccatagacttctcacctgtgaaacgaggaatgtagattatgtgatctctaagtcttccttgcatctctgttttctgataccagagcaattctcaggccttggtactagccgttagtaaatcctctgcttaggatggagctggtctccttataatctcttctgctcattgtcatccatttaatccttactgtttttgttaacaaaacaaatattgagcattttctgtgtacttgggggcacctgttcaggggatcccagtctatg

SEQ ID NO: 294112 - DNA, 597 bp, Homo sapiens
ccatctgtctcctctctcttctttggcttcagatgagctgagccatttaaaaattccccaacaagggaccccaggcaccagaagaagtgatgaacagattttcaatttggccctgatttcataaaatttttttttctggcagttgaaatcattgagacctagaggccggagatgggtagtagtgggttttccccatctgaagcggattcttgattggtctggaaagactgctggagctcctgggtgcaaggctctgaccagcagagctggtcagcagagctgactgctctgggtgcagcttctccagagaaggaagagatggcaaagaggaaggcctggggttcagagaaggactttgcaaccccaatggggagtcagatcctcaggtctcctcctagagcggctgcctggtaactttcccagtgtccttcagggagcatctcctcrtccgtgtggctggtttcttctgataggaggctaccttgtaatttctcactgacaggacagtggggaccccagccagagcctggggacttggctgccttggaaccagaacctggcccctcagaggagttgcagaatttcgatagaggagtg

SEQ ID NO: 294113 - DNA, 573 bp, Homo sapiens
aagtgttcttcagcttgttgcagcctggcagaggcccttgggttttctgggtggacaagactgaatcaatacagtacctagtgcccctgataaaagacatagattccagcctgggctaggactgggtctgggagaggaatcatgctgtgattccaggccctactgaatgcctctgctgggatccacaaagcaacctctggacacctgggtggggctgtcatgggtctctggggactgctggaggcctaagggtccaatctcagagccatgcaggggcagcaaccatgatatatcagggctcatgagtagggagagtagccatgtgggtagaccagatgaacaaatggagattccaagatgagaaaaggggccccatttagtgacagaacagaggctggagtcctggtaccactcctcctagcccagtgcccctccccaactccctggggtcttgaatggagcttaactgagagttctcagaggccatcgtgggacagatgagtttgacagccagcagtctratgtagaaacttcgcattgattcagtgaggccagtttgctgtgccaggggtt

SEQ ID NO: 294114 - DNA, 582 bp, Homo sapiens
ttctatagctattgtgaagcatgcaatgcttcccagatactcagcactcagataaactggcttagtctggggtcagtttaaatgatttagatcaatgcatttttgtgcagaactactgtgagttcaccaaagcctgtctcctttccctcctcaacacttaccatgagtgcttttcccagccttcattgcaactgggtgtggcctcgagactgaatgtgggcagaagtgtttggaaagtaaatgtgttccctctaaaacccctttttccctatctgctgtctggaaggaaaaggatatcaggacccacaggagggtggagtcrcaggaaagaagaagcctgggctcctggaggcctgggggaaggatacggagccggaaaaccttaattggactgtgatgtacatgagaaactaacttccattatgttaagcaactgggaattcagtatttatctgttagaacagctagcattaccttaacgaatacaattccctgttgggaaatactccctaaacacaattcctctcaatcaaggggaattgaacggtttgagtggcaccaagttcaaggttatgttccctg

SEQ ID NO: 294115 - DNA, 600 bp, Homo sapiens
ccctccctgtgggtataactgcatctcagtctttggaggtacatatgtgcatatgtaacactctagggctctatgccctaagagtacgtctgattcaataaacctcaaacattcctgtttaattttgtaagatgaagaggacccggcaggactccttcatgagcagtggtcaacaccgtctgcacagatccattagctcccccttagctgtgggcacctgctgccccggggcctggcggttgacttggggttggtgccagagcctgtggagccggagctgttcataggtttcctgataggagctggcagacgttgcctgggtaggggtagaactagatgacctctaagttcccttctaatcttaagatcccatgacaggcatagatgacatattctgcagcattaaactatcaaccttcttccacatagagctataacactaaagactttttggaagtctctcccactttttttcagaataccagtccaaartgcatggctttagatagtaatatccattttggtcttttttttaaattgcaccatagtattaatatatttatatgaaaacacaggatcatatataaaatgactcataca

SEQ ID NO: 294116 - DNA, 558 bp, Homo sapiens
aatctaaagtcacaaagattttttcctatgctttcttccaaagtttcagagttttaagtttttatacttaagcccatgatcacttcacattagcttttatgtgtgatagttaaggtgtgaggtaactggttgggctttgtatttttccatatggatatttggttgttccagcatcatttgctgggaaaataattctttcccaattgaattaccttggcatctaaaaattagtcgactatatgtatatatagtgtgtgtgtattttaggcttgaaattctttcttattgatctatgtgtctatttctatgtcytactataagtttatagtaaatctttgaattaggttggataattgttctgcttttattttttctaaaattggtttaagtgttctatatttcttaaattttcatatatacttgggaaacaagtcactttcttaaagcattctgctgagaatttaggttcagttgaaattgatagatcaatttggagagaattaacattatgagtcttccattcataaacatgtaatgtgtacccattattttagtctt

SEQ ID NO: 294117 - DNA, 625 bp, Homo sapiens
tattttagtcttccttaattttttaaagccaaattttacagtttcaagtaaacaaagcttgcacgtattttgttaattttattccagagtatttcatttttgatgtattctaaatgatattttaaaaaattcaatttccaattgttttagtacataattgatttttgtatattgatcttgtttcctgtaactctattaaactcattcttagttctaaaagcttttatgtagatttattaggacttcctatgtatattaaattaattaattacttaattattttagagggtggcccaggctctaatgcagtggcatgatctcaactcactgcagcctcaaattcctaagctcaggcaatgctcccatctgagcctcctgagtagctaggactacaggtgtgcaccaccatgcccagctaatgttttttatttttgtgtagagatggggcttcactctgttgcccaggctggcctgcaactcctggcctcaagtaatcctcccatttcggcttcycaaaccactgggattacaggcatgagccactgcacctggcctacactttcatgtattgtattatcttatgtgctaacattttgttaagaaactttgtttctgtattataaaa

SEQ ID NO: 294118 - DNA, 571 bp, Homo sapiens
gagaagccctctagctgttttgtgtgatgatgtatggaggatcctcatggtggtcagggaagagtatttgtagatttggcccaagtgtctcataggaaaggagagtcccaggactttataaagggaaatgatcatggggagtcctgggctgattcaaggcaccagtgaggttattccagacagaataagttaaatcatgggaagagtggagtctcaaggattgtcgttgagcagaagggttggatgaaaggctgagcccagtctccagggataaagtgtgtggcatgttaaaaatggaaggacagaagagggactctctttcagaagaaggggttagctgacctcagctctgggaagcaatgctaggaactggggtgtggtggtgagaataactcctgtaaagagcttattagttctttygtatttttgtacaatcgtgttgtgtctcatttacattttaccacctctctattattcctcagagttgcacacaaacatttcatagattctgtccataattccagcctttgtagaacaaagggaagggccagagagggaggggcatgtggct

SEQ ID NO: 294119 - DNA, 564 bp, Homo sapiens
aaatgctacaactcagaggcatccaggagacccaaacattgtgtggtaattccaacaccaggctctgaacagcaccgcttcccagacatcccagttggaatggaaatgggctcttaattgaggataaggcctagacagggtttcagttggaattgcgtctgccgaatatgggctcctgtggataaggggtctgagcaaccaatcaaaataaaataccatgcagagagggaggagaaaaaggacactcaaggacacagcaaggcagaaggccgaaaggccaagaaaacaggaggtcttcagaagtttacccccaggataaaccaagcagaagactctcccctcaagacttcctgggtttaaatctcatcttcaccattcactagctatgtggccttggacaaattacgtaacaaatctgtgcaaacccatttcttcatctatgtcaaatggggagaataatggtacctgcctcacagagtgtcacaaggattaaatgacttaatccttgcaatatgcttagaagagtgtctggcacatgayaaagtgctatgtaagtgttcactg

SEQ ID NO: 294120 - DNA, 647 bp, Homo sapiens
aaggggggagggcccttctttggagaagggagggcctctctggggagccggcttgccatgcccttgttttgcctggcacccagagtgatcttgcaagcaacaggtgctgtgaacctgatcttggtcattgtggtctctcagcacagagcctcttccatttggacagcaagactgtggggcattgcaatgcagagaaatgtcaaagagaatatccacctttaaatcacaaaccatctatagaagcagaggagagagcaaaacatccagcagcaggtgcaaggttagtgttataagaaggtagagggctcttaggaggtgagacttttcccaatgtagaatccagtagagatgagatacctgcccagaagaatgagttatggagcaggggcgattaagtcctgaatgaatgccagctggtcagtgttttgaagtgcaaaagaggcttcaccctctgctcaggtgtcagggtggcccagtggaaaagagatgagataaagagaagtggaagatggtggggattgtgggtggggttaagagtgtgagcaaatacatctgctcagggactycaagtggctcaggaagaatattgaggaagattgtgttatgggacatgtcctgagtgagaagcctaggcaagaaggcaattt

SEQ ID NO: 294121 - DNA, 462 bp, Homo sapiens
ctgtgatgactcttgttgttacaaataatactctttccttttgattcactgcgttctgctcaagaacctgcctgtcattcatcactcctctctcaatttgttttttgctttggttttgacactctttcyttcccctcaaatgttgtgtcccaatttcaagaagtctaataaagcactgtccacttgggatctagaggatatcaaaggcataataacacagcactttgaagcataaaatagccagactgatatccatgagctattaaccacaagctcaaaaggtgggatttggcttcacctgacaatggctgtctcagggagaccaccagaaggttctggcttaggagtggggtgcaagcatggactctggctcctctggatcctgcaggaatctggtgctaaaggtagcaggatcacagggagagcctgctgtaaacagtgggcaccttccctcctaggaga

SEQ ID NO: 294122 - DNA, 462 bp, Homo sapiens
ctgtgatgactcttgttgttacaaataatactctttccttttgattcactgcgttctgctcaagaacctgcctgtcattcatcactcctctctcaatttgttttttgctttggttttgacactctttccttcccytcaaatgttgtgtcccaatttcaagaagtctaataaagcactgtccacttgggatctagaggatatcaaaggcataataacacagcactttgaagcataaaatagccagactgatatccatgagctattaaccacaagctcaaaaggtgggatttggcttcacctgacaatggctgtctcagggagaccaccagaaggttctggcttaggagtggggtgcaagcatggactctggctcctctggatcctgcaggaatctggtgctaaaggtagcaggatcacagggagagcctgctgtaaacagtgggcaccttccctcctaggaga

SEQ ID NO: 294123 - DNA, 2240 bp, Homo sapiens
atacataaaaatcagatgaagaatgcataaaagacaactgaaaaattctatcaaaggacatataaaaagactttaaaaaaagcacactgtatatatgagtgagtcactcattatgaacataattctgccccaaattaatctatgaatgcattacagggtactctccccaggcagctcaggtggcaggctgcagaactggccctcattgctgtgggttccacaccatttctgggagcacaatgaaaagagaaaagtrgggaaataaaggcaaattttacttatctctcagtttacagggggcctggaggaatgaatcagtggcagtgagtgacagagtggtctcagcaggaagaggtggaggcaacgctgggatttggaaatgcctctgtgagtgactcatgtttgactgcaggtgacttgcagaatgatgctgaatgattcaggattgccacatacacggttaggatgccactaatccccatcccacwtcaaactgagagtcaagatgtctagattcttgttttgcctttaaccttcagctaatgatttaaattcagctaatgatttaaatwcactagacttccattccttaacctacattttatttttatttatttatttatttaaagatagggtttctctctgttgcccatgctggagtgcaatagtgtgatcataactcactgcatccttgacctgagatcaagagatcctcctgcctcagcctctgaagtagctgggaatgcagcatgagccaccacacccagctcttatctacactttataaataaaacctgctttacccatctcaggaataatgaggataacattaaataaaagattcaaaagtacttgcaaagtactggaaggattatacttgcatagaacatcactaaagaaacattttctgcttctaatagcctcccatcaactttgatgaacttacttggaccccacattacaaaggtatttctgtaactacaaacacaaaaactcttatatgttaagtactcggtgcattcctatttttctctagaatattctttagcaacttcaaacttgcttttcattctatcaaatttcttttttaaaattccatatatataacactwtcaaactgagagtcaagatgtctagattcttgttttgcctttaaccttcagctaatgatttaaattcagctaatgatttaaattcactagacttccattccttaacctacattttatttttatttatttatttatttaaagatagggtttctctctgttgcccatgctggagtgcaatagtgtgatcataactcactgcatccttgacctgagatcaagagatcctcctgcctcagcctctgaagtagctgggaatgcagcatgagccaccacacccagctcttatctacactttataaataaaacctgctttacccatctcaggaataatgaggataacattaaataaaagattcaaaagtacttgcaaagtactggaaggattatacttgcatagaacatcactaaagaaacattttctgcttctaatagcctcccatcaactttgatgaacttacttggaccccacattacaaaggtatttctgtaactacaaacacaaaaactcttatatgttwagtactcggtgcattcctatttttctctagaatattctttagcaacttcaaacttgcttttcattctatcaaatttcttttttaaaattccatatatataacactwtaatcccatttacaatagccacacataaaattaaatacctagaaattaaccaaagaagtgaacaatctctgtaataaaaactgtaagacactgatgaaaaagaaattgaagaggacacaaaaaaatattccatgttcatggattggaagaatcagtattgttaaaatgtctgtactacccaaagtagccgtctacaggttcaatacaatccctatcaaagtaccaatgacattcttcacagaaatagaaacaatcctaaaacttatatgaattcacaaaagacccaggatagccaaagctatcctaagcaaaaagaacaaaactggacgaatcacwttacctgacttcaaattatactgcaaagcaatagtaaccaaaacaggatggtactgacataaaaacagacacacatagatcagtggaatagaatagagaacccagagacaaatttgcacacctacagtgaacttatttttggcaaaagtgccaagagcatatattggg

SEQ ID NO: 294124 - DNA, 487 bp, Homo sapiens
gactgagaaacagtctaccagagacatttctttcaagaaaaatgaacctccagtttagaaaatgaaatggctgtttttatcctaggtaattgttctgtttttatggaaagacacttcgaattatgtaacaaccaagtattttttttcttttgagaacacmtgctaggaaatttagagcctccactgtgtccaattcactgtggtaggtcttcagaatctgtgtcttggtctcattcctggaccatgctatgtttccagctagtttttctttcttcttttactctgacttacttatgtatcttatttctgtagctagactgaaaccttgtggagtaaggtgggcatatgaatgaattaacaaaatgtgctttctttgtttcataatttgctctatctcaaatcttcagatatctaatttctcatcaactagagctgtcttatgttgtcccacttgatacgacattttggaggatgagagtggtaaaag

SEQ ID NO: 294125 - DNA, 611 bp, Homo sapiens
tcactataattaataaaattactgtaaaaattacatgagataatatatgtagaaagttggacagggactagccatgcaataattctggttatactttcttttctcctcattgatgtttgaaatcactccattcctttgcattaagyattgacctcaaagacttatagcacccttggaagaggatttattttcttgtacacctgtgtatgtttgaattagttcgtcacttactgtgggacagaaaaacgtaaaagttctgggtgctagagctagggagagtgggccaggaaagaaaggataaaagattgctatactgttttctggtttgttgaaggggtgagtgtaatttagagaattaaacgctaggagtcctcttcatgatcctatgcaaaaggctcaccatccacacatcgtagctgcaggcttgttgtgatttgctatatgagactctagaatcttattgagaatggaaaagaactcatataatatgcatagaaatccagaagctctgcctaatggtcttggaaattgtgcctctaaacaggcatccttttgcttcattcattcatttatatattcacatattgtacattaattaatttatactcaat

SEQ ID NO: 294126 - DNA, 618 bp, Homo sapiens
tgtttttggtttttattccatggttcattttactaagccctcctggtagccagacactgtaataggtgctggtttacagacatgaacttgacagtcatgatccggctagaatggagctcacaggctgatgggaaggagttgctggagcagcgattatgagggagataaatggggagtagagcatgccatcgcagtgtgcatcatggggtgctcatctccttggggattagagaacttcctagaggaagttgcatctactagaacyttgagtgatgagaaggtgctcactagaaatgttccaggcctggtggacacacatgaaaagaccagagctacagaacttggtacttctaccaagaatgaacacctaagctgctgttgttggggccatgacaatcgctggggagaccactacaggacaaatagaggatagactggattgtggagaaaccccgtcaggattttggtctgtatgccaaggataatgggaaataactgacaaaagatagatttaaacagagaagtgagatgaccctatttgaagtttgcaaggatgggtgtggctgcagtattgactagaagcagctgaccccagaggatcacacaagtctggttggg

SEQ ID NO: 294127 - DNA, 618 bp, Homo sapiens
tgtttttggtttttattccatggttcattttactaagccctcctggtagccagacactgtaataggtgctggtttacagacatgaacttgacagtcatgatccggctagaatggagctcacaggctgatgggaaggagttgctggagcagcgattatgagggagataaatggggagtagagcatgccatcgcagtgtgcatcatggggtgctcatctccttggggattagagaacttcctagaggaagttgcatctactagaaccttgagtgatgagaaggtgctcactagaaatgttccaggcctggtggacacacatgaaaagaccagagctacagaacttggtmcttctaccaagaatgaacacctaagctgctgttgttggggccatgacaatcgctggggagaccactacaggacaaatagaggatagactggattgtggagaaaccccgtcaggattttggtctgtatgccaaggataatgggaaataactgacaaaagatagatttaaacagagaagtgagatgaccctatttgaagtttgcaaggatgggtgtggctgcagtattgactagaagcagctgaccccagaggatcacacaagtctggttggg

SEQ ID NO: 294128 - DNA, 594 bp, Homo sapiens
gttgattttatgtatcaacttgactgagctaaggatgctcagatagctggtaaaatcttatttctggaggtayctgtgaaggtgtttccagaagagactagcatttgaataggtagactgagtacagcagattgtcctcaccaatgtgggtgggcatcgtgtaatccattgaggaattgaacagaaaaaaaaggcagaagaggatgagctgcttgagctggaccatccgtcttctcctgccctcagatattggtgctcttgggcctttggatttgctctgggatggacatcatcagtcccccagttatccgggcttctgactcatactgtgacttataccattggcttccctggttctcaggcctttgagcttggactggaactacaccaccagatttcctgggcctctagcttagaaacaagagatcatgggacttctcagcctacataatcacatgagccaatccctcataatctttctatgtatctgtatgtacatggaatatacatttttacgcattccaaaatttctatggaatataaatccttttaaattctatatacatacatatatatagaaagatttgtcattac

SEQ ID NO: 294129 - DNA, 502 bp, Homo sapiens
caagggtctcagaaaaatatttttcctgtgtaccagagccttctttacattctctgcatcatggcttcttatgtgccatgcagaattctcattatgaatttagaatctgcaatattaaaaatatttcctttgtagctgttgaattatgggaacgtgtggatactcaagatttctactggggaaaagctggggtccttagtaaagaaaaagaacatgtaatgttgaggatcyatctgtgttctctattagctctatacagaaaaggatcaagaaaatgcttatttaaacagaatggcatttatcacccatgaagttctgaaaaaaattttaggagattcctgctttctagggtgctgaagaaagactacttaaaatcactatttaatagtacagtaaataggagatacctgtattttgaactttgcataaaattgatgtttctttatggttaaatttagattataatttactttttgggggcagtcttccagcagtgatgctg

SEQ ID NO: 294130 - DNA, 623 bp, Homo sapiens
agacactaaaatcatgcttacctataattatgcctttggataaattaataagcatgtgagactaatatctactgtaacaatttggtagtgaattttctttggatattagatgtaaatatctaagtataatttgtgtactagccataatgtacataaaaattttttaagttgtctgtaaccataattcaattaaaaccctttatattgcagaagtatgaataacgatttaaaatgaccatttaagggatctattcaaagtaaatactgtggctttatattcatactattgtagaaaatactgtttaattttttctacaaacactacacataactattcttactgttctgaagaaataaacagaaatcaaagtacaactccagacttcacttttcatacactgaaccttttgcagtgtaagtacttcagcctgcaaatattgcataactactttggataatcagtattttttgtcaaaagaacttactcagtatagtaaagtctatcattctgtactgctaccctaatcctatccttgtgctcaacttttgtgtgtcttaaaatgagctytaatctaaacaaatcagtctactttaaaagaccaaaaataaaaaaacaaaaacaa

SEQ ID NO: 294131 - DNA, 481 bp, Homo sapiens
tttcttccaaatggcagcatgagcatgaagaaccaagaaagcatacttttagtctgtgtaaatgttagctacctttcctttgtttaattcaagtcctcttgtaagagctatcagttcagctaattgagcgtttgtgctggggagagagacacacttttaataacgttgtttagagtgactactgagtatcttgccttatgtattttttgctttactggctatttgttacctaagaggtccccctagaggacagtaattgtgtcatgytgtgtggggtgtaagttaaattctctagtataattaaagagaattatgattataatttccagggttaatttggagacttttctaagtagtagagccaccatggcagtggctacaggaagaggggagacctgaattagagaacagaaaagagggagactggctctattgtttagaaggatgattatcttccttcttttaatttccagaatcacct

SEQ ID NO: 294132 - DNA, 592 bp, Homo sapiens
gacgtgtattgggttagtatggcatttgccgatctttcctaacagaactgttccccygaattgtaaaaattcctgcacatttcatacacagagaaaagacatggtgactgcagatagaaaaggagaaattttgcaacaggatagatggagattctctttgctaacacctggatgagtggtcagaagttggctttagtccagaagcctttggataacaccagggtatgccctggcccgaaattttcagttgctccaaaacctctcccagccccatgtaatggctaggtcctccatgaaagaaaactggtttaaagcatggccaatgtgtgtattgcaggggattcatcctctccccagtaaccctcacatttgagtcttcaagaacagtagccatgctaatcacatttttaaatggctgtttggatgcccattattaatttgatttgattttataataaggcccatagcctcaaaattaaaggacagattctgaggttcacttccatacttattgctttgatgtttatacctatcattccatttctgattctgaaggagcccccaaatgaagtggctttgttctgtggggaca

SEQ ID NO: 294133 - DNA, 559 bp, Homo sapiens
ctagatgcaaaatcagagatatgtcacaatccctgattttggcagggccccgrcagaagaggagagtgaaatcaatcaccacctcttctccgtcacctgggtgatgaataaacagatatgttctaatacctctgtaggccgggccatgcagatttgcatcatgaaagtgttagacccagccatatgtcacaatactcaatgtatgcagggcccaggcaggagaaggaagtcacattacctaggtgctgggcccagtcatatatcacaatctgtccttgggcagagagatcaagcaatagaggaaagtcacttcacctgggtgttagggccagcaatatttcacaattctctctgtgaaaagtgcttagacaaaattataggctcacatcatccaggtgctaggtttagtcatttgccacaatcccatctgtagggcccaggcagaagggtcaaatcacttaggtgctgggaaaaggtgtatgtcacaatcacacctgcaaggtctagggattatattaaacatcccacacacgtcctggttctaggtatgagagtcaat

SEQ ID NO: 294134 - DNA, 559 bp, Homo sapiens
ctagatgcaaaatcagagatatgtcacaatccctgattttggcagggccccggcagaagaggagagtgaaatcaatcaccacctcttctccgtcacctgggtgatgaataaacagatatgttctaatacctctgtaggccgggccatgcagatttgcatcatgaaagtgttagacccagccatatgtcacaatactcaatgtatgcagggcccaggcaggagaaggaagtcacattacctaggtgctgggcccagtcatatatcacaatctgtccttgggcagagagatcaagcaatagaggaaagtcacttcacctgggtgttagggccagcaatatttcacaattctctctgtgaaaagtgcttagacaaaattataggctcacatcatccaggtgctaggtttagtcatttgccacaatcccatctgtagggcccaggcagaagggtcaaatcacttaggtgctgggaaaaggtgtatstcacaatcacacctgcaaggtctagggattatattaaacatcccacacacgtcctggttctaggtatgagagtcaat

SEQ ID NO: 294135 - DNA, 537 bp, Homo sapiens
cctcggccgtgccgctgctcagtagtctgtcatccttataccactggaaatccgcgggggaaaccgccatggcttcgcagcgcagtaggyggcccggcccagcgcggtgcgggcgctggtcacgtccgtgatggtcggaggatagttgactgtgaccagcacgcggcggctgtcgggcgccgagttaaccccgttgtgagtcacgcactcatactccccggcctggccccgcaggatgtcagagatctccaggatctctccctccgaggtgaagccgtctcggagctgtctccaggtgaccgtgggctctggccgccccacggccaggcaaagcaggttcacattacctccctcattcaccatcacaggcgacgagatgttcacaacgcgggcagggacgtggacaatgaggtagacctgagtggtgtacggctggtggcgggtctggaaggagcaggtgtagaggccctcgtcgccgagccccacctcggtgacgaggatggagaactcctcgggggtgttgatgagcagccgcac

SEQ ID NO: 294136 - DNA, 545 bp, Homo sapiens
tctcaggttttttgactggaaaactgaatctcctgtatcaaacagtaaatgattttgtttttaaaatcttttaattatcactttggataaataaatgactattattttatggtgatctgtggtcctattttagtgaagtgttttaaccctatgacatatttgacaggcttcccaacatcaaattttgctttaaaagtgtcttttttttacaccccaaacttttggatgctatagagtgtcaatgcagcatgcaaaagagtgataaacaggcagggggaggcgggcagatcaccaggtcaagagatggagaccatcctggccaacatgatgaaaccctgtctctactaaaaatacaaaaattaastgggcatggtggtgagcgcctgtaatctgagctactcaggaggctgaggctggagaatggagaatggcttgaacctgggaggcagaggttgcagtgagccaagatcgctccattgcactcccacctgggcaacaagagcaaaacttcgactgaaaaaaaaaaaagttaacttacatggaag

SEQ ID NO: 294137 - DNA, 545 bp, Homo sapiens
tctcaggttttttgactggaaaactgaatctcctgtatcaaacagtaaatgattttgtttttaaaatcttttaattatcactttggataaataaatgactattattttatggtgatctgtggtcctattttagtgaagtgttttaaccctatgacatatttgacaggcttcccaacatcaaattttgctttaaaagtgtcttttttttacaccccaaacttttggatgctatagagtgtcaatgcagcatgcaaaagagtgataaacaggcagggggaggcgggcagatcaccaggtcaagagatggagaccatcctggccaacatgatgaaaccctgtctctactaaaaatacaaaaattaactgggcatggtggtgagcrcctgtaatctgagctactcaggaggctgaggctggagaatggagaatggcttgaacctgggaggcagaggttgcagtgagccaagatcgctccattgcactcccacctgggcaacaagagcaaaacttcgactgaaaaaaaaaaaagttaacttacatggaag

SEQ ID NO: 294138 - DNA, 951 bp, Homo sapiens
gttataggtgtgtaaggctggtttgacattaagaaatcaattaatataatccatcacatccataggttaaaaaagacaaaaaagatcatatcaaaaaacaaaaaataagcatttgacaaaaaccaacaccattcatcataataactctcagcaaactgctaatagaaggaaatttctgaaacttgatgaagaacatccataaaaaacctatatcacatcatatttgacagtgagaaactagatgctttcctcctaagatcaggaacaatacaaggatgtcacttctcaccactactatccaacatcatattggrtgtcctagctaatgcaataaagcaagaaaaggaaacaaaatgtacataaattgggaatataactgtctttgtttgccaaccacatgattgtctattttagaaaattccaatgaatcacaaggggaaaaaaaaaagccctcctaaaactaagtgattatagcaaggctgcaggatagaggtgaatatacaaaagtcagttgctttactaaattctagcaatgaacaactggaacttgaaattcaaaacccagtgccattwgaaaactacaaaactgttattaaaaagaccaaaaaaaaaacagaaataaatgaagaggtattccatgttcattaataagaaaactcaatattagaatatcaatttctcccaaatgatctaaagwttcaacacaattccaatagaaaattctagtaagttattttgtgactattgacaaactgattctaaagtttgtatggaaaggcaaaagacacagaatagccaacataatactaacgaagaggaagaagatcagaggacagtgtccaactttaagacttactataaaaggtaaaactggccaggcacagtggctcacacggagtaatcccagcactttgggaggccgagggcaggcagactgcttgagcccaggag

SEQ ID NO: 294139 - DNA, 543 bp, Homo sapiens
tataactgggaaggaaattggatttactgaaaaatctccccttaaaaaatctccaggtgcatatggtttcaatagagaattccaccaaacattttaagaagaattaacaccaattctacacaatcttttccagaaagcagaagaggaaggaatacctctccaactcattttatgaagcactgatgtcaaaaccagacaaagacagtactaaaatagaaaactacaaaccaatatccttcatgcatttagataaaaataccttagcaaaatacaagtaaacagaattcagcaatttacaaaaggaattatacaccatgaccaagtagggtttattccaggaatggaaggttgcttgactatttgaaaaataaattaatgtgatacatcatattaacagactaaagatacaacagaagaaaggaaatctaaagaagaaaaatgaggccaaggcagtaggattacttgaggccagargttcaagaaaagcctaagcaacataggcttaggctataagaaacaaaaaatttctttaaaaaattagtc

SEQ ID NO: 294140 - DNA, 1239 bp, Homo sapiens
aggacatttggggtgtttctagttttggtactatatgcacaaagctgctataaatattaagcttcaagcttctgagtgaatatgctggttcaatacccaggagtgggattgctaggtcatatatatgaccactcctggctgtatgttcaacattataataaactgctaaactgttttccaaagcgactctatcatttcacattttcacagaaatatatgagttccatttgctctatatycttgacagtacatggtaatgtcagttttttttattttaggtattctaatagctgtacagttaaaacactactttttaataagaaaacattggaaatcatttagtgtccatgtatagattagctgaataaaccatggtacatccaaacaatggagtactatttagcagtaaaaatagaatgagaaagatttctatgaactgatatggaataattttcaaaatatatttcaaataaacaaagtacaaaaatatatatgtattatgctattaataattacgttgcttgaggtaaaatgaaggggatacacacaaaaactaacaacactcattacttacaaaaggtgggtaggagcagtgtggaaaggataaggatgagaatggwaggacatttggggtgtttctagttttggtactatatgcacaaagctgctataaatattaagcttcaagcttctgagtgaatatgctggttcaatacccaggagtgggattgctaggtcatatatatgaccactcctggctgtatgttcaacattataataaactgctaaactgttttccaaagcgactctatcatttcacattttcacagaaatatatgagttccatttgctctatatccttgacagtacatggtaatgtcagttttttttattttaggtattctaatagctgtacagttaaaacactactttttaataagaaaacattggaaatcatttagtgtccatgtatagattagctgaataaaccatggtacatccaaacaatggagtactatttagcagtaaaaatagaatgagaaagatttctatgaactgatatggaataattttcaaaatatawttcaaataaacaaagtacaaaaatatatatgtattatgctattaataattacgttgcttgaggtaaaatgaaggggatacacacaaaaactaacaacactcattacttacaaaaggtgggtaggagcagtgtggaaaggataaggatgagaatgg

SEQ ID NO: 294141 - DNA, 521 bp, Homo sapiens
ttgtaatattcctgccaaaaatgattaacctgactctagtcatgaggatacaacgagatgtacctgaacagatggatattaagggagactaaacagacataaaaatcaatgtgtaaaatttgtcttgatgtggctgcaaggaaaaaaacgaaggaaaaaaatctgctagaaagaacattattggaacaactagagatagttgtataaaggttgtatattaagtggcagtgtcaccatcaatgtgaaatttcctgatgtaatcaccgtattatacttatgtagaagaatgtcattgtcaggaaacacagattacagtatttggagttccaaatattatgaatgatgcatgccactttcttccaaatggctcagttttgggagagaaaagaaacatacacatacacacacacgcacgcacgcacacacctattctttcaaaatcaaatttttcagagagaggaagcrtcaagttttaataagtggactatttaagtgaagcgtatatggataccatatgtgta

SEQ ID NO: 294142 - DNA, 576 bp, Homo sapiens
tggtcaactgagagaagacaaagactggaaatagaaaatctaatatacatcactaaaacagtccaaataacattatgagaacttgaataaaggtagcaacagattayaagaagcaaaagtaacagaattaactgacttaaatgtggtacatggaagagaagaaggaaataagaataactacaagtattctggccgtgatgactaaacagtggggccattccaagcaataggaaccatgaaaatagtaagttgaatgcaggataaaaaaagatgagttccctaaacctgttgggtatccaggtgaaaatgacagtaaagcacctcagtgtatacaactctttcaggataagaaaaacactttaccattcttagactgccccaagtccagaaagtggcatacacatagtaaatttagatatttattatataaaggcaacaggtaacaaaagggaattcatgtgaaaatgagatttggcccaataaaaacttataaaagacttgacttgagtgcttttctacccattagaagttagaggagagcccacaagcatgacctaacctggactgtcaaactaa

SEQ ID NO: 294143 - DNA, 518 bp, Homo sapiens
ccacctcccgcaccctgcccctgctggccaaggcagagaacttgggaccaagatttccctgctccacacctaggcatacctctgggcacttggtggccccccactggattctccttcagcactagtgcttgtgccttccactggcagacctgtaggtgggcctgctgggtctgacccctcccatcttacccatcactcccctaacccccagggcaaagctgggagctgagaccagggtgcactccacagatcagaccattgcctgaggcaacagagagcttctcccaataaacaagggtcagatatatacccaaccacattgggcacaatcagcactgacccatatgcaccacctactggcttccaagttcaatcacaaactcaatataaaatctgcggacagaagttcataggccatagaagaaaagccaaaagaccctgcscaacattctcggtagttataggccttagggaaggtgaaagagaaggggaaatatatatatatgggcaaaaaataa

SEQ ID NO: 294144 - DNA, 590 bp, Homo sapiens
acaaagtattagtgtcccccaggatcctagaataatactgtccactggtgtctgatcaaagcaaacgtgaatcctctccaaaaaaagataccatcatcccagactttcagtggtttctacaaacaattttgacacgacagtgctgtggtgctgtgatataataagaaatatatatttggtcttcatccccactgcccagcacagagcttctaaaacccttgtaacttcctaagtgacagaggtgatgcgagcatctttagttataatatttggttttgtccctggtttctggcacagagcacctgaacacccttggaatttctgagtgtaagaggagtgtcctttttattcataagcccctttcaaccatacctgagtttgtgctaataacatgactcttsgcagataggggctggttactagaggaatcaaccacaggattaaagggttcaaattttcagccccaccccttgacatcaaagaagaaaagaagaggtggaaattagttcaatcatcagtggccaatgatttaattaatcatgtatatgcaatggaacctccaaaaaaaccgtaaacaacagggttggaga

SEQ ID NO: 294145 - DNA, 617 bp, Homo sapiens
gactgtctgcctatagagtccacacagcattttatactcttctacctcctaatcaatgataacagcctagcaacctgtctttccaaacctttatttatgcaagaacatatagaagtttttttttkgggggggggtgggttgttttgttttgttttttgtttgcagaggcagaatctcgctatattgttcaggctggtctcctagcgtcaggtaatcctcccacatcagcctcccaaactgctgggattacaggcatgagccaccacacctagcctagagagtttaaaatacatatatatatgaatatatatgtatatgtgtatatatatacctaaaaatatatatatatacctaaaaaagactttcagtactgtttaacatttattcatttatcaaattctaaatgaaactgaaatagtcttttcatatttgcctataattacatagttaaacacatgtccagaaccctcaaaacagctctgctactttcactgcttactgttctctctcacacaaaattgattgccagactctggagagggattggccccctttcctgtccataaagaggacaaggaaacgtcagtttctagtttcccctattgtcctcattccag

SEQ ID NO: 294146 - DNA, 617 bp, Homo sapiens
gactgtctgcctatagagtccacacagcattttatactcttctacctcctaatcaatgataacagcctagcaacctgtctttccaaacctttatttatgcaagaacatatagaagtttttttttggggggggggtgggttgttttgttttgttttttgtttgcagaggcagaatctcgctatattgttcaggctggtctcctagcgtcaggtaatcctcccacatcagcctcccaaactgctgggattacaggcatgagccaccacacctagcctagagagtttaaaatacatatatatatgaatatatatgtatatgtgtatatatatacctaaaaatatatatatatacctaaaaaagactttcagtactgtttaacatttattcatttatcaaattctaaatgaaactgaaatagtcttttcatatttgcctataattacatagttaaacacatgtccagaaccctcaaaacagctctgctactttcactgcttactgttctctctcacacaaaattsattgccagactctggagagggattggccccctttcctgtccataaagaggacaaggaaacgtcagtttctagtttcccctattgtcctcattccag

SEQ ID NO: 294147 - DNA, 600 bp, Homo sapiens
tcatgagctataatcacaccactgctttcctaccttggtgacagggagagaccctgtctctatttaaagaaaaaaataaaattgaactcatggagataatagaatgatgtttaccacaggctgggaatggtattgggtggcagggagtgrggatggttaatgggcacaaaaaacagctagatagaatgaataaaatatagtatttatgatagcacaacagggtgagtatagtaaataacaatcaaattgtacatttaaaaataactaaaagagtatgattagattgcttgtaacacaaaaagcaaatgcttgaggtgacaatgtcccattatcctgatgtgactattattacacattgtatgcctggatcaaaatgtctcacgtatcatataaatatatgcacctactatatgcccacaaaaattaaattttttaaaatctgtgcagcagcaaaagaaaaaaatctaaaaaatgaaaaaaattaaatttttaaaaactaaataaataaaatttacatgaaaatgtaaagaaactaaagtagctaaaaacaattttgaagaaagaagaaagtgggagaaagcagtctaccttattgcaaga

SEQ ID NO: 294148 - DNA, 576 bp, Homo sapiens
aggtaggaaatggggtttcatggactaaaataaaaggaaaaataatgactatatcaaaaatggtcctgaatgccaagctgaaccctgtgtcttttgcatgtcaggaagaaccactgaggcttgaacagtgcaggtaataaatttgcaaataaattgtcctgtaacttcttactcaatgaggtttgaggtctcaacccatcagtcctaatatttggacatctaattgactcagagcaatgagttaggggcagcagtctttgcattacagctgtttacagactgaaagttgggccttgcttctctggctattaatgactacaatttctattcaccagcacagtttcagagcgagaacaaattagcaaagagtaaaatggaaaggaaaaagaaatgtgcaccttaaactagtactttgaaaacttttttgactgcaatcctccataagaaatgtattttacacctcaacccagaacatacgcatgcctgcgcrcacacacacacacacacacacacacacacacacacaccccgtaagacgaaagtttcatgaaatactacccttattttatgaaatgc

SEQ ID NO: 294149 - DNA, 587 bp, Homo sapiens
aaaaatggatttcagccagacgaaacacctaaatttaaatggcaaaacactaaaacttttaacataaataatagaatatcttcaggatatcagagtaaacaaggttttcttaggacataggaaataggaccaataaggaaaaggaagacctcatatgacatgaggagtgaaggcctcagagttatagaagagcatataaaatatacaactgttggttttttaaaggagcaaaaggagtgagatatatatttattgtgtaactgtggagaggaactttggaagtagacaaaagaaactaatagtggttatcttagaatgagaggagattgcagatgggttggaaggtgatatagtttggatgtgtgtctccattcagatatcatattgaaatgtaattcccagtgttggaggtggggcctgctgggaggtgagtggatcatgggggcagatttctcatgaatggtttagcaccatccccattggtactgtcctcgaaatagtgactgtgttctcgtgagatgtggtcatttaaaagtgtgtascacctcctgccttcactttcttgtttctgctctggccatgacatg

SEQ ID NO: 294150 - DNA, 559 bp, Homo sapiens
ggttagaggttcaagctggtgtaggatttattttcgttgtttctttggcatatcttcagtgcagtctcggaaatgttcatcaagctctgacgtcagcataaattcctttacttacttctcatggtgggctttgtccttgtgcatggtgaccaagtgttacctatcctcactgtactctcaactgttctattttcttttgaaatctcttgaaaattcagttatgtgggtaagamcagtggtatagaatttctcctttatattggttgcattttggggaattaggagagggaggatgttgtgatggttaatattagatgtcaacttgatgggattgaaggatgcctagatggctggtaaagtgtcgtttctgggtgtgtctgtgagggtgtcaccagaggagacagacatttgagtcagtggtctgggagaagaagacccaccctcaaggtgggtgggcaccatccagtcggctgccggcacagctagaacaaagcaggtagaagaaggtaggctactcttgcttgctgagccttctggcttccttatctattggtgccag

SEQ ID NO: 294151 - DNA, 257 bp, Homo sapiens
aatctactgtgggtgaagatgctgtgaaaaccattcaaatggcagcaaaggatttagaatattatataaacttagttgataaagcagcagcaggtggagaggattgactctaattttgaaagaagtcctactgtgggttaaatgccatccaacagcattacrtactacagagaaatcttctgtgaagagtcaatgaatatggcaaacttcattgtcttattttaataaattgccacagccacttcagccttcaaaag

SEQ ID NO: 294152 - DNA, 579 bp, Homo sapiens
gcttttattctaacagtatttagaactgtttacatttctaatttacaaatgtatgctttatatttttaaattattacattcagtgacatgattaggaccaactcctgcactgttctcattaatcatgaaygttaaaagtacatttaaaaaatactcccagcagggcacggtggctcatgcctgtaatcccaacactttgggaggctgaggtgggcggatcacctgaggtcgggagttcaagaccagcctgaccaacatggagaaaccccgtctatactaaaggtacaaaattagccaggcatggtggtgcatgcctgtaatcccagctactcaggaggccaaggcaggagaatcgcttgaatccagaaggtggggttttgggtaaccaagatcatgccattgcactccagcctgggcaacaagagcaaaactccgtctcaaaaaaaaaaaaaaaaaaaatactcccaagatttttcattcacctaatattccacacttaggattttatcctaagtaaacaatgattcatgtataacaaatcattacttacaatgatgaggaattggaaacaatctgtga

SEQ ID NO: 294153 - DNA, 579 bp, Homo sapiens
gcttttattctaacagtatttagaactgtttacatttctaatttacaaatgtatgctttatatttttaaattattacattcagtgacatgattaggaccaactcctgcactgttctcattaatcatgaatgttaaaagtacatttaaaaaatactcccagcagggcacggtggctcatgcctgtaatcccaacactttgggaggctgaggtgggcggatcacctgaggtcgggagttcaagaccagcctgaccaacatggagaaaccccgtctatactaaaggtacaaaattagccaggcatggtggtgcatgcctgtaatcccagctactcaggaggccaaggcaggagaatcgcttgaatccagaaggtggggttttgggtaaccaagatcatgccattgcactccagcctgggcaacaagagcaaaactccgtctcaaaaaaaaaaaaaaaaaaaatactcccaagatttttcattcacctaatattccacacttaggattttatcctaagkaaacaatgattcatgtataacaaatcattacttacaatgatgaggaattggaaacaatctgtga

SEQ ID NO: 294154 - DNA, 585 bp, Homo sapiens
aaaaaaacagcgtttatgtcagcgaatccgcgggtttttatagttaagggagggctttgctcctcacactccacccgcgaggagatctgcggacgcacacaccacgcctaggcctcgcgcgctcacacacctgccggctccaccccgagggtaggcatcggacccaatcgggggtcstcccccatggggagcgcgcaggtggggatgggagtagcaggcagggcgggggcccacgggcttctcactgacccagtcccgccgtcggcagccgccccggcgcccgtgacgctcctgcgggttcagtcctttggcctcgccccacgcctgccctctcggcagccccactcacaagcccagctcgcaagcgcaggcgcctctcttctctagcccgaccgccaactgcagcacctcccttgttcctcggctacggctggcgtcacttccggcggcgttgccaagcaaccgcgtggtacgagtaacaactccaccggctggcgtccgcggcgcttggcgccacagtcacttttccagatctaggagcatcatggacacctcgtcagagatgctggtacggtttggacggcg

SEQ ID NO: 294155 - DNA, 585 bp, Homo sapiens
aaaaaaacagcgtttatgtcagcgaatccgcgggtttttatagttaagggagggctttgctcctcacactccacccgcgaggagatctgcggacgcacacaccacgcctaggcctcgcgcgctcacacacctgccggctccaccccgagggtaggcatcggacccaatcgggggtcgtcccccatggggagcgcgcaggtggggatgggagtagcaggcagggcgggggcccacgggcttctcactgacccagtcccgccgtcggcagccgccccggcgcccgtgacgctcctgcgggttcagtcctttggcctcgccccacgcctgccctctcggcagccccactcacaagcccagctcgcaagcgcaggcgcctctcttctctagcccgaccgccaactgcagcacctcccttgttcctcggckacggctggcgtcacttccggcggcgttgccaagcaaccgcgtggtacgagtaacaactccaccggctggcgtccgcggcgcttggcgccacagtcacttttccagatctaggagcatcatggacacctcgtcagagatgctggtacggtttggacggcg

SEQ ID NO: 294156 - DNA, 619 bp, Homo sapiens
gtaggagaagcaaataaatattagtttccccaaaattcacatttgaaaatatttagataaaagtcacagaatttttctcagtagagaccccaataattagctgctgtaggttacctgtttgaaaggacaatatctctttagagtataactttactaatttgggtatagagaagaagtcttaggaataagaacatgatcttaaaggagagaagaggaacagaggaagacataaaagcaagaaaaatgtcatggtaattgcaatcactaaaaaactgtattctcagtcagtgcagaatactgtcttctgtctacaacaggtgcttattcccgaactgttattgcakcatggatttaatttgcttggagttagtctgatcattcaaatgttttattgtgtaccggagagcatttagaagatattttacactattaggaggttggtccttaagaactctgatacaggccagttgtggtagctcatgtctataatcccagaaccatgggaggccaaggcaggaggactgcttgacctcaggagttggagaccagcctaggaaacatagcccatctctataaaaaattttttaaagtagccaggcatagtggtgtatgcctagtc

SEQ ID NO: 294157 - DNA, 595 bp, Homo sapiens
caatatgttaaaaatattttaaaaatcagaatggtcgctcctctctgtctacaaataaatagcctgttgtttctccttcatcttagtcaagactttcctgtctggtttccatttgatttagagggagagttgctctgtagtttttaatatcctcctatctcttcctcaccctgatttttttctttcctccctaacatttgccttattccactaacaayagactataatcatccagagttcctagattaaaaaattcaaagttttcagaaatagatgaagatttcccaaaatgagtctgctattatctcagcccttttataaataaagagcttctgatatataattagagaataaatttctctgtactcacaagatttcccatttttctgaatgattatcaagtaaggcaacatgctgaaaatagagctgtgtacaatataggaaatatatctgaattaatactgtccacagcagtggacctgaaactcactttctttaaaaagcttctaagtcacctataagctctggtcattgcctctccttaaaaatggagtaacagacaagtagctacagatgctcctaaacagtgttaaat

SEQ ID NO: 294158 - DNA, 664 bp, Homo sapiens
catttatgttgttgcaaatgacaggatttccttccttttaaggctgaatactattccactgtgtacatataccacattttctttatccatttattcactgatggacacatattgtttscacatcttggctattgtgaataatgctacaatgaacatgggaatgcagatatctctttgatataagtatttcaattcctctggatatatagccagaagtggattactgggtcatatggtagttgcagttttagctttttaaagaacctctataccattttccacaatggcttatattattttacatccccaccagcaatatataagagttcccttctcaagtattcagacaggaaaggaggaagtcaagttgtctctgtttgcagatgacatgattgtatatttagaaaacatttcatctcaaaccatctcagcccagaatctctttaacctgataagcaatttcggcaaagtctcaggatacaaaatcaatgtgcaaaaatcacaagcattcctatacaccaataacagacaaacagagagccaaatcaggagtgaactcccatttacaattgctacaaagagaataaaatacctaggaatacaacttataagggatgtgaaggacctcttcaaggagaactacaaatcactgctcaaggaaata

SEQ ID NO: 294159 - DNA, 664 bp, Homo sapiens
catttatgttgttgcaaatgacaggatttccttccttttaaggctgaatactattccactgtgtacatataccacattttctttatccatttattcactgatggacacatattgtttccacatcttggctattgtgaataatgctacaatgaacatgggaatgcagatatctctttgatataagtatttcaattcctctggatatatagccagaagtggattactgggtcatatggtagttgcagttttagctttttaaagaacctctataccattttccacaatggcttatattattttacatccccaccagcaatatataagagttcccttctcaagtattcagacaggaaaggaggaagtcaagttgtctctgtttgcagatgacrtgattgtatatttagaaaacatttcatctcaaaccatctcagcccagaatctctttaacctgataagcaatttcggcaaagtctcaggatacaaaatcaatgtgcaaaaatcacaagcattcctatacaccaataacagacaaacagagagccaaatcaggagtgaactcccatttacaattgctacaaagagaataaaatacctaggaatacaacttataagggatgtgaaggacctcttcaaggagaactacaaatcactgctcaaggaaata

SEQ ID NO: 294160 - DNA, 610 bp, Homo sapiens
actctctgggttcctgttttctcataggtttttgtctggtaattttttataatctggtcaactctttaattaatttaaataacatttagcaagccatatctagcatttttattttcaatagtaagattagtatgagtaatttattcactgtaagaggtttcaaacatcacgacaaattttttgcaatctatggaagccccttttkaatatgtatttgtcaattttcccatcaggaaatgaagtctattattctacaccttgaatctaggcttggctatgtggtttgctttggccaatggaatataagcaaaagaaatggaagcagagacttgagaaggacttctgcattgggactttccccctcttggttctcttggggactctttgatcactaccatgtaaataagcctaagctaacctgctggattttgagttacttccaacacccctgccaacagacaaccatcatcagatattttagtgaagaggcaacccagccaataccatgtggagaacagacaagccatcccacctgagccctgactgccaacccatagaattgggagcaaataagtaatgtaagttgcttagttttaagatgagttgttat

SEQ ID NO: 294161 - DNA, 596 bp, Homo sapiens
ggtaattttttataatctggtcaactctttaattaatttaaataacatttagcaagccatatctagcatttttattttcaatagtaagattagtatgagtaatttattcactgtaagaggtttcaaacatcacgacaaattttttgcaatctatggaagcccctttttaatatgtatttgtcaattttcccatcaggaaatgaagtctattattctacaccttgaatctaggcttggctatgtggtttgctttggccaatggaatataagcaaaagaaatggaagcagagacttgagaaggacttctgcattgggactttccccctcttggttctcttggggactctttgatcactaccatgtaaataagcctaagctaacctgctggattttgagttacttycaacacccctgccaacagacaaccatcatcagatattttagtgaagaggcaacccagccaataccatgtggagaacagacaagccatcccacctgagccctgactgccaacccatagaattgggagcaaataagtaatgtaagttgcttagttttaagatgagttgttatggagcaaaagctaactgatatgc

SEQ ID NO: 294162 - DNA, 600 bp, Homo sapiens
aaagtagtccacttatcatcactcctcgtgacccacatggataatttattcttccatttccacaactctaggctctacatgactacaagttctgattcccagatgtaaaatgtttccaccatggaacgaacaagagtgccaatgaagttcaagctatggatgtcacctactctcttcaggctcctttgctaaggccagtaggcaagrtaaggagttgccagcctggaggtaattcaccctcaccaacaggaggcaggaggactgctcttacacagcaaatgatcatcacagcatgccagaggacctttgtgcttcagtggctaagggagtgataagatttcaaagataaactttgacttctttctctaaaaggaattacaggctcttggagaaaaaactgtaagtcttaaatttcactttttattgatatataatggttgcacatatttatagggtatgtgtgatattttgatacatgtgaacaatgtgtaatgaccaaatcagggtaactgggttattcatcacctcaaataatgatcatttctttgtgtttagaatgttccaaagattctcttctagctattttgaattatacaatta

SEQ ID NO: 294163 - DNA, 600 bp, Homo sapiens
aaagtagtccacttatcatcactcctcgtgacccacatggataatttattcttccatttccacaactctaggctctacatgactacaagttctgattcccagatgtaaaatgtttccaccatggaacgaacaagagtgccaatgaagttcaagctatggatgtcacctactctcttcaggctcctttgctaaggccagtaggcaagataaggagttgccagcctggaggtaattcaccctcaccaacaggaggcaggaggactgctcttacacagcaaatgatcatcacagcatgccagaggacctttgtgcttcagtggctaagggagtgataagatttcaaagataaactttgacttctttctctaaaaggaattacaggctcttggagaaaaaactgtaagtcttaaayttcactttttattgatatataatggttgcacatatttatagggtatgtgtgatattttgatacatgtgaacaatgtgtaatgaccaaatcagggtaactgggttattcatcacctcaaataatgatcatttctttgtgtttagaatgttccaaagattctcttctagctattttgaattatacaatta

SEQ ID NO: 294164 - DNA, 544 bp, Homo sapiens
agcattgttcacatattgaaactttgaagcagtacaggtgtccattaagagaaaaatagatgaatattcatataatagaacattgttatattcagcaacagaatatagcagttggactgaatgaaactacaatgaaatgcaaaaaatatggatgaatctagcattataatattcactgaaaagtaagcaccaaackattatacactttattctttcatctttatgatggtagagattaactaaaataaatagtctgtaagaatacttagagatgcaataaaacatgaaattcagggtgatgccatcattcttcacagaactagaagaaacaatcctaaaattcatctggaaccaaaacagagcctgcatagccaaagcaagactaagcaaaaagaacaaatctggagacatcacattaccaaacttcaaactatatcataagactatagtcaccaaaacagcatggtactagtataaaaataggcacctagaccaatggaacacaatagagaacgcagaaataaagccaaatacttacagccaa

SEQ ID NO: 294165 - DNA, 500 bp, Homo sapiens
tgatgatgtgaccttgagttagatgcttcaccactgtgagtctttgttttctcatccataaaatcctacttcataggttgttgtagggattaaatcagataatgtctatgaaatactaacaagtgtagttcaaaagcttagatgccaatgaacatgaggtccttaatgtttctaaactgaaackaaaatttttatttttaatgtcattctgccaaaaatggcccaaaattttaaccaactttaatgtgtacacccttctcctggaaattttgttaaaatggagactataattagtaggtctgtggtggggcctgagagtctgcatttgtaacaagctcccgggtgatactgatgatgctgcaggtctcaggaccacagtttgaatagcaagcatctaaaggcatacagagctgacacctgcttaatttacgaggaaaaaataagacagaagaaaatagaggaccattgcaacttaaaagtgccagcccagtacatactgc

SEQ ID NO: 294166 - DNA, 615 bp, Homo sapiens
gcaaaccatggtatgcaacaaatgctgcttggaaggctgaggaaaatattccatatatctactcatgcctgccagttcccaaggtaattgtggcaacacaaacaaatttatcaaaagcaccattaaatgtattgcagttttttgctatttgtattggttcctgtggatacaaattaaaattatggcatttatggtggaaaggtctctgaaatttttcaatgttttaaatgggaatgtcttgctcaaaaaagtttgaattatcttttcaaattctccaagccctactctttttctcctctccttctggctctctgattatacaagtgttagatctattgagatagttctacaggtccctgaggttcatttctttttcgtctaatttatcctgtttttcaaattgggtcatttctgttggcccacattcaagttaactggttctttcctctgktgtatttattattctattgagtccatccagtgaatctcttatatctgttattacattttttcagttctaaaatttttattttgttctcctcatatcttctatttctttgctgagactttttgttttacctcttgtttgaaatgcagtcataattgcttgtttcg

SEQ ID NO: 294167 - DNA, 524 bp, Homo sapiens
ctaagtgtactgatgtagtttcaagtactcctaagcaccatacatacattatctttaattctgactacaatttgtgagataattctaatatttacattaacgctaaagatgaagggattaaggcacggaggtaagtaacgtgtctggggacaggaagcttgtacatggcagaagtagaatccttctgccttcagagctggagctctcgaaaaatatgcaaagctggcctcccagatgggtaccaatgaatattcgatgaatcaatggatgaagcaagcttttggtttaaaaggaaaatatttattttaattttaaaatcgctttcttttttttttcacttcatagttcttggaagtcagtacaccagacaatcctttttatttgtgtccgtttcattcagtggggttgctttaggaaagggtttttttkggggggagtgggtctgattaacagtcactgatgtaactatatggcaatggtgttaaatatttaaaattctgagattaaaaaggtacgcagttaca

SEQ ID NO: 294168 - DNA, 609 bp, Homo sapiens
tgcatctgcttgtgtgtctgtgcaggtttccactgcagaactcctctgcttctcaggttcacctggtaggaaacatgtttcctaaaagctctcaattcttttatcttagagtttgaatgatcagaaacatactggtctctttttctcggtttcagttttaaacatttcctagggaagagctgtgattgagtcattttggatcagattcccayccctggactagttaagtaagtgagtgttggacaaagtcatatattgtggtagttcctgatacaaccatgtagatgacattgtggagaaggaaacagttttccaaaggaacagctgagcagaccaaatcctatgtatcctctctatttgattcccctctgtggaaaatattactcattttgtatcctaaggctgttgtatccttctctgttttcagtggaaatagagacaagcttctcaccatcttctcattaatatctggcttaatgacttctctattctgttaatgaacctaggaaacatgctgatcagcactggttctcttaagaggttctttgttggagtaattgttcctgacaaccttacttttattaagaataacttgattttatttaactc

SEQ ID NO: 294169 - DNA, 562 bp, Homo sapiens
tgaaccaaggtaggctggttttaaaatccatgagcttaaccattgctgtatgctaattctaccttagcatctgataaaaaggagctaaatttcccttcataatagaattacaggttagctacctgcaggggggcggtagggacagtaaatgagtgtctctgaactgagaaagttgacagaagtgtttggctagaaggaaataaaacaagtcccaggaaatgatggctttgtgagaaagttgggaatgtcaccagcaagaccgtcactgtggtagagacagctgagggcctttggccagtgccttctgttatttgatttagttgtttcccatcttttttatttatttatttatttatttatttattgatgcagcccctcatcatcatcccctaaccttcagtaagagtttgttacacataacagcaatgtgttatggtgctttgagacttgcmggtagagggatggggtcctggtgtatggacagcagtgtggataaatctcagtagctgcaagaagccgggcagtgagcagggataaagaattcactgggcaaaggaactta

SEQ ID NO: 294170 - DNA, 570 bp, Homo sapiens
tatttatttatttatttatttattgatgcagcccctcatcatcatcccctaaccttcagtaagagtttgttacacataacagcaatgtgttatggtgctttgagacttgcaggtagagggatggggtcctggtgtatggacagcagtgtggataaatctcagtagctgcaagaagccgggcagtgagcagggataaagaattcactgggcaaaggaacttagatccaagtcttcctggagggtatttagtgaagccacgagactcgccaarggtatgatgagacaggtatcatgcagatatcatttcccaggcctgagcactggcagacagaggcaaaggcagagagcaagaggaaaacagggtgtgggggtccccatatttctcatctggactgtactgggaacaactcactaggttggtaaaagatttacagcccttgctcattttggtctctggggcagctctcacagatctaatggtgtggtgtggtccagcagagagaggccctgaggtttagcttttctgagtcccttcagttcacaagttgaataggtgtggagtagaaagtc

SEQ ID NO: 294171 - DNA, 605 bp, Homo sapiens
aagcaccttggtggctctccttgctattatcttggaaggaggaggtaaagacactttccaagttaatactgataaattcacagctttgaaaagacaatatatcatttaattctcaacaactctccctgttactacataaatgaatatgttattttgtggaggaatcttttaaaggacattccatctccctgttagaggtaatggaacttcatacatcaacgagcatccattatttctgagctagtaacttcctttgagtcccagaaaagaatacctatgtgcttgtgagaattaatggagataatgtctgactgcactttcagaactagaagtactacacaaacgtagagtattgttgtcatcagctagtgatttctatattctgcagccagcagagagacgacatgataaatgacctccttggggtctgttccaattatcccatgacagctttccccccctcccccmaaacggtccttcagccatccattattctagaatgcttttaactccctaaaaaatccatgtgtcactgttgctttctctttctctctttcttactgattcctaattcaaacctgagactgaggtactcaagcccaaac

SEQ ID NO: 294172 - DNA, 605 bp, Homo sapiens
aagcaccttggtggctctccttgctattatcttggaaggaggaggtaaagacactttccaagttaatactgataaattcacagctttgaaaagacaatatatcatttaattctcaacaactctccctgttactacataaatgaatatgttattttgtggaggaatcttttaaaggacattccatctccctgttagaggtaatggaacttcatacatcaacgagcatccattatttctgagctagtaacttcctttgagtcccagaaaagaatacctatgtgcttgtgagaattaatggagataatgtctgactgcactttcagaactagaagtactacacaaacgtagagtattgttgtcatcagctagtgatttctatattctgcagccagcagagagacgacatgataaatgacctccttggggtctgttccaattatcccatgacagctttccccccctccccccaaayggtccttcagccatccattattctagaatgcttttaactccctaaaaaatccatgtgtcactgttgctttctctttctctctttcttactgattcctaattcaaacctgagactgaggtactcaagcccaaac

SEQ ID NO: 294173 - DNA, 471 bp, Homo sapiens
tttaaaacagccaatcagaattagcttagactgtgcagtccaaccctagccaataggggaatgacacagcagtagggactacctgtgtcagggctaagaaccccttcccctcccttgttcargtgtgctctcaccattgttccaccggtgagatgcacccttctatagaagtaatattgccttgctgagaaaatgtttttaaaaaaggatactagaaaggcttcctgttcccaaaacatctcctccattctcttcctaaaatgccacagctagagtcatttagatgaggcagttgggatctaattttgactcttgaaacatcagaaaattgtataatggggaggagatggatatgatgaaatacagaaataaataattgcataacagagacaacaaaatgagaataaaacagaaagaatgtgaaaacagttaaataaaacagacacaaaaaattaaggtctgcacttagtc

SEQ ID NO: 294174 - DNA, 587 bp, Homo sapiens
actgtgggcccagaacagtagcaccagcagcaccttgttagaatgcaggacctcaggccctgccccagaccagctgaatcagaatccccattttaacaagatccccaggtgatttgcatacacattaaatcttgcaacatctcggccttatcacagcctactgcctccatgtacatgggacagtggagctgcttttacatccaggcccacggaaccattctcaaagggatcctgtaaactctgaacarcctgactgaggtaaaacatagagcaaagctctgagacaaaatgacctcaaggttatttgctatacagaattggggtagatactagttcatgaaaagaaacaattccaagccagagaggacaagagtcaaggccatcctttgaatataacttccattcaatttaagaaacctggaaaacatccaagtatgatcttagggctatagtcatgaaatgctaaaagccactgctgggtcagaataaactgaaaagaagcataaatgtcacctgaatagaatataagaatgtatgtcatccagaggttagtatattaatggaattgaagatgtaaagtacaagaa

SEQ ID NO: 294175 - DNA, 1175 bp, Homo sapiens
actgtgggcccagaacagtagcaccagcagcaccttgttagaatgcaggacctcaggccctgccccagaccagctgaatcagaatccccattttaacaagatccccaggtgatttgcatacacattaaatcttgcaacatctcggccttatcacagcctactgcctccatgtacatgggacagtggagctgcttttacatccaggcccacggaaccattctcaaagggatcctgtaaactctgaacaacctgactgaggtaaarcatagagcaaagctctgagacaaaatgacctcaaggttatttgctatacagaattggggtagatactagttcatgaaaagaaacaattccaagccagagaggacaagagtcaaggccatcctttgaatataacttccattcaatttaagaaacctggaaaacatccaagtatgatcttagggctatagtcatgaaatgctaaaagccactgctgggtcagaataaactgaaaagaagcataaatgtcacctgaatagaatataagaatgtatgtcatccagaggttagtatattaatggaattgaagatgtaaagtacaagaawactgtgggcccagaacagtagcaccagcagcaccttgttagaatgcaggacctcaggccctgccccagaccagctgaatcagaatccccattttaacaagatccccaggtgatttgcatacacattaaatcttgcaacatctcggccttatcacagcctactgcctccatgtacatgggacagtggagctgcttttacatccaggcccacggaaccattctcaaagggatcctgtaaactctgaacaacctgactgaggtaaaacatagagcaaagctctgagacaaaawgacctcaaggttatttgctatacagaattggggtagatactagttcatgaaaagaaacaattccaagccagagaggacaagagtcaaggccatcctttgaatataacttccattcaatttaagaaacctggaaaacatccaagtatgatcttagggctatagtcatgaaatgctaaaagccactgctgggtcagaataaactgaaaagaagcataaatgtcacctgaatagaatataagaatgtatgtcatccagaggttagtatattaatggaattgaagatgtaaagtacaagaa

SEQ ID NO: 294176 - DNA, 573 bp, Homo sapiens
ttgaagacagataaatatttattcatgtggtaaataaaaatacctgcattttttattttttgcaattttcaggatgtgactggaacagaaattctcatggaaccctttgaaaaagctgtgctttcatagccccgtgtgcccctctccaccacatttatcacagtgccttagcaggcctctatgacttcttagagaacragagagggagaggtcacctccattttttttgtggcttctgcatttaaaaattttctaaaagtcaaaagaaaataaaaagcacaacacaatgcaatataacattcctatttataagataatttaatgatttatacaaatattaatgaaccataacaaaaataattataatcgtcaatttatagcatttctgtagttaactttttctcaaaattataaaaggaaaagtaaaaatataagataaatatattaattgacaccatagtacagatggtctggcaatgagatatgcatatttaagttgtatgatcattgacaacttctttgaacctgtcaggaagtctctaaaactacatatatgtgataatttgtaaataa

SEQ ID NO: 294177 - DNA, 591 bp, Homo sapiens
acttttgataatcagcaaggtgatctaaacttccgaaacttaactaatgtaagtctataactggacccctcctagcattctaaaaatggcacaatacagagggattacagtttgtccttaatgctcctatcataaagcttcatccattttatcttctgtgccagaaggagtcctttttcttctactcctcccatgtatcaatcagacggcaaacactgtctcttctttctttaaaatattgatttttatcttttggataatagacctctatagagtaaaaattactggatgatagccactttacattattgttgttgttttattatctccaggttaagtaactttctaagatttcaaagctagtaagtgacggtgtgtgagcctagctttccttttcaactccaaaattagggattatagtagtcagggctcttcagagaagcagaagcaataggaaagatacagatatayagtgattatagtagtcagtagaagaagaaagttgagcaggagaatggtgctatctaggcatccattatcccagtcaaattgacacataaattaaccatctcaattatcccaaaacagtat

SEQ ID NO: 294178 - DNA, 591 bp, Homo sapiens
acttttgataatcagcaaggtgatctaaacttccgaaacttaactaatgtaagtctataactggacccctcctagcattctaaaaatggcacaatacagagggattacagtttgtccttaatgctcctatcataaagcttcatccattttatcttctgtgccagaaggagtcctttttcttctactcctcccatgtatcaatcagacggcaaacactgtctcttctttctttaaaatattgatttttatcttttggataatagacctctatagagtaaaaattactggatgatagccactttacattattgttgttgttttattatctccaggttaagtaactttctaagatttcaaagctagtaagtgacggtgtgtgagcctagctttccttttcaactccaaaattagggattatagtagtcagggctcttcagagaagcagaagcaataggaaagatacagatatatagtsattatagtagtcagtagaagaagaaagttgagcaggagaatggtgctatctaggcatccattatcccagtcaaattgacacataaattaaccatctcaattatcccaaaacagtat

SEQ ID NO: 294179 - DNA, 567 bp, Homo sapiens
aatggaatttatcccagagacgcaataatggtttaacatttgcaaatcaattaatgtgatacattccatcgacagaatgaagaacaaaaacgatttgatcatttcaattgatgctggaaaggcatttgataaaatttaacattcrttcatgattttaaaaaaacccttaaaaaactgggtatggaaggaacatacctcaacacaatgaaagccacatatgaaaatctatagctagtatcatactgagtggggaaaaactgaaaaacctttcctctaacatttggaacatgacaaggatgtccacttttaccactgttattcaacacagtactggaagtctcggctagagcaattggacaagagaaagaaataaatggcattcaaattggaaaaaaagaagtcaaattatcctgtttgtagatgatatgatcttgtatttggaaaaacctaaagactccacatgcacactcacaaaaaaactattagaactgataaattcagtaaagttgtaggatactaaatcaagatacaaaaatcagtagcatttgtatatgccaatggtgaaca

SEQ ID NO: 294180 - DNA, 513 bp, Homo sapiens
aagggcatcttggaacaattagtgcagcagagtcttggttccagacctagttctgctggtctatcatcttgggtgtggccttcccctccctgggctcagtttcctcatctgtcacaggagagaattgggyccccccactctgcattcccgaccgcctggaagtgggggcaggatgggttggaatagccagagaaagcttcttggaggaggagatgttgggatgtaggtaggaatcttccccttaaggaaggggtaggattcgtttgtgaagggaaggagggcattctagacctgggtatcagactgaatagaagcttctggaaatgaacagggtgttgtgaaggaacaaagaggaaactggcctgcctggtgcagaggaatcctggctgaggagtgagatgaaggcaagggggagcatagaggtgggagagagagagagattgagagacagaatcacaccaagcttagtgctgtggggcttgaggaccccccacctggacatacctgcctttc

SEQ ID NO: 294181 - DNA, 568 bp, Homo sapiens
gtattcagctagcctcttgacagtttgaagacttactttttgatagaatcctttggtttaaatttaattttacagctatggcaacattcccaaattaggccttgggtttattcttaaagtggcgtgtgaaaatgatacacacgatagaaaaatagatggtcactatattagatttcttagaatgttagrgaagtacattttttattactttctatggaaaacaaagcaccagtgttacattcttttatatcttgcaagtcacagacttgaagatagtaaaccagcaatctgactcttcagtggaattgaatgttggagcgtcttctgcccacagagaagacttcatcgtggcgtgattgggggtataaaagcgttaagcgtagctgcgggctgtagtggtgcagaagagtttcttggtggttggcctttgagtgcatgaaggatctctctccccaggcttccctgagcctccttcagggagctgcatgtggccctggtgcttgctgttctgtgggactcttcattctgactttcctaggttactgcctgctgaactcatgttcaagca

SEQ ID NO: 294182 - DNA, 557 bp, Homo sapiens
ccacatcccaggacctggcacccagtgagtgtgaaatgcatgactctttttaattttgaatttttttttttttttttttctttttttgagacagggtcttgccgtgtcacacaggctgggagtgcagtggcacaatcacggctcayggtatccccaatctcccaggctcaagggatcctcctacctcagcttcccgagtagctgagactacaggcacacaccaccactcctggctaatttttttatattttttgtagagacagggttttgccatgttgcccaggctggtcttgagctcttaggctcaagcaatcctcctaccttggcctcccaaagtgctgggattatagttgtgagccaccgtgcccagccatgactctcttttttaaaaaatgttaattcataattttaaaagttaggcttatagaggatggcatagagcttctcaaatgtattatgaaggaatccaatcttattaatgtgtacaaattttttccataactaaattgtgggaaaaaatcaaaatacaaaagcacttatacatttttctcagtgtc

SEQ ID NO: 294183 - DNA, 557 bp, Homo sapiens
ccacatcccaggacctggcacccagtgagtgtgaaatgcatgactctttttaattttgaatttttttttttttttttttctttttttgagacagggtcttgccgtgtcacacaggctgggagtgcagtggcacaatcacggctcacggtatccccaatctcccaggctcaagggatcctcctacctcagcttcccgagtagctgagactacaggcacacaccaccactcctggctaatttttttatattttttgtagagacagggttttgccatgttgcccaggctggtcttgagctcttaggctcaagcaatcctcctaccttggcctcccaaagtgctgggattrtagttgtgagccaccgtgcccagccatgactctcttttttaaaaaatgttaattcataattttaaaagttaggcttatagaggatggcatagagcttctcaaatgtattatgaaggaatccaatcttattaatgtgtacaaattttttccataactaaattgtgggaaaaaatcaaaatacaaaagcacttatacatttttctcagtgtc

SEQ ID NO: 294184 - DNA, 590 bp, Homo sapiens
caggtcacataatgacagttctttgagaatgaggtctgttctgctctctctggtgctgcggatgtgtgctgttacctgtatggaaataaggagagaarcaaaggctatttatctactcagagcttgctatgacaagggaggaagccactctcctgtgtttcagcagacactcaaaagcaggcaggggagtggggaagcttcgtgctggagaaaagggaaggctcaggtgtgtgcagattggaggctgttgacctagggaagctggagggctcgctagaaatggggcttctatatgattgcttaggggagcaaattgactttctctggttggtcctcagctggaagcagggacaaaaattaggaaagtgtctagttattaaccagtcaactggctgcgtggggccaattgtcacagaagtaattgtttttactttgtggattgtttctagagagagcaattggacctccaacaagtctgacttgtagcatgctggcttcctgagttgttatgtgcagataagggtttggcttccttcctgggcttgttgttaccggttgtgggtgagagttctgtttgtgtatatggcctg

SEQ ID NO: 294185 - DNA, 563 bp, Homo sapiens
tttaggtggccccagtaggaccccggggggcatgcctgagatggaaacagcgtggatgccgtcccgaccatcactgatgctccaaatttgggatggctgctcctgatcatgttctgccttgtgcacttaagcgttcccatgaactcgcagatacacattttcagccgggtttttagggaaaagtgttttgtggtattttccacacagcacccactggagtgcacaatgtcagatagtgagaacaatgaagactatagaggccatgccaaatgaaagtacrgctacggtacttgcctgcaagagcggctccagcatcctgagtgcctgtgaaaagcaccttgatgtgccctcgggtgatggcagtgctctccctgcagccaggccttcctgagcccagaccccaggctgcagcccagccgccatccactgggaatgctctatgggagacacggtgcattcgcttcctgtggaggctgtcacaaatggttgctcaaaaacgacacacattctcttacctttctgaatgtcagaaatctaagagcaaggtgctggcaggtgtgtga

SEQ ID NO: 294186 - DNA, 563 bp, Homo sapiens
tttaggtggccccagtaggaccccggggggcatgcctgagatggaaacagcgtggatgccgtcccgaccatcactgatgctccaaatttgggatggctgctcctgatcatgttctgccttgtgcacttaagcgttcccatgaactcgcagatacacattttcagccgggtttttagggaaaagtgttttgtggtattttccacacagcacccactggagtgcacaatgtcagatagtgagaacaatgaagactatagaggccatgccaaatgaaagtacagctacggtacttgcctgcaagagcggctccagcatcctgagtgcctgtgaaaagcaccttgatgtgccctcgggtgatggcagtgctctccctgcagccaggccttcctgagcccagaccccaggctgcagcccagccgccatccactgggaatgctctatgggagacacggtgcattygcttcctgtggaggctgtcacaaatggttgctcaaaaacgacacacattctcttacctttctgaatgtcagaaatctaagagcaaggtgctggcaggtgtgtga

SEQ ID NO: 294187 - DNA, 521 bp, Homo sapiens
cagtctgtggtattttatggcagcctamgcagaataagatgctggcagaggccacttttcctgcctgggagacccttccctcaccccacaggttcccaggtccctgcaccagcccaggccagagtgctgccagccctggaccaggctgaaaatatagatagcccaggccatctccccttccacatcctagctggaagcctctggggttgaacttacaggggtgagggaggaagggatgcgaggacattgtctccccctgcccttccttgggcaacaacactcctctgtgaggctcacagttgaacttccaccccactcccacacacacacacagtggttctgtgactgaagcagagccagtccctcccagagaacatgaaagttacagttaggggcaccagccccctttatgtcctggattgtggagatgtctgagcccaggccctagctccctggaggcacctggtagggcaaggccagcccacagaggccaggactcaggtgacaggcctgcaggcaat

SEQ ID NO: 294188 - DNA, 521 bp, Homo sapiens
cagtctgtggtattttatggcagcctaagcagaataagatgctggcagaggccacttttcctgcctgggagacccttccctcaccccacaggttcccaggtccctgcaccagcccaggccagagtgctgccagccctggaccaggctgaaaatatagatagcccaggccatctccccttccacatcctagctggaagcctctggggttgaacttacaggggtgagggaggaagggatgcgaggacattgtctccccctgcccttccttgggcaacaacactcctctgtgaggctcacagttgaacttccaccccactcccacayacacacacagtggttctgtgactgaagcagagccagtccctcccagagaacatgaaagttacagttaggggcaccagccccctttatgtcctggattgtggagatgtctgagcccaggccctagctccctggaggcacctggtagggcaaggccagcccacagaggccaggactcaggtgacaggcctgcaggcaat

SEQ ID NO: 294189 - DNA, 533 bp, Homo sapiens
gtttttcaagcactcctagaaggaaacacttccagggtaagcctctcagargaaggctcacatcttacctctgatcttcccctaaataatcaccagcaggtgaccatctctttgcagcctttctactaaggagccaaggcaagagtattactcagatattgaaaatggatctcagctgtgcccctcgccttttctcccacgactcgtcatctgtgatgtttccaccagctttatttgcagagcacagaccacagggagccagtgtcttgggttagggttgtcttcacctgccctcgtctccaggcacgagaggcctgagaggctgctcaggagctaaaacattgtgaatgtccattcttgtaaaggatcaggtaccttagtattcggcagtttacatgattcaaagcacctgtgcatgttttcctctttctctagttacttgcacacttgtctggaaagaccttgtggggtgtagaacacaacagtgttcatagctaggccagtctcagcagtgtcctagcccattcagaggc

SEQ ID NO: 294190 - DNA, 595 bp, Homo sapiens
ctggtagtgctagtacggctagtaggggtagtaatcgtggcagtaccactactactcctagtactgctgggttgtaaatagaaaactccctagagaaaataaggtgggactgcaaagcttttatttcctgagcctaccacatcatgatgaggggaatgatgaatggatgagggaggaaacctggtatgggtggaacccagggcaccaaagaagacaaatctagaggcgtcgtggcggcagaccaaacaaacatatgaacacccgcctcattccagacttgtgaaaygttggtaacgtggaagtcttcctgcaagtcacagatacatggcaaagcttaaaaccaacagacctttttagagagatgcaaaatatataaaaaagacgttgcagcttagaaggtggactgagaaggttcagcagagtctaatatgagtttcagaaggagacaaggtaagctggagagatgaaatattgatggaaatcgtggctcagaacattcaagaaccaaagaaagctggaagtcctcagctaaaagaaacacaatttgttccaagcaggataaatgtaaacaaactcatgacaggacgtagctgaa

SEQ ID NO: 294191 - DNA, 595 bp, Homo sapiens
ctggtagtgctagtacggctagtaggggtagtaatcgtggcagtaccactactactcctagtactgctgggttgtaaatagaaaactccctagagaaaataaggtgggactgcaaagcttttatttcctgagcctaccacatcatgatgaggggaatgatgaatggatgagggaggaaacctggtatgggtggaacccagggcaccaaagaagacaaatctagaggcgtcgtggcggcagaccaaacaaacatatgaacacccgcctcattccagacttgtgaaacgttggtaacgkggaagtcttcctgcaagtcacagatacatggcaaagcttaaaaccaacagacctttttagagagatgcaaaatatataaaaaagacgttgcagcttagaaggtggactgagaaggttcagcagagtctaatatgagtttcagaaggagacaaggtaagctggagagatgaaatattgatggaaatcgtggctcagaacattcaagaaccaaagaaagctggaagtcctcagctaaaagaaacacaatttgttccaagcaggataaatgtaaacaaactcatgacaggacgtagctgaa

SEQ ID NO: 294192 - DNA, 595 bp, Homo sapiens
ctggtagtgctagtacggctagtaggggtagtaatcgtggcagtaccactactactcctagtactgctgggttgtaaatagaaaactccctagagaaaataaggtgggactgcaaagcttttatttcctgagcctaccacatcatgatgaggggaatgatgaatggatgagggaggaaacctggtatgggtggaacccagggcaccaaagaagacaaatctagaggcgtcgtggcggcagaccaaacaaacatatgaacacccgcctcattccagacttgtgaaacgttggtaacgtggaagtcttcctgcaagtcacagatacatggcaaagcttaaaaccaacagacctttttagagagatgcaaaatatayaaaaaagacgttgcagcttagaaggtggactgagaaggttcagcagagtctaatatgagtttcagaaggagacaaggtaagctggagagatgaaatattgatggaaatcgtggctcagaacattcaagaaccaaagaaagctggaagtcctcagctaaaagaaacacaatttgttccaagcaggataaatgtaaacaaactcatgacaggacgtagctgaa

SEQ ID NO: 294193 - DNA, 595 bp, Homo sapiens
ctggtagtgctagtacggctagtaggggtagtaatcgtggcagtaccactactactcctagtactgctgggttgtaaatagaaaactccctagagaaaataaggtgggactgcaaagcttttatttcctgagcctaccacatcatgatgaggggaatgatgaatggatgagggaggaaacctggtatgggtggaacccagggcaccaaagaagacaaatctagaggcgtcgtggcggcagaccaaacaaacatatgaacacccgcctcattccagacttgtgaaacgttggtaacgtggaagtcttcctgcaagtcacagatacatggcaaagcttaaaaccaacagacctttttagagagatgcaaaatatataaaaaagacgttgcagcttagaagrtggactgagaaggttcagcagagtctaatatgagtttcagaaggagacaaggtaagctggagagatgaaatattgatggaaatcgtggctcagaacattcaagaaccaaagaaagctggaagtcctcagctaaaagaaacacaatttgttccaagcaggataaatgtaaacaaactcatgacaggacgtagctgaa

SEQ ID NO: 294194 - DNA, 595 bp, Homo sapiens
acagtagaaaaaatggagaaaggatatgaatgtcagctcacaaagagcattcccaagtggctaataggaggggaagggtgcataaattcaccagcaatgagggaaatgaagttaagcaatagataccacttcacacccagcacaggagcaaaaccaccctgtggaaggacaccaagggctgatgaggatgaggatgtgaaarggaggcagcttgccgcacagcaggaagcaagtcactgtttcagcaccagggacagcagccaggcgggcccagggacagtgaaaacctgggcataccctgttccagaaatcccacttacatcccttcacacctagcaagctcttctcattacaagaattagatgacacccctttgctctcctgaagtgaaaaccacaggcaatataacctaaccagtacaaattatttcaacaaaatcaatataatgctctatctataacataaagtggaaagaaaaggagtcatgtatagtaaaacaatgtgtaattcaatatgtaaatactcagtcacacctgaatggaaggctcaatgaaagtgtcaaacatttttctttttttttgcaatgagtaagttt

SEQ ID NO: 294195 - DNA, 604 bp, Homo sapiens
gcccgccggggacaagagccctggcgcctcccagcagtgcccgccgaggacaagagctgcccttcccacttctgctgcctttaaatatcacctaaggggaccgcacgggatgtgtcttttctgtctggctttttcactgcaytctgtcggtctgtgagaggcattcatggtattgcagggaggaaaaatgactttattgagaaatattttaaatgtaccaagaagtacagagaatgaaataatgagcatgtttggacccgcagtccacattttcatgtttgcaccatttggttctgagctctgaccctggccgatgactcctcgtcctcctcctcctcctcttactcctcctcctcctcccccctctcctaacttctcctgccccctgtgataaacttgccgtcctgccgaatgtgccggcagtgcagcagctgggtgtagagtgtgtggggagtctccgtcaatgacgtggaatggctgggtttggggctatccatctgcatttccaatattgcattttgtcttacttcctcttcacagagtgcatgaaatgcaccgtctccctgcctccccactcacacgtgctgcacacacgcggtgatcc

SEQ ID NO: 294196 - DNA, 604 bp, Homo sapiens
gcccgccggggacaagagccctggcgcctcccagcagtgcccgccgaggacaagagctgcccttcccacttctgctgcctttaaatatcacctaaggggaccgcacgggatgtgtcttttctgtctggctttttcactgcacyctgtcggtctgtgagaggcattcatggtattgcagggaggaaaaatgactttattgagaaatattttaaatgtaccaagaagtacagagaatgaaataatgagcatgtttggacccgcagtccacattttcatgtttgcaccatttggttctgagctctgaccctggccgatgactcctcgtcctcctcctcctcctcttactcctcctcctcctcccccctctcctaacttctcctgccccctgtgataaacttgccgtcctgccgaatgtgccggcagtgcagcagctgggtgtagagtgtgtggggagtctccgtcaatgacgtggaatggctgggtttggggctatccatctgcatttccaatattgcattttgtcttacttcctcttcacagagtgcatgaaatgcaccgtctccctgcctccccactcacacgtgctgcacacacgcggtgatcc

SEQ ID NO: 294197 - DNA, 533 bp, Homo sapiens
ctggagctgctgcctcccagctctctgctttgacctcctgtcctgcctgtttcccatgtccccacctccctggcctgaggcagccctgcacmgagctgtgctcatcacagggacatttggctgcttcatgcatctctctgggcatgtgtcccccgtcctgcaggcccctgcaccgagctgtgctcatcagagggacatttggctgctatgtgcatctctctgggtgtgtgtcccccttctgcaggcccctgcaccgagctgtgctcatcagagggacatttggctgcttcatgcatctctctgggtgtgtgtcccccttctgcaggcccctgcaccgagctgtgctcatcacagggacatttggctgcttcatgcatctctctgggcgtgtgtcccccttctgcaggcccctgcaccgagccatgctcatcacagggaaattccactgctgtgtacgtctctctgggcatgtgttccccctcctacaggctccattccaagccccctacctcgtcatctccccggatgcttcc

SEQ ID NO: 294198 - DNA, 533 bp, Homo sapiens
ctggagctgctgcctcccagctctctgctttgacctcctgtcctgcctgtttcccatgtccccacctccctggcctgaggcagccctgcacagagctgtgctcatcacagggacatttggctgcttcatgcatctctctgggcatgtgtyccccgtcctgcaggcccctgcaccgagctgtgctcatcagagggacatttggctgctatgtgcatctctctgggtgtgtgtcccccttctgcaggcccctgcaccgagctgtgctcatcagagggacatttggctgcttcatgcatctctctgggtgtgtgtcccccttctgcaggcccctgcaccgagctgtgctcatcacagggacatttggctgcttcatgcatctctctgggcgtgtgtcccccttctgcaggcccctgcaccgagccatgctcatcacagggaaattccactgctgtgtacgtctctctgggcatgtgttccccctcctacaggctccattccaagccccctacctcgtcatctccccggatgcttcc

SEQ ID NO: 294199 - DNA, 533 bp, Homo sapiens
ctggagctgctgcctcccagctctctgctttgacctcctgtcctgcctgtttcccatgtccccacctccctggcctgaggcagccctgcacagagctgtgctcatcacagggacatttggctgcttcatgcatctctctgggcatgtgtcccccgtcctgcaggcccctgcaccgagctgtgctcatcagagggacatttggctgctatgtgcatctctctgggtgtgtgtcccccttctgcaggcccctgcaccgagctgtgctcatcagagggacatttggctgcttcatgcatctctctgggtgtgtgtcccccttctgcaggcccctgcaccgagctgtgctcatcacagggacatttggctgcttcatgcatctctctgggcgtgtgtcccccttctgcaggcccctgcaccgagccatgctcatcacagggaaattccactgctgtgtacgtctctctgggcatgtgtyccccctcctacaggctccattccaagccccctacctcgtcatctccccggatgcttcc

SEQ ID NO: 294200 - DNA, 510 bp, Homo sapiens
gtagctaaggacactgccagcatttgagggagcaggtttcaagaagaccctgtgatccctgcgccatggtgctccccctgggacactgccctctccrggagtgtgaggcagaaatggagatttgcttctcccataccatgtagcaaaggtgatgatagcacatctgcactcatgttaccctctatgacactcaacttgcccacccctcccgggcctgaggaagtgggcagccttgtgggaaagctcacatggcaaggagctatctgcatcttctaaaattacagctgagctttaggagaaactgtgcaggaataaatcctgcccacatcctgaacaagcccggaagtgcatccttccccagtccagcctctgaatgagaacatagcccagccagtagcttggccgcaaccttgtgagaccctgagcagaggcccccactaggctgcacatggactccttcctgagccccagaaactgttataataggcatgtgttgctttaagctgctga

SEQ ID NO: 294201 - DNA, 531 bp, Homo sapiens
ctctctcctgaactatgagtttatcacagatgcaatctctcccttgaactgtgagtttatcattccctttctttattttctatggtcatataaaatacacggaatacatggaatactcttcagcacatcgtgtgtttgagcttcgtagaaatgccaacatgcaatatcagattataagggttctgcagagatttgctttcttattcaacattacgagattcatccatgatgttctgtgtcacggaggctcatgcatttcactaagaacagtattccacccatgaacatttcagagttgattcacattttctcctgttgatgaaygttagctttccattgctaaagcatctttgcaccttggacataacaaatgtaacatacctgccattggatatgatgttgttgtgtgtaaatatgacacttagatctcctgcagccaccttgcgaccatgagggaacaaacccaaggacaaaagccaacgatcaggagatggctgtttggaaagatgagaaaacttgtgtcctcagtca

SEQ ID NO: 294202 - DNA, 565 bp, Homo sapiens
ttctggggcacttaaagaaaggtctggccccagtaaaggtcattctccgcggcagcttatggctcttaaacctctgtgtcctgaggaggaggcatgggctacgggaaccctgagtgaccytggcgctgccttctaattctctgaaaaagagttgtctgggcaactcatgtcaccagatttgtctgtgctcttattatgtttcaggccagttctacagtttgccaggaaaagaaataatggagacagcatgttattcttcctatgcccgaggagcttagagtgtaagggggaagggctgggaaggaagggagtgaacactcatgtgcacctgctgtgtgttggggtacttcccactatgctgactggcactttccttcattttacacacaacagtgtgtgtaaaatggactgtattttgcagaaggagaacttgaagttcaaggaacttaaggaagttgcccaaggtcacacagactaaggattgtctccttacagacgtgcattcaaggaaccataaatcagggagaaaatgataagtatcaaagctatttaaatgagacaagtc

SEQ ID NO: 294203 - DNA, 373 bp, Homo sapiens
ggatggtgcccagaaggatctgggtcttaggagtggggctgaattaacactaactttattaaaggctatttttttttttttttgagagacaggttctcactctgttgcccaggctggaatgcagtggcgccatctcagctcactgcaactgcctcctgggctcaaacaatcctttsacttcagcctcctgagtggctgggactataggtttgcaccactatggcttgttaatttttgtactttttgtaaagatgaggtttcaccatgttagccaggttggtctggaattcctaggctcaagtgatctgcctgcctcggcctcccaaaattctgggattacaggtgtaattacagtaacccagaagacatagca

SEQ ID NO: 294204 - DNA, 555 bp, Homo sapiens
gaaactgtatggggagatagggacatttgtcagggcaatgtgtaagcattcttaattacttggctattcaacgtttaccctaacattaataaaaaatgttctggaagagggtgccttcagtttatctttgctataccagtaggtaaagaactattaggtggcttgattacagaaatttgggatgatattaagatagttrtaattttctttaaattatgtctctgttacacaggataattcatttgctatgtgatgaagatgagatttttcttaaagcctgatatggtttggctgtgtccccacccaaatctcaacttgaattgtatctcccagaattcccatgtgttatgggagggatccaggaagaggtaattgaatcatgggggccagtctttcccatgctattctcgtgatagcgagtaagtctcacaagatctgataggtttatcagtggtttctgcttttgcttcttcattttctcttgctgccaacatgtaagaagggccttttgcctcccaccatgattctgaggcctctccagccgtgaggaactgt

SEQ ID NO: 294205 - DNA, 620 bp, Homo sapiens
tgtgtgagggtgtattaggctgttctcacattgcaataaagaactacccaagactggataatttatgaagaagtttaattggctcatggttctgcaggctgtacaagaagcatggctggggagacctcaggaaacatacaattatggcagaaggcgaggcacagcacggtggtaagcaaagcacatctctcattctgccaggagagagagtgaaggggcactgccacacacttttaaaccatcagatctcgtgagaactcgctcactatcacaagaacagcataagggacttccgccctgtgatagttaatattgagtgtcaacttgattagattgaaggatgcaaagtattgttcctggatgtgtctgtgagggtgttgctagaggagattcacatttgagtcagtggactgggagaggcagatccaccctcagtgtgggtgggcaccatctaatcagctgccagcatggctggaataaagcaggcattagaacatggaaggactagacttgctgagtcttccggcctccatctttctcctgtgctggatgcttcctgcccttgaaaatcagactcccyaagttcttcagcttttggactcttggacttacgtcagtgg

SEQ ID NO: 294206 - DNA, 597 bp, Homo sapiens
ctaaacgttgttacgtgacacatagctgtacaactctgattctctaaaaattcrcccagcattgtttgctatcattttagtctctatcctagttccccaaccagttcatgaacttctttggagaactgtcttgtctgcagtattgcatctctataaagtattgcacagtttagtttaatcaatacgtactgattgagcagccggacaccttcaactctaatgatataaataatgtgatctctgggtgtccagtccagcacttaaggagcttggaagttgtcactcccatcatttaaggagctcagaacttgtcactcccatcctaacacaagcaaaacagccaaacagaaaattaacatatatttttagagtcatcagagaattaaggtcataggaaaaaccactgacaccagaattagacacggacaggcaaaacatgaatcccaacttaccaggacagagactcataaacagatacttctgtgggaagcagagatggtcccataacaggaaaagccaaactataattgatgaattgctgggggctcagtgtggacaagtttgagagtttaaaataatagctcgacactaactgtg

SEQ ID NO: 294207 - DNA, 640 bp, Homo sapiens
aaccaaaatgactcctctaaatattcagcaaaataatacctaacctttaattttttcattggtgtccattttgtatttcaggtctcttaaaagcactatatctatattccactacacatgcgttgctctccaaacattcttggaatttttttctatggatattccgtagacaaaaagcccccaacagtctaacgtataaccccctcaacatttgtgcctggaggcgtaagatctgctttgcttagagagttttttataaatagccttgaggcaggaattaagccaagctggattgactcctttaatttttttttaattttcaatttttgtgagtgcatagtaggtgtatatatttatggggtacctgagatattttgatatagccatgcaatgtgtaataaccacatcatggtaaatggcacggggtacagtgtcaaccataaggctgtcctcactgtgacaccaaccacgaccacacggtaactgatgtgatttatcatgatgttattattacamattgcatgtctatatcgaagtatctcatgtatccatccccttaagcattatcctttgtgttgtaaacaatccaattatacttttaattattttttaatgtacaattatattattattgactgta

SEQ ID NO: 294208 - DNA, 544 bp, Homo sapiens
gaacaacagagtggtaaagctgagtgacttggcccctttcacaggaggcatgcttctttcagagcacatgaactgagggaaaacccagacacaagcccccattgttttcacccataaatgaaaggtgagaactatttccccaccccacccccagcttaaaagcttacaccctagtacacccaggaccaccttgctgggctccgagtcctgagttgaaaaactacctattggccactatgctcactacctggatgacaggatcattcgtaccctaaacctcatgacacacaatctaccgatgtgacaaacgtgcacatgtaccccatgaacctaaaagttggaagaaaaaaaaaaaagaaagaaagaaagctagarccaggctctgttcacccagtttgagttttaaatagagaatcattttccagcagcattaatgtgtgatcctggagtgggataaacaactgcaggcttgactgcccgatatgtcagcccgaggaaatagccctctggaggacaccactcaccccaagcccattagccaatt

SEQ ID NO: 294209 - DNA, 440 bp, Homo sapiens
acagtatcacaatcaggtttctgttatttttggttgggtactcactaataaattcactagatggtgagcgccttgaaggcaagagctatgtctttattccaatttcttaagaaatattatagtaaatatagtggaaataggctctgacttccaaatttgttggatataaaaccttcagaaagttatgaaacctctytatgcttccactgccatatcataaaaacacgaaaaatactcatcttgcagttcagatttaagaattagcaataacattcatataacatgagtacaaggcctgagagaaagcccaatagatggacccttatgttgtttggtgttatttgaatctctagaacctagcccagcacttggctcataggttatagtcacaaatttatatttactgcattaaatcagaaggaaaaacatcacttaaaata

SEQ ID NO: 294210 - DNA, 588 bp, Homo sapiens
agaattaaatcaaaataattcaacagaatttttatgacagttctcattatacacacacagagagagagagagaataagagtatttgcttactttatttttgtggttttttaattatgcaaatttttgaaattaggcaaaactatcactttcaaaaatttacaatttatttttaatcatatatatgaataacctaagaaatgtccttctctgttggaggataatcagaatggtgttaaactgcctctacttttytaactgtgattccatgggcatgccacttagtttttctgaggttacatcttcatgaaaaagttgaattataaacaggggtgctaatccatagacttagacagtcttttgggggagggttcttccttacatcttctccttcccattctgttattaccagaagatatcctggaatccacttgtgactgtctcacagccatacaatggttttgcctaccttacacctatcttccaacagccactccacattctctggaaaaaccattctgttcacactcagtgcacatgatttcaatgggctccgagttcaagtacggacacaaacccttttacaggtc

SEQ ID NO: 294211 - DNA, 1127 bp, Homo sapiens
atgagatggcgcccacctagactgaggctggctctgtctctcccagtccacggactcaaatgttaatctcctttggcaacaccctcacagacacacccaggaacaatactttgcatccttcaatccaatcaagttgacactcaatattaaccatcacagtatgaggcttttgaaaaacaatttcytgaagaataaacttaccatgaatacaggcatcagagagaggatgagtgatgcaccttgaggacctaaaactataaaagacgcaaaccctccactgccccaaggagagagcatgcaatgggctaaagatgcttcactggcagctttcattacactgagggcccctaaagcttcctttctaaccagccatggccctcacacttatgtatttatgaaatatgcattgagaagctactaagagcccagtgtgtggttctcggtcagctataatcacagtctgctgaatattatgtgcctttaaaaccttgcagaagggaccaagttcacaacaaaacataagcctatacatgccatwtactttgctaagtttctaaatttatacgtcttaattatctgtaaggaaccagaagatatttatttgatcatgctaagaatatttattgagcaactactcaatgctctacatcagttttctgttgctatgtaagaaattgtctccaaacttaggggcttaagagaagttcattatctcagaatctaggaawgtattcactaggcatgcatggctcagtgcctctcacatgactgccatcaaggtgtccttcagagctgcagtgttctcaaggttcaagtcagagaggatcatgttctcttgacataaggcctgagtcctagcaggatgttgattggagacctcagtcccatgtcatgtgggcctctcctgagggctgcccaacatagcagcttgccttccctagaggaagggtggacagggagaatgcagaaggtagaagtcacagggttttgttgtaaactaatattggaagtgacataacatcacttcttccccattccattttttagaagcaagttactgcgtccatcccacattcaatagaagataacaaaactcgggaatatcaggcagtggggagtattgagag

SEQ ID NO: 294212 - DNA, 1191 bp, Homo sapiens
tactttgctaagtttctaaatttatacgtcttaattatctgtaaggaaccagaagatatttatttgatcatgctaagaatatttattgagcaactactcaatgctctacatcagttttctgttgctatgtaagaaattgtctccaaacttaggggcttaagagaagttcattatctcagaatctaggaatgtattcactaggcatgcatggctcagtgcctctcacatgactgccatcaaggtgtccttcagagctgcagtgttctcaaggttcaagtcagagaggatcatgttctcttgacataaggcctgagtcctagcaggatgttgattggagacctcagtcccatgtcatgtgggcctctcctgagggctgcccaacatagcagcttgccttccctagaggaagggtggacagggagaatgcagaaggtagragtcacagggttttgttgtaaactaatattggaagtgacataacatcacttcttccccattccattttttagaagcaagttactgcgtccatcccacattcaatagaagataacaaaactcgggaatatcaggcagtggggagtattgagagwttttgtcaatttcgatgcttctccagcctatggaaggcattgaagttggaagccacagcaagattgtcatagtataacaaaaaggaaaaatgtgatcaaagatttcgcgaattaatcctgtcaatgaaattttgaactacacttgctaacttattttgcccttaaagaaaaaaaagtgttttattcactcaggacaggactttggttctttttttatttttgtaactgcattttttttwaaatgtaggatttcatatggagcagaagtaaatatttagaattcatttaccagatatttagggaatacaaaatagggagatgggagaatgagaattgtgaggatgtcatcaaagctttttatcagcaaagctgtcactatttatagagacgtaatctgacaggcactacgttgagtttgctttggttgagagcttccacttgtgaggtgatttttatgaactcaactcagaaattcatgagaaaaggcaagagactatatcacatgcttcttcctcttttatttactggtcgctagaaccagatgtcagaactcttaaatttggagatttttaagtcccatgatgaactagataatagttaa

SEQ ID NO: 294213 - DNA, 543 bp, Homo sapiens
ttattaaatttataggaaagctttattggcaaagaaaatacaaacctggattttaaaaaatatgcttctaagatttaaaacaatgcttgggttttaactttctgtaagcactttaaggaaaccaaaatggaaattaatgctgcattactggtattgtttatgtaagaaagatgacaaggcagtcaacttgagaaacttaatttgaagagaggacattcgattcacatccaaagattkgtagctactaatatcttaggtatgtatgcatcacttttataattacaacaaaagagatcttctaataaccttcaatctatatgtacattttagttaacttgtagtagactatgtgtatagaatgtttcttggaggtgttaattttgttgtagtttgggataagaaggcaggattatatctcagcattgcccatcaaacagctttttagtggccgttttacatccttcattcttgaaaaagttgttgggtgatctctctttagtcaatcctttttaattctttgttcctgcttcttaccttcttcat

SEQ ID NO: 294214 - DNA, 602 bp, Homo sapiens
aagactagagaagttaacttgcccaaggccataagctagaagtggttaaatttagtcatgaaaccagaattgcctgactcctgtgctcctatgctcaggctttcttatcataatatcacattgccttctaccccttttggtatcacttgagcctcagctatatccagctctaaaccaccagcattatctaatttctttcaatgctaaactaaatggaaactgaacaatccactttttctaatctactatggtgggggtgcggaggcggatttgggactagtttttcccctatccagtcaaaccaaacataatgaaagttcctctataattttcctctaaaatgatttcagttcagacattcagttctctcttcagcatgatcattagactattagcttcaaaatgacagttttgtgcatttttcayctgtggatctctaatatctcccaatatgcccagcatgtagtaggcatccatatttattaaattgaagagttcttttctcctttttgttgcaacttacaacttcccttagatttcctctccaaccctcatttagtctgatggtcatctcccaggtgacttggctcaagtcattgagt

SEQ ID NO: 294215 - DNA, 561 bp, Homo sapiens
aagtatgcagaacacaagagagtggcatagaaagagccaaaataaggatgtgtttttgtgttgttcatggctgactggagttcaaacctgccaggaccttcagaggtgtcttatcaaacagaggtcagaactatcttccttagtaacaaaatggggagatcctgcctctctttggtcaagagcggcctcatgcacaaaactccagtttgtacatagggtccccacgagtgcccctgtttgtagaatcagagaaaccttcatgctggaagcaaaagtctgcatgagaccctctccaactgtgcctgcctgaagcccttcaaagcctgcatggaacttgccactcttgcagtgcttggagttagtggtgagattgaggggttagtggactgatatagattctccattaactccaagatgcactcattttattgttataatgttgtgagagaaagctargagctaaagttacatactcagtaatatctcaattgattcatacattctgtaatctgttgagtgccagatatgtccctggttctgtgaaatcaaagaataggacaa

SEQ ID NO: 294216 - DNA, 522 bp, Homo sapiens
aggtggaggttgcagtgagctgtgatcacgccattgccctcctgcctgggtgtcagagtgagattccatctcaaaaaaacaaacaacaacaacaacaaaaaaaaaaggtagacataacccacatttccatcagtggatgagtggataaacaaaatgtggtatatccttaaaatgggatattattcagcaataaaaagggacgaagtactgacatatgctataatatggatgaacttcaaaaatatttagctaagctgaagaagttagatacaaagcattgyatagtgtgtgattacatgtataagaactttcaaaatatgtgaattcataaagatagaatgtagattagtgttgtcacattctgtttttatggattcacattttgaggtacagagtctcccttgagggtgatgaaaatgtcttggaactagatagaggtgatggttgcacaacattgtaaatatatgaaattcctcaaagtatgcattaaaatgatcaatgattaattttggtatataaatt

SEQ ID NO: 294217 - DNA, 594 bp, Homo sapiens
tgaggtatgttcctgaagagtttaggtatcagtgagtggcccccaggctagagagtattttcaagagaggagtagcaaggaacagttgagtggaatcggaagagaagggagtaaacacttatggggtacctaatcttggtatataaagtcaggcacttgactatttcactttatctccacccaaatctgtgagacatgggagagatgcctatacccaaagagctctagaaagtgccagaaactcaacctcaatgggtaaatgaactccagcgagstattagctgcaggttctttcattgtggaatggaaggtttggacttcagttaaatttctctattaggaggagtatttttagaagtggagagttgaaagctggcccttttaggcagcacgtatcactttcagagttacaacctatacaacacagtcctgggatctcatttccagagaaattcaccccagcactctctggggtttgctctatggtgaaaggcaggataggatgcctcctagtcctgaattggcaagaagagcagagtggcgtcaaagtcgccaaagtgtcacagtgcttcaccagcaggactgtttcctccc

SEQ ID NO: 294218 - DNA, 612 bp, Homo sapiens
cttgaaatatacaggaggaaaaaatattaaaacctatctagctcatttttctccctagagacaaacatttttctgtcggagcatcattctttcctcaggttcaataatttccaggtgcaaggtagagccacttttatgtacaatgtattgcccctttaaatttttacaccaggtccatacaacttatgtatgtactgtggtaatatggccactgttgccttctgtggtyattagagctctgccttttcctgacacttgaatggtatctgatatggtagttcatggcatttacttcatcaaaatttggtacctgtttaacttgatgacctagtattttatgcttacgtactgcaactgaacaaacatttctggggcactcaccatagtgctagatttattctgtatacatctaatacctactgaagccaggcaccatgtctactgcactattttttcccctagacacagtgcagtgcctggtgttcgctaatatagcacagtagctaagggcctgtgttctatttcagcatggcagaatctctagctcagtaacttgggcaagttacttgacctttctgtgcctcagtttcctcatgtaaattttggaaaata

SEQ ID NO: 294219 - DNA, 579 bp, Homo sapiens
ttcccctttttatgattatgaagacaccagtcacgttacatcaagcccaccctaacggcctcacttaaattcgattacttctgtaaagatcctatctccaaataaggccacattttggggcactggggtttagcatttcaatatttgaattttgaatggatgygattcaatacatgacagttctgtattttctgtaaaaaagtttttgtattaaggagaatggcgtgaacccgggaggcggaacttgcagtgagccgagattgcgccactgtactacagcctgggcgacagagcgagactccgtctcaaaaaaaaagaaaaaaagagtttctgtattaaaaaatagttatttactcacaggttttctcctgtctgctttcaaagtgatattatgtggctagaataaattggcattatacttgacccctaagaactcatttgaataaatgtacaaaggaaacaattccttaaaatgtaaaaaaagtgaaaaaaccttaaagttaacataaataatataaagcaagtgtatctgatggcagtgaattttataagcatgaaggataagtatgcttaaagttt

SEQ ID NO: 294220 - DNA, 645 bp, Homo sapiens
ttcagttctgtggttaagtttattcctaggtgttttattttatttgtagctactgtaagattactttgttgatttctttttcacactgttccactgttggcatataaaaatgctactaatttttgtatgttaattttttatcctttaactttactgaatttttgaaaacattctaaaaattttttggaggaatctttagttttttccaaatacaagattctataacgtacaaacaatgataatttaacttcttcctttccaatttggatgccttttatttctttctcttgtctgatttctctagcttagatttccaatactatgttttataactgtgatcaaaatgggcatttttgtctgttccagatgctagaagaaaggctttcagctttccccatttagtatactagccatgggtctatcatatatggactttattgtgtttaggtgtgttcattctatttcggtttttgagggttcttcatgatgaaagaatgttgaattttatcaaatgctttttcagtgtcaaatgaaatgataatatggattttatctttcattktgttgatatgatatatcacattgattttgcatatgttgaaccattcttgtatccagggataaatcccacttgtcgtgataaat

SEQ ID NO: 294221 - DNA, 640 bp, Homo sapiens
agagtaaatactgtataatttatatcaaattttagaaaatgcaaactaatctttaatgacagaaagcagaccattggctgtctacaggtgatcaaggcatatggagacaggagggagagaaggattgcaaacatccatgagttggggagtcatcaatatgttcattgctttgattgtggtgatggtttttatgggtataccagtatacccaagyttatcaaattgtatactttaaacaccattcattgcatgccaattatatctcaaaaaaactattaaaatatagacagagagttaaaaatccttataaaaagttttgaaatatattactttcatatagcttttattcttgaagctttatgattgcccaaaacatgggaaataaaaggttttttcttttaaaaatatcactgagattttagccagcacatccaatagagtgtgagagaaaaaaaagagagaatttactgaagaaaaaaaagaaaccagcaaaaaaaaatacggttttaattccagtaattcctggaaagcaactccacagaaacttggccaggagttgggaaaagatcatataaatgctttagggcagctgtgccaggaaaaagttataaatgactgaaggattatggcatttgtgatg

SEQ ID NO: 294222 - DNA, 1127 bp, Homo sapiens
ggggaaggataacttattcttctgttatatgggaaaaaaaattacaccatctctgggccagaagccaagtcatgtaacttctatgggtccaaaattcatcctctatatatcaagtagtttaattcaactctcttaacttcattccagctctgtaatttatgattctatatactcagattaaggkatataagcatattcagaccatatcttaattttctaaagagagaacagaagaggaatactgcataagtgattaaagcaaagaaaaggaaaatgatgctggattggcatgaaattaacttataagcaatataactataataataattgttagtattttcttgatcagttatgtcctaaaatttatctttattttttagtgaaggctgcctgcaaattaaggcgagtacccttccaaggtcaaatgtgtctcatgatgtgcaaataggtcacttctcttaatcatagacctctatagcattgaaatgttggtttattttgaatttgtagttgtaagtactttttcctawaattttgagctctacatgttctaaaaatgtgctagtgattttcacacaaaattgattctcaactgtattctctttctaagtgaatggcataaaaattttctcattcatggaagccagaaacataggagtcatccttgactactacttcttaatctctgtattcacactttctctaggttctgctaatacatattcttttacctttgtcacatgcatttctgctgatactagtcaattacagtattgttaaataataatggttgaaggcatcattcttagttttcagaagcattagcagataaataggtcctcataaaagccaagattccaaaaaataaagcaaaaccatgatgctggatgccttaawtatatagttttttttttgtcttagtccatttgggccaccataacaaaataccataaactaggtcacttataaacaacaaaaatttatttctcacagctctggaggctgggctgtgcaaaatcaaggtgcctatagatatggtgcttgatgacggctcattttctcatccaaagatagtaccttctcactgtgttctcacatggtagaaaggatgaagggtctcttggacc

SEQ ID NO: 294223 - DNA, 548 bp, Homo sapiens
agctatatatcctgatttgatcattataccagctaaacatgtatggaaacatcactctttacctcataagcatgtataattctcatgcatcaattaaaaataaaacttaaaacattaaataactaaattggtaggtctcattttcatattttttcctcagcacatgatttttcataaaatacgtagtaacattttttttaaaagccaagagaagaaaacaacaacaataaaggcagtttgaaaaattaatctccactgtaataacataaaccaaataacatcagaagcaaaaattttaccagtttaagtatagttttgttgtaaataaattgaatttttgataatcaggccattgttttacagaagtgttttttgtttcttgttttcattctccctaaatgtagttattgagtgtctatctgccaacattgtacccagtatgggagatttaaagatgaaatgatarcctagagagatgcactaaatagagttgtaaacactgatagggtaatagacacccagatcacgatagtcttctcagaaacatg

SEQ ID NO: 294224 - DNA, 583 bp, Homo sapiens
caaggtcaagagatcaagaccatcctggtcaacatggtgaaaacccctctctactaaaaatatttttaaaaattagctgggagtggtggcacgtgcctgcagtcccagctactcgggagtctgaggcaggaggatcccttgaacccaggaggcggaggttgcagtgagcagagatcrtgccactgaactccagcctggcgacagagcaagacaatgtctcaaaaaaaaaaaaaagtactcaatctattaatgtttcaatatattaatataatttgtttcatcactggtcaaagggaaaatatataattatttaatagattataaaagtttgatgaaattaaatatatgacattaatgaaggttgttaataaaatatgaacaaatattatttttcatagatcatatctgttggcattcccatttaatcttaagaaatatgactgctattgcattaatcttgaattttcatccaatgtaataagtgaagaaataaaataatacaattattaccaaaaaatacagctcaatgtcccttatttcaaaaagatgttctatatagaaagggtaagaacattgactcaca

SEQ ID NO: 294225 - DNA, 585 bp, Homo sapiens
ttttagttttctaagctaaaaatgtttattctgcaaaaatcatatatttgtcagtttaagccgctacatgattatcatttaatatttttcatgaaaaatgttatactttcttctaaaagtgaacatttctttaaaaacatattaatgtgatgatttagtaataatcttgtattatattgctaaaacttggacaagttttcctatatagtataagaaaaaattacatgcaattaatttgtattctcttgaagaagactgcttccaagaaatcagagtatagtcagattttttctcctcttcagaaggctgttctyccagcctaatatagtgtcatatagtaaaaatatatagcttctcatgcgtaagctctcatgattttgtcaactgacatttagcagcttttacctcttggctgccaattcttcactttgcataatatatttttttcttacataaaaactgaaacatagggggattgtaagttggcgttggccctgtgagatgacagtatgatcggcatctgtgtaataaatgcagacttataatgtacaaagacagccacactttcacactctgacatttcca

SEQ ID NO: 294226 - DNA, 576 bp, Homo sapiens
tacgtacaggtcagtacttaggactttctatattatttgttatggtatcacacaaaattaaatccttgatgatttgtgtgatgttttgtgaygatgaggaagatgatacaatctgtttcttcatagaacaaggagaggagaagttggtggaacaatggtagattatcactcaattttataattgggaaactctattctgatgattctatcattaataaaatatagggaattagaaacaatctgcaagaaacttacagaaatagcctttttttaaaaaaagaagaagacgcaggctttactttcccttatcttacctatgagcaaataaaattcccttgttagagtaaatttgattaatttatggatgatcataatgtttgctcttggtaaacttgtacaaaacatttatcatcacctactgcactcaaggtcttttagggaaacctaaacaaataaatgtgtttgatttgacattctaattatattgtaaagaaggattaggttttgattgggtaaactttaaatcttaggtaaaagtagcacatagaaggaatataacttaaatgaaagtagttt

SEQ ID NO: 294227 - DNA, 575 bp, Homo sapiens
tactcagaaatgaaactaactgactataatcaacttacatcacagttaatggaacaccaacccttccagatgagaagaaatcagcacaagaattctggcaaatcaaaaatccagtgtccccttgcatccaaatgagtctactaactcctgagcaacggttcttaaccagtctaacatgattgaaatgacaggcatagaattcagagtttgaatgacaaataaactcattacaattcattaaaaagttgaaatccaacccagggaatacagtaaaatgatccaagagctgaacgacaaagaagccattttaagaaagaatcaaactgaacttctagagcttaaatattcatgaccagaatttcataatataattggaagtattaacagcaaaaagatcaagctgaggaaagaatcccagtgttcaatggctagttctttgaatcaactcagtcagataaaaataaaggaaaaataaytaataaaaatgaacaaaacctctgagaaatatggaattatgtaaagagaccaaatctacaactcactggcatttctgagagagaaagagaaagaatatg

SEQ ID NO: 294228 - DNA, 595 bp, Homo sapiens
acccactcccacaatactaatctacttttttgacaacagatttaattcattcttgaaggtgtccatctcccaatcatctgaacctcttaacactgatctacaggagattaattttccaacacctgaactttgggggacacatttaaatcacagcaggtagtatggatgttttggaatgttgattcttacaagccatgaagatgggatatctttttatttatttgactcttctatttattttcaatattttatagttttcagtgtagcaaccatctccttggataaatttatttctttttttatttgtagctattgtaattgggatcgttgcttgattttattttcagattgttgttagtgtagagaaacagtatagatttttgtatgttttgcatacatgattctatgtcctgcaattttattgaatttgttttttagttctaattatatttgatgagattttaatggttttttaaatataaaattatgttgtctgcagacacaatttaattttakcttttccaatttggatgtcttctatttttttatcttgactaatttctctggctaggacttttagtacagattgaataga

SEQ ID NO: 294229 - DNA, 661 bp, Homo sapiens
gtacagcttcaatgattgttctatcacttgccatgcattttttccagagttccacctgagaagagctgtattatgatgtcaacttggatcttccctgaagttcaactactgaattatttttaactaaagaatattttaaatacatagaaaaaaccccagaaaatataagatgggctgttgcatacattttaaaattatatgtgtgtcaatgcatgggcttctctgtgcatccccttcttttactgttgcctgaagaatattttctgakgagatcactttgttttcttcatccaattgctcaggcaaagatcactctcaaatttttttttgaatcatctctcctgtaccttccaagcctccaaaacaataataagaatgaaattcctataataatagcaactaatctacttgattcactaatgtatgtccaggacataaacaatggtgatactagataaatgaatgacagaatcatgtctgtttctttctggcttctctcacacttctcagtataattaaaaattgtctagttataaaatataatctttctgactgtttttggtagctgaattttggatctgttaacaagaagtgacattaactgagtagtcatagtgtcccaggcatggtgctaccagtgaacaatttaccactattatct

SEQ ID NO: 294230 - DNA, 661 bp, Homo sapiens
gtacagcttcaatgattgttctatcacttgccatgcattttttccagagttccacctgagaagagctgtattatgatgtcaacttggatcttccctgaagttcaactactgaattatttttaactaaagaatattttaaatacatagaaaaaaccccagaaaatataagatgggctgttgcatacattttaaaattatatgtgtgtcaatgcatgggcttctctgtgcatccccttcttttactgttgcctgaagaatattttctgatgagatcactttgttttcttcatccaattgctcaggcaaagatcactctcaaatttttttttgaatcatctctcctgtaccttccaagcctccaaaacaataataagaatgaaatycctataataatagcaactaatctacttgattcactaatgtatgtccaggacataaacaatggtgatactagataaatgaatgacagaatcatgtctgtttctttctggcttctctcacacttctcagtataattaaaaattgtctagttataaaatataatctttctgactgtttttggtagctgaattttggatctgttaacaagaagtgacattaactgagtagtcatagtgtcccaggcatggtgctaccagtgaacaatttaccactattatct

SEQ ID NO: 294231 - DNA, 588 bp, Homo sapiens
acattagtatagtgtttggcctataacatgcaggaatgtaacatatttagtgctaagagctcaaaggaagcatgcagaaataaagctgttttggagtaaggaaatgataccagatggtaactaaatcctcaggaagaaaggaaaagatacagaaatggaaaattataagtttaatgtaacagacactataaatatatacttgctctcctttcttctctaagcttctttaaaagacatcaaattataaaactgatatctaaaacaatgtattatagggtttataacacacataaatggactatgtgtaacaataatagcacaaaaagaagaaagtagaactatgcaggagtaacatttttataatctcattagatttagtataaatctgaagtaaattctgataaattaagacartagggtaagtcctatggcaaccactaaagatataatgcaacagaaagaaaacatactaaaataattaaaatgttacattagaaaacatttagttaatgcaagagaaagtgataaaggaggactagaggaacaaataagatatgagacaattaaaacacaaaaagacaatggtag

SEQ ID NO: 294232 - DNA, 598 bp, Homo sapiens
cctgattgcaaactgttgtctgaaaaaggaatgtaattgggtacatagtttattgtgtctctaaaatgacacctgcaaattatataaaatgactatggtctgcttaaagttgaaaattattcttaagtcatgtttttatgtgagttttttttgtccttttgcaactgtaattggaagccttgtttttcattaaatagtttacaagctaaaaaatagaaaaaaaatttacttatgaattcaaaatctgttaataagtatattttggaccagtatttttcttgaagttgaaatccaagagtatctttattcttgtaaaatcaataaaaatgtaagaaaaattcaaaaattgggtctaatcatgattacatrtttgtgcttataattacaaatttttcaaatccacattttaaaaatttgtatgttataatgcatattgtttttaactgcacagtgaaatcgttgatggataattcagttttcttgtatttactgccttccatttcactttttaattttgttagatttatttataagattcctatgttgggacataaatgatgctttattatatttaggtcattaaaaataggtataatcc

SEQ ID NO: 294233 - DNA, 575 bp, Homo sapiens
aggcgtgagtcaccacatctgaccttacttacatatttttaaatattttataaaaagactctctgatacttaaattctttaaactacagaaaaggaagaaaaataagtgaataattaagctattttactgagtttatagttaaattttttagagatagccccagaacagttttcaagatggtagattgtatagtcttcctttcctaccatcgctttgcagtaaaacaaaaagagagggactactcagatgtctaataaattttttaatctctttttaagcagttgaaagttgacaaaattgaatattaaaagcaaaccagaagccacaatacacacaaaataatactgcttcacagggtggggatagcaccaatgtgtgcaatgattggagggagccrgaggtgttccagaacatgcaggaggtcattagttgaagtacccacagaagctaatagatagacatccccagtcccttcttgcaatagcaggaagcagcaagtatgtgggcttccaagttgagagacaaggcaaacatcccaggtgtccgacaacaatttggaaagatggcaaatcgc

SEQ ID NO: 294234 - DNA, 619 bp, Homo sapiens
tagcatcaacagtgtattataaacctaagtacaggacccttctaagcacaggactctgttcaagaggtcacttgcccatgaagttctgcaggtgaaaaatctgaaaatgtttcacttttaataagaacctcaagtgtctttaattaggattcccaggaactatattttgggaaacactgctctaggtccacccatatgggccagagaagcactcattggcagctgctgataacaaaaagtttaataggactggaaaaaagtatagttaacagtagagcacatttcagtcttaactcatcagtggcataagatgaaggagtcagattgtataccagaagaaaagagcacgtatgattccacagactgaaggtcctggactgaggtttgttacatcagctttkgttattaaagagggaaacttgctgtcaagggtaagaaaggatcccaattcttatgtttagcacaggacaaaacaggtaactagaacagaaagtcagaacagggaatatgcattaattaactcaactattatttcctgaggtttttgatagacagtccttctccaaggagttaacaatacaatgagtgacttaaataaattgatattggtaattgttat

SEQ ID NO: 294235 - DNA, 619 bp, Homo sapiens
tagcatcaacagtgtattataaacctaagtacaggacccttctaagcacaggactctgttcaagaggtcacttgcccatgaagttctgcaggtgaaaaatctgaaaatgtttcacttttaataagaacctcaagtgtctttaattaggattcccaggaactatattttgggaaacactgctctaggtccacccatatgggccagagaagcactcattggcagctgctgataacaaaaagtttaataggactggaaaaaagtatagttaacagtagagcacatttcagtcttaactcatcagtggcataagatgaaggagtcagattgtataccagaagaaaagagcacgtatgattccacagactgaaggtcctggactgaggtttgttacatcagcttttgttattaaagagggaaacttgctgtcaagggtaaraaaggatcccaattcttatgtttagcacaggacaaaacaggtaactagaacagaaagtcagaacagggaatatgcattaattaactcaactattatttcctgaggtttttgatagacagtccttctccaaggagttaacaatacaatgagtgacttaaataaattgatattggtaattgttat

SEQ ID NO: 294236 - DNA, 575 bp, Homo sapiens
agcataaaaatgaaagcgtgtgttgaattaggagagcaaggaaaagctcagtactctggatggtctctaaggtggsatatcagagacaaaaggccagagcagaggcaccataaaaataggttaccaaataagggatattatacaggccagcagccccatggaacctgaatgtggagaaagatagtcaaagaaatcctgtttctaagcagaatcaatccttcttgcctcaagctcagatgggcttgggaaccgatatggggccaaaactgtaggtgggaaagcagaaagcccacctcaggaaagcaaagtatgacttccatagagaagtaaatctgaacagggagggaaggctgaaattgttttctttcaactttttttaattttcctcctcacgtgtgttaaaaaaaaaaaaactttaggcaaaataaatttaactgggtttatttgagcaaagaacaattcataaatcaagcaaaacttaaaactggaagacattcagagagctccacttcagcaatgtaagcagttggcttttgtaggctgagcatggatgcaaagcaaagacattatttgat

SEQ ID NO: 294237 - DNA, 575 bp, Homo sapiens
agcataaaaatgaaagcgtgtgttgaattaggagagcaaggaaaagctcagtactctggatggtctctaaggtggcatatcagagacaaaaggccagagcagrggcaccataaaaataggttaccaaataagggatattatacaggccagcagccccatggaacctgaatgtggagaaagatagtcaaagaaatcctgtttctaagcagaatcaatccttcttgcctcaagctcagatgggcttgggaaccgatatggggccaaaactgtaggtgggaaagcagaaagcccacctcaggaaagcaaagtatgacttccatagagaagtaaatctgaacagggagggaaggctgaaattgttttctttcaactttttttaattttcctcctcacgtgtgttaaaaaaaaaaaaactttaggcaaaataaatttaactgggtttatttgagcaaagaacaattcataaatcaagcaaaacttaaaactggaagacattcagagagctccacttcagcaatgtaagcagttggcttttgtaggctgagcatggatgcaaagcaaagacattatttgat

SEQ ID NO: 294238 - DNA, 578 bp, Homo sapiens
tttgattgtctacagctaggcatttgccttaattgggtatggtttgatgggaggtccctagatatataaacaatcagctagttagttgtctgtgaytggctgaaactcaattcaaagttaatcaggtacaaggaatgcctgtaagtttagttttgtaaaacttgtgtaagccttccaggtagagaaacaacctcaggccaatcaccttctgcttactttgctttaacacatgttaaagtgctaacacatattaacacttcaagtgtttaacacatgttaaagggtcagtgtaaactgacagtcatgtgagcatgtcatgcaacaggtcaagcagggttatacctttgaacaaagcctgcatctgagacagagctctggtgcctgaaacagcgcagatgtacctcaccagataaaaacacagaagcacagatgtccatattcctcccttgaaaactctgtcctgtaggcaagttgggttggagtagcaggtcgtttagttctagagttggttttttttccagtcacatagatttttacatctgattaccatatattgcttaaaatattacttaatccat

SEQ ID NO: 294239 - DNA, 578 bp, Homo sapiens
tttgattgtctacagctaggcatttgccttaattgggtatggtttgatgggaggtccctagatatataaacaatcagctagttagttgtctgtgactggctgaaactcaattcaaagttaatcaggtacaaggaatgcctstaagtttagttttgtaaaacttgtgtaagccttccaggtagagaaacaacctcaggccaatcaccttctgcttactttgctttaacacatgttaaagtgctaacacatattaacacttcaagtgtttaacacatgttaaagggtcagtgtaaactgacagtcatgtgagcatgtcatgcaacaggtcaagcagggttatacctttgaacaaagcctgcatctgagacagagctctggtgcctgaaacagcgcagatgtacctcaccagataaaaacacagaagcacagatgtccatattcctcccttgaaaactctgtcctgtaggcaagttgggttggagtagcaggtcgtttagttctagagttggttttttttccagtcacatagatttttacatctgattaccatatattgcttaaaatattacttaatccat

SEQ ID NO: 294240 - DNA, 716 bp, Homo sapiens
aaaatggtgaagcaattgacaatatcaaaaatgttacgaataagaaacttaccttgaggaataggggagagttgccagtagaaagaatagatgaaaaaattggtttccaaaatgttaagctagaagtgacagagaactacaactgaaaatatggaacataatgacagcaagtatattttaactgaatgaataaaaaataatttatcaaattgtttaggaaaatgttcatgatgaatcaggatatgcagagctgcagcttgaggaagaaaacagaattaaaaatgtagatttgggagtcacagtgaaaaattacatttatttagtgctttttacgtatcaagattgttctaagtgctttacatatataaacacatttaatcctaactaagttcaagagcttaactactatactatgttgtgctttcctgttcctgcaacaaagaaatgataaatgactaagatcagatgacctcttagagtgaaaaaatgtggagaaaaaaggcagaagcccatgcatagtcaaggctatatggagggactagggccaggatagagaaatattacaaggtgatagagtggagggatagaaactagaatggtttatcagtcagagtccaactaggcaagcctctcctgccattttgtacttagtggtrgctgcaatgtttgggttggggtggcttgagaggtaatttatttgtgtgtgtcttatgatt

SEQ ID NO: 294241 - DNA, 1252 bp, Homo sapiens
aaagaatctgaaagaagaaacacagtagacttaaataggcattttagagaagaggatatccaaatggcaaataaacatgtgaaaagggtccaaccttcgtagtgatcagggaaatcaaatttaaagccacaatgaaatatcaccacacacttgcccaaagagttaaaactgtaaaagctgacaatgctgtgttggagtgatgaggagcaccttgaactctcatgcaatgataactgaaagagtaaaatggtatatacccacttgggaaaattatgtggtaaattttactaaccctaaatatgtatataccctatgagttagcaatttcatttctaattataacttaaagtacatacatattttcaccaagagatgtatgcaacaatgttcattaaaaataattataataacraaatagtggaaactttccacatgttcattaatagtacaatggataaattgtgctatattcatacatagaatgttgcaataagaataaataaattactgctaaattgagcaatatgaataaatctcacaaacataattttgaggaaaagaagccaaacacaaaacaatgcaaactactttattctgttttatacaaagttcaaatacagacatgwatttaggtccatgtctggactctattctgatacattggtctgtttatgtgctatcatactactatttgaatttgtataactttatgtttaatagtagaaatttccttggccattcttgctttttaacttttctctacgaattttagaaacagtttgctttactgcaaaagaaagtcctgttggtgatttaatcagatgacwctaaatttatggattgacttatataatcctgtccaggaaaaatacatccttcctaattccttcaagtttccctttatgtttcccaggaggttatagagttttcttcaactagatcttgcacatttctttagacttttctcagaaattttacctgttgttgctgttgccataataattggattccttctcatcaaatcctctaatggttatttgtataaatgaaggttattgctttctttacattaattttacacacagtcactcttccaaattttcttatcatgggaataaactttcacttgattctttgggttttcccaaaaagcagtttcaattctccctccttctctctttccctccctctcttttcctcttcctctctttcattctccctctctttccctccccctctctttgctctccta

SEQ ID NO: 294242 - DNA, 393 bp, Homo sapiens
atggttctaattcagtaagtccaactctctcaccccctttttttgtcagctgtgtgggctttcccaggatggcatgcaatgggacccctgtgccatgcatattgtaaaggaaaatgcctccctccatgcgctacaaaacagcacatttatgatggcactttgaaaagatatgggytgtggtgtcacatattgacaattccttggccagaagcttaacagtgccagcagtgccagaagattaagaagacagcaaaaacagaaaagggagaagatggtgaagtagctatataacatgagcgagaatgctcctgattacaaagcagagaaattgactttttttcttagtgttttctatagtcattgctctatccctgttctagaattcaagtcatg

SEQ ID NO: 294243 - DNA, 594 bp, Homo sapiens
catgcatattgtaaaggaaaatgcctccctccatgcgctacaaaacagcacatttatgatggcactttgaaaagatatgggctgtggtgtcacatattgacaattccttggccagargcttaacagtgccagcagtgccagaagattaagaagacagcaaaaacagaaaagggagaagatggtgaagtagctatataacatgagcgagaatgctcctgattacaaagcagagaaattgactttttttcttagtgttttctatagtcattgctctatccctgttctagaattcaagtcatgataagaatttcttcacgttgacttcctgcattgctttcagacattgcaattaaagaatgcgaagaaagaacctcacagaggtaacagagtttgttttcctgggattctccagattccacaaacatcacatcactctctttgtggtttttctcatcctgtacacattaactgtggctggcaatgccatcatcatgaccatcatctgcattgaccgtcacctccacactcccatgtacttcttcctgagcatgctggctagctcaaagacagtgtacacactgttcatcattccac

SEQ ID NO: 294244 - DNA, 594 bp, Homo sapiens
catgcatattgtaaaggaaaatgcctccctccatgcgctacaaaacagcacatttatgatggcactttgaaaagatatgggctgtggtgtcacatattgacaattccttggccagaagcttaacagtgccagcagtgccagaagattaagaagacagcaaaaacagaaaagggagaagatggtgaagtagytatataacatgagcgagaatgctcctgattacaaagcagagaaattgactttttttcttagtgttttctatagtcattgctctatccctgttctagaattcaagtcatgataagaatttcttcacgttgacttcctgcattgctttcagacattgcaattaaagaatgcgaagaaagaacctcacagaggtaacagagtttgttttcctgggattctccagattccacaaacatcacatcactctctttgtggtttttctcatcctgtacacattaactgtggctggcaatgccatcatcatgaccatcatctgcattgaccgtcacctccacactcccatgtacttcttcctgagcatgctggctagctcaaagacagtgtacacactgttcatcattccac

SEQ ID NO: 294245 - DNA, 1023 bp, Homo sapiens
ccagggtctaggaacattccaataccccttgtcaaagctgtgyctgtgttcatatttttcttcttgcctgggctgacctccactccctgttgcccacccagattccaagtcctctgtgcttggaagcacatcctcatcactctcagtactttcttaacataaaacccccaaatgaaattatattcttattcttcgcttaaatacagaatttttaaatcaccaaattagatctatttttaatgtttaaaaattgtttcttaggagtatttcaagactcagctcattgcctagcatcttcatgaaatcatctcacaacaaccctgcttctcacttctctttctttcataaagcctatacccaagctggaggcagcttgcaccagctcaccagagaagattgctaacattctttctcagctccatattctgtagtatcatctgggtagattaagatctactgtagagaaatagtgttaactgagaaatggacaatcagtatcaggactatttttwccagggtctaggaacattccaataccccttgtcaaagctgtgcctgtgttcatatttttcttcttgcctgggctgacctccactccctgttgcccacccagattccaagtcctctgtgcttggaagcacatcctcatcactctcagtactttcttaacataaaacccccaaatgaaattatattcttattcttcgcttaaatacagaatttttaaatcaccaaattagatctatttttaatgtttaaaaattgtttcttaggagtatttcaagactcagctcattgcctagcatcttcatgaaatcwtctcacaacaaccctgcttctcacttctctttctttcataaagcctatacccaagctggaggcagcttgcaccagctcaccagagaagattgctaacattctttctcagctccatattctgtagtatcatctgggtagattaagatctactgtagagaaatagtgttaactgagaaatggacaatcagtatcaggactattttt

SEQ ID NO: 294246 - DNA, 581 bp, Homo sapiens
atattctgtagtatcatctgggtagattaagatctactgtagagaaatagtgttaactgagaaatggacaatcagtatcaggactattttttttcctggagagctgattgttaaacatctaccaacacaccactgccttcatccttgtaccatatgctgtggcccagtccatgttatcttgcattgttgtctgttttctcccatgtgtcagtcttatttcccaaattagattgtaaacagtttgaaagaatgtgccagggctgttaaatcttctcagtccttcacacaattcactcagagaatccttcaatatgtactaggtgactgaagagtatgaagaatctagaattattattgcattataattggagctyaatttgccaaggagacagcattagctacccatgaaaatagtgggactcaaacaataagggatgcttttgtgtagcatcctggcgtaaatctcagtgtttttctcctaatccttcttcacattttcccacatggaatcagatgataatgacaaactagagcaatcatgggaaaagacaaaaaatgttgcatgggaaagagaagggtca

SEQ ID NO: 294247 - DNA, 561 bp, Homo sapiens
atagttgagaacctgacagcaagtaataagacaggaagaataaaactagaagaagtcagaatgaaaaccaaaaaagtatgagactgggatcattttgtatgaagacaaacataactttatgtctcaaaaacctcagtaggactgtacaatgcttgattttcataatgttctcttgatgtcatcaaaaaatattatactctgaatattgctcacatgaatatgctgtctaaaattcttccatggattcacacttcttacaggacatgatttaaacctctaaatatgacattgccctctataacctggtcccagttactctctctgaaatgtacacagagagtatacacagaatactctctgaaatggactttccatgtacatttcagatacaactcttagcagagcaagccacatcctaactatcacactgaaaaataattgtcagatgctattactagtagttatttttatggttatgaaaagcatggaacacagtgcctggcacatcgtcaacagatatragttgcattcccagagaagcaaggatcccagagggagttt

SEQ ID NO: 294248 - DNA, 578 bp, Homo sapiens
gggggcggttaccctcgtgctgttctcatgatagtgagtgagttctcacaagacctgatggctttatatgggacttttccycccttgctccacgatcctccttcctgccaccatgtgaagaaggacatgtttgcttccatttctccatagttgtaagtttcctgaaggctccccagcactgtggaactgtgagtcaattaaatctctttcttttatacattaccctgtcttgggcaggtctttatagcagcatgaaaacagactaataaagatggaatttctggtaacgtcatctcggcatttttctcagatacagttgttgtcacaacaaagaaatcagcaaaagtcacagaggaaactacttgaataattcagaatctataaagaaaatggaaggatttggaggtgcaataacccaggaacatagttgtgtagtgatttaataattacagagataatcacgccctttcccatacttgccactaaggctgttagatactaggggacaagtagtacacaagatgtacaataagttgctaaaaccaggagtcatctctaataagaaaagcaatttttga

SEQ ID NO: 294249 - DNA, 548 bp, Homo sapiens
agcttgggatatgccttagctaaaacttgagttgaagtggaaatktaaaaaaaatattttatctgcactggataggatcaatgtatagtcacatttggaatgcaatgtggagactttttaggtattcatgagactttgcattgtttagaaataataggtgtccaagaccattcaaatgacagaagaaaaaatgaaacatgacctgaattgtctttaatccttatcttgtcaagactaaatagctgattatcatataaactaaactccatttgtattccagaattttctatctccttttcatctggctggctgtggccacttttctgagtttaacatgggagatacctcaagagaccaccgtcgagtttgggcactggtaaaggcatctgcatcatgtcacattcaaccacaggatccagaagcaaagctaatctaatgttattgacatatttcactgaagcccataatctatgaggggttcacacagctgtgcctggggtgagatgtcaaagacaaatacttcatctagagctccagctgttgcaaca

SEQ ID NO: 294250 - DNA, 548 bp, Homo sapiens
agcttgggatatgccttagctaaaacttgagttgaagtggaaatgtaaaaaaaatattttatctgcactggataggatcaatgtatagtcacatttggaatgcaatgtggagactttttaggtattcatgagactttgcattgtttmgaaataataggtgtccaagaccattcaaatgacagaagaaaaaatgaaacatgacctgaattgtctttaatccttatcttgtcaagactaaatagctgattatcatataaactaaactccatttgtattccagaattttctatctccttttcatctggctggctgtggccacttttctgagtttaacatgggagatacctcaagagaccaccgtcgagtttgggcactggtaaaggcatctgcatcatgtcacattcaaccacaggatccagaagcaaagctaatctaatgttattgacatatttcactgaagcccataatctatgaggggttcacacagctgtgcctggggtgagatgtcaaagacaaatacttcatctagagctccagctgttgcaaca

SEQ ID NO: 294251 - DNA, 548 bp, Homo sapiens
agcttgggatatgccttagctaaaacttgagttgaagtggaaatgtaaaaaaaatattttatctgcactggataggatcaatgtatagtcacatttggaatgcaatgtggagactttttaggtattcatgagactttgcattgtttagaaataataggtgtccaagaccattcaaatgacagaagaaaaaatgaaacatgacctgaattgtctttaatccttatcttgtcaagactaaatagctgattatcatataaactaaactccatttgtattccagaattttctrtctccttttcatctggctggctgtggccacttttctgagtttaacatgggagatacctcaagagaccaccgtcgagtttgggcactggtaaaggcatctgcatcatgtcacattcaaccacaggatccagaagcaaagctaatctaatgttattgacatatttcactgaagcccataatctatgaggggttcacacagctgtgcctggggtgagatgtcaaagacaaatacttcatctagagctccagctgttgcaaca

SEQ ID NO: 294252 - DNA, 555 bp, Homo sapiens
gcaggtagttttctgtgagttttgtgtgggagactctgggtggagctctgagattaaagcaatgaggccccttagcttgggatatgccttagctaaaacttgagttgaagtggaaatgtaaaaaaaatattttatctgcactggataggatcaatgtatagtcacatttggaatgcaatgtggagactttttaggtattcatgagactttgcattgtttagaaataataggtgtccaagaccattcaaatgacagaagaaaaaatgaaacatgacctgaattgtctttaatccttatcttgtcaagactaaatagctgattatcatataaactaaactccatttgtattccagaattttctatctccttttcatctggctggctgtggccacttttctgagtttaacatgggagatacctcaagagaccaccgtcgagttygggcactggtaaaggcatctgcatcatgtcacattcaaccacaggatccagaagcaaagctaatctaatgttattgacatatttcactgaagcccataatctatgaggggttca

SEQ ID NO: 294253 - DNA, 579 bp, Homo sapiens
gaccaaacactaacagggattcaaaagaagaaaagatggtgccatgtgacaacatatcttcaactgagttgagctacttttttccctgaagaaacrtaagtagcaggccatgtgagaccaaagcttgctcaatattcctagtgtgatctgcttgtaatgagatcccccggctcatttctggattctcattgtgcagacccaagggagacatggtaagtctcttgacaaattgatgcagtgactagagctagacagaagaacttctcctctgagagtctcttcctaatcacagagtttaagggggcagctcttctagagccaaagcaaaaagggccaaacggactctgtgaatgtcaccctgtgctttagccagagtccagtgaaatgtaagtgacccaataatctaataaggctgagaatcaaataaggctaaacttttaaagacatcaagagtctgtcaattatttttccagacaaacaataatcagatttcctagaattgtaatgatcttttgtaaattagtcacaattattctaaaactgaacacagattccacagactgcagaaggtggatggac

SEQ ID NO: 294254 - DNA, 661 bp, Homo sapiens
ttattagttccaggaaggctttttattttttctcagtcaacaatagataatcatgtcatctgctaacaaatacagttttggttcttcttttacaatgtatataccttttacttccttgttttattgcattaagactttttcgatacaatgttaaataggaatgatgagaggggacatcttcccagtcttaggagaaaarcatctagttccttatcaagtatggtcatatctgtggatttggcaaaagatgctctttttcaagttgggtgttcccactcctattttctgaaagagattatggataattaatatactttcttgttaaatatttgtttcttaaattcaccagtgaaaccatctggccctggtgtttttatttttggaggattattaattatcaatttaatttcttcaatagatattgagctattcagatgatatatttctctgtgtgtgagttttggtaaattatgtctttcaaataatttttccatttcttctaagtaagtaagcaaatttgagagcatggaaacatttatattatattcatttattatccttttaatatccataggattggtagtaatttctgatattagcagtttgtgacttctttctttttttttttttggttagcctggctagaggcttatcaatctta

SEQ ID NO: 294255 - DNA, 551 bp, Homo sapiens
caactatatcttctctaattttctgctggctggatctgtcaattactgatagtgtggtgtggtgttgaagactgtgattataatagcgagtttgtcaatttctcctatttctatcagtttttgccttatgtattttggccctstcttgttaggcaattccctcaaaaccagctacaaaatatgctagatgttgtcatgggaaaaatggacaatatgcaggaacagatgaataatgtaagcagagcgaaggaaaccaggaaagaaccaaaagaaaatgttagaaataaaaaaatttgtaacagaaattaagaatacctttgatggatttgtcagtagactggatatggtcaaggaaagaatccagaagcttttttcattagaactcttagcatattaatcatagttattttaaattcccaggcttctaatcattccaagatctatgctctatctgtacgtggttctgatgcttacttgtctcttccgacttttcctcctgctttttgggatgtcttgtaatttttaataatttatacatgatgtattaggca

SEQ ID NO: 294256 - DNA, 609 bp, Homo sapiens
ggtaggtgcacaactaggtaggtgatggtggtagagtggtaggtgttacaagcctttcagtcaatttccagagactttaaatgattgcttcgataattctgatgagttgaaaagatgtctgttcaaaagaaggtttttgctgagctcctcatgttactattccctgagtttttgtgttttcattttgtgatttcgctaatatcctttttatcattataatttctttcaataaatacatctagccactcttgaagtatcaagtactggatccagcactaaggatgcagagataaatcctacttagtcggttttgggacggtaataatgtaattactctccctcacatggcagcaaaataggagcagtaaaggttacattacagggagctgcttacagttaatgaaggattctaactatcactrtggaggtggaaagctgcctacaggtgggctttgtgcaggaggcaacatttgattgggagctgaaaagatgagtgaaagtctgctttgtgacaaggaaaaaaggagcattgcagacagttggagagttcaggaagccaatgtgcaagccagttgtgttcagggctgtttagaaaatgcagaaattata

SEQ ID NO: 294257 - DNA, 482 bp, Homo sapiens
cagtctggctacagaagctttgccaggctgcaatgggctctgcccagtctgaacttgctgtctatctcaacactgtgaggggaaaatcgcttactcaagtctcagtaatggtagatgcccctccccgcaccaagctcaagctttccaggttgacttcagactgctctgctggcagcgagaatttccagccagtttattttagcttgctgggctccacaggggtaggacatgctgagcaagacctcttgtccccctggcttcagctccctttccaggggagtgaatggttctctctctctggggttccaggcaccatggggatatgaaaaaaatgtcctgcatctagattggtgtctgcttaaatgttcacccagttttgtgcttgaaacccagggccttggtggtgtaggcatccaagggaatctcctkgtctgcaggttgccaaaaccataagaaaagcatagtatctgggccagatagca

SEQ ID NO: 294258 - DNA, 622 bp, Homo sapiens
tgccttggtgggtgcttcattctttatctgctggcttttggcattaggttctcaaaggtttttcagaggtacgagggttgtggttgttactagatgtctcaaggtasctgagagggcttggggatggatgaagggtacaattaagagaatgggaacggtatgccagataagaaacatgggtaagtgatttatttttctcctaggcacataggtatctgaaaaggaacatgactaaataatcagaggaatctaatgttttctccttgcaccctttttcctacaaacctggttgaggaagtcttttcctcctaaattagagcaaagtcttcttgcatacatagcaaagctttgttttaggccagttgaaacccagacctcattcatagcatgcccctatgctttgtagccaaggcctaacctcatcattacagttctgctaattccacaaacgtttatcaaatgcctgttaaatggcaagtatactcccctgcatacacacctaatacaatttctaattgtgtacagaggtcttacttctgaaggttgaataaaattcttacatgttaccagatgggctccgttgagatctaaacaattttgcaaaatcctatttatatgtaag

SEQ ID NO: 294259 - DNA, 622 bp, Homo sapiens
tgccttggtgggtgcttcattctttatctgctggcttttggcattaggttctcaaaggtttttcagaggtacgagggttgtggttgttactagatgtctcaaggtagctgagagggcttggggatggatgaagggyacaattaagagaatgggaacggtatgccagataagaaacatgggtaagtgatttatttttctcctaggcacataggtatctgaaaaggaacatgactaaataatcagaggaatctaatgttttctccttgcaccctttttcctacaaacctggttgaggaagtcttttcctcctaaattagagcaaagtcttcttgcatacatagcaaagctttgttttaggccagttgaaacccagacctcattcatagcatgcccctatgctttgtagccaaggcctaacctcatcattacagttctgctaattccacaaacgtttatcaaatgcctgttaaatggcaagtatactcccctgcatacacacctaatacaatttctaattgtgtacagaggtcttacttctgaaggttgaataaaattcttacatgttaccagatgggctccgttgagatctaaacaattttgcaaaatcctatttatatgtaag

SEQ ID NO: 294260 - DNA, 407 bp, Homo sapiens
gagcctttgaagcttgtgaggctcaaagacatcaagacatcacgtggaatttcaggccctaaagtacacccrgatgtctttccctaactccctgtctacttgccttttgggtacaggataagatcattgagtttgctgcccaggaaaacatctaacaaggaagtgagatgccagtaagctttttgtagcattgccccctttttgtaaatgatgtttctttttagggaaatgaaaagatggggtgggtggaaatctcctatgaccacaaaattgtactccaaggctgcttccagcatcctctaatttcacctcttatttcactggggggagggactagaaggaagatgatatggtttggcagtgtcaccacccaaatctcaccttgaattatagctcccataattccc

SEQ ID NO: 294261 - DNA, 573 bp, Homo sapiens
agggaacaagcaccgtgaagatagtggtggtggtggtggtggtggtgtgagacgaggctggactcccacttatgcactcggacagtacatgcctgatggacagagacctctagctacattgacctgacttctgtgtggccccatggtatgaaaaagatggaggaagagggttggaagaagrgtggactatttttgtcttctgcacaatagttgctgcatcccagatccaactcaaggtaaatctgagagtcttaattgtcccctgcccccactcctatattccaatggacattggagattatcagtcattgaagaccttggaacctgttgcagagaattctcctcctccccacaccttgctttcctgacagtttttttcattgtcagggctaccctcacattcctgtgcagtattccatctcatcagccgctcctcagcgttaaccctaggtggacttctctccttctccacatcctccctgggtgaacccattcattctcatttcaaaagtgaccatctgtattcttctgattcctacagctatgtctctagctcagaccactctcctgaat

SEQ ID NO: 294262 - DNA, 615 bp, Homo sapiens
tgagcatttcaaattgctagtagagaataataagaatattcctagcagaaagaaaagataaatatttaaggtgatggatatactagttaacctgatttgatcattacgcattatatgagaataccaaattatcacatgtgctttgaaagtatgtacctatattgtatgttaataaaataataaagacataaaaatgttaaaatatatgatagagttcataggtttgtctaaattcttttagggaactctcaagtaacaacaatgacaacaatccaaaaaagcaaacttacagccattgccctaaactttattctaagtgcctagtttcaacctctcaaactttgagaataagaaaattaggtraagaacatacagggaaggtaaatagacctcagataaatacagatttagagttcatgggcacacactgttggatatgagctggtctttgcttggatctgggttcctttactatattgaggcccccgaactcacactgaagggggaacttcctttccctccctgactcagtgggagaccctttgaacccaactctctttttaaatctagtgcttcagcttctagaagacagggctatatatggaacagttttct

SEQ ID NO: 294263 - DNA, 615 bp, Homo sapiens
tgagcatttcaaattgctagtagagaataataagaatattcctagcagaaagaaaagataaatatttaaggtgatggatatactagttaacctgatttgatcattacgcattatatgagaataccaaattatcacatgtgctttgaaagtatgtacctatattgtatgttaataaaataataaagacataaaaatgttaaaatatatgatagagttcataggtttgtctaaattcttttagggaactctcaagtaacaacaatgacaacaatccaaaaaagcaaacttacagccattgccctaaactttattctaagtgcctagtttcaacctctcaaactttgagaataagaaaattaggtgaagaacatacagggaaggtaaatagacctcagataaatacaratttagagttcatgggcacacactgttggatatgagctggtctttgcttggatctgggttcctttactatattgaggcccccgaactcacactgaagggggaacttcctttccctccctgactcagtgggagaccctttgaacccaactctctttttaaatctagtgcttcagcttctagaagacagggctatatatggaacagttttct

SEQ ID NO: 294264 - DNA, 615 bp, Homo sapiens
tgagcatttcaaattgctagtagagaataataagaatattcctagcagaaagaaaagataaatatttaaggtgatggatatactagttaacctgatttgatcattacgcattatatgagaataccaaattatcacatgtgctttgaaagtatgtacctatattgtatgttaataaaataataaagacataaaaatgttaaaatatatgatagagttcataggtttgtctaaattcttttagggaactctcaagtaacaacaatgacaacaatccaaaaaagcaaacttacagccattgccctaaactttattctaagtgcctagtttcaacctctcaaactttgagaataagaaaattaggtgaagaacatacagggaaggtaaatagacctcagataaatacagatttagagttcatgggcacacactgttggatatgagctggtctttgcttggatctgggttcctttactatattgaggcccccgaactcacactgaagggggaacttcctttccctccctgactcagtgggagaccctttgaacccaaytctctttttaaatctagtgcttcagcttctagaagacagggctatatatggaacagttttct

SEQ ID NO: 294265 - DNA, 1023 bp, Homo sapiens
acaattcataatattcaagttgttagttatagagcaattaagagtaactataatcttgtaacaggtctacatgattctaggacaataggcaccaaatagctataaggaagcatgtcagagagcaagctcacataatgattattgatgaatgggctgcaagcttggtttattttcactagcccccttgccttcttccctgattaattttataaagtttataggaatggtttcattaagaagtagcaagtactttccatgttttagtaaggcctacatagtaagttgcacaaaaacaaagaagggggctgggcaccatrgctcacgcctgtaatatcaccactttgggaggccaaggcaggcggatcacaaggtcaggagttcgagaccagcctggccaacgtagtgaaaccccatctctactaaagaaatacaaaaaaattagccgggcatggtcatgtgcacctataatcccagctactcaggaagctgaggcaggataatcacttgaacccaggaggcagaggttgcagtgagccgagatgacgccactgcagtccaawtccattccagctagcgaactctgcaaggtctctgttgatagcaaaatccaggcctgtgagagaagctggtagaagaaatatacaggaaaatggtaggcccaaagagcacttgtgagcacaggctggctggagcctgatagcacaatgttaattatgggagcagtaacctgggcatgatagagtttgtaggagaaaacaaaccttaaaaggaaataaataaccttaaagttcagatggaaggtccattagccagcaaaattgctatgaccatgaaaacaaaatggttacttcaggcagcagatcaagaatagagaggagaaaattgaaagaattgccaagwagccattagaataatgaaaaggaagctagataatgaatttgacctctgcattagtttgctggggatgcactcagtactacagattgggtggcttcacatcagaagtgtatttcctttcagttc

SEQ ID NO: 294266 - DNA, 533 bp, Homo sapiens
tgattgtaggtttcctgaggcctcttagtcatgcttcctgttaagcctgtggaactgtgagtcaatgaaaccatttttcttcaaaaattacccagtctcagatagttctttatagcagtgtgaaaacagactaatacaggtcsacagactagaaaaggaatcaacttctggtgttggagaacaggacttacaaatgtaaacatccaaaatagtagttagttaatatcaacataaaaagggctaagtaatcaatctgtcctaagagatggaatgtgtcttaagtggaatatgctactgatgacactaaggcactttctcaagtcccatctcatttccaaaattctgtcaacaagaggccaatctaaatgtaatacactgtcaattttggtcttctaacatattcatgccaaatgcaagcagaagagtattagtttgcatggagtatagaaaaaataatcagaagaggaagaatttgcaatatatttttctatctctgtccttgagtaggtttgctttaaggtgaaccctgtaga

SEQ ID NO: 294267 - DNA, 533 bp, Homo sapiens
tgattgtaggtttcctgaggcctcttagtcatgcttcctgttaagcctgtggaactgtgagtcaatgaaaccatttttcttcaaaaattacccagtctcagatagttctttatagcagtgtgaaaacagactaatacaggtccacagactagaaaaggaatcaacttctggtgttggagaacaggacttacaaatgtaaacatccaaaatagtagttagttaatatcaacataaaaagggctaagtaatcaatctgtcctaagagatggaatgtgtcttaagtggaatatgctactgatgacactaaggcactttctcaagtcccatctcatttccaaaattckgtcaacaagaggccaatctaaatgtaatacactgtcaattttggtcttctaacatattcatgccaaatgcaagcagaagagtattagtttgcatggagtatagaaaaaataatcagaagaggaagaatttgcaatatatttttctatctctgtccttgagtaggtttgctttaaggtgaaccctgtaga

SEQ ID NO: 294268 - DNA, 508 bp, Homo sapiens
tgctaaatcataagcaattttacatgttgctataaactctttgtaaccatcaaaattcctttaaatgtatacagcataatttaacattttttttgtcaatgtgcctttaagtttttaatgatttgctagtagtattaatatgctataaacttaggccaaaagttccccttacccactcatatttggaattatcktctcagaatcaattccctgaagtagaaaacccaggccagggattatggttccaaatgcacattgtcaaattgtgaagcttgcattgaaggtaactttggatgagatatttcttctgaataaactcttagaaaagtggtctatctttggccacttgaacatagccagtgtctttattaagactaatacatattaatgtggaagaaatagatcaattaagacaaaaatgtccaacagaaaaacacaaatagattctcttaatatttaaatgcatgctatgtaaactgccttaggccattattttaatagcatagta

SEQ ID NO: 294269 - DNA, 557 bp, Homo sapiens
ggttgtaccattttgttttcccactagcagtgaatgagagttcctttgttctgcatccttgccagcttggtattgtcagttttttaaagccattctaatagatatgtagtggtatctcattcttgtttttaatttccatttccctaatgacagatgatattgagtatcttttcatatgctgtttgccatctgtcttctttgttgaggtgtcttttgcccatttaaaaaatttggttcttttcttattgtttggagaattctttgcatattttagatacaagtcctttatcagatatgagttttgcagtccagtctgtggttttgcytttcatcttaacagtgtccttagtagagaagaagtttttaatttcagtctagtccaacattcattttttttctttcatggattatgcttttgttgttgtatctaacttatcaccaaactaaatgtcatttagattttcccctgtattttcttctagaaattttatagttttgtgttttacatttaggtttataatcatttctgaggtacagatgtgtgtataaggcataag

SEQ ID NO: 294270 - DNA, 575 bp, Homo sapiens
atgagctagtgatgtagagggaagtaaggaaggacccctttccctgcctgtgctccagggacccagcatgycccgatccgacttccctggtctcagtggaattgagaggattgtgggtagtctcgtcttctacctcaaaccccaggtacccaggcatagaaaaatctcaagttactgggttcttaggaagatagagccatgatttgggaccgtaatttggaatttttttttaaatgtgaattttagctagctaggaataatttggaattttaactaagaatataaatgtgttcgttcatttaggcttcattattcagcttcaagacatagaattttccaacatgtttgccatgatgcattatatgtaatgcaagcaagagtcactagtaacaacagaatcatgtgatgttgcacatggtctccccttctcacccacagccaaagacaggcaggcaagtgggctagttaatgcaggtgggaccatgtttgaaacagtctctaaggaggttgcctggtatgaattagctataagctattctataaaaagagctacaagctttaaaagcctagcagca

SEQ ID NO: 294271 - DNA, 616 bp, Homo sapiens
atgagtccattctgaagcccctttggacgatggcaggttatggtagtgcacagtaaagagcacaggctcaagagtcaggcagatctgagttgaatcctgagtctagtgytttgtggataaccataggcaagtgactcagcctaagcctctgtctccttgtccataaaatgggagtaatgttaaataactacctcagagttttgttgaaggaattgaattaagtaattgtttagcacagtgtctagcacacagatgctcgataaatggtggctatagttaaattcagttggcacttgtgttttcatttccaatctattgtgaagtagggagagggcaagcaggtattattgaattccttttataccttaagagacttgtaatctgaagatgttagatgatataatgataaactggtaagaatagaacccagagctcttgtgctcagtagtattttcacttcatttacaagactcttgggtcaaatgcacgtatctcaaaggctgtcatttcaaactataacaaacataatctcataaaactcagtatctggctttctgtctttagttggcccctccagtctattctctggagatagcagagaaaccaacctactaca

SEQ ID NO: 294272 - DNA, 1053 bp, Homo sapiens
  misc_feature (1)...(1053): n = A,T,C or G
ctgagtgtgacaggcgtggaaaggtaggggcctgaccaagtggtggggccttttgatcaacccctctaacaccgccctctcctgccctctgggctgattgacgcagagctgtcttatcagtgatgctgtcttactcctgtgatggttttcttctgtgagggttgagctgcggctgcttccaktcttgtttctcagacattcttttctcgtctgctctctattatccaggaattcctaaaactttctggtctgctgatagttcatcgtttgtggtggtggtgttgctcatttgttttccaatgtcattttgcatgttaaaatatcttttctgccaaacctttagcatggcagacaaaaatctggctaaaatgaagagattagcaaggtgctgcttgttggtcctgaatggacttccatttaaactcccgctgatctcaacataggtactgagtatctttagctggtctaagatgggaatttattnnnnnnnnnnnnnnnnnnnnnnnnnnnnnnnnnnnnnnnnnnnwctgagtgtgacaggcgtggaaaggtaggggcctgaccaagtggtggggccttttgatcaacccctctaacaccgccctctcctgccctctgggctgattgacgcagagctgtcttatcagtgatgctgtcttactcctgtgatggttttcttctgtgagggttgagctgcggctgcttccattcttgtttctcagacattcttttctcgtctgctctctattatccaggaawtcctaaaactttctggtctgctgatagttcatcgtttgtggtggtggtgttgctcatttgttttccaatgtcattttgcatgttaaaatatcttttctgccaaacctttagcatggcagacaaaaatctggctaaaatgaagagattagcaaggtgctgcttgttggtcctgaatggacttccatttaaactcccgctgatctcaacataggtactgagtatctttagctggtctaagatgggaatttattnnnnnnnnnnnnnnnnnnnnnnnnnnnnnnnnnnnnnnnnnnn

SEQ ID NO: 294273 - DNA, 553 bp, Homo sapiens
tgggattgtttggttgaatggtaattccttattaagttctttgaaaaatcaccaaattgctttccgcaatggccaaactaattcacattcccagcagcagtgcgtgtaagcattcccttttctctgcaacctcaccagcatatttttagactttgtaatttttttattctgtctggtgtgagatggtgcctcattatggttttgatttgcatttctctaatgatgagtgattttgagtatttttttcatatgcttgttggccacatgtatgtcctctttcgaaaagtatctgttcacatcytttgccctctttgtaatagggtttgtgtgttttttgcttcttacttatttatggattctggctattatacatttattagatgcacagtttgcaaatatttatcaaattatataagttgtatgtttactctgtttattttgttttgctgtgcagatgttctttagtttaattagtcccacttgccaatttttgtttttgttgcaattgattttggcatattaatcatgaaatctttgccagatcctatgtcaa

SEQ ID NO: 294274 - DNA, 1066 bp, Homo sapiens
tacgtgtctaaagcaacctcaattcttgcctcctcagattttttattttgactgaagggcataagggagaaaaagagaccaagggaagttttagagcaggagtggaagtttattttaaaaggctttagaacaagaaagaaaggaaagtatgcttggaagagactcagtgagcagcttaaataacaagtgtggtgtttaacctggatcctaggactctataggctggcccctttcttgtgatttttcccttagggtgggctgcctgcatgcacagtgtgcttcttgcccttgggaagtgagcatgcacagtgtgtttaagaagttgtatgtatgttcatctgagatactcctcactttcccggtggattgctgacagaaggtcataccctgccattttttctcttaatgtgcacscctgggctcatgagaccattacctgagattttattggaagccctttttgctactccctggcacctgaattcaattaacacgttaatattaacagctgtggatcatwcagcatagtgcccatcactcactcacttcctctagtcccttctcaggcaaaggcatggaattctcccgtttaccttgagccaagtgcaggccatcacaagaatgtaccttgctcactggagcttaaggatcctaggagttgataggagaggctacacagcacaggctatggtggaagagacagaaagcccaggcttgacttgcaacaagatgtatgtgttctaccaccagcaaaatgagatggcctggggggatctttctctaggggactgcctggaagtttaaaagaaccttcagtgagagaagtgccagatttctttgatgtaaaagatgatcaagaagttctaagtaaggtgccaccaatgggctggacattgtctaggtgaaggtgaatgcagtcacaggtcactagtggggwatgtcagaatccacaaaaatggtacctgagaaagattcagcaaggatacatcaaccacagagagggtaccaacccgtgattacagtgaactcggccatgtttgactgtgcagcttttagcaaatcctcc

SEQ ID NO: 294275 - DNA, 1220 bp, Homo sapiens
gcattgtgtgacacatagaagacaatatttgtttatatagaaataaaatctgactttgggaaggcagttattcaaaataataccatttctaatattaatgctcatggttttttaattgtcttattttatttctcaraaatattcccatcttccatatattgaatttagaaaggctgaatgtctgaataagagaagaatcattaacttatgagtgttttatttttgttttttgagacggagtcttactctgtcacccaggctggagtgctgtggcatgaccttgactcacttcaacttctgcctcttgggttcaaacaattctcctgcctcagcctcctgtgtagctgggattacaggtgcctgccaccatgcctggcaaattttgtattttttagtagagacagggtttcacaatgttggccaggctggtcttgaactcctgacctcaggtgatccacccacctcggcctcccaaagtgctggaattacaggcatgagccactgagcccagccaaacttatggttttaaggtttatgttttttctattattgttaaaatctcaatttcattttctttttgctttggtcttatgtgcctaactctcccaacattttgwtaccagcaaaatagatcatcttatttgataatagagcagtaccatcaaccttattttgatttttaggtgtgaggctgcattccagttttgattgctgatactgawgatgaactcgctcctgaagttaatcactctcctcacacacataaagaaatttaacttctggttgctgtaacagtcaaaggttgctatacatagtgcttgcaataaattctgattggatctttagagttgaagttataggaaatgtcaactcacacagcactaacccattcctgattacagccccccaggatgctgattgcaatgtagaaaactttgtaaaggacaagggttgtgtgtcattgtcagcgaactttgaaacaataattgtgattttatgactatttgttattactgattgtatgtcaagcgaaaaaaaacctctaatgcatttttaggctcttaatgccttctaaattttacataaagtagactagctatttctgctgtataagcagattactaatcattcatttggtccctttctgggtagcaagttgatacttaatattcaagagccctgcatccttagatttaacactgcagtgatattttaaaaat

SEQ ID NO: 294276 - DNA, 552 bp, Homo sapiens
taatcactctcctcacacacataaagaaatttaacttctggttgctgtarcagtcaaaggttgctatacatagtgcttgcaataaattctgattggatctttagagttgaagttataggaaatgtcaactcacacagcactaacccattcctgattacagccccccaggatgctgattgcaatgtagaaaactttgtaaaggacaagggttgtgtgtcattgtcagcgaactttgaaacaataattgtgattttatgactatttgttattactgattgtatgtcaagcgaaaaaaaacctctaatgcatttttaggctcttaatgccttctaaattttacataaagtagactagctatttctgctgtataagcagattactaatcattcatttggtccctttctgggtagcaagttgatacttaatattcaagagccctgcatccttagatttaacactgcagtgatattttaaaaattatcctttgtagcaaagaaacaacataaccacaatttatgaccttaatgtgtacttgttcaataaacaaatcac

SEQ ID NO: 294277 - DNA, 530 bp, Homo sapiens
gaccccagactcacaggcgcatctcctccacgcttgccttaggccgcctcctcggcctggaatgccattcctccttcctacccgtttagaccccatttcctacccgttttgatcctacttccaggcccagcacggatgctgcttttctgtggagcctctccggtgccctagtcagacagtatggagggtatccctgagtgctcatctctgtagcagggttactttgtcctgtcgggcgtgacagtgaacgttcaccttctctgcttggcattacagacagcattcgcttagaaatgtgggctcatgggtgagagctggagggggtygaaggcaacatctagtttgagcctcttattctatagacatatctgtctcctccgcatgagaggcgtctctgtcacctgggtctgtcttataggaatggagggccggcctgtcataactttaaagacagtgtgggtgtatggacatgcgagtgtgtgtgtgtgtgaagggtgtgtgtgtgtgtgtgtgtgtgtgtgtgtgtgtgt

SEQ ID NO: 294278 - DNA, 530 bp, Homo sapiens
gaccccagactcacaggcgcatctcctccacgcttgccttaggccgcctcctcggcctggaatgccattcctccttcctacccgtttagaccccatttcctacccgttttgatcctacttccaggcccagcacggatgctgcttttctgtggagcctctccggtgccctagtcagacagtatggagggtatccctgagtgctcatctctgtagcagggttactttgtcctgtcgggcgtgacagtgaacgttcaccttctctgcttggcattacagacagcattcgcttagaaatgtgggctcatgggtgagagctggagggggtcgaaggcaacatctagtttgagcctcttattctatagacatatctgtctcctccgcatgagaggcrtctctgtcacctgggtctgtcttataggaatggagggccggcctgtcataactttaaagacagtgtgggtgtatggacatgcgagtgtgtgtgtgtgtgaagggtgtgtgtgtgtgtgtgtgtgtgtgtgtgtgtgtgt

SEQ ID NO: 294279 - DNA, 608 bp, Homo sapiens
gatggcaaccctagctcatttgtggcttaggctgaccacccttgaattttgtgttatgtgatattaataaatccttacttgatcaagatatttcaattgattatgtcatgtaaattaaattctctttggatgaaacatctagtattttttgttaaaataataggtcattttaacagcattgagagctaaaagcagacccatgactatggaaacttaatatttcaaagttggtatatcaaattagtgaagagtagatggataattattkgtgttgggacaactatatactggacaaaaaaatttctttacactatacacaataatacagttcatattgaattgcagttgatattaaaacataagataaatttggagtacgtgagattttctaaataactcaaagtataaagtcataaaggaaaataaagatctgtctattacattattattgaagatttctggatcacaaaaagccccataaacaaagttaaaactcaaatgacaggcaaatgcatgtgatgtatcttgacagccatagacatagaaatagagagattattaaaatccataatatgtaaggtactcttctataccaataaggcaaaaca

SEQ ID NO: 294280 - DNA, 622 bp, Homo sapiens
ttagcatgggggtggtacaaattcatattgatcaaatgcaattagacattgtactagataatttggaatatgttaatatgtagactggtgattgttagtttagttttaacctgagaaaactgatgctcagaaagatgcagtgatttgctcaagacacacagttattaaatgatgaaatgggatataacctctggtatttctgactgcaaaactcatcttctgtgaagaactaaattaagttgtatttaattcctgagctgcggttccttcgtaaatgagcttaggtttacaatctgaatttggtcttacaactctaggcagtgctccggtctgccacgttatacactgggcacactctgtgaaagtgtaagaggtattctgggtgacctatccaattagaagaagaaccaatgtcctatatattaacctcagaggaagaaaagacttcttcttagtattttcacrgtaggatgttgtacttaataaccctgaatctgaaaaatcaagaacataaaaaaagtcctaattacaacttttcaggcatctgggggaggtccaagaattagctattttttcttcagtaaaatgagagaatgttagacctggtaggtaatcagagatt

SEQ ID NO: 294281 - DNA, 552 bp, Homo sapiens
aaacttaaaacaaaaaattaatcacaatacaaacctctttttttttccctgacagagttttcaattaagaaaaaaactagatctgtgtcctcagtaattaaaataggataagaagtaaattatgtattaataatgagggaaacactttcaatcttcatagattgactataatctggagaaaattttactgtaacttaaatgttattatttccttcattctacaagtacttatctggcttgtttaatttgcgtttcctggatacctgaagatgctggtgtatgtatgtatatatatatatatatatatayacacacacacattcattgttagtttcaatttactaatattttattttggattttagttccaacatgcataagtgaaacaggtttacagttttcctttcttgcaagtatgctttttgtgtagcagttaagaaaagagacactgaaactagactgcctgggttcaaatcccagctcagtcacttactagctctgttaaccttgactttgtgaaggcacttatccagagggttcagctatctatag

SEQ ID NO: 294282 - DNA, 570 bp, Homo sapiens
acaaccaggaatactctagttatgagttgttatgaaggttcatgggtaaccatattattactataacgtttaactcacatatattctaaacttaggrggaaagtctctatttgcttagaagtcatgcttatttgctaacttgttatgtttctatctttaagtagggagaaacatgaagaggaagacaatagagtttggatgagctgctgcccagagccctttgtttctgtcctcaggtaaaaatatcctctagacctgattcccattggatggcagccttgtggaccctgcagagatgtcaccgtagagaaccttctgtcagctacccccagtcactaaaggaaggatagaaggatctgtgacctggaagtttaggactttgcagaatgtaacttttaggatgaaggctggaaacagtgcaaataatatctggacactgtttcacactctgttcgttgcaaaaaagggcatttaaaaccctccctttgatgtgatgaaatttccattgcactgacatttaaaaaaaaaatcagagtacggcctggcatagagagaaaaggaaactccaat

SEQ ID NO: 294283 - DNA, 570 bp, Homo sapiens
acaaccaggaatactctagttatgagttgttatgaaggttcatgggtaaccatattattactataacgtttaactcacatatattctaaacttagggggaaagtctctatttgcttagaagtcatgcttatttgctaacttgttatgtttctatctttaagtagggagaaacatgaagaggaagacaatagagtttggatgagctgctgcccagagccctttgtttctgtcctcaggtaaaaatatcctctagacctgattcccattggatggcagccttgtggaccctgcagagatgtcaccgtagakaaccttctgtcagctacccccagtcactaaaggaaggatagaaggatctgtgacctggaagtttaggactttgcagaatgtaacttttaggatgaaggctggaaacagtgcaaataatatctggacactgtttcacactctgttcgttgcaaaaaagggcatttaaaaccctccctttgatgtgatgaaatttccattgcactgacatttaaaaaaaaaatcagagtacggcctggcatagagagaaaaggaaactccaat

SEQ ID NO: 294284 - DNA, 570 bp, Homo sapiens
acaaccaggaatactctagttatgagttgttatgaaggttcatgggtaaccatattattactataacgtttaactcacatatattctaaacttagggggaaagtctctatttgcttagaagtcatgcttatttgctaacttgttatgtttctatctttaagtagggagaaacatgaagaggaagacaatagagtttggatgagctgctgcccagagccctttgtttctgtcctcaggtaaaaatatcctctagacctgattcccattggatggcagccttgtggaccctgcagagatgtcaccgtagagaaccttctgtcagctacccccagtcactaaaggaaggatagaaggatctgtgacctggaagtttaggactttgcagaatgtaacttttaggatgaaggctggaaacagtgcaaataatatctggacactgtttcacactctgttcgttgcaaaaaagggcatttaaaaccctccctttgatgtgatgaratttccattgcactgacatttaaaaaaaaaatcagagtacggcctggcatagagagaaaaggaaactccaat

SEQ ID NO: 294285 - DNA, 546 bp, Homo sapiens
ggagggttctttctttctctatcttggggaatagtatcaaaagtattggcaccaattcttctttgaatgtgtggtagaattctgctgtgaatccatctggtcctggacttttttttttgttggtaattttctaattaccacttcaatctcgctgcttgttatcaatctgttcaggtaatctaattctttctgatttaakctaggagggttgtatttttgcaggaatttatccatctcttctaggttttctagtttatgtgcataaaggtgttcatagtagacttaaatgatcttttgtatttcagtggtgacagttgtaatacctcgcgtttcatttcttagtgaggttattggattttctcccttcttttcttggttaatcttgttaatggtctatcaattttatttatcccttcaaggaaccagctttttgttttatttatcttttgggttttttgtttgtttgcttgcttgtttgtttcaatttcacttaattctgctctaatcttggttatttcctttgttctgctgggtttgggtttagtt

SEQ ID NO: 294286 - DNA, 506 bp, Homo sapiens
gtatcttttctaaaacttgttatatttctatactgatcattttctctattargtaaacatttcatataggaaaaataaaagtttttaaaaacactgttagatatttaaaaataaaaactgtcttaaccaatacttgtaagttttttaattagagaataattttcaagctctgtcctttcttcagagtaattaatttttttgtttctaaagtgtttaccttctcagttttattgtatttgatgaattttgttttcaataaatatgttttgacatcaagatttaagttttcttgtttcaaaggagatttgtaatattagtaaatcattcacctctaaatgttttacgtagatggatgtagtttattttgttattttcactttgtaatgtatttactataaatattttctgcttatgattatatgaaataagagtgttttctgaaaatgtactttttttctcttaagtatgtattattttaaattaaaacaatcattcttttaagttgt

SEQ ID NO: 294287 - DNA, 609 bp, Homo sapiens
tgacaatgtctcataaatatcttaagctttcttaattacttttcaatcttctttttttcttgtctgactgggtaatttcaaatgacctgctttcaagttcacagattatttcttctaattgatcaagtgtaatgctaaagctctctattgcacttttcatttcattaactgtattacgttgctatcttaacatctgaatcagtcttacgttgccatcttaacatatgaagcagtcacctcctgcggtctttactgactggctttgggaaacaaacagcttcaccaagcttctcttagacattttcaatagatgtacccactccataccttcagccattaccgtttagggagaattcytaagactatatgctttctttggatcccattaaactaggctgggtgttgagaatatcccatgttttttttgtgggggtagtgccctgaaatgctcaagtttgtgtgcattctctaaatcccaaagagttgtgccagctgactgtgcttgcattccccatctagggggtgcacatgacagccagccatggggaaggagggcagtaatgcatatgaagagttggaatcacctgtgggccagctggtgtggtggta

SEQ ID NO: 294288 - DNA, 638 bp, Homo sapiens
tcattttgcttggtaaaattgccctaggaactgaggatttacttttccaatgtcatgagtgtgggcccagggctgtgataatcttatgcattctgttaacagtttagactcttaaaatcatgaagctcaaaagaacattttttgttgtrgtcctaaataaatggatgtctaaacgaacagcccagacgggactcctgaaggaacctcagtcttatctctacctcagctatacctctgaatgaaagtctaggctgaggttgagcataataaaaccaaaattagggatgttgaatttttgactttttaagactttctgttgattacgttaatgctagttgccataacaagcaaaccctggacttttgacataaaattctgtcttttgtggtgatagagtgtttgccctatgcagtcctatgaaaactcattctgatgaagactttggtaacatggttgcgtgatctgtagggttattcttgttgtagatattcatcaggtggaggggacaaatgagagagaatggaggaacatatccaggcttttatgaacctggtctggacctgggggaacataccacttctgcccccatctcattggcagaactcaactatttggccacacttagatgaaagggagtc

SEQ ID NO: 294289 - DNA, 602 bp, Homo sapiens
ttactattatgttaaaaattacagtggtcaaatatgtttgggatacactggattaataaaatgagacatttctcttctgaaagattttggagttgttattatgctaatactcagtgatcctccaaaggacaaatagaatttgcagtgttttccaaacttttttcaccatgaaaactttgttttctctgagcacatttttcaaaactaatgtcaaagaactgagttgaggaatataaataaataagaaggggatttcaaaaagatttttttaaaaaagataatacaaaagaatctttctactattaccactctagtcaggagctgttttcatgtcccagagtcttgcacagtggctaagagttctagtgctaaaatcagataatctggctttgagtaccagctctatcatttacccactgcgtgatcttaggcaagatcatgaacttctctgagcctctacatcctcatttgcaaaacggtagtagtcaccatgttagcagtggtattatagttatccatacgagtstgcagcaacctcaattattgcctactcagaagaaagcatttgactgaggggcgtaaggcaaaaggaaagaccaagg

SEQ ID NO: 294290 - DNA, 611 bp, Homo sapiens
ttacaaaacactgaaatttaggcatcactgcccatgtttccaggtggcaaaacaaagactaagagaggaatgtgattgcccastcacacagcaagtagggtagagcctggatttttaaactcagatctatctacctcaacagcctttgtctgcccttagagcatcctgtcttcagggtccctgcgaaccaaagcaccagtgctgagtaaagcattaggtcttcggttacaactctgttaacccaactgaccaggattaaaatggctcagaataggtgatctcaaaagatgtgactctgtttgcatcattgcctctataataaatcaaccctctgtaaattggttaacaaaatatggacatataaagcaaacaaagatcagtaaacttcttctgtgaggaaccagatagtaaatatttttggctttgtaggccatacaatctctgtcgtgacttcttaactctgccaccgtagaatgcagccatagacaaaacataatgaatggatacaattctgttacaatacaactgtatttacaataggaggcaggataaatttggcccactgatttgctaacctctgaaacaatgggaaggtagatggtgttttttta

SEQ ID NO: 294291 - DNA, 476 bp, Homo sapiens
aaatgtccctacctatacattatgctaggaaccagaaaactgaaataaatttgacagaggtcctactttcaaagacgaccacaatacaaaaattaggatctgggatcagtctcatagtcaacttatgtgggatccaggatcctgaaaagattctgttaggcagacagagcagtacatgggaggatgaaggacaaaagtgtgcagtgtggagtttrtgcaggagcacctggtagaactacaggaccacataatataagaaaaagagatggacccccagcccacctatgagtggggaagagtgatttctaactcaacaaagcaggtttctggtgctttaaggaatgggcaaatggggattggcctgcagacactttcagggggactgactgatgaagcaggctggtgctgacagcaacagagcaatggcctcagctgtggaaattcagcgccattcaattctttcagcactactgtca

SEQ ID NO: 294292 - DNA, 545 bp, Homo sapiens
acagagcttgcttcttcctgtgcaaaaaagcatgaatttgggtaggaaaaaaagagatctgaatttaatagaaaaccacagtgatggaaaagaaatttaattgtatatgcattttttttttctcttggcttatcctaagaagcatccattgaagataaaaggaaaaaaatgctttctaaaatcgggggtggggtctcctggagtcccttctttgctctcccacctcagctgctacccaggcagttgacaccctttgccagtcaagaaaatttctcctaaacccaagaataagctatgctgtccagagcaccatcttttagaacatgcttyaccttctacttaaaatgtcctttccctgctcgtctatctggtaacctcaggacaaatgccccgtgggacaaatgtccctcggggcagccttacctcgaccctgcagcaaatggaaagcacttactctagtcactcagtatgcatggttgctccttcattataacacttattctttagatcataatttaaatagaatgatgatagtaatagcaacc

SEQ ID NO: 294293 - DNA, 495 bp, Homo sapiens
ccacaaggtaactcacttagcactaaaataagattacttatttagattctggttttatagttgcattgtggtttttgatttgttttgttttgttttttgagacaggttctcactctctttcccagactgaagggcagtggtacaactgcggctcactgtagcctcaatcttccaggcccaagccatcctcctgactcagcctcctgagtagctaggccaaaggtgcatgccaccatgcctggctaatttttttaatttttttttttttttttttttttttarattcagtgtctcactatggtgcccagtctggtctcgaactcctgggctcaatcttcccacctcagcctcccaaagtgttggtattacaggcgtgagccaccatgcctggcctatagttgcattctcttaataatgaagtagagtaaggacctagatattttgacagcaggacctaaaaaaaaataacttattttctaactgaagaggaagaag

SEQ ID NO: 294294 - DNA, 364 bp, Homo sapiens
acctaatcagactcctgcttctggtttctggggagtttggcccctgaccctgcctccttcttataaaagctagagaaggagctacacactctctaggggccaacatctatgtgttttccatcatgctgctctcttctgaggaacaggatttctgctatgatttccattttcttggctatgtccttgctacctgctgagagatatcccagatgctgactggccactaataatagtctggctgcctgtttgccatctgttcctgaattagcagctrccattctctacccacttccaccacatcctgagttggatcttactgaaataccaatgattgtaccagactatccacagccaaaaactacct

SEQ ID NO: 294295 - DNA, 534 bp, Homo sapiens
tctggctgcctgtttgccatctgttcctgaattagcagctgccattctctacccacttccaccacatcctgagttggatcttactgaaataccaatgattgtaccagactatccacagccaaaaactacctattgtgtgaccctacagagactttatccagcctagtaggctgtccttctctcagaatccatagaaaagtctctgcctctgtcctcctctttccatctcgacactggtcaggcaccatctctctcccgaatgatggtaataactggtctccctgcattctgtgatacctctttacaatctattttctaaacagaagctgaataagtyacaacaccagttctctcctgaaagctctgaagcatctaaaatgaaatctaaactccttaccgtggctgaggctccaagagctgagcctccatctccatatctttcatgtcagtttctacctggttcctacattttaagccagtggctctcaaacattttgacgaagacccacagtgagaaagaaattttgcatcatg

SEQ ID NO: 294296 - DNA, 619 bp, Homo sapiens
accattagaactcatgcttcacctcaagatttttgcgtagattgctgttctttttactccactctcacctttcaaattcaaagccacagagagaccttctctgaccacctaatctaaatttgccagtgcccatcaactctgtaataataccatgttttaattatgtcataaaagttttgattacctgaaattatttcatccattaattgacttatgatctctccatgccccctctcctttggagagtttaggaaaactctccaagtgtgggaaatttgcttgccttgctttctggtctgcccccaatatctamaagatcctgacccatagtgggtgctttatgaataagtaaataaaactccttgaatcctggtatgactgaaggccccatttacttgtttcactttgtcaatcttcttcactccatttatggtttatatatgtgagccataccaaccatgaaccttgttttttttcagacagaagtagttccatacttttgctctgacacctctaagagcaaccccttcccccacattcctaaaaacctcttgattgtttggggatgctgtccctgaatttatccagcactatgatgtaagggaatgagcataaacag

SEQ ID NO: 294297 - DNA, 553 bp, Homo sapiens
gaaaagaaaatcccattttctgaggagaaattcaagctggctgcagaaattttcctaagtaacaaccgaatgttaatgcctaagacaatggggaaaatatytccagggcatgttagaggtcaaggcagcccctcccatcataggcccagaggcctaggaggaaaacatggtttcatgggtcaggctcagggtccctgtgctgtgtgcagcctagggacttggtgccctgtgtcccagccactccagccatggctgaaaggggtcaatgtacagctccagctggggcctcaaagagtgcaagccccaagccttggcagcttccacatggtgttgagcctgtgagtgcacagaagtcaagaattggggtttgggaacttccacctagatttcagaaagttaatggaaatgcctggatgcccaggcagaagtttgctgcaggggtgggaccttcatggagaacctctcctaggacagtgcagaaagaaagtgtggggtcagagctcccacacagagtccctactagggcaccacctagtggagctgtgagaaaagg

SEQ ID NO: 294298 - DNA, 1129 bp, Homo sapiens
gaaaagaaaatcccattttctgaggagaaattcaagctggctgcagaaattttcctaagtaacaaccgaatgttaatgcctaagacaatggggaaaatatctccagggcatgttagaggtcaaggcagcccctcccatcataggcccagaggcctaggaggaaaacatggtttcatgggtcaggctcagggtccctgtgctgtktgcagcctagggacttggtgccctgtgtcccagccactccagccatggctgaaaggggtcaatgtacagctccagctggggcctcaaagagtgcaagccccaagccttggcagcttccacatggtgttgagcctgtgagtgcacagaagtcaagaattggggtttgggaacttccacctagatttcagaaagttaatggaaatgcctggatgcccaggcagaagtttgctgcaggggtgggaccttcatggagaacctctcctaggacagtgcagaaagaaagtgtggggtcagagctcccacacagagtccctactagggcaccacctagtggagctgtgagaaaaggwtggctatgcgttgtattaaagttgtgawttctgctagtgttatttttaatgtttagataaaaaaagatttgtaatatttctcttaaaatgtttgaatctatgctacttaaaattgtagaaaaaaaattttgttttagaaaatagttttggtatagaactctttcataggtctaccgatactgtttcttttttcatatgtatatttagatgtgtgcatacatacatgtgatatatatacacacacacatatgtgagcttatccaaatgtggatatatatatgtacaaacacacacatacagacttttagaatgcacttttactcttaaaagtgttgtggtttggatgataaagtatatgaatcttaaaatatcctaaaaatatttttcttttgagaatacttccaagactgaaacatatgaagcattatcaagcattatctctccaggtcaccttgcgttattgtaaaaaaaaaaaaaaaagaaaaggaactctgaagtcaggcaaacttgggtttaaatgaaggctccaccaataagtagtagtgtcttgatttaagttcccgtttgccagagac

SEQ ID NO: 294299 - DNA, 561 bp, Homo sapiens
gactatataacaaagtttatcataagagtattagttgaaaggtaaccagcagaatgaaattcaatttttgcaaaataacagacaatataagtataagagcaagacaaagaaagcaaataagatagtctacatgaggctgggcgcagtggctcatgcctgtaatcccagcactttggaaggctgaggtgggaggatcacaaggccaggagatcgagaccatcctggctaacacggtgaaaccctgtctctacaaaatacaaaaaaaaaaaattagccgggtgcgttggcgggctcctgtagtcccagctactcaggaggctgaggcaggagaatggcgtgaacccgggaggtggagcttgcagtgggctgagatcacgtcactgcactccagcctgggtgacagagtgagactctgtctcaaaaaaaaaaaaaaaaaaaaaaaaaggtagtctacatgatgaattactatggcttgatattcaraaaatgaatcacaaatatttgtggtatgttgttgatattactctaaaactgttgtctgcatattacatgatgaaacaa

SEQ ID NO: 294300 - DNA, 537 bp, Homo sapiens
ttatttatatcctgttctaatttataacatctatctatatctacgtatatatgtgtgtgtgtatatatataaggttggtgcaaaagtaattgtgtttttgccattaaaggtaattgcaaaaaaacacaattagtgttgcaccaaactaatatgtaaaaaattatctttgatggtattaaggaatgctgctagcttttaggcatgacaataatgttgttaaaatgaaaaaaaaaacatctagtcagatacttaagccatcatttttgaaaataataacaaaaattaaaccagaatagtcttggaataatcaagattctgaatttctcaggtaggttatcatttggatttctagacaaattcrgacacttgattgttttttgatactgggtcagccccttatagaaaagataaggtatatgaaagttcttataattcagtaaagtcacttgaactgaatttttgagcctcagtttatctgattaactctaaatggcttcctacattgactttccctggctctaggtcaaagagttgcca

SEQ ID NO: 294301 - DNA, 537 bp, Homo sapiens
ttatttatatcctgttctaatttataacatctatctatatctacgtatatatgtgtgtgtgtatatatataaggttggtgcaaaagtaattgtgtttttgccattaaaggtaattgcaaaaaaacacaattagtgttgcaccaaactaatatgtaaaaaattatctttgatggtattaaggaatgctgctagcttttaggcatgacaataatgttgttaaaatgaaaaaaaaaacatctagtcagatacttaagccatcatttttgaaaataataacaaaaattaaaccagaatagtcttggaataatcaagattctgaatttctcaggtaggttatcatttggatttctagacaaattcggacacttgattgttttttgatactgggtcagcccyttatagaaaagataaggtatatgaaagttcttataattcagtaaagtcacttgaactgaatttttgagcctcagtttatctgattaactctaaatggcttcctacattgactttccctggctctaggtcaaagagttgcca

SEQ ID NO: 294302 - DNA, 537 bp, Homo sapiens
ttatttatatcctgttctaatttataacatctatctatatctacgtatatatgtgtgtgtgtatatatataaggttggtgcaaaagtaattgtgtttttgccattaaaggtaattgcaaaaaaacacaattagtgttgcaccaaactaatatgtaaaaaattatctttgatggtattaaggaatgctgctagcttttaggcatgacaataatgttgttaaaatgaaaaaaaaaacatctagtcagatacttaagccatcatttttgaaaataataacaaaaattaaaccagaatagtcttggaataatcaagattctgaatttctcaggtaggttatcatttggatttctagacaaattcggacacttgattgttttttgatactgggtcagccccttatagaaaagataaggtatatgaaagttcttataattcagtaaagtcacttgaactgaatttttgagcctcartttatctgattaactctaaatggcttcctacattgactttccctggctctaggtcaaagagttgcca

SEQ ID NO: 294303 - DNA, 582 bp, Homo sapiens
ccacagactgggaaagaagggtctgcagatgacctcagggaagcagagggtgtccaccaacagttatcctacaagacgcttcaccagagcagctcttatagaaccacatacatgcatcttgtatctgagccctgcaatattgtccccaccaagaaaatctgccattctctcctgttcatgagcctcaagttgggcaaaatatagtgctctctattggtttcttcaaccatcctgtcttatggaataaagtatgtgtcttccartgaggcatgcagtggtaaaacacacagaggtactatgattccaggcaacagcaaagaaatgatgtttccattctcctgcacaatgctattatggttaaatataagaagatgttggttaggattttaaaatactgaaaattactagtggattccaaccattgcctacaaagactcgctaatggtctgtggaaacattgcaatctcctggggcacagggaccctgtctcgttcctcactgcctccccggcacccacagcagtgcccacacagaagggaaacaccctgtctgtgtgtagtttgctgactgagataggcttcc

SEQ ID NO: 294304 - DNA, 588 bp, Homo sapiens
ccacagttacatttgcaccaacctaatatgttgtatttgggggaggatgatgatgatggtttctcatggaccttctgaaggtggcatcaccatcacatcatttttagcattatcatgagccaaagcaatttcctaagtattttactaagtattttmctaaaagattgtctcagttcactatcacaactattaggtagtcgtttttatttatatttgtcaggggagaaaactgagtccagaaagtcgtgacaagtaaaagaagttgcccaagtacacagctattggtgggaagatcagcagggtgcctgaggcaagatagaattttaataaataaatgccccaggaaaggcacgctcctctccctctctgagtagccctctcatcttgtttgcttcttatgttcttcgcttccctctttttttatttcttccaagaaaaactatgatggacatgtctttaaagagacaaaggaaagaaggaaaagatctatttggatctgcctgaaggtaaatgcaagtttttcagcttaatattggctgctaggttatcctaaacagcatatatgttctgggaatttgaagtgtggac

SEQ ID NO: 294305 - DNA, 561 bp, Homo sapiens
caagtctcagactgcatggggcacctgtcatccatggtgatcttggccaatttgcctctcagtctcctagtttctttgttgatgaaatgggcatgataataatagtacccatcacagagggtgttttaaggattaagtgaggaaatatattcaaagctctaacagcagtttctcatccataattataaatattggctattatttttcttattgtccccagctatggatcctcagccaaaactctgaagcagcaggaaataacccattaaataccatgtttcattcagatgtcccccagttcaatcacmtcatcttccaatgaggaaacagagacccagaggcactgggaaacaaatccaaccctgactggtgtttccccttctcagtgtccacaacattcattacccaaaatatatactctggaaaatgattgcatttggtgtagcatttgattatagagtgtctaatccttttctctacaatagcatgatgaataagagttttcctatttcctaagaattaaagcttagagtcaagaacaaggaagcactaattaccccc

SEQ ID NO: 294306 - DNA, 553 bp, Homo sapiens
catgtggggagtggtaagaaagttccctgatgggagacagaactcccacacctacccagcagttacaaagagcactttccacccacaaatgtcaatggagtctgaacggagaagttgtaattcaaccccacctggaagtaattaggtggctccacacttaacccatcagactagtttcaggatgtgcctgctaaaatagaagcaataaataacatccgtrtaagagtcataacataatacccgaattgtcctggtttcaactgaaaatgactcatcataccaagaatgaagaagatctcaaactgggcaaaaatagagatgaacactgagatgacaatgatgttaggattatctgacaagaaccattataatgagcaattatgaacacatttgaaacaaatgttaaaatggaaagctttagcgtataataaaaaggttcagcacacaaacagaagacataaagaggaaccaaacagaaatattagaactgataaataaataaggaataaaggaagttctctaagcagaaataaaatgataaaagaaggaacct

SEQ ID NO: 294307 - DNA, 616 bp, Homo sapiens
ccctaggcagtgcccccctggggactctgtgtgggggttccaaccccacatttcccttccacactgctctagcagaggttctccatgaggactccacccctgcagcagacttctgtctggacatccaggcattgccatacatctgctgaaatctaggtggaggttcccaaaactcaattcttgtcttctgtgcatccccaggcccaacaccacatagaagttgtcaaggcttggggcttgcaccctctgaagcaatggcctgagccatactttgaccccttttagccatggctggagctgaagcagctcggatgcagggtaccatgtcctgagattacatagagcaggggggccctgggcccagtccatgaaatcatttttccctcctaggcctccaggcatgygatgaaaggggctgccgtgaaggtctctgacatggcttggagacattttcccgattgtcttggtgattaacattcagctcctcattacttattcagatttctgcagcaggcttgattttttcccccagaaaatgggattttattttctattacatcatcagcctgggaattttctgaacttttattctctgcttcctcttgaatgctttgct

SEQ ID NO: 294308 - DNA, 535 bp, Homo sapiens
atcacgctcattcccatattctagatgctaactggtctcatctcttgtgccaaagcagaaggcctgtttcaagtgtccatgaaagcacacttcacttctatcccttaattctatgccctattgagtgatattcagttaatccaccctgtttacacgcccccaataggtccatatgacctccacaccccaaggtgaccattattctcttccactctctctcargacttgtccttcctccaccttactggactgcagaccacactgactactctctgctcagttagcaccactcaagcctccgcagggctgcatcctcactcactcttccctagcctgagccgccctcccatgcacgtgaaaactgatgagatgagggaaaatgtgaagggcatagtcccattcaggtgaaagtcttctccactaatcccctcatcttctttttataaaggacattttcttttgataggcaagacctctgatgagaatgaatattgaaggttttgtttgagttacgtttagaacatttatttcagaa

SEQ ID NO: 294309 - DNA, 535 bp, Homo sapiens
atcacgctcattcccatattctagatgctaactggtctcatctcttgtgccaaagcagaaggcctgtttcaagtgtccatgaaagcacacttcacttctatcccttaattctatgccctattgagtgatattcagttaatccaccctgtttacacgcccccaataggtccatatgacctccacaccccaaggtgaccattattctcttccactctctctcaggacttgtccttcctccaccttactggactgcagaccacactgactactctctgctcagttagcaccactcaagcctccgcagggctgcatcctcactcactcttccctagcctgagccgccctcccatgcacgtgaaaactgatgagatgagggaaaatgtgaagggcatagtcccattcargtgaaagtcttctccactaatcccctcatcttctttttataaaggacattttcttttgataggcaagacctctgatgagaatgaatattgaaggttttgtttgagttacgtttagaacatttatttcagaa

SEQ ID NO: 294310 - DNA, 556 bp, Homo sapiens
agaaaggcaggagggaaattcgtagggcaacaggccaaattattataatagttttttttttttaacatggttcatggagaacagaatcttattgtattggctgaatatatacactcccatttgtttttcattacatcactgtctgataggcattcggagtcctatttagagagagttagcaaggtaatcgggaactcctgttcctaaatttccccagctagtagtgacatagagcctgatgtgaagcccaagctccttcaactattccacrctgccctttaaagacagagccacataaagagaaatactgctaactgctgtgctatggtgtctgtttacagctgagggaatttgaccatcagcaatgcgaagttctgttttgtgaatcaccagccaaatagccctgccttcagaagttgagtcaagaccatcttattcccagtttcttactttaatcaccagcaatgctgcccactaccaatttctgaaaaactatcaaccttattaccttctcttagagagctttctgctgaaatctcttgaggcaaacttcatc

SEQ ID NO: 294311 - DNA, 595 bp, Homo sapiens
tttggaaggaattgttattttgtgtgccaagaaagaacttacttaaagggaattatgagcaacaaggtctcagccaatatgaaagttaaagtatttatacttctacataactgctagttgacaactttgagacatgtagtacaggcatttattagctactcagccaccttagacattcacatagtatattacactgaagtaaaaaagacgaactcaccctacaaaacacatatgagcttatttgttttattctttttttttccttctctcatgcaagtggggatagagatggaggactcattaaactcctattatgtgatgggtattttgcacgtaaaatcttgtttatttttcccagcgtggtgcagattatcattttcacttagcaggtgaaaaaatggaggcttagctaggtgaaaggacttggtgayaacaacaatgctgggattcaaacccaggcctctgataaaatatattttacattatacttcattgccacatgggagttctcaacctggaaaagccattcttgtgagtgctgaagatgtgttttatcttcgatgtcacagaactcttcaccctagtgcccagagtc

SEQ ID NO: 294312 - DNA, 1205 bp, Homo sapiens
gattcatgcaacccagtatgtagtgaatgatgatgccaagatccaaaggtagagaaagtagtcattggcctgcatgatttctttctccaaatgctaaagatggctgtttgatgctgcttcccaattagttgtggttattctctctgctctacattataatttcactttgcaaataatttcactttttctagggtttgtggttacatcttatatggttcaactttatgcaagtacatcatatttaatggacacattactaaaacaggagtcaatatttttagagctacttctgccacttactaatgaagtgatgtggcatattacttcacctgcctgagactcaattccctcagtttcaaaattcaaataaataaaaacagtctgagttatctctcaagatttttrtcaaatattgcctgagagcaaaggtcgcatgggtgcatggtaaacactaactgttagcacaaacatcacagacacccattaatcctgaaactaccatgttcaaaattcatgattatcttcttttgccaatctataaaatctgattggtagaacatgcttttctctatacttacacctgttataattgtatagatttcwgattcatgcaacccagtatgtagtgaatgatgatgccaagatccaaaggtagagaaagtagtcattggcctgcatgatttctttctccaaatgctaaagatggctgtttgatgctgcttcccaattagttgtggttattctctctgctctacattataatttcactttgcaaataatttcactttttctagggtttgtggttacatcttatatggttcaactttatgcaagtacatcatatttaatggacacattactaaaacaggagtcaatatttttagagctacttctgccacttactaatgaagtgatgtggcatattacttcacctgcctgagactcaattccctcagtttcaaaattcaaataaataaaaacagtctgagttatctctcaagatttttatcaaatattgcctgagagcaaaggtcgcatgggtgcatggtaaacactaactgttagcacaaacatcacagacacccattaatcctgaawctaccatgttcaaaattcatgattatcttcttttgccaatctataaaatctgattggtagaacatgcttttctctatacttacacctgttataattgtatagatttc

SEQ ID NO: 294313 - DNA, 1130 bp, Homo sapiens
atctcagtgaaggatacaccaaagcctggaacacagctgccccatctcacatgtggaaagtaggggccctgccaaggctgactgcacgggtgattgatacgggggcccaaaatgtatacatatagaagaaacgtcagaccatgagcccctggatagctagttcactttcctattagaaactgaactctgaaagaagcaaggacaagcaaagaaattgatcaacatgtgagaaaacccgaataagaattgatcaaataaaacaacctttgtcataatgataatgactaattttagagtttacatacaatgggaaattaaaatgttaaatagaatccttagtaaagcaggagaggtataattggaattaaagagttttmagatccatgcacaattcaagaggagaagggtagggatattaattaaagttagattttgttaactaatatgtgcttataaaagtttaaggtcatacactaaaaaaatataattaaactgtctatagattataggaaacttcttaatggtgaaaggcaggaaataagattaaaaatagactctcagagtcatttataggttatttatttwttggggaaacactccagacattcatctgggtaaagatttcttgaggaggacttcaaaagtacaggcaaccaaagcaaaaatgtacatatgggatcgtatcaagctaaaaagcttctggacagcaaaggaaacaataagtaaataaaaaaacccacagaatggaagaaaatatttgtaaactacccactggacaagggattaataaccagaattggaatatataaggagctaaaacaactcgagaggaagaaaaagaacaaataatgggcaaaatacctgaatagtaattttgcaaaagaagacatacaaataaatggacaataggtatatgaaaaaatgctcagatgatttgtgggttccccattcgtggattcaaccaattgcagattgaaaatattttttaaaacaataaaaaataaaaattttwaaacaatacagtatataatctatttgcatttacattatactaggtattataagttatcagattatttaaaatatatgggaagatgtgcataggctatatacaaatactttgtcatttt

SEQ ID NO: 294314 - DNA, 940 bp, Homo sapiens
tcttcccaatgcttctcaattttartagtagtaataagatgtggagaatatattttactttcattaacccgaagagcaagccagcagagactgagatttcatgtttatgaaatcagaaatggtagttctttgcagatgttatttttttcactttggcagtaattagttggcttagatatataaaagggcctattttcaagttttaaaatggtgtattgaaactgatgattcatcttattttgagaagcagtgaagactagccgttttgcatgggatacatcaaataattactgtatttctagttttaaagaattgaccattactcaatgaactgaaatctgttttcccgcttgtttcagatcgaagactaaatgaagattttaggcggtatcaaatggaaagtttttwtatatatttgtatttctttgctgataattagtaacttagcaggggctttatgaggaaatggaataaaagcacatgtttgttctgcatagtttcgccagaagttggctwttttttatctaaaagaaaaacagaatcaagttttttttgatatttaagaaatggattgatactgttatcttcaagtaacatctattttcatacatgtttcacaaaatatataacacattggcatttaatttacatagatatatagcttagaatatgaatgtataaacattagtctataaatataagtatttagttaataaatgtatattggggtacatgctaaataattttttactgataggaggcatgagcagagtagtttggagaccacttcactttttctaagagtttgcctcattttttagttccacctagttccaggtcttctcaaggttagggcagcaatttttggactatacttatctctttatttgtgtggaataaatcaagaacacagggatacataccagctccatgtgcactg

SEQ ID NO: 294315 - DNA, 1153 bp, Homo sapiens
tatatatttgtatttctttgctgataattagtaacttagcaggggctttatgaggaaatggaataaaagcacatgtttgttctgcatagtttcgccagaagttggcttttttttatctaaaagaaaaacagaatcaagttttttttgatatttaagaaatggattgatactgttatcttcaagtaacatctattttcatacatgtttcacaaaatatataacacattggcatttaatttacatagatatatmgcttagaatatgaatgtataaacattagtctataaatataagtatttagttaataaatgtatattggggtacatgctaaataattttttactgataggaggcatgagcagagtagtttggagaccacttcactttttctaagagtttgcctcattttttagttccacctagttccaggtcttctcaaggttagggcagcaatttttggactatacttatctctttatttgtgtggaataaatcaagaacacagggatacataccagctccatgtgcactgwtagcttgcatgcaacttgcaatagccaggatggggaaaaaaaggaatctgttttctaaatatcatggattagtgctctgatcaatgattactgcttctgatctcagagatgcagttgtagaggtgggcagtcatttttgcaagctcctctccctctggtggaaggwacttccaggggagttaacgggtcagtgacgagtatcttttttgttcccatttatctttcttttccacctttgggagccaaacacttaagccaaaaccactaaaacacaaaaacacaaaagccacttatttacattttgaatgtaaataagccaaacacttatttacattcaaaaataaccacaaatacaatggaatttactgtgcatgccaagaaagaggcacaggctctgaaaagaagaagactttatacattaggctgtctctggcacagagccatcttacaacaatcaaaacaacaacaaaaatagaaaactctagagaaggaaaagaactggatctccacagttacatttgccatatatatatatatatatatatatatatatatatatatatatacacacacacacaccatatatatgtatataccatatatatatacaccatatatat

SEQ ID NO: 294316 - DNA, 554 bp, Homo sapiens
caaatctaaacatacagcatgaggaatgttgacaaatatatgcagctacataaccatcatccagatcaaaatacaaaacatttcaatcaccccrgaaaatttcctcaggccccttttccattcaatttgaattccctgccctcactctaagcagccactgttctggtatctatcatcaaatattagttttgcctggaagtggctttaatataaaagtaattagatagtatgttatgtttggtttgttttgctcaacttaatgtttttgagattcatacaggttgttgcatgtatcagcagtccttttttaaatgaacagtattccactgactatattgtagtttgtctatccattttcctatggatggaaatttcactgtttacaattttgtgctattatgaataaagctgctatgagcagtcatttttctggggtatatatctaggaatgaaatggttgaatcacaaggtagtgcaagacagtcctctaggtggccttggacaacctcaattgttccccctttttcacttgtagttttcaagaataactgtac

SEQ ID NO: 294317 - DNA, 627 bp, Homo sapiens
tgtttaagccatcctgcctattataagctcataacttcttccctcaagttttgttctaaaagctttaccttaacatttagatatgcaatcaatgcagaaattacatatgagagtagtttgggtagagatcaaaatttatttttctttattctatatgaaagtctggtatgtgtagagctatttccaaactttattctgtttaactggcttgyttccttggccaataccatactaaccaaattactatagctttacagtaaatattaagacctggtagtatctgtttccaagtgcagttgttctgcaagattgtcttagctcttcttgtcccttttcatataaattttgaaaacaaaatagttctagttttaattttttgaggacttccatactgctctccacagtggctaaactaatgtacatttctaccaacagtgtagggaggggttcccctttctccacatcctcaccagcatccattattgcctgtctttaggataaaagtcattaaaacaggggtgatatgggatctcactatggttttgattggcatttctctaatgattacttatgttaagcattttttcatatacttcttggccagttgtatgtcttcttttagagatg

SEQ ID NO: 294318 - DNA, 627 bp, Homo sapiens
tgtttaagccatcctgcctattataagctcataacttcttccctcaagttttgttctaaaagctttaccttaacatttagatatgcaatcaatgcagaaattacatatgagagtagtttgggtagagatcaaaatttatttttctttattctatatgaaagtctggtatgtgtagagctatttccaaactttattctgtttaactggcttgcttccttggccaataccatactaaccaaattactatagctttacagtaaatattaagacctggtagtatctgtttccaagtgcagttgttctgcaagattgtcttagctcttcttgtcccttttcatataaattttgaaaacaaaatagttctagttttaattttttgaggacttccatactgctctccacagtggctaaactaatgtacatttctaccaacagtgtagggaggggttcccctttctccacatcctcaccagcatccattattgcctgtctttaggataaaagtcattaaaacaggggtgatatgggatctcactrtggttttgattggcatttctctaatgattacttatgttaagcattttttcatatacttcttggccagttgtatgtcttcttttagagatg

SEQ ID NO: 294319 - DNA, 622 bp, Homo sapiens
gctgtaagtatagacttgatgtccaagcccaaaagaataattaatacctgtgtcccctaaccagccatgtatttgaccaagtgccatctgatttgccttgtcacagtttgtttctcagtggaaacatgagcagtgtgcatcttaatcctctgcttagaaayagaaatctgaatgtgaggaagacatggggctaagagtggcctcttaaaaattagcattaacataactggcaaagaactaagaagacctgggttcccatcttgtctctgccattttacagctgtaggagctttggcaggctgcttgcctctctgaacgtcagctccttttctataagtaagagtttcagcccatcttcaggactgttatgatgaatattatgtttgtgacagtggttattggcattacgtgtaacactgagaaaagcaagctttctctactcccaaagtgagttcgaaataaaggaaaaaattgggttttttttgtgacaaagcattgtgacctggagatttctctacaagtggtagctttacttttatgatttcagtgcctctaacacatattaaaattatgttttgtacacaaagagtgaaccctaatgtaaactatggactgtaaataa

SEQ ID NO: 294320 - DNA, 622 bp, Homo sapiens
gctgtaagtatagacttgatgtccaagcccaaaagaataattaatacctgtgtcccctaaccagccatgtatttgaccaagtgccatctgatttgccttgtcacagtttgtttctcagtggaaacatgagcagtgtgcatcttaatcctctgcttagaaacagaaatctgaatgtgaggaagacatggggctaagagtggcctcttaaaaattagcattaacataactggcaaagaactaagaagacctgggttcccatcttgtctctgccattttacagctgtaggagctttggcaggctgcttgcctctctgaacgtcagctccttttctataagtaagagtttcagcccatcttcaggactgttatgatgaatattatgtttgtgacagtggttattggcattacgtgtaacactgagaaaagcaagctttctctactcccaaagtgagttcgaaataaaggaaaaaattgggttttttttgtgacaaagcattgtgacctggagatttctctacaagtggtagctttayttttatgatttcagtgcctctaacacatattaaaattatgttttgtacacaaagagtgaaccctaatgtaaactatggactgtaaataa

SEQ ID NO: 294321 - DNA, 615 bp, Homo sapiens
gtttacccaggacagtcccagcttacaactattgtccccacataattatcaatagagtcctctgtcactctcaaaagtgctccagtttgaacagtgacttgtacagcctccatatttataacacaaacagttgtctgctactcccaagctaaaacctctagagaccacactaactgtgattstagaatatcagtgacagctgggactcctgttcctagaggattggtagagtgagttcatctggaaaaaaaaaaggtgattgtgaaagaaaccatgattttcagaagtgtgattattcattcattccaaatgggaactattttgcaactttcataaatttcaactacattttatgcactaggtggtgaaactgctgcaaaaaccacacgtgttttaaaataaatatacatgtgactatcacctgagttccaaagccagacagttgcctttaaggtgtgacagatggcatcatcctctaggaggacagtcagcatgatcacatgtgatgccacactgagcatcagggcatcaatagctatcctgttggaacagggcctggagcaagaaatgcaatagttcaaccataattgtcttgtcattgaaaatctttttgta

SEQ ID NO: 294322 - DNA, 338 bp, Homo sapiens
ttcttgtacagcctgcagaaccatgaacaaataaaccactattttttaataaattacccaccctcaggtattcctttatagcaacacaaatggactaagacagatgcatttaagactctgctaaaaataaaaaataaattaaaaagagagtagttctttaatatctttcctgccagactgccaaaggcatgaatttccacctgcaaattgcccttttgcagcacaatattcagtctccatagtctcctgttacaatacaaatctatgactagaagagacaggggccacctggctggcctcactaataccacagcacaasgttgcttagcaaattagct

SEQ ID NO: 294323 - DNA, 573 bp, Homo sapiens
aggggcagagctgcccaaggccttgggagctcacctcttgtgtcatcgtgccctggatatgagacatggagtcaaagaagttttttttttggaacttgaagatttgatgactgccctgctgggttttgaacttgcatggggcctgtagcccctttgtttaggtcaatttctccctcttgcaatgggagcatttacccaatgyctttacccccattgtgtcttggaagtaactaacttgttttttattttacaggctcataggcagaaggaactggccttgtctcagatgagactttggacttggacttttgagttaatgctggaatgaattaagactttggggaactgttagaaaggcatgattggttttgaagtgtgagaagggcatgagacttgggaggggccaggagcagaatgatatggtttggctctgtgtctccacccaaatctcatgcagaattgtaatcccctggtgttgggggagaggcctgctaggaggttattgaatcatgggggcatactacttcccccttgctgttcttgtgatagtgagtgagttctcatgagatctgg

SEQ ID NO: 294324 - DNA, 470 bp, Homo sapiens
tttcaccatgttgcccaggctggtctcgaactcctgagctcaagcgatctgcatgtctcggcctctcaaaatgctgggattacagatgtgcattttcattttagaaataagaaaactgagactcagaaaaattcattacattgctcaaagacacagctaataaaaggcagaactggatctgacatcttaaacagggggattagtacaactttttgagttgaggtgatatacaaaaacatgtaaattcagcaacattaatctatgtggaatgtagaataacttgaaagaaagaaggtgggaagacgagatcagcagttatgaagtagagagaattcacagaaaaactaggcacactcatccaggctggctgccacaaggaatcytaaagagctgtgacaagagagggagaggcctagacttgagccagattgaagtacaaaacagagagacagaggcataaatcctgggaa

SEQ ID NO: 294325 - DNA, 470 bp, Homo sapiens
tttcaccatgttgcccaggctggtctcgaactcctgagctcaagcgatctgcatgtctcggcctctcaaaatgctgggattacagatgtgcattttcattttagaaataagaaaactgagactcagaaaaattcattacattgctcaaagacacagctaataaaaggcagaactggatctgacatcttaaacagggggattagtacaactttttgagttgaggtgatatacaaaaacatgtaaattcagcaacattaatctatgtggaatgtagaataacttgaaagaaagaaggtgggaagacgagatcagcagttatgaagtagagagaattcacagaaaaactaggcacactcatccaggctggctgccacaaggaatcctaaagagctgtgacaagagagggagaggcytagacttgagccagattgaagtacaaaacagagagacagaggcataaatcctgggaa

SEQ ID NO: 294326 - DNA, 599 bp, Homo sapiens
ttgttatgttagtggcccataggcatatagaaagttcaacacagccttgggatataataagtgttccaaaaatgttaggtagtaatagctttagtaattaatcatgtagttaatggactggaataagaagaggacaagtcatgtggtttttacagagtggtctggggaccatctgcactggatgattccagcggtgagcttattaaaaacccacatgcctggattgtaccttggtcttaccaaatcagactctctgggggtagagcctgagaatctgcactttcaagaagcttccaaagtgatctttgtgataaccaccaagcaagaaataagaagacttgtaagtaggtcactgtagtagtccaggcaggagtggctgataaaatcaagcaaggcactggcaatgagaacagggagcgggtgtggcactctttgaggcagrtggaaactacggaactgagtaatcagacaggggtggtggaaaggaaggagggcagaggatgagctggaatcaccgtggggaggtgagttcggggaggattgactcagattgggtcatgagagtccagacatctgtggggtatccaagtggaatgtca

SEQ ID NO: 294327 - DNA, 442 bp, Homo sapiens
cttgactatgctatattttattaaaaggaaattaattctcaaacttaattttaatgatttttagtaacaaagcactggtgacatgcttgtaggtcacaaaacttggattgaaaagtactgaggaagatggtgggataaaatgtttttcagcagttcagccttcttaattcagatagtcagatagtgcctgaggttcttttctgaattcastctctagtcttcaacttcagttgtagtcagattttgctaatcattggcatcacaggaaggtttacaatttttattaaaagttatattttgattaatccaacatgtgtaaaatattctaatttcaaaatggaataataaaaatattgatgtggctttttaaaatatactaagcctttgagatctgcatgtgttctgcacttacattgcatttcgatttggtgagccacatttc

SEQ ID NO: 294328 - DNA, 442 bp, Homo sapiens
cttgactatgctatattttattaaaaggaaattaattctcaaacttaattttaatgatttttagtaacaaagcactggtgacatgcttgtaggtcacaaaacttggattgaaaagtactgaggaagatggtgggataaaatgtttttcagcagttcagccttcttaattcagatagtcagatagtgcctgaggttcttttctgaattcagtctctagtcttcaacttcagttgtagtcagattttgctaatcattggcatcacaggaaggtttacaatttttattaaaagttatattttgattaatccaacatgtstaaaatattctaatttcaaaatggaataataaaaatattgatgtggctttttaaaatatactaagcctttgagatctgcatgtgttctgcacttacattgcatttcgatttggtgagccacatttc

SEQ ID NO: 294329 - DNA, 534 bp, Homo sapiens
ccatgtggaactgtaagtccaagaaacctctttcttttgtaaattgcctaatcttgggtatgtttttatcagcagcatgaaaacggactaatactctctagttgcatccatgctgttgcaaatgacaggatcttatcttttttatgttggaatagtactccactgtgtttatgcacccattttctttatccattcatctgttgatggacaccaaggttgattcacttgattccaaatcttggttattttaaatagtgttgcatgaacacagtgcaaatatcttttgatatgctgatttcctttcttgggagtatacatcaagcagtggaattgttagttatttcttttctcttgctgcttttaggatcctttctttatccttgacctttgggaatttgattactaatgccttgaggtactcttacttagattatatctgcttggtgttctataacttycttgtatttgaatatggacatctttctttaggtttgagatgttctctattactatatttttgaatgaactttctac

SEQ ID NO: 294330 - DNA, 567 bp, Homo sapiens
taggactacaggtgtgccaccatgcctggctaactatttattttttattttgtagagatgggtgtcttgctatgttgcccaagttggtcttgaactcctagcctcaagcagtcctcccgcctcaacctcctacagctgtgggattacaggctgttcctggccaataaccatttttattagttttttggttacccttcaggtgtgtgtttctgcaaatataggtgtgtgcatatatatggtcttactttcatctcttcgtattgttgtattttataattaaagcagaaagactagcatttctgggatatccttgatccaacttggtcataatgaagtagccttatgtttttggatttggcttattaataatttatgtagttttttttcatttatatttatgggagaaattggcctatcattgttcttttactgttcttatgrgattttgctatcaaagtttggcttcatagtctgaggcagagtgtagtgtttcttatatattctttctctcttttaatggtctggaagtatttgtgaaagattgaaatatttcttcctatattgatt

SEQ ID NO: 294331 - DNA, 562 bp, Homo sapiens
tgagggttttacaggaccctccttggactgtgtggcaatctgggatgcttcccttcctgctcttcctactcagggccaggatcccatctcagtctgatgactctcccagccttttctgactccctcccattttctttcctaggtgtttcccctatcaaatccttgcatatttgatctcatgttggagtctgactctcagagaaccccagctaacatgggctctaagaactgtcmctgtggggcctgtgctggttggaaggctggctaatcccaagcaccatcccgttttgaatccagtgcctgctctcattcacacagccactgttcagtttgccttccatacctagattcagtccaaatttaaaaaccctaacagaaaagcagaggtataaagcaaatgctatctattagcctttattctagataactggcactgacaggaggagaaaatagcagaaggttaggaagttgaataggaaaaacagacataaagatctcttttgagtttagagccttctcaccatgagagaagatgtcagctctgaccacagcatgcagcatg

SEQ ID NO: 294332 - DNA, 609 bp, Homo sapiens
tcaggtttgaattccttctctgcaatacactatctgtggtagcttggtatcactacccttttttgaatygcaatttctttcttaggccaaattcccccataaagcaaagcctggtcaagagctttcacgcaggtagtttgggaaatggtccggggaaaggattaagaactgaaaaaagtaacacaggaaaagagaaaaagccattacaagggctggagttggccactattgtggacaattgggcccaactgtgcaggtaccttctgggggtcatgttgaatgccccaaggacagaggtggggacagttcttgatgggctccattctccccataggcgtaccctcccagattatacatgcataagggccagatgggttcctgaagattttccacgttagacaagcccctgaggtggaaagtgagagaagtgaagtgtggcccatatgaggtgtcatcaggctacacctgtgcaagctggttgctgcggcaatggctgcaataaatgatgggcccaagaggatgtgaggcagggcacaagagatgtctcatgaagtttcctcatctaagtaatgggagtaaaagtattatttgcagaacctatgcttcagg

SEQ ID NO: 294333 - DNA, 609 bp, Homo sapiens
tcaggtttgaattccttctctgcaatacactatctgtggtagcttggtatcactacccttttttgaattgcaatttctttcttaggccaaattcccccataaagcaaagcctggtcaagagctttcacgcaggtagtttgggaaatggtcyggggaaaggattaagaactgaaaaaagtaacacaggaaaagagaaaaagccattacaagggctggagttggccactattgtggacaattgggcccaactgtgcaggtaccttctgggggtcatgttgaatgccccaaggacagaggtggggacagttcttgatgggctccattctccccataggcgtaccctcccagattatacatgcataagggccagatgggttcctgaagattttccacgttagacaagcccctgaggtggaaagtgagagaagtgaagtgtggcccatatgaggtgtcatcaggctacacctgtgcaagctggttgctgcggcaatggctgcaataaatgatgggcccaagaggatgtgaggcagggcacaagagatgtctcatgaagtttcctcatctaagtaatgggagtaaaagtattatttgcagaacctatgcttcagg

SEQ ID NO: 294334 - DNA, 562 bp, Homo sapiens
tgagggttttacaggaccctccttggactgtgtggcaatctgggatgcttcccttcctgctcttcctactcagggccaggatcccatctcagtctgatgactctcccagccttttctgactccctcccattttctttcctaggtgtttcccctatcaaatccttgcatatttgatctcatgttggagtctgactctcagagaaccccagctaacatgggctctaagaactgtcactgtggggcctgtgctggttggaaggctggctaatcccaagcaccatcccgttttgaatccagtgcctgctctcaytcacacagccactgttcagtttgccttccatacctagattcagtccaaatttaaaaaccctaacagaaaagcagaggtataaagcaaatgctatctattagcctttattctagataactggcactgacaggaggagaaaatagcagaaggttaggaagttgaataggaaaaacagacataaagatctcttttgagtttagagccttctcaccatgagagaagatgtcagctctgaccacagcatgcagcatg

SEQ ID NO: 294335 - DNA, 583 bp, Homo sapiens
agaattttgctttgattccaacttcaaacctactactgacctaaacctaatgtctttaggtatgtatgttttaatgtgaggtccatggctcccacaggcccccctaaggggagtcttaaaattttttacgaggatctttttaattggaggtcttcgttttgatcatagtcttaaaattgagttttactatcttctgcatmattctaatgactcatgatcaaatcataccacaggaatccagtggccttgtttattccagtggcacagatgtaagctttgcaaagacatgttgggttaacacaaattaaggccaaataagttgatagtatacgtatactttacaaaggcagtttccatagtagttcaaataaagagaaattgtggaaaaattggtcatcacatggcacccagtagcatagacatgccaaatttaaaagaattaatgaggcagcagtcaatatcatgttttcatttgaaaggtaatttggtttcagcaaaacaacatcatccttcccattaaattaaggttgttaaattggctttgtagttttgtttgaatttaacttgtattgaattatataat

SEQ ID NO: 294336 - DNA, 583 bp, Homo sapiens
agaattttgctttgattccaacttcaaacctactactgacctaaacctaatgtctttaggtatgtatgttttaatgtgaggtccatggctcccacaggcccccctaaggggagtcttaaaattttttacgaggatctttttaattggaggtcttcgttttgatcatagtcttaaaattgagttttactatcttctgcatcattctaatgactcatgatcaaatcataccacaggaatccagtggccttgtttattccagtggcacagatgtaagctttgcaaagacatgttgggttaacacaaattaaggccaaataagttgatagtatacgtatactttacaaaggcagtttccatagtagttcaaataaagagaaattgtggaaaaatkggtcatcacatggcacccagtagcatagacatgccaaatttaaaagaattaatgaggcagcagtcaatatcatgttttcatttgaaaggtaatttggtttcagcaaaacaacatcatccttcccattaaattaaggttgttaaattggctttgtagttttgtttgaatttaacttgtattgaattatataat

SEQ ID NO: 294337 - DNA, 592 bp, Homo sapiens
ctgtctttcaactcaaactgcatctcttctctgagtctgcaacctgccggcctcctcacgtctcccatctaattttggactcaccaagtttccacaatcatgtgagccaattccttaaaatctctccccctctctctrtctccatatatttacatatatagcacacatccatcctgttggttttgtttttctgaagagctggagaactctgactaatacattcctcctcgtccacaacagcgtgcctctggttattattgtctaaattccctccttgtatttatttgtgatgttttagcattgatattaactgacaatatggagggagtgtggtgaaatggaatgaacactggaccccattcaactaattagtaggggtaattagttgggcaagtcaccaatcctgagcaagccacttaacttctctgaacctcctcctagactatagtattcctgagggtcctcctagtttcataacatctcaatgggaggtgagccactccctgttctgttggccttcaccaaggcttgggacacacagcttgaggtgcctgtccctttcttttccatatttttccttggttggaaatct

SEQ ID NO: 294338 - DNA, 592 bp, Homo sapiens
ctgtctttcaactcaaactgcatctcttctctgagtctgcaacctgccggcctcctcacgtctcccatctaattttggactcaccaagtttccacaatcatgtgagccaattccttaaaatctctccccctctctctatctccatatatttacatatatagcacacatccatcctgttggttttgtttttctgaagagctggagaactctgactaatacattcctcctcgtccacaacagcgtgcctctggttattattgtctmaattccctccttgtatttatttgtgatgttttagcattgatattaactgacaatatggagggagtgtggtgaaatggaatgaacactggaccccattcaactaattagtaggggtaattagttgggcaagtcaccaatcctgagcaagccacttaacttctctgaacctcctcctagactatagtattcctgagggtcctcctagtttcataacatctcaatgggaggtgagccactccctgttctgttggccttcaccaaggcttgggacacacagcttgaggtgcctgtccctttcttttccatatttttccttggttggaaatct

SEQ ID NO: 294339 - DNA, 592 bp, Homo sapiens
ctgtctttcaactcaaactgcatctcttctctgagtctgcaacctgccggcctcctcacgtctcccatctaattttggactcaccaagtttccacaatcatgtgagccaattccttaaaatctctccccctctctctatctccatatatttacatatatagcacacatccatcctgttggttttgtttttctgaagagctggagaactctgactaatacattcctcctcgtccacaacagcgtgcctctggttattattgtctaaattccctccttrtatttatttgtgatgttttagcattgatattaactgacaatatggagggagtgtggtgaaatggaatgaacactggaccccattcaactaattagtaggggtaattagttgggcaagtcaccaatcctgagcaagccacttaacttctctgaacctcctcctagactatagtattcctgagggtcctcctagtttcataacatctcaatgggaggtgagccactccctgttctgttggccttcaccaaggcttgggacacacagcttgaggtgcctgtccctttcttttccatatttttccttggttggaaatct

SEQ ID NO: 294340 - DNA, 545 bp, Homo sapiens
gtgcctgtccctttcttttccatatttttccttggttggaaatcttgtttctgctcctataattcttttgtcattttggacctgggaaagggaaggcaaagggtaaagaacaaggaagaaggaggatatgaggacagttcttgctggagagaaggggaagatagaaggtgctttccgtggagggaggagctgagaagagggctgaagagaggatgggcaagtgtgacagtgtcctgaattccctcccacaaccaaatcaaaaccccaggctgggctgggtgtgcgcatgygctaggaacttaaggaaactttggagaaacctagcaagaccatggctggtgctctgcttccccaggtacagcctgggagagccacagcctgtgggaaaagtctgcatttccaaagggtgccgtgtacatcaggtttgggtactaatgggcagcatgggcagaagtgggtgcctgtatagccagggcctgagatagcctcattctagcccaccctagctctctcttggcttcagcagagcacaaagaagatctgga

SEQ ID NO: 294341 - DNA, 603 bp, Homo sapiens
gggaaaccctgtagcagaagccacagggaggtctggccaggtctgggggtctcaaggagcttgtgaccatgtctcaaaggaccagtatcaccagcaaaatctcaggtggctggagtcagcagcagaagatggctgaagttgtattccatgggctgagagaacattcaccaggtccaccaggcttcacattgaggcaaggaaggctattraggccagaagctggggcccagagaacagcagcccagaggaccacacgcaggtgcagaactcctcctctctgctgtgaggatatttaaggctctgcttccctccacttcaggtgccatcttgaaaaagagtagaaagcaacttcttgaaaagagagaaacagacttggtaggaaccacttcagaatatttgcccaaagggaactattttgaactggaagagactgggttctcttttattggcatgtctatttttatttgtgtttttccccctacttctatgggggcttcagagcagaagacaatccattactaaaataaaagaagctcctttctggttttgcacacctgaactctagtgtgtaaagcttagccataacagaggattgagaagggg

SEQ ID NO: 294342 - DNA, 603 bp, Homo sapiens
gggaaaccctgtagcagaagccacagggaggtctggccaggtctgggggtctcaaggagcttgtgaccatgtctcaaaggaccagtatcaccagcaaaatctcaggtggctggagtcagcagcagaagatggctgaagttgtattccatgggctgagagaacattcaccaggtccaccaggcttcacattgaggcaaggaaggctattaaggccagaagctggggcccagagaacagcagcccagaggaccacacrcaggtgcagaactcctcctctctgctgtgaggatatttaaggctctgcttccctccacttcaggtgccatcttgaaaaagagtagaaagcaacttcttgaaaagagagaaacagacttggtaggaaccacttcagaatatttgcccaaagggaactattttgaactggaagagactgggttctcttttattggcatgtctatttttatttgtgtttttccccctacttctatgggggcttcagagcagaagacaatccattactaaaataaaagaagctcctttctggttttgcacacctgaactctagtgtgtaaagcttagccataacagaggattgagaagggg

SEQ ID NO: 294343 - DNA, 603 bp, Homo sapiens
gggaaaccctgtagcagaagccacagggaggtctggccaggtctgggggtctcaaggagcttgtgaccatgtctcaaaggaccagtatcaccagcaaaatctcaggtggctggagtcagcagcagaagatggctgaagttgtattccatgggctgagagaacattcaccaggtccaccaggcttcacattgaggcaaggaaggctattaaggccagaagctggggcccagagaacagcagcccagaggaccacacgcaggtgcagaactcctcctctctgctgtgaggatatttaaggctctgcttccctccacttcaggtgccatcttgaaaaagagtagaaagcaacttcttgaaaagagagaaacagacttggtaggaaccacttcagaatatttgcccaaagggaactattttgaactggaagagactgggttctcttttattggcatgtctatttttatttgtgtttttccccctacttctatgggggcttcagagcagaagacaatccattactaaaayaaaagaagctcctttctggttttgcacacctgaactctagtgtgtaaagcttagccataacagaggattgagaagggg

SEQ ID NO: 294344 - DNA, 553 bp, Homo sapiens
agaaagggagccacagagagtataacacttaaaaaaccattgctggccaggcacggtggctcacgcctgtaatcccagcactttgggaggccaaggcaggtggatcatgaggtcaggagtttgagaccagcctgaccaacatggtgaaaccccatytctactaaaaatacaaaaattagctgggcatggtgatgcatgcctgtaatcccagctactcaggagcctgaggcaggaaaatcgcttgaaccggggggacagaggttgcagtgagccaagatcgcaccactgcactcccgccagggtgacagagcaagactccatctcaaaacaacaacagcaccaacagcaaaaaaaaaaaaatatatatatatatatatatatataaaatatatatatataaatatttatatttatatatttagataaaaaatatttatattatatatatatatatatagctacaaatgcctcccatccctgtatatatgcccccggcaatgtggggttgctactgttcccatcacttgccttggccaatggaaagaagcagaat

SEQ ID NO: 294345 - DNA, 553 bp, Homo sapiens
agaaagggagccacagagagtataacacttaaaaaaccattgctggccaggcacggtggctcacgcctgtaatcccagcactttgggaggccaaggcaggtggatcatgaggtcaggagtttgagaccagcctgaccaacatggtgaaaccccatttctactaaaaatacaaaaattagctgggcatggtgatgcatgcctgtaatcccagctactcargagcctgaggcaggaaaatcgcttgaaccggggggacagaggttgcagtgagccaagatcgcaccactgcactcccgccagggtgacagagcaagactccatctcaaaacaacaacagcaccaacagcaaaaaaaaaaaaatatatatatatatatatatatataaaatatatatatataaatatttatatttatatatttagataaaaaatatttatattatatatatatatatatagctacaaatgcctcccatccctgtatatatgcccccggcaatgtggggttgctactgttcccatcacttgccttggccaatggaaagaagcagaat

SEQ ID NO: 294346 - DNA, 593 bp, Homo sapiens
acgcactccagcctgggcaaaagagcaagactccatcttaaaaaaaaaaagtttaatctgtctgcctctaagaccctttctccacagagtgctcaagaagaattgtaaagtgtcagatactgaactgcacagtattatattttaactttctgtcagataacattaagaagaaacagtaataacaataatgatgacatgactccccctcccctcatcaaataccctggatacaacaatgtccttttaagatattaaaaaggccaggcctgtggctcacacctataatcccagcactttgggagcctgaggtgggaggatcacttgagtccaggagttcaagaccagtctgggcaacatagtgagaccccgtctctacaaaaaataccaaaacaagtagtggggcttagtggctcacgcctgtggtcctagctacttgggaggcacttggsaggactgcttgagcccaagaggctgaggctgcagtgaactgtgattgaaccactgcactcctgcctgggcaacagagagagaccctgtcaccaaaaaaaaaaataaataaaaaaaataaaaattattttcattgaataaaagac

SEQ ID NO: 294347 - DNA, 594 bp, Homo sapiens
ctgttgttgttgttgttgttgttgtttttccttggaattgcagtccaggcttgactgtccatgctaatggaacgaggccatgttgtacagtaatgggatttttcaggtttttttaaattttaatttaattttatttcaagtgccaggacacatatgcaggctgtgcaggtttgttacacagataaacatgtgccatggtggtttgctgcacctatcaacccatcatctaagtattaagcaccacagcattagctacttatcctgatgctctccctcccgctgctcccctygacaggccccagtgtgtgttgttcccctccctgtgtgcatgtgttctcatgcttcagctcccacttataagtgggaacatgtggtgtttggttttctgtttctgtataagtttgctgaggatgatggcttccagctccatccatgttcctgcaaagaacatgacctcgttcctttttatggctgcatagtattccatggtgaatatgtaccacattttctttatccagtctatcactcatgggcatttgggttgattccctgtctctgctattgtgaatagtgctgcagtgaacatacgcatgc

SEQ ID NO: 294348 - DNA, 1155 bp, Homo sapiens
ctgttgttgttgttgttgttgttgtttttccttggaattgcagtccaggcttgactgtccatgctaatggaacgaggccatgttgtacagtaatgggatttttcaggtttttttaaattttaatttaattttatttcaagtgccaggacacatatgcaggctgtgcaggtttgttacacagataaacatgtgccatggtggtttgctgcacctatcaacccatcatctaagtattaagcaccacagcattagctacttatcctgatgctctccctcccgctgctcccctcgacaggccccagtgtgtgttgttcccctccctgtgtgcatgtgttctcatgcttcagctcccacttataagtgggaacatgtggtgtttggttttctgtttctgtataagtttgctgaggatgatggcttccagctccatccatgttcctgcaaagaacatgacctcgttcctttttatggctgcatagtattccatggtgaatatgtaccacattttctttatccagtctatcactcrtgggcatttgggttgattccctgtctctgctattgtgaatagtgctgcagtgaacatacgcatgcwgttcatacatagtagagccttgatccatatggggawcttttcaccacagtgacttttttgtgtgccactgtactccattaccttctcttggagttattctattttttggtttcttccctacccaaatgactcaactgtttttgagttagccacttggactgtggtcaacgtttttgccagtgttctctgtaaagctttgcagttcagttgcatagcagacaacatttttaaaaattgaagtttataaatatacatatggatgtcaagaacaggtttccccaagtgattcaggagcatattaactatgaaagagaaaagcttgccgactttcagcaatttgtgtgaacaatgacatagagccagaagaatgtggcctgagaaagaccacagttgtacctacccccttgctggctcccagtggaagggaatggagctgagccagacctgaggcagaacatgattgctcattgtataggtgaacagccgggattcattagggctggagacttccatgaaggggccagttacagcaggctccagtggaagggccctttgtcttt

SEQ ID NO: 294349 - DNA, 560 bp, Homo sapiens
gttcatacatagtagagccttgatccatatggggatcttttcaccacagtgacttttttgtgtgccactgtactccattaccttctcttggagttattctattttttggtttcttccctacccaaatgactcaactgtttttgagttagccacttggactgtggycaacgtttttgccagtgttctctgtaaagctttgcagttcagttgcatagcagacaacatttttaaaaattgaagtttataaatatacatatggatgtcaagaacaggtttccccaagtgattcaggagcatattaactatgaaagagaaaagcttgccgactttcagcaatttgtgtgaacaatgacatagagccagaagaatgtggcctgagaaagaccacagttgtacctacccccttgctggctcccagtggaagggaatggagctgagccagacctgaggcagaacatgattgctcattgtataggtgaacagccgggattcattagggctggagacttccatgaaggggccagttacagcaggctccagtggaagggccctttgtcttt

SEQ ID NO: 294350 - DNA, 560 bp, Homo sapiens
gttcatacatagtagagccttgatccatatggggatcttttcaccacagtgacttttttgtgtgccactgtactccattaccttctcttggagttattctattttttggtttcttccctacccaaatgactcaactgtttttgagttagccacttggactgtggtcaacgtttttgccagtgttctctgtaaagctttgcagttcagttgcatagcagacaacatttttaaaaattgaagtttataaatatacatatggatgtcaagaacaggtttccccaagtgattcaggagcatattaactatgaaagagaaaagcttgccgactttcagcaatttgtgtgaacaatgacatagagccagaagaatgtggcctgagaaagaccacagttgtacctacccccttgctggctcccagtggaagggartggagctgagccagacctgaggcagaacatgattgctcattgtataggtgaacagccgggattcattagggctggagacttccatgaaggggccagttacagcaggctccagtggaagggccctttgtcttt

SEQ ID NO: 294351 - DNA, 560 bp, Homo sapiens
gttcatacatagtagagccttgatccatatggggatcttttcaccacagtgacttttttgtgtgccactgtactccattaccttctcttggagttattctattttttggtttcttccctacccaaatgactcaactgtttttgagttagccacttggactgtggtcaacgtttttgccagtgttctctgtaaagctttgcagttcagttgcatagcagacaacatttttaaaaattgaagtttataaatatacatatggatgtcaagaacaggtttccccaagtgattcaggagcatattaactatgaaagagaaaagcttgccgactttcagcaatttgtgtgaacaatgacatagagccagaagaatgtggcctgagaaagaccacagttgtacctacccccttgctggctcccagtggaagggaatggagctgagccagacctgaggcagaacatgattgctcattgtrtaggtgaacagccgggattcattagggctggagacttccatgaaggggccagttacagcaggctccagtggaagggccctttgtcttt

SEQ ID NO: 294352 - DNA, 606 bp, Homo sapiens
tacgtctgcattgaaaagactaacaaaatagttttaatagtaacttcatatgtgccccgagttcattttagattcttcgtgtttgaaacttagtagaaaaggagggtaagaagatggaggccaaattggggtgggagtggaagttcccatgtcctctgtctggatctttgtctgtcgtggaccttactggtcccccagaacagtggacacttyggaaatatttgttgaatgaatgaatttgcagacgatgcaccttttattcatattgtggatgtttactatcattgagagaaactgctggtgttaatcggggagggagggggaaattttgagtggagtgatcagttcattaagtaatctgtattagtgaacattgtcatattatgatgacttttgctttccctgaatagggaatagctggcattgggataacaaataccttgagagtgaagatcctctgtattaggttttcccttttttagtgcctatttataattgtaaaatgcacattcagaaagtgtgtaaaaacttacagtctaacaaataattataaaacaagtactgaggtagtctccatccagattaagaaatagaacattactagca

SEQ ID NO: 294353 - DNA, 620 bp, Homo sapiens
agaacgtgactgtatttggaaacagggcctttaaagaggtgattgaattaaaatgaggctgttagggtgggctctaatccaatctgattggtaattttgtaagaaaatgtggacaaacagagagacaccggggcacacatacagaaaggggctaccatgtgaagacacagcgagaagatggccatctgctttccaaggagaaaccaaatctgccaatgccttgatcttgaacttcagggaaattgagaggctgctggctgcattggtgagcgagagtgaggaggcaggtagtgcagtggtctgaggctcctggtggcagctgtcattgtgaraagagaagggagctggatgggtttcttcagcaaccatgtccaacacacccagtagggctgagattgagaaatttgacaggtcaaaattgaagacagaaaagcaagagaaaaatccactactgacagcagtggctaccaacctggactgattaaaaaggatcaaaggactgatgtttttgtagatatcactgtgaacagatgacatggggaccaggtaagcactcataaacttggcatgttataaccccctcagaatgtggtcacaaccacagagagaaagggcagaag

SEQ ID NO: 294354 - DNA, 620 bp, Homo sapiens
agaacgtgactgtatttggaaacagggcctttaaagaggtgattgaattaaaatgaggctgttagggtgggctctaatccaatctgattggtaattttgtaagaaaatgtggacaaacagagagacaccggggcacacatacagaaaggggctaccatgtgaagacacagcgagaagatggccatctgctttccaaggagaaaccaaatctgccaatgccttgatcttgaacttcagggaaattgagaggctgctggctgcattggtgagcgagagtgaggaggcaggtagtgcagtggtctgaggctcctggtggcagctgtcattgtgaaaagagaagggagctggatgggtttcttcagcaaccatgtccaacacacccartagggctgagattgagaaatttgacaggtcaaaattgaagacagaaaagcaagagaaaaatccactactgacagcagtggctaccaacctggactgattaaaaaggatcaaaggactgatgtttttgtagatatcactgtgaacagatgacatggggaccaggtaagcactcataaacttggcatgttataaccccctcagaatgtggtcacaaccacagagagaaagggcagaag

SEQ ID NO: 294355 - DNA, 465 bp, Homo sapiens
tgctgctcacctgcagaggtgtcttgggagcccagccagccagcctgaattcctccagattagaggcttagtctacattgacataaggtccttggggcttaggctagagcactctgaggttctttggctcaagcaagacaccctctagcttagtctakacctctctgaagtctcttggcttaggtttgacctccttaaagtcctccagtgcagatactgggagtccaaggctaaacagagaaggtgtacgtgcagtggaagatgaaagagccactttaggttacatcattttcaaacatgaaccacagaaacaggattttatatctgatttttaaaaagccatcatttactgagctcggtcactcactggttttgaattatatgatattttttctcatttaacctttttacatatcaccccctcccttgcatattatactggtgcactaaaacataccagatact

SEQ ID NO: 294356 - DNA, 555 bp, Homo sapiens
agagattctttacgtttcctcctgtccagggcatctgaaaccaccctcacaggttaacaagaatgacaagccatgctttaggcagaattttagttaggcattgaccagggtgcacaggtgcactttgacccacttccctgcaccarctaactaaccgagagtcacagagcaggctgaccaccagctcctctattgttcctatcgatggaatctgtgacatttgacctttttacccaagaactgcttaaagtgtttttcagaacctgaattcctgcagaacggctgccaccaatcggtttaaagacccccaccaagaaactcactcagcacaggaatgttgtttcttcatctccctgtcccatgacttcactcctcacttctggaccaatcaacaatccccacactttagccatttgcccatacagagcccttaaaaacctcatccccaatcctctcagggaggtggatttgaggtttcctcttgtctcctcatttggctgccctaccattattaaaccctttctctgttgcaactccttctgttttggtgtattg

SEQ ID NO: 294357 - DNA, 555 bp, Homo sapiens
agagattctttacgtttcctcctgtccagggcatctgaaaccaccctcacaggttaacaagaatgacaagccatgctttaggcagaattttagttaggcattgaccagggtgcacaggtgcactttgacccacttccctgcaccagctaactaaccgagagtcacagagcaggctgaccaccagctcctctattgttcctatcgatggaatctgtgacatttgacctttttacccaagaactgcttaaagtgtttttcagaacctgaattcctgcagaacggctgccaccaatcggtttaaagaccyccaccaagaaactcactcagcacaggaatgttgtttcttcatctccctgtcccatgacttcactcctcacttctggaccaatcaacaatccccacactttagccatttgcccatacagagcccttaaaaacctcatccccaatcctctcagggaggtggatttgaggtttcctcttgtctcctcatttggctgccctaccattattaaaccctttctctgttgcaactccttctgttttggtgtattg

SEQ ID NO: 294358 - DNA, 609 bp, Homo sapiens
tttgattttcttgttagagttctttccttaggactgtttgttgcttttaacgaggtggatgggggtggtagtgtgctgagcagagcagtgctgatgctgacaacaacaccacagcaaacagcaaacaggacatgcaaagcaggaggcaaactcgtcttcccaaccaacatttagctgaggactagtcagggtgtgtggctattatgttctagtagctaggagagtcccagcatgtgctcttagaggccattttggagagggtgaaatagagaaactagaaacattattcatctcagagactctctggacctgagagagaacagtaactgtattcaggcctaatccctcagatggctgccttggcggccactctctttaccatgaaaattgccccccagatggaaacctcttgaacttggaaaaacctctttatttccaaacagaaaaaaaaaaaatcactatgtatttcttcttaagaaaaaaaaattgttattcaactactrtgtcccattttcccaataaacattaattgaactgctagtgggcaccattcatccatttaacaaatactgagcccccactatgtagcatatattgtaaatgagaccc

SEQ ID NO: 294359 - DNA, 445 bp, Homo sapiens
tcaacggtgctgagattaagaaacactacctatgaggrtaagttacatgataagtacatgaactttctgggggcaaagtcaatagctttcaccaaattctcaaaggagttatgactcaaaaacttaagaaacactagcttgaatacatatttcatctaggccatggtaaagagtgacatattaacctacttcacaataggagtcacctctttagttaagaagacatatctctgccacacaaatttcactgtccctttccactgtctactgtcattcacggctagataaacacagatctttgaagttcccatttctagggccaacaagtacccatccctctatcagccagattaacacaaccattaaggttacagtgactattagtgactaagctagagcttcatgctatgtcaatttaaaagctgctttcttcagacatactcgg

SEQ ID NO: 294360 - DNA, 571 bp, Homo sapiens
gagtaatttaaaactgcaagaaggaagtcagagcataaaaagtgaaggtgagagaagctgaaatgaggatgaagagggagaactgaacacccggatcactgcatgccatgtttcatttcgtatttttctccactcaaatgcaataggcagctaactccttcctggctagtttaaacaattctgtggtatctatagcccagtccaagtcatttgggatatactaatattcagccaacatttcctgggcactgccacgcaaacttgggaaacggcactacaggcaaggtgagaacagccaatgcaaacactttttttttttctcctttgtcactagtagttctaattaraaacgaatgtggcgggggtcgggggtaagtatgcacaataaagctgatgtctaaagtactgtttccagatattcagcaattttaatcatggttataatcgccattgctcttgtcagatattgaaagtttgctgccactgcctgtaaatggagagagagcgcgcgcaaagaactttaaccattccccgaaggattagcaactcagtaccgtatattgttagcagt

SEQ ID NO: 294361 - DNA, 436 bp, Homo sapiens
gctggtcttcttttcatcacatcaccatgtgtcyttgcattcctcacaatagttctttatttcattctgctctccctccattgctacctgctctttcttcataatttttcactcctacttcataaaagccatgtcttcttatgtcctaacgaagacgcaaaacagtagtttagaattctcttccggttcatggagtacatcactttcagaaacaggaccttcctctagacttctgaatgacattccattttctttaatctgcagtactgcagagcttatcctgcaagaaggaaaatctgttcagatctactggctgctaaaagacacattgtgactctcttgactccactcactgtccatttggacgtttgtggaatctcattcttagatagacaactgtaagatagtgtagtgtgcagagcttggtgcaatttcc

SEQ ID NO: 294362 - DNA, 599 bp, Homo sapiens
gcaaccaaagactcctagtggacagatgaagagttcagttctggatctgatgagtttcaggcccatgtgacatccctgtgatgaccagcagctccaggaagtatgaatcacagaggaaaggtctgggctggagttatcagcatatgaatcatggttgaaactaggaaagcatcagaccaccaagagagagaatagcagtgggcagagggtggagtccaggagaacaagtaaaagctgaggggaagaaaacaggagaaacrggaaattaaatggtcagagaggccaaggagaaccaggagagcaggatttcctagaaaccaagaaagtaagagtttgaagaatgaatagttgaagattttacatatagccgagaggctaaagtaaactaggggctgaactttggacttgaaaagtagtttgttgatgactcatggggcaatctcaccaaagggaggaagatggaagccaggctgtgtgaggtggcaacgtgcatgggaggtgggaggcgaggaattggagggagtgggtttgggcagttttaaatgagagatgaaagagacaagacagtcctggggggaggtgggatcaagggagggctt

SEQ ID NO: 294363 - DNA, 555 bp, Homo sapiens
gctcggggtccaggagtaggggttgggatcttcgggaaaagyaactgtgggaggaggctgaagggaacggggcaggggttgggggtcgggggacgcggaggagcccaagcctggaccaaccctgcttcccaggccgcgaccctgatcctgcagcacgcgaagaagcgaaccccgcggatgggccactgagcctgaatccggggcggtgtagagccccctggagcaaggatcaggatgtcccgtctcatgagggacatggagtccgaagatcccgcgttcctggtgggcccctctgctactcgccgtcagcatttgctgtcaggtggctttggctggagccccttcctcggcatcgcagatggcatcacagctgcagggtgcaggctggggctgtctcccccttggggatgctggaaacgtcgggtggcttcgtggacatgcttgggatgatgaacgacatgactgatggaacacatgacagctggaggctcttgccagaccgtttcatcctccgctgccatctcctactccagcgcgggagagggtgtccccacg

SEQ ID NO: 294364 - DNA, 555 bp, Homo sapiens
gctcggggtccaggagtaggggttgggatcttcgggaaaagcaactgtgggaggaggctgaagggaacggggcaggggttgggggtsgggggacgcggaggagcccaagcctggaccaaccctgcttcccaggccgcgaccctgatcctgcagcacgcgaagaagcgaaccccgcggatgggccactgagcctgaatccggggcggtgtagagccccctggagcaaggatcaggatgtcccgtctcatgagggacatggagtccgaagatcccgcgttcctggtgggcccctctgctactcgccgtcagcatttgctgtcaggtggctttggctggagccccttcctcggcatcgcagatggcatcacagctgcagggtgcaggctggggctgtctcccccttggggatgctggaaacgtcgggtggcttcgtggacatgcttgggatgatgaacgacatgactgatggaacacatgacagctggaggctcttgccagaccgtttcatcctccgctgccatctcctactccagcgcgggagagggtgtccccacg

SEQ ID NO: 294365 - DNA, 491 bp, Homo sapiens
tttggatgaattgagaaactaaacagaagatacaaggtccgaataaaagaaggagaaaaatgggtattaaaggactaagaattgggaggacccaggacatccgattagagagtgcccaagggggttcagcataattacttgcttggttggcaagtttttggactctatccttgagttttttaatgttgtcatacaccaggccagattgatttaggtaaaaacaacactcctcatttaagaatatgcagagtcctcctttttcagmagtgagtaagtcaaggcctcggtggttttggaggacaactgcagctaaagagtcaacttgggcctggaggactgataaagtttgtgatatgtctgtgatgctagcagagaagtcattagacaggctacaaaatgtcgtgacagaggttgaaatgcctgctattccagtactgagagcaatagtggaggcagaaagtcctaaaccgaccatcaagggaattagtgga

SEQ ID NO: 294366 - DNA, 588 bp, Homo sapiens
agtctttcttatcacgttctagtcctgaagggcttatgatttargattgctcagcgacataaaaccaggggataaatgttttgctgaatccctgctgcttccccatcttccagctaccccaagcccacacacgggaacacacacacacacacacacacacacacacttagcacatatctagcatgcagcaccaactaatgtcagtggaatgaaaaaacgatgcttgttcacaggcctcccaatccacagggctcagaagggaacaaaataggaaccttgcctgtgcaatcagagaagggcaggtagggtgttggatgaacccatcccttgcaagttagatctcacgtgccactgtggggagaggcacaggggcaccaaaacatggagcctgggggaaggatccgtgccttgtttttgtattttatttctcttggcaataattctctgttgtttgcactggaacctcacatgagaacatcaaatggggctaagggtggaggggaaaatgatgcaaaagaatgtctatcttattctgattcatagagcgatttccacccaggactaagaacagtgatggtaggatccttt

SEQ ID NO: 294367 - DNA, 588 bp, Homo sapiens
agtctttcttatcacgttctagtcctgaagggcttatgatttaggattgctcagcgacataaaaccaggggataaatgttttgctgaatccctgctgcttccccatcttccagctaccccaagcccacacacgggaacacacacacacacacacacacacacacacttagcacatatctagcatgcagcaccaactaatgtcagtggaatgaaaaaacgatgcttgttcacaggcctcccaatccacagggctcagaagggaacaaaataggaaccttgcctgtgcaatcagagaagggcaggtagggtgttggatgaacccatcycttgcaagttagatctcacgtgccactgtggggagaggcacaggggcaccaaaacatggagcctgggggaaggatccgtgccttgtttttgtattttatttctcttggcaataattctctgttgtttgcactggaacctcacatgagaacatcaaatggggctaagggtggaggggaaaatgatgcaaaagaatgtctatcttattctgattcatagagcgatttccacccaggactaagaacagtgatggtaggatccttt

SEQ ID NO: 294368 - DNA, 588 bp, Homo sapiens
agtctttcttatcacgttctagtcctgaagggcttatgatttaggattgctcagcgacataaaaccaggggataaatgttttgctgaatccctgctgcttccccatcttccagctaccccaagcccacacacgggaacacacacacacacacacacacacacacacttagcacatatctagcatgcagcaccaactaatgtcagtggaatgaaaaaacgatgcttgttcacaggcctcccaatccacagggctcagaagggaacaaaataggaaccttgcctgtgcaatcagagaagggcaggtagggtgttggatgaacccatcccttgcaagttagatctcacgtgccactgtggggagaggcacaggggcaccaaaacatggagcckgggggaaggatccgtgccttgtttttgtattttatttctcttggcaataattctctgttgtttgcactggaacctcacatgagaacatcaaatggggctaagggtggaggggaaaatgatgcaaaagaatgtctatcttattctgattcatagagcgatttccacccaggactaagaacagtgatggtaggatccttt

SEQ ID NO: 294369 - DNA, 278 bp, Homo sapiens
tattatctcatgtattctgcacagagacttattcccaatatacaaataagggaactgaggctcaggaaggtaaacaaatcccccaagacctcaaagcctagtggtagcatctggatttcacttcaggtttccctggtttcaaagcccakgctcttttcattcctcagagctacctctcagcccactgcagagagggtgaccatcaactcctcctggagactagcatttgaggttctaagaggcagccattgccactgatgagaaaagctttttagttg

SEQ ID NO: 294370 - DNA, 545 bp, Homo sapiens
aaacaacagcatggttactaccttggttacctatgttattatttacagctgttatcttacaaatgcacttccacatggcttttaaacaaagatgataaccagggtaagtcagagaccaagaacccaattgcaatcaccttatcggacattaaattcatgatgtttttatgtggtttgatttgtgttctgatcaaagaagctaagcaggatacagaagatgtaccatggccatttggtacgtggacccaggactgtcccatgtgtgactttccttaatctacacaacaactggctaaaataaagcattattaactccattggatmgattaagaaactgcagctcagagaaaataagtggcttgtgcaagagatcagaggtagagccagcatttaaaccaagatcttctggctctaagatgcatctatggtctttcttccaacatgctaccccaggggaactcctggctccacctctgacctaagtactctctgaccaaaatcaagtagagcctacagatgtcttctgtatggcatcacagaaaagg

SEQ ID NO: 294371 - DNA, 454 bp, Homo sapiens
acagaccctctgaaggaagtggactgcttctgcaggaccggggagacaccccaaatagtgggaaagggagaccctcctcttctgaacacacaccccaactggggaagctgaaggtctgtttgggggagaagtttctgactttacctggagctctgtcaagttagagagccgactgaaatacaggggtggaggaagcagcagaaaggccctgggagctcgctgggttcccatgcagcccattcctccctggcaccacagggatccattgggagggtggccagaggagcagrgggtaaaactccacagggagaaggaattctttagctgaacttgggggagggagccagttggtagtgcagacttcataggcagggaaagaactaaagcccctttctttcacagctgggaggtgaatagcctcaggcaagttctcaagcccatctcaccctccacg

SEQ ID NO: 294372 - DNA, 568 bp, Homo sapiens
aactctggtaatataataaaacaaggctcttcaacmtccccccaaaaatcacactagttcaccagcaacagatctaaaccaaaaaggactccctgatttgcctgaaaaagaattcaggaggttagttattaaactaatcagggagggaccagagaaaggcaaagaccaatgcaaggaaatccaaaaaatgatacaagaagtgaagggagaaatattcaatgaaatagatagcttaaagaaaaaaacaataaaaagttcaggaaactttggacacacttttagaaatgcgaaatactctggaaagtctcagcaatagaattgaacaagcagaagaaagaaattcagagcttgaagacaaggtctttgaattaacccaatccaacaaaagaaaaaagaataagaaaatattaacaaagcctccaagaagtctgggattatgttaaatgaccaaacctaagaataatcagtgtacctgagaaagaagagaattctaaaagcctggaaaatatatttaggggaataatggaggaaaacttccccagccttgcaagagacctagacattcaaa

SEQ ID NO: 294373 - DNA, 608 bp, Homo sapiens
aatttattaggaatggggtgatagcctgggcattcccttagtagcaaatagtttacactattgaaaacacagaaaaggaattgaggacatgctagagtactagacagtgcagaatgttatcattctacttttagggggagacgttgctggacatttgtttctaatggtaaatttactaagtcaccttatatcagattatttttcatttggaaagtcaccaaaatgaaaccttttaattatatggatgtgatgcaacttccaccccaatattctgaaagaagagtgtaactagacttttatagtttgttgtggaagcttgagactctgacttagtaggcaaatggggtgtcatagcgtctctttttgtacccttggaatatgatgaaaaagaaatgaaaatatgtacatgacagccatggaaacttggggccaaaattatcttgggagaaacttgttctggtcctggcatgtatctattgccagaatgcttcttgtcctagcctcactggtaaaaatgtgtgatygtcctatgccagttaaagcaaattattttgtgtgctttctggttatcgagataaagcagaggttggtaaactgtacccaggggc

SEQ ID NO: 294374 - DNA, 608 bp, Homo sapiens
aatttattaggaatggggtgatagcctgggcattcccttagtagcaaatagtttacactattgaaaacacagaaaaggaattgaggacatgctagagtactagacagtgcagaatgttatcattctacttttagggggagacgttgctggacatttgtttctaatggtaaatttactaagtcaccttatatcagattatttttcatttggaaagtcaccaaaatgaaaccttttaattatatggatgtgatgcaacttccaccccaatattctgaaagaagagtgtaactagacttttatagtttgttgtggaagcttgagactctgacttagtaggcaaatggggtgtcatagcgtctctttttgtacccttggaatatgatgaaaaagaaatgaaaatatgtacatgacagccatggaaacttggggccaaaattatcttgggagaaacttgttctggtcctggcatgtatctattgccagaatgcttcttgtcctagcctcactggtaaaaatgtgtgatcgtcctatgccrgttaaagcaaattattttgtgtgctttctggttatcgagataaagcagaggttggtaaactgtacccaggggc

SEQ ID NO: 294375 - DNA, 479 bp, Homo sapiens
agaagtgggagcccatgaggacagttaggagcctgtgttagttccttttgcctttgatcttagtggcatgggcccttcgtcttgaagctaaacacacacccccggcccaggagtcagagaagctgaaggagggtccagagacggatggagcagttgcaggccatagaggttacccagcaggtgagtgagaggtatgggagctgcaacatggtggctgcttcttttggccctccaaagctccataagtgtgtcacttgttgcccaccctaaccggaaatatggaaggaagggcatcctgggatgtgtggtccagccgagccaagtggacatattgcaaagccamcacagctggcgtgaatttgtttctcagattcttttgtgaacaggcctaagattacggagtctcagggagagacaggtagatttccttgtgggtccttttcgattctggctgatttcgtacccatccaccctttcaa

SEQ ID NO: 294376 - DNA, 603 bp, Homo sapiens
aatatacttttaattctaagaggacaaaggagaacagataatataggatggatttccacattttaatgtgtrcagtctggattctcagaatcagaaggtctgatttctcacaaatcttgtgttcctgaacagtcacacacagtctcgactgaagctgcagaagtgagagatcagcattgcattttccagtgtgaagttggaattccttctctacattattcctaaatcatccctagtgtatcgtgtaattcaggtacttctaggacacttaaaaaaatcctctttcctttcactctggctggttaacagagagccaatgggtcttctcagggagggggatagatttctggtgttcaatgatttgggctaaatctaatgccactcaaaatgtcaggtgattctgagagaatctcagatcagcaggaagttgtcttaagggactgactttcccttacctgttggataaactgagctacagcagaaatgcattggacaactggatttcactggcagatggtgagctccttaagggcaaggattctagttgacattagtactcttaatatctcacaggtgtatgacaaacagggaagcccagttagt

SEQ ID NO: 294377 - DNA, 549 bp, Homo sapiens
accttgcaatgacccagccagcctctctgatggtacgtgaacctgtagcatcagctcttaataatgtgaccactctggagcacatcataaactttaatgcaccaattataatgatggtaataacttttttgcttcatgggctgaatcccattcctccccgtccattttctccttgagagaaggcggtaagaacaagggagctgccatttcaaaggagattgttactgatgcggtgacagctgagctgagactcaaaggaggtgagggagtgccaaaagagcctgtgcccagaaaacccggtggtggagcagttcaggcaggggcgagggcagccctaaaggccgaaactgtgctgagcagttaggcactgcacagagtgggtttatagggaagagaacctatacgttyaggagaaaatggaatattaactccagagtttttcatttttaaagttttaggtgaattgtaaaatgatacccacttgaaatataatcccatctaatcttcaaaaccttatcctctgggaaacaagtagtgactccagaaaaa

SEQ ID NO: 294378 - DNA, 549 bp, Homo sapiens
accttgcaatgacccagccagcctctctgatggtacgtgaacctgtagcatcagctcttaataatgtgaccactctggagcacatcataaactttaatgcaccaattataatgatggtaataacttttttgcttcatgggctgaatcccattcctccccgtccattttctccttgagagaaggcggtaagaacaagggagctgccatttcaaaggagattgttactgatgcggtgacagctgagctgagactcaaaggaggtgagggagtgccaaaagagcctgtgcccagaaaacccggtggtggagcagttcaggcaggggcgagggcagccctaaaggccgaaactgtgctgagcagttaggcactgcacagagtgggtttatagggaagagaacctatacgtttaggagaaaatggaatattaactccagagtttttcayttttaaagttttaggtgaattgtaaaatgatacccacttgaaatataatcccatctaatcttcaaaaccttatcctctgggaaacaagtagtgactccagaaaaa

SEQ ID NO: 294379 - DNA, 597 bp, Homo sapiens
aatttatggtcatcacagtgatggacattctgaaggaaaagtatagaagaaaatatattatggaactttctctttccacggccacatttgagccctgtcccctgcacaccatccctcctcattcagctggcttccagaatcccatctgtatcaatgagaataaattgagtgcaggtaagaaaccttgactaatgtttatctcatatgaartgaggtctggagaaggaggggtcagggttgcttgagaaactcaatgacctttccttcatggtaatgactacagcagccccaaacatcactcagtggtgccccaagcaggcaggaagggggaggccagaaaagatgccctttacttttccagctgtctttgtttatccatgaaaaaaagagctcctcagctcctccacttatgtctcatgggctggtacccagtcacatgcccactcctaatgattatcagcaaatgggaatggggtggttatgcttgacttgcatgtactcgattcatcccagggcctgcaggaggggcttagctaccttgaatatgttgcagccaaaccaaatgggtttccattgattatagaagaaggaacaatt

SEQ ID NO: 294380 - DNA, 595 bp, Homo sapiens
agcatcaagctaaaaaacatgctttgttctctatagtagatatttcttatcggtgaagaattacacacaatttcattggttaaaattattttgaagtcttaaatgggcattttacaagctttttcttatgacatttataagattccagggatcaagagcatcagatcatcttgatgccttatttcctatatcattgctgtagtgtggatatttgtcatctaaattctatgttaaaatttgatctccaatgttggatgtggggcctaatggaaggtgtttgggttttgggggcagattcctcatgaatagagtgatgccttccatgaggaagggggtggtgagtgagccctcattctgttagttcccttgagaggtggttgtcaaaaagagcctgacacctccctctcatatcccttgtttcctctcytaccatgtgatctctgcacatgctggctccacttcactttctgccttgagtggaagcagattgaaggcctcaccagatgcagatgctgatgtcatgcttcttgaacagcacgctgaatcatgagctaaataaacctctattctataaatattacctggcctcatgtat

SEQ ID NO: 294381 - DNA, 522 bp, Homo sapiens
tccccctctccagttgtaacaaacaataaaaaacctcaccagacattgcaaaaatcccctgggggtcaaaaaccccacaatctgagacattgctcttgacgaaaatattcctaataaattaaggactgatttttaaatcctgtttttccttgtaagatattagatcctccatatattctatagccttcaagaattggaaagagtagagagcagagactttatcccttccactatcacatcttttaaataaaggaagaaatttgaaaaataattaatacaagtatgggttgggttagtacattttttaaaatccctatcattgcttccttaaaatgtctgttaacatttcagcagtcaaggtttaattatagtgatgtgcctatttttatgggttttctgttcctcttctagaatatgttttgctagtgtttacctccaataataccatcaaagagaattatcttgcaagattaaaaatatraatatagtggagataaatcagacattcacaaaggtctactt

SEQ ID NO: 294382 - DNA, 571 bp, Homo sapiens
ctcccgatctcaggtgttctgcctgcctcggtctcccaatgtgctggtgtgtccggaattggtgggttcttggtttcactgacttcaagaatgaagccacgcacctttgcagttaggattacagttcttaaagatggtgtgtccagaatttgttctttcagatgttcagatgggtctggagtttcttccttaaggtgggttcctggtctcactggcttcagcagtaaaactgcagacctttgcagtaagtgttatagctcataaacgcagtgcagacccaaacactgagcagtcttaaaattcactgtgatgagcaaaataaaaaacactgaacacccccaaggcagacctgaattggttgcggctcctggctcsggtggcctgcttttattcccttatctggccccacccacatcctgctgattggtccattttacagagagctgattggtccattttggagagagcagattggtccgttttgacagagagctgattggtgcatttacaaacatttagctagacacagactgctgattggtgcatttacaatcctttaactagacacaaa

SEQ ID NO: 294383 - DNA, 673 bp, Homo sapiens
gtcaattttataaaattagttttattttgttccaagaaaaaaaaatcgatatctatacacattttataaattgggacaaatatcccaatgaaaaaatttgtataactttattaacatgaaatatttaatatctttaacatayttgaatctcaataacataaagatagctttctaatatttccttttgaattgttatagatttcagtttatatcataacactgagcagtcttaaactttctaatccctttattataagaaaagcaacagaacaagcaattgaaaacaggcagtgaataaatactaagcctaatcattctatgggaatttgaatgttgaaagataatactatttccttctaaatgaattactaatagattttttactcatagaaacttaggccatagaaaaatgaaagaatttcagcctgtgggaagaaaaaaaggcattggttagaaagagaaataggtatttttctaaattatatgtctattttctttagcagtatgcctggaatgtactactgaatttgcttgtcttggttctctacatgattttactcaataaattttgaagccatttattcatctaatttttcttttaatattcattttctgcttgctggatgatgtgggatacaaccataaaggaaagagttttgtcccccaaaatata

SEQ ID NO: 294384 - DNA, 550 bp, Homo sapiens
catactaataattgaataaaactaagttaaaaatgcacagtaaaattgaaaggattttttaatagtttcagggtgaaagagagagaataacaagagggttagataaggctgactgtatggcccttctggaagtgtttgttgatttcaaaaaccaaaaggctggcattttatagtgaagatgggacaaacagaaaatgaggtcttgggtgaaaggcaaaatattagacctgaaggctcttccttttttttttgagtcggagtctccctgtcgccatgctggagtgcagaggtgcaatctgcaatctyggctcactgcaacctctgcctcccgggttcaagcaattctcctgcctcagcctcccaagtagccaggactacaggcacacaccaccatgcccagctaatttttgttgttgttgttgtattattagtagagatggggtttcaccatattgtccaggctggtcttgaactcctgacctcgtgatccacctgcctcggcctcccaaagtggggagagattacaggcatgagctagtgtgcctggccc

SEQ ID NO: 294385 - DNA, 585 bp, Homo sapiens
gaacaccacacgctcggacctacctgagagtagcgggtgggaaaagggagaggttcaggaaaagtaactaatgggtactaagcttaatacctgggtgacaacataacctgtacaacaaatccccatgacacgagtttacctgtataacaaacctgcacgtgtactcctgaacttaaactaaaagttaacaaaaggccaggtgcagtgtttcacrcctgtaatcccagcactttgggaggctaagacaggtggatcacctgaggtcaggagttcaagaccagcccgaccaactaaatacaaaaaattagctagatgtggtggcatgtaatcccagctcctctggaggccaaggcaggagaatcacttgaatccagaaggcagaggttgcagtgagccgacattgtgccactgcactccagcctgggcaataagagagaaactctgtctcaaaaaaaaaaaaaaaagttaacaaaacggctttctctagttctaaagcaccaacacagaggtggtcaaaatactctaagaagcactgggaaacactgaggggatggttcaaacatcagacctaaggcctaatttccc

SEQ ID NO: 294386 - DNA, 585 bp, Homo sapiens
gaacaccacacgctcggacctacctgagagtagcgggtgggaaaagggagaggttcaggaaaagtaactaatgggtactaagcttaatacctgggtgacaacataacctgtacaacaaatccccatgacacgagtttacctgtataacaaacctgcacgtgtactcctgaacttaaactaaaagttaacaaaaggccaggtgcagtgtttcacacctgtaatcccagcactttgggaggctaagacrggtggatcacctgaggtcaggagttcaagaccagcccgaccaactaaatacaaaaaattagctagatgtggtggcatgtaatcccagctcctctggaggccaaggcaggagaatcacttgaatccagaaggcagaggttgcagtgagccgacattgtgccactgcactccagcctgggcaataagagagaaactctgtctcaaaaaaaaaaaaaaaagttaacaaaacggctttctctagttctaaagcaccaacacagaggtggtcaaaatactctaagaagcactgggaaacactgaggggatggttcaaacatcagacctaaggcctaatttccc

SEQ ID NO: 294387 - DNA, 617 bp, Homo sapiens
tacatatttcccctgttgtttcacttcagtgaatggtcatatagtattccatcacctaacttaataatgtgttctagattttactctctctccctatagcacccatcctgtttcttattcttactccacaatacactcccaacttacacatacagtctcttctttaggtgttgggggttgggagttattacaagatgacatggtktatgcatttatttctttgtctacattgattgtactgatttacagtctcaccagcagttcataaaatccttccttgcggctaagatatgggcacaaggctaaaatttatatctttagctgatatctcattcctgaacactcatctcatttgcaactgccttgaatgtcaaataggcatctcaaccttagtaagtaaaacagaattctttatctgcatcctgccaatcctgcttctttcccagtaatttttcactcagtaatttgagccattattaatctatattctaaagcttcaaaacttggagtcattaccagctgttttatatacaccattccaagccattagaaagtcaattacatttcacctggaaatgtattgcaaatctgacgattgtctcttacatgaactacta

SEQ ID NO: 294388 - DNA, 622 bp, Homo sapiens
gacaacaaataatgctagcgatgccaagtgaatagcaagtttaaccaagttatcctgtatggggagccacagttacttaaaatgtctgacaatccacagtcctggtgatcatgtggaatatcaccctcttaatcgatgcaaaaatttatttaatagtcatagtgctaaagatggcatgccctccaaatgagcaattgcactcttagtyatgcatttatatgaatatgtatataggaatagtcatgataaaactactaattattataaaatttttggaaaaagcataactattaaaaatgaaattggaaacttaagactactcaatacgtcaacaaaaatgaatgaactatgcaaaatcatggatgaatttcaaaaatgaaatgttgagaaagaaaatttgcactgttttcaagtctaataccaaacagaactaaatcgtatttctggataaacaaattagaaaataaaattataaaaaaagcaagaaaaaaattaccacaaaagttgggatgaagttacattaagagatggcatggtcttatacaaagaaaaccctaaagactgtgaaagactcctacacttgacaaattactgcaataaattttcagaatacgaagtcaat

SEQ ID NO: 294389 - DNA, 622 bp, Homo sapiens
gacaacaaataatgctagcgatgccaagtgaatagcaagtttaaccaagttatcctgtatggggagccacagttacttaaaatgtctgacaatccacagtcctggtgatcatgtggaatatcaccctcttaatcgatgcaaaaatttatttaatagtcatagtgctaaagatggcatgccctccaaatgagcaattgcactcttagttatgcatttatatgaatatgtatataggaatagtcatgataaaactactaattattataaaatttttggaaaaagcataactattaaaaatgaaattggaaacttaagactactcaatacgtcaacaaaaatgaatgaactatgcaaaatcatggatgaatttcaaaaatgaaatgttgagaaaraaaatttgcactgttttcaagtctaataccaaacagaactaaatcgtatttctggataaacaaattagaaaataaaattataaaaaaagcaagaaaaaaattaccacaaaagttgggatgaagttacattaagagatggcatggtcttatacaaagaaaaccctaaagactgtgaaagactcctacacttgacaaattactgcaataaattttcagaatacgaagtcaat

SEQ ID NO: 294390 - DNA, 622 bp, Homo sapiens
cactcacttttctctacattctcatcaatacctgatgygttgtgacttttaaaaaatagccattctgactagtataaggtggcatttcattgtggttttaatttttatttctctgatgatgagattgagcattatttcatatgtttgctgtccaggtggaccggttggcttttgagaaatgcctgtttatgtactttgtccagtggggaatggggttatctattttggtgttgttgagttgtttgaatttcttgtctattctggatattagtacttagttggatgcatagtttgcaaatattttctcacattcttcaggttatctctttcctcagttatttcttttactgtgcagaaacttttttgtttaattaagtcccatttgtctacttttgtttttgctaaatttgcttttgaggtcttagtcacaaattttttgccaaggccaatgtctagaagagtttttccaggttttctatgactatttttatagcttcaggtattatatttaagtctttaattcatcctgagttaactttgtggatggcaacagataggggcccagttttattcctctgcatgtggctttccaattttccctgcactatttattaaagggaat

SEQ ID NO: 294391 - DNA, 622 bp, Homo sapiens
cactcacttttctctacattctcatcaatacctgatgcgttgtgacttttaaaaaatagccattctgactagtataaggtggcatttcattgtggttttaatttttatttctctgatgatgagattgagcattatttcatatgtttgctgtccaggtggaccggttggcttttgagaaatgcctgtttatgtactttgtccagtggggaatggggttatctattttggtgttgttgagttgtttgaatttcttgtctattctggatattagtacttagttggatgcatagtttgcaaatattttctcacattcttcaggttatctctttcctcagttatttcttttactgtgcagaaacttttttgtttaattaagtcccatttgtctacttttgtttttgctaaatttgcttttgaggtcttagtcacaaattttttgccaaggccaatgtctagaagagtttttccakgttttctatgactatttttatagcttcaggtattatatttaagtctttaattcatcctgagttaactttgtggatggcaacagataggggcccagttttattcctctgcatgtggctttccaattttccctgcactatttattaaagggaat

SEQ ID NO: 294392 - DNA, 1001 bp, Homo sapiens
tctcagactatggcaatggtaatctgcattaatggcaaaatcattaatattgatgaaaatttttattttctgcccttcccaaaatcatctacttctttggaatttacattagcaggcaacaatggcagtggcaataccaccttttggaaggtaactgtagctccacccttatctgtaaaaagatatgtattaagacccccagttgatgcctgaaacagtggatagtaaacatgtactatttttcctacacatacatacttataatagactgtaatttaaaaattaggcatagtgaaatttaactaataattatagtagtttattagttaaattactactaattattatagtagtagtatttrtttaaactaatatactcattatgggagtagtattaaactaataggctaattatattagtttaataattctattagattattagttaaactaatactactaatgataatagaattatattagttatactaatatattatwtctcagactatggcaatggtaatctgcattaatggcaaaatcattaatattgatgaaaatttttattttctgcccttcccaaaatcatctacttctttggaatttacattagcaggcaacaatggcagtggcaataccaccttttggaaggtaactgtagctccacccttatctgtaaaaagatatgtattaagacccccagttgatgcctgaaacagtggatagtaaacatgtactatttttcctacacatacatacttataatagactgtaatttaaaaattaggcatagtgaaatttaactaataattatagtagtttattagttaaattactactaattattatagtagtagtatttatttaaactaatatactcattatgggagtagtattaaactaataggctaattatattagtttaataattctattagwttattagttaaactaatactactaatgataatagaattatattagttatactaatatattat

SEQ ID NO: 294393 - DNA, 673 bp, Homo sapiens
agtagtatttatttaaactaatatactcattatgggagtagtattaaactaataggctaattatattagtttaataattctattagattattagttaaactaayactactaatgataatagaattatattagttatactaatatattatttataggagtagtatacttctataattatataggaatataattatattccttttactaataattatatgaacataactaataatagaattattataacaatatactgtagtaaaagttatgtgaatgtggtctctttctcttgaaataccatattattatctacttttctttctgtgataaagaaaawagtagtatttatttaaactaatatactcattatgggagtagtattaaactaataggctaattatattagtttaataattctattagattattagttaaactaatactactaatgataatagaattatattagttatactaatatattatttataggagtagtatacttctataattatataggaatataattatattccttttactaataattatatgaacataactaataatagaattattataacaatatactgtagtaaaagttatgtgaatgtggtctctttctcttgaaataccwtattattatctacttttctttctgtgataaagaaaa

SEQ ID NO: 294394 - DNA, 513 bp, Homo sapiens
catcctggccaacacagtgaaaccccatctttactaaaaatacaaaaaaaattagctgggcatggtggcgtgtgcctgtaatcccagctacttgggaggctgaagcaggagaattgcttgaaccagggagttgcaggttgcggtgtgtggagatcatgccactgcactccagcctggcaacagagcgattctctgccaaaaaaaataaaaaaataaaaaaaaaataaagtgcaatttaacccatggtaaatacaaggaaaaaaataataatgaaaagtaatatatgaaataaaaaaggaaaaagactaaaagatattagaaaaaattaaaaagagcaaagagcaaagtgtagttatttgaaaagattaataaagttagtaaattacaagccttcaaaactattaaagaartgtaaaaacatacatgcacacaggttactaataataggaatgaatgcagacattattactgattcttcagacgttaaaagtataatcatgaaaatttacaaac

SEQ ID NO: 294395 - DNA, 560 bp, Homo sapiens
taaattcctaaactcacagcctgatctttacaatgaaatttgaaatttgaaatggaacaaataagtagtatttttgattacttaattaaacattatcttccatatccaggtacatatacayatacacaaaaatatagaccaatattaatatatacagatatgtacacattgatatgtaatatattaatttttataaatctaaggaagaaaggattttaaggaaaaagacaaatgaaaaataaatattcattagttcatagtaaactattattaaatatgatagccttatgcaattttaatttcatatttcctcaatatcaaggaatatctttatattgtaagatgcatgtgttcacgtatgttaatgtatctataagtggaaaatatcttgagttcaatggtatgttatcattgccattggccaggtggtagacatggtaacagtagtttacagcctgaacatggctgaaccttattatttctgttagtgtaactagacatcatgaaacttttgaagtttcaattgataataatttaagaattatttgaataataaaatg

SEQ ID NO: 294396 - DNA, 1151 bp, Homo sapiens
ctgtttgcctaggtatcaccagcggaggctgcagaatagcaaatattgcaggatgrcaaatattgctgcctgatcctccctctggaagctttgtcccagagggtcacccacctgtatgaggtgtctgtcggcccctactgagaggtgtctcccagttaggctatatgggggtcagggacccacttaaggaggcagtctgtccattcttagagctcaaatgccatcctgggagaatcactgctctcttcagagctgtcaggcagggacgtttaagtctacagaagtttctgctgcctttcgttcagctatgccctgcccacagaggtggggtctatagagacagtaggacttgctgagctgcagtgggctctgcccagtttgagcttcccagccactttgtttacctactcaagcctcagcaatggcagacgtccctcccccaggcacgctgcagcctaccaggtggatcccagactgttgcactagcagtgatcaaggctctgtgggactggccccactgagccaggcacaggaggaaatctccagatcwtatcaccagcggaggctgcagaatagcaaatattgcaggatggcaaatattgctgcctgatcctccctctggaagctttgtcccagagggtcacccacctgtatgaggtgtctgtcggcccctactgagaggtgtctcccagttaggctatatgggggtcagggacccacttaaggaggcagtctgtccattcttagagctcaaatgccatcctgggagaatcactgctctcttcagagctgtcaggcagggacgtttaagtctacagaagtttctgctgcctttcgttcagctatgccctgcccacagaggtggggtctatagagacagtaggacttgctgagctgcagtgggctctgcccagtttgagcttcccagccactttgtttacctactcaagcctcagcaatggcagacgtccctcccccaggcacgctgcagcctaccaggtggatcccagactgttgcactagcagtgatcaaggctctgtgggactggccccactgagccaggcacaggaggaaatctccwgatctgccagttgttaagactttgggaaagtcgtagtatttgggtggaagtgtcccatttttccaggta

SEQ ID NO: 294397 - DNA, 574 bp, Homo sapiens
gtaatagctcacataaatctatttctcttatctaactgaaagtttgtactctgtgaataacatttcctcttcctctgtctatataccccattcctggtaaccacaattctacaagtccaacatttttagattccacatatataagtgagatcatgcttcaaaattgttcagagtagactttaaatattgtcaccacaaaggaaaaaatatgtgtggtgatggatatcctaattagatcaactgaattattctacaatatgtacatgtatcataatattatatttacaccataaatatatgtaattattgcttgtcaattaaaaattgagastatttctatatgataccaaaggacaaatgtgaattagaataccattttgaaaaaattgaaaacatgacatagctatagataaattacacaaaatctactcaagttctgcatgctgaaacctaaaaatattgttaagatatagtgaagaaaatttaaataaatggagagacatgttaataaattggaaggctcaaccactttaaaatagcaatcttctttaaatttaacataattgctatgcaa

SEQ ID NO: 294398 - DNA, 644 bp, Homo sapiens
catttttttacattggattatctgmctttatctttttgtttataattattttcagatacttgaaattggtgctatgttgtttatatctattgtaaatgcatgttattctctgtatgccattttattccttaaatgtttgatgaacagatcaaacagaacaatcatttggtgaacaaaacatgatccattttatcagattttccttttggattaagggattcttccatcaagtttaaaaaatgtttccttatttcaaattaatatatatgtattctaatgtattacttagctccttaatgtaagctttatataagtgtatatttattttatttcacattgagatatacagtccaccaagattagttttttgtgtatacaatgtgaaatataactacttgatcaacacacacttaagttttcttgtattgaatattgcagcattttttgctgtaaacactttttttattgttaaaatgctaattctttgtgatttcctgaccagttggttattaaagtatttatttgtcgatttctaagctttgggaattttccaattaagtcgtctaatttatttttaatgtatttgtctatgtctcaccacatggcaattcaaaaaacactattatattgttatttaaaacact

SEQ ID NO: 294399 - DNA, 644 bp, Homo sapiens
catttttttacattggattatctgactttatctttttgtttataattattttcagatacttgaaattggtgctatgttgtttatatctattgtaaatgcatgttattctctgtatgccattttattccttaaatgtttgatgaacagatcaaacagaacaatcatttggtgaacaaaacatgatccattttatcagattttccttttggattaagggattcttccatcaagtttaaaaaatgtttccttatttcaaattaatatatatgyattctaatgtattacttagctccttaatgtaagctttatataagtgtatatttattttatttcacattgagatatacagtccaccaagattagttttttgtgtatacaatgtgaaatataactacttgatcaacacacacttaagttttcttgtattgaatattgcagcattttttgctgtaaacactttttttattgttaaaatgctaattctttgtgatttcctgaccagttggttattaaagtatttatttgtcgatttctaagctttgggaattttccaattaagtcgtctaatttatttttaatgtatttgtctatgtctcaccacatggcaattcaaaaaacactattatattgttatttaaaacact

SEQ ID NO: 294400 - DNA, 375 bp, Homo sapiens
gctccaaaatctcaacttttgtcttctgcacaccagcaggtccaacaccacatggaagccaccaagacttgggcttgcaccctctgaaacgacggctcaagctataccttagctccttttagccatgactggagctggagtgtctgggaggcagcraaccaagtcctgaagctgcacagagcaatagggccctgggcccagcccacaaagccattttttccctcctagggctgctggcatctgatgagaggggctaccatgaaggtctgtgacatgccctggagacattttctccattaacattaactattaacattcagctccttgttacttaggcaaatttcagcagctagcttgaattcctccccagaaaat

SEQ ID NO: 294401 - DNA, 375 bp, Homo sapiens
gctccaaaatctcaacttttgtcttctgcacaccagcaggtccaacaccacatggaagccaccaagacttgggcttgcaccctctgaaacgacggctcaagctataccttagctccttttagccatgactggagctggagtgtctgggaggcagcaaaccaagtcctgaagctgcacagagcaatagggccctgggcccagcccacaaagccattttttccctcctagggctgctggcatctgatgagaggggctaccatgaaggtctgtgacatgccctggagacattttctccattaacattaactattaacattcagctccttgttacttaggcaaatttcakcagctagcttgaattcctccccagaaaat

SEQ ID NO: 294402 - DNA, 562 bp, Homo sapiens
tctgcacatttcaaaaattacatttttccctaaaaacatttttacagtattgcatctatattttataattaaggtattttgatttttaaaaaatattcaagctatttatacatattaaatataatattatttaaaatatatcaaagatatatttttcttatttgtagttcaaagcgtgcttgatcaatattggtacttatactgtttttcttacttaactatggaatctctctctctaggtatagatacaaattctgataagaaaaagaaatatcttcaccccatggttcaacagagaaaaacagggaatagtgaggacccacatttgaacaggtttttctacacaatatttatttttattaaagaggtgaaaccactttttaatcctgcattatattcattatatcagagtggctttgttactgtttaagttattattttggamcaaaaacccacatgcttgttccatctcccaattctcccacttacagtttgcaaatgaaaaaaatgttatcgagtatttttgatggccttgttttctcttcagtgttgagtggtagag

SEQ ID NO: 294403 - DNA, 615 bp, Homo sapiens
cactatgttgtccaggctgatttttaactcccctatgctcaagtgatccacgcaccttgcccttccaaagtgttgggattacaggtgtaagccaccacrcctaacctggtataatttgcaatcaatcgaatgacttgttgggcctgactctgcagctcatcatgggcaactcttttcacataatcatttgcagttctattatcaagtgttaagcaggactcaagctgcagtttaaatagtgtgtaattctctattgcagacagcattatttgcaatccagaattagatgttgctccagaaaccctaggtgactaaagttgctgctggaactctcctattaagacttgtgaggaactcctgcactgcatcctatgtaccaccagtacgtctggcgccatgggatctgatgactccagtgagccaacaggcagtaccaggtttactgcagcctgaacatgctgcatatttctgttttgttctggcccctatttaacaacgagagattatcaagttactttctaaatgagtccaatctgtattccagaatgttcaatgggctctttctaaaacttaaagagacctactaaatgttcctcatttttataatagaagttt

SEQ ID NO: 294404 - DNA, 526 bp, Homo sapiens
ctttccttctcctaattttaaaataaattctggactttattttcttttttataaatttacttgtatctaatttctatcgcaatttccttatctctagaaaactttacatcttgaccaatctatgtgtgctattatggtacaaattcctagaattggtgatagtggcacaatctgtcagtatcaggtccatgctttacaagacgatkgatgtatactgaaaatagctatgattttttcctacagatatttttctggcctaaggagatcacttggtccaggttcagggcaagtcagagtcctgcagagtaaattccccagaagtgatcttcatccaactagggatttggtggataaataccacatacttcttcctcctcaactgggataaattgaggttatatattatactgtcaccagagtactctggaaaaactaacctccaggttcacaaatgataactggtttactaatgcacactttattgctttctgtttttcccttaccattgccactttttcattaccca

SEQ ID NO: 294405 - DNA, 611 bp, Homo sapiens
acagagcagataccagtagtctcagcacagactgacttccactaacctattgttattgagttctcagatatataagcatagaccagccagatttggctcaatcatgagaaataataaatacttattgttttaatctgctaagttttgatgtagtttttactcagcaatagctaattgatggagtatgtcttattgattccccccatatggacacttcttccaaaagttattgtagggagtcattacatactgaaattacagaactacatttacrtattatcgtgtttactatggttaaccaacctataaattataggtaaacttaatgcattctaaattcttcttattaagaagatgtattatactatattatatattatcaagttattagatatgtctaattccatgttgcacagaaatattttttcatattttatgttcatctccacttgacttctttgtagtcaagtttttttctgtctggaagcttattttttgtctttaacttccttaacattaacatcgataatgtagaggcagttttgtttgttttattttaatctattgtcttttcatcatttgtatttaatcattaaaaattattgactatt

SEQ ID NO: 294406 - DNA, 631 bp, Homo sapiens
aatttaaaatcttagcacagcttaataattacactttagatgaatgtaatgctctgtggatagagcaaagctaaccagggactcatctttctacagtactcatttccactcccacatatgaatcatactgtttatcccaacacagacgcatccacactactgtcttcctatggaggatgtatccctcaattcttaagttattcttttcttcatctctaaacaccaatgcatactaaattccccaccagagagcctggaggtttctttctacgttactctcctctctttccctcttctctcttgtgttctgcttcatcctctctcttctttactcactttctatcccacttcattttatatattaatagcaattcagtcactttttctataatgcaaaatccatgtgtatagaaatcaatgtgctatcaaaaatcatgtcataaaaccacgaggttttgggaaaattggatttaagggcacaatactcaacaactttgtcagtgatacatttaagaaagcmaatttttgtaacaataaaaatagcagaatagttccacacatattgaatagttaagaaatacataaaaaaacacaataaatataactatagacctaaaaaaatacttgaaat

SEQ ID NO: 294407 - DNA, 631 bp, Homo sapiens
tgaagatataaagaatggaaatattcccagtagatgaaatatattaattatacatacacgaagtttagcaaaaccccgaggaaatgatatacagatattacatctatttgtatattaaaaattaagtgatttaaaccaaagaaaaagagaaaatctcaaggggcaataaaagagtactcaccacatgtkcatgtgtctttttgtagtagaataacaaaataaatgactactgacttctgatcaggaaaaaaataaagaggagaagaaaacagaatttcaaaatggcagaaagaaaataaatcggaattttaacctwtgaagatataaagaatggaaatattcccagtagatgaaatatattaattatacatacacgaagtttagcaaaaccccgaggaaatgatatacagatattacatctatttgtatattaaaaattaagtgatttaaaccaaagaaaaagagaaaatctcaaggggcaataaaagagtactcaccacatgttcatgtgtctttttgtagtagaataacaaaatwaatgactactgacttctgatcaggaaaaaaataaagaggagaagaaaacagaatttcaaaatggcagaaagaaaataaatcggaattttaacct

SEQ ID NO: 294408 - DNA, 500 bp, Homo sapiens
ttgtggaatgtcccttaattggaattctttctgaatttktttttttcatgattagactggagctttgtgttttggggaggaagatcacagaggtaaagtgccagtctcatcatgttgtatcaaggatatgtaccatcaatacgacacactttttatgttaatattactatgtggcctcaggtcaagttgttcctaggcgaaactgagggttgggctgctatttctcatgggccaataatgagatgtagatgaactggggaggaagagagttttaatttctgtaaccagttacagtgggaaggcctggaaactatcaccagaccaactcaaaattacaaagttttccagagcttatataccttctaaactatatgtctattggtaagtgtgcattcatccaaagtcataagtgactaacttcttttaatctatatctaaggcctgagtcctgaataccttcttctggagcctcagtaagtttaattaatctaaatgggtat

SEQ ID NO: 294409 - DNA, 422 bp, Homo sapiens
ttgcatctcctcaatgtttgcgatatccataattctaaaagagaaagaaataaagaaaatatgatggtagagagagagagagctaaactaaataaaagcattgagcgaataacactagcatttttgaactatattattttattgggagtgagtaaactaggaatcaggatagacaagtttagtagtttcctggcagaaatttattatgtttaatgttacagttatttaacttcatgcattgatgaaagagttggcaaaggttcctggcccatacacaaygttccaaaaaaattgataataaaatgttactcaattactttttttattagacccatggaaactatgccattttagcagtccatggtcatattaaaaagtagaagttatcatatttaatgattatatatatgtgtagtttgcag

SEQ ID NO: 294410 - DNA, 610 bp, Homo sapiens
tggtttgggggccaggcatggtgactctcacctataatcccaacattttgagaggccgaggcaggagcatggcttgaggccaggagtttgagaccactatcactatcactgggtaatacagtgagacccgtctctacaaaaaagataaaaaaaattagccaggcatagtggtgcattcctgtagtcccagctactcaggaggctgaggtggaagtatgcttgagcccaggaggttgaggctgcagtgagccatgatcatgccactgtactccagcttgggtaacagagtgagaccctctttcaaaatgaaaaacaaacaaacaaacaaacaaacaaatgacgacaacaaaaaactggccttggaaacctttccacasgaaaaaacccaagtatctccattcctaaactacaaaacttccatctcattctcttttgagataatttgtggctacttcaactgtgtgtcaaaaacaaaactcatttttccacccaaccaactcaccctctctactttcctatttgggtttgtattcagtgtttggttttcatccagtgttgtttccatccagtgctattttaaatcttacttggattttccacgtctttatcc

SEQ ID NO: 294411 - DNA, 557 bp, Homo sapiens
caacagagggagaccctgtcaaaataaaaacaaacaacaacaacaaaaaaaaaaacaaaaaaaaactcagtagcttgccttttaaggctcagaataaacaccatcccttcttattcactcagttcatccctcaacaaatatgtgctgcacacctactctgasccaggcgtcattgttctaggaaactattgaaaggtgtggtagatggaattttccaaagatagctgccgcagtatatatcccaaccacatgctctttttacaaagtgactgacactctccattgagaggtagagtctatgttccctcaatttgaggtatgcaaggggcatatcacttctctgaccaatcaaatatggcagaagtgaggtgatgtaacttttgcaggtaggtcataatctctttctgtgtgtgtgtgtatgagtgtgtgtgtgtttctctctcctctaacatcttcccttggaacctagccaccacgctgtaagaaagcacaaagtcttcatagagaaaccatctggagggacctcaagctcccagccaacagccagtcctgcaaga

SEQ ID NO: 294412 - DNA, 611 bp, Homo sapiens
ttatctaaggctatgttatacaagatacagattttcctgattcctgggacctgtcttatcatactagctgttcacttgcttagttatatcactatcatagtagatggtggcagaaagtgtggtaacattcctaacaatttgttttacaacttatcctttctggtaaaaaggatgctaaaggaaaatgtcaatgatcttggctacaagtgagggtttgctgttttaagttatttatggtcccttaaccctaagatagtttcaaatattttaatgttttaaaatcacatttttttcaacaaataataagaaaggaacatatcacttcaaaatgctgtattttgttcaaaatactttcatgctattctttgattatactggtggcatgaagcatgttcagatagataaataggcacgaagcagaccagtcaaataacctctgtgaatatatacagctaatatgaatctttttggggttaggaaaaattatagtcttcttcttcatctgtctctagttggtgtgacaagagctgtccactcccttgggaggagcccagtctgggagragctttagggcagaagggttaccactggtaactactatttactgagca

SEQ ID NO: 294413 - DNA, 536 bp, Homo sapiens
tccagtttgtcagtttttgcttttgttgcaactgcttttgatgttttcatcatgaaatctttgcccaatgtgtacagtttttttgagatggagtcttgctctgttgcccaggctggagtgcagtggtgcaatcttggctcactgccagctccacctcccgggttcatgccattctcctgcctcagcctctcgagtagctgggactgcaggtgcccaccaccacgccyggctaattttttttttttttgtatttttagtagagatagggtttcactgtgttagcccagatggtcttgatctcctgacctcgtgatccacccacctcagcctctcaaagtgctgggattacaggcgtgagccaccgcaccccaccaatgtgtacaaatttttttagcaaatttttaacgactacttatggtcgaattggaacaaaccagtagatatagtagttaagagcacaaactgtagcataacactgcctgcattcaaatcagctctactaaaatgtgacattggacaagatataactggtaact

SEQ ID NO: 294414 - DNA, 536 bp, Homo sapiens
tccagtttgtcagtttttgcttttgttgcaactgcttttgatgttttcatcatgaaatctttgcccaatgtgtacagtttttttgagatggagtcttgctctgttgcccaggctggagtgcagtggtgcaatcttggctcactgccagctccacctcccgggttcatgccattctcctgcctcagcctctcgagtagctgggactgcaggtgcccaccaccacgcccggctaattttttttttttttgtatttttagtagagatagggtttcactgtgttagcccagatggtcttgatctcctgacctcgtgatccacccacctcagcctctcaaagtgctgggattacaggcgtgagccaccgcaccccaccaatgtgtacaaatttttttagcaaatttttaacgactacttatggtcraattggaacaaaccagtagatatagtagttaagagcacaaactgtagcataacactgcctgcattcaaatcagctctactaaaatgtgacattggacaagatataactggtaact

SEQ ID NO: 294415 - DNA, 575 bp, Homo sapiens
acatttgtgaattcccaatatcttaacaacagagagcacaatctaaakaatttctttctttaagttgtcatttcaggagatgatagtattgtctggaagaggttagtttaatttttcagctgtgaattgagaacaaactatcctaatacatagtgttttgaagaattaaacatggactaatgttttaaaaaattttcatataattaaagatgttattagcagcagtagaataacaattatgcaggccaaaatatatccaaacagctatgcatatgttctgattatagagccaaacatagtttatgtgtatattctttttcaagttgcagttttactcaaggctgtttttttgtttgtttgtttgtttgttcgtttgtttgtttgagacggagtcttgctctgtcacccaggctggagtgcagtgtcacgatttcggctcactgcaatctccgcctcctgggctcaaggattctcctgtcaaggttgttttgctacgtaataatttaatatcttcccttttatgacctataatacttcctttaataaatatgaatagatttggttctgcgacaaca

SEQ ID NO: 294416 - DNA, 575 bp, Homo sapiens
acatttgtgaattcccaatatcttaacaacagagagcacaatctaaagaatttctttctttaagttgtcatttcaggagatgatagtattgtctggaagaggttartttaatttttcagctgtgaattgagaacaaactatcctaatacatagtgttttgaagaattaaacatggactaatgttttaaaaaattttcatataattaaagatgttattagcagcagtagaataacaattatgcaggccaaaatatatccaaacagctatgcatatgttctgattatagagccaaacatagtttatgtgtatattctttttcaagttgcagttttactcaaggctgtttttttgtttgtttgtttgtttgttcgtttgtttgtttgagacggagtcttgctctgtcacccaggctggagtgcagtgtcacgatttcggctcactgcaatctccgcctcctgggctcaaggattctcctgtcaaggttgttttgctacgtaataatttaatatcttcccttttatgacctataatacttcctttaataaatatgaatagatttggttctgcgacaaca

SEQ ID NO: 294417 - DNA, 575 bp, Homo sapiens
acatttgtgaattcccaatatcttaacaacagagagcacaatctaaagaatttctttctttaagttgtcatttcaggagatgatagtattgtctggaagaggttagtttaatttttcagctgtgaattgagaacaaactatcctaatacatagtgttttgaagaattaaacatggactaatgttttaaaaaattttcatataattaaagatgttattagcagcagtagaataacaattatgcaggccaaaatatatccaaacagctatgcatatgttctgattatagagccaaacatagtttatgtgtatattctttttcaagttgcagttttactcaaggctgtttttttgtttgtttgtttgtttgttcgtttgtttgtttgagacggagtcttgctctgtcacccaggctggagtgcagtgtcacgatttcggctcactgcaatctccgcctcctgggctcaaggattctcctgtcaargttgttttgctacgtaataatttaatatcttcccttttatgacctataatacttcctttaataaatatgaatagatttggttctgcgacaaca

SEQ ID NO: 294418 - DNA, 594 bp, Homo sapiens
cggccatctatccattacattttttatacttgtatgtatgaattgggctaggccaggttaaaaaatgcttcatgaacacttctcaaggcatggcactagagaaggtaatctagacaaagatataaattcatattttctcataagttgcatatatatatataaaggacataggtttgccactgaagaggagggtggtttcttctgcctgtcatacttctgtatatcttatttcaataatgtcttatttttgataagatcttatctctcatttatgaacactggtcaataagatcaatagacagcatttataaatgagtgcttactgtgtaccaggcacaagtctgggcactttgcacacattatgtcatctaatcttaaacccagcccctcaataaggtagattgtttgagaggtgaagttactttccccaggtccacagttaaaaaatatggatcttgtattcaaacccagraagtctggttctagtacctgcaatcttaccactaccttttctactgcatctgtttttcacctcacagttaccaatactgatgaagtagaacattagtacagataatatgaaataactgacta

SEQ ID NO: 294419 - DNA, 574 bp, Homo sapiens
tttataaatctttataaactaaaacttataaaacttaagaacagacagatattcctttaattggataaaaaatctatctcaggcctaaaggttacatgatacttaactgcaacagtagagatattcccyctgaaatgaatttaaagcagaagtattgttagatcctttattatttagcattgttattgaagtgctagccagtacaagacctgaaacataaataactatttatccccaaaaatcagcgaatagaattttcaaatcaagaagaaagtaaagatcatttttaatcttgttgtacagagataatgttaaatttttattcttccaaacttttaaattccctgtccctctcttctatatatgggcatattgtatgtgtgctttctttaatataaaagtgttgtcatacctgacacactatttttgaagctgctggactctatataatcttagtatctttcttagttagttaatatagataaacataatcatttttaatgattgcatagtcatccatatgtcattatccatttaccaaatcttctattaataaacatttaggattttttta

SEQ ID NO: 294420 - DNA, 1165 bp, Homo sapiens
tttataaatctttataaactaaaacttataaaacttaagaacagacagatattcctttaattggataaaaaatctatctcaggcctaaaggttacatgatacttaactgcaacagtagagatattccctctgaaatgaatttaaagcagaagtattgttagatcctttattatttagcattgttattgaagtgctagccagtacaagacctgaaacataaataactatttatccccaaaaatcagcgaatagaattttcaaatcaagaagaaagtaaagatcatttttaatcttgttgtacagagataatgttaaatttttattcttccaaacttttaaattccctgtccctctcttctrtatatgggcatattgtatgtgtgctttctttaatataaaagtgttgtcatacctgacacactatttttgaagctgctggactctatataatcttagtatctttcttagttagttaatatagataaacataatcatttttaatgattgcatagtcatccatatgtcattatccatttaccaaatcttctattaataaacatttaggatttttttawcacagtgttgggattgtaataactcagaaaaaaattgacattttttaatatcaattctctattccctgtgtagggtgggtactatcctcctcaccttgtattcaccctggttcccactgtgagttttgagtatggtgtaggcagaagtgctttgcaattggagcctaacacaagttccaactccacaaactggctttatgatgttggagaagttacctaacttcatggaaccctgttttcctcatttgcagagtggggaaagtgactacaacttcttgtgaagattaaatgagctaatttgtcagttttatttttaattgacaaataatatgtatatttatagagtatagttggatgttttgatctatgtatacattatagaaagattcagtcaaaccaattaacatgtctgtttcctcaccaacttatttttttgtggtgagaatgttaaaaatctattcttttagcaattttgaagtatacaatagttattattaactggtaaccatgcaacacaatagctcattaaaacattcctccagwctaactgaaactatgccctttgatcatgaaataatttgtgtaaggac

SEQ ID NO: 294421 - DNA, 562 bp, Homo sapiens
gtaaatttgtcagtttcagtcaaatgatttgatcgtccttgctattaccttcaaaagtaattccttgctgtaaacttcaaagacagcaaattggtgatctgtagcatgccaatggctagctatcatgtatttcttccttctaccttgaaatagcacaaggaaccaacctcgtactaaaaagggagagraaccttttctgttttccagaagtctgtgagtttattctctgctttatttatttattccctactcatcctctccaattcattacattgagaagacttaataaccacacagtctgaggcacattttatttgtctaattgaaaaaacatagatgcttcaaaaataacctttcttattgttgatttttagaagcaattactttgaagtaggtagctttggaaagcccatttgtagattttagaaatatgtttgatactgatactttacaatcaataaacatatccaagagaatatgagagaatccaggaaacctaactactttcttggctaccaactaaatcatgtctctcattctcttccaggacaatccatttttt

SEQ ID NO: 294422 - DNA, 562 bp, Homo sapiens
gtaaatttgtcagtttcagtcaaatgatttgatcgtccttgctattaccttcaaaagtaattccttgctgtaaacttcaaagacagcaaattggtgatctgtagcatgccaatggctagctatcatgtatttcttccttctaccttgaaatagcacaaggaaccaacctcgtactaaaaagggagaggaaccttttctgttttccagaagtctgtgagtttattctctgctttatttatttattccctactcatcctctccaattcattacattgagaagacttaataaccrcacagtctgaggcacattttatttgtctaattgaaaaaacatagatgcttcaaaaataacctttcttattgttgatttttagaagcaattactttgaagtaggtagctttggaaagcccatttgtagattttagaaatatgtttgatactgatactttacaatcaataaacatatccaagagaatatgagagaatccaggaaacctaactactttcttggctaccaactaaatcatgtctctcattctcttccaggacaatccatttttt

SEQ ID NO: 294423 - DNA, 632 bp, Homo sapiens
accagaggtcactcttattaccatattgattttggtgggttttagctggcttccttactgcaacctgttttattagcaaggtctttatgatctgtatcttgtgctgacctcctatctcaccctgtggtttacaatgccttaaccatctgggaatgcagcacagtaggtctcagcctcattgtacccagcccctactcaagacgcagatgctgtggttcaatcgcctctgacaccatttctgctccttcatagccccactcccaccaggtttgtaaaacctaaccctctccaccccagaagaaaagtctcccaagctcagtcatttttatgtatgtgtgaatttaaaaccccatgttaggtcaaygtagagatatttgccttttaatcttccctaattgtgggattaaagactttaacattacttcaggcagcacccgcttggggaaaggtgtttacggggggcaaagtgatctttgcattttctcagaatagacttatatatgcagctacacatgcaattctctctgaagacagcttccatccccaacccgtgaaaccacattaagaagcttcttgtcctcacttccagggtagagaaagggctaagaaataccaccaatggagaacaaggg

SEQ ID NO: 294424 - DNA, 581 bp, Homo sapiens
gttctttttcttgagccctgaatctgctttcttacagcgtccacctttggtcttaattttatcctctggctccacactgaataaatctatccctcaccaaatgacagccttttaagtatttgaaaacagtaatcaagtcccacagaaaactctctagagacttgtggccgcctttggggacctacattttgtggctgctcctaaccagttggakttcggagctaggcagagcctagttgccgctaatcttgtagcagggctgcagggctggaaactgcctctggagttggaagcccacagtgccccaccccagcatgagggaattccaagatgcttgcactagaagggtaaacggttccaacaagaggtaattcctgggctggaggcagttcactgcctccacattcatctccctagagagggcagcttctcctctgggtccagccttgcagctcactcatttgatttcaaagcagccaaatcccagttctttgcgacttggggaagtacagtggcagtgggggaggtagcagcaaggaattcgatggttctttgtgtgttctttgtttcaacaaaatgta

SEQ ID NO: 294425 - DNA, 533 bp, Homo sapiens
ggcatagacacagggagaatgattcactggggactgttactgcaacaatctaccatacctgtttgcttcacagagctatagtgaggaaccaatgagacagtgcttgcataccacagtgtacaatgccaatgcaagttaatattttattgatgtatgtagtcccatcattttacttttattcatgatatatctggagtctttctctgtcccctattagattcaagtccctttcagatggtgttatgggttgagttttatccccctaaaaagatatgttacgtgaacttatttggaaatagagtcattgcaggtgtaattaggtaagttaagataaagtcatacaggagtagggtggggccttaatccaatatgactggtgtccttgtaagaagatagtgttcttgtaacaaaatggccatgagacagaaatacacagggaaaacgtcaygtaaagccagaagcagagattggagttatgccaccacaagccaagggacatctatggcaaccagaagatggaggaggaaaggaag

SEQ ID NO: 294426 - DNA, 533 bp, Homo sapiens
ggcatagacacagggagaatgattcactggggactgttactgcaacaatctaccatacctgtttgcttcacagagctatagtgaggaaccaatgagacagtgcttgcataccacagtgtacaatgccaatgcaagttaatattttattgatgtatgtagtcccatcattttacttttattcatgatatatctggagtctttctctgtcccctattagattcaagtccctttcagatggtgttatgggttgagttttatccccctaaaaagatatgttacgtgaacttatttggaaatagagtcattgcaggtgtaattaggtaagttaagataaagtcatacaggagtagggtggggccttaatccaatatgactggtgtccttgtaagaagatagtgttcttgtaacaaaatggccatgagacagaaatacacagggaaaacgtcacgtaaagccagaagcagagattggagttatgcyaccacaagccaagggacatctatggcaaccagaagatggaggaggaaaggaag

SEQ ID NO: 294427 - DNA, 533 bp, Homo sapiens
ggcatagacacagggagaatgattcactggggactgttactgcaacaatctaccatacctgtttgcttcacagagctatagtgaggaaccaatgagacagtgcttgcataccacagtgtacaatgccaatgcaagttaatattttattgatgtatgtagtcccatcattttacttttattcatgatatatctggagtctttctctgtcccctattagattcaagtccctttcagatggtgttatgggttgagttttatccccctaaaaagatatgttacgtgaacttatttggaaatagagtcattgcaggtgtaattaggtaagttaagataaagtcatacaggagtagggtggggccttaatccaatatgactggtgtccttgtaagaagatagtgttcttgtaacaaaatggccatgagacagaaatacacagggaaaacgtcacgtaaagccagaagcagagattggagttatgccrccacaagccaagggacatctatggcaaccagaagatggaggaggaaaggaag

SEQ ID NO: 294428 - DNA, 589 bp, Homo sapiens
gcccaacatagtagtctttatttaatcttgattttcctttaaagaaattatcagatgatattttattatataccatatgtacaagagtagattccaattgtgtggggcagtagcttataaaattcgggtggccatttaaaaatattcatttattattattattttaaatgtggtaaaatacacacaacataaaatttaccatcttaaccatttttaaagtattcagttcagtgccattaaatacattcatggtattgtgcaacaatcaccagtatccatccctaagattcttttatcttgcaaaactgaaactctatacccattaaacaataactctttatttcccctcctatgagtccattttgctttctgtgtccatgaatttgactattctagatctgtcatataaatggattcatayagtatttgtctttttgtgactgacttatttcacttagcataatatcctcaaagttcatccatgttgtagcatatgtcagaatttctttcctttttaaggctgaatatttcattgtccttgggacaggacaagcctaccttcctagtagacctagacattggccccaaa

SEQ ID NO: 294429 - DNA, 537 bp, Homo sapiens
tgcacacaaactagaaaatctaaaggaaatggataaattcctggaaacacagaaacctcccaatattgaacaacaacaacaacaacaacaaaacccccagaaatcytgaacacacaaataaggagtaatcgaatttgaatcagtaataaaaagcctaccaaccaaaaaaaagacctggaccagatggattcacagccaagttctaccatacatacaaagaggagctgatactaatcctattgaaattattccaaaaaatcaaggatgagggacttctccctaacccattctataaaaccagtatcatcctgataccaaaatctgtcaaacacacaacaacaaaaaaataaaactacaggccaatatccctgatgaaatagacacaaaaattttcaacaaaatattagcaaaccaaatccagcagcacatcaaaaagttaattcaccatgatcaaatgggctttattcttgggatgcaaggatggttcaatgtaagcaaaccaataaatgtggatcatcacataaacagaattaaaaa

SEQ ID NO: 294430 - DNA, 537 bp, Homo sapiens
tgcacacaaactagaaaatctaaaggaaatggataaattcctggaaacacagaaacctcccaatattgaacaacaacaacaacaacaacaaaacccccagaaatcctgaacacacaaataaggagtaatcgaatttgaatcagtaataaaaagcctaccaaccaaaaaaaagacctggaccagatggattcacagccaagttctaccatacatacaaagargagctgatactaatcctattgaaattattccaaaaaatcaaggatgagggacttctccctaacccattctataaaaccagtatcatcctgataccaaaatctgtcaaacacacaacaacaaaaaaataaaactacaggccaatatccctgatgaaatagacacaaaaattttcaacaaaatattagcaaaccaaatccagcagcacatcaaaaagttaattcaccatgatcaaatgggctttattcttgggatgcaaggatggttcaatgtaagcaaaccaataaatgtggatcatcacataaacagaattaaaaa

SEQ ID NO: 294431 - DNA, 560 bp, Homo sapiens
gttgaaaaaactatctattgggtactatattccctactgggatgataggattattagaagcccaaaccccagcgtcacacaatatacccatacaacaaacatgcatgtgcacaccctgagtctaaaatcaaaatttttttaattaaaaaaaaaatgctgagttctgtacaatggaaaggtgggatggcaggaaggtgagcatgtctgcaaatcacaagactccctgggcgccgtggagatggtcctcagctacgaacaaagccattttctaaggctcttgttcttgtctaagggaacagaaccaaaacttccagccagggttcttcctgtctgtatttcttctgcttttccactgggtagttggaagctgaaagtgtgaaaactggaggtatttcartgccgaggtgcctgttgtctgataaacgcctgtctacttcgtctcttggctggacggggagctggctgcccaggcaggccaagctgtagcaccccttcccagctggcagaagatcgcagggcaccccctgcccagggtgcgaggcttcctgtccgcactgaag

SEQ ID NO: 294432 - DNA, 584 bp, Homo sapiens
tgcatcttaatgatctagctcaagcagctcaagcagagtgagaatgggggaaggggtgggaggaggtagactctataaatcaggaagaacctttaatcagattcagctgggacccacagggactgctaggaggatgacaggtacaagcatcccacaaatattcctgagagaacctgtccttgactgtagcccaagaggccctgagcctagctctgtgagtcataggctcaaagcaccaacattgaggaggggaagcagcaacaacagcactggtttctcaaattattgctcaggacaactcgtcagcaggcccacagcctttgctgagagcccataaaccactctgcacgaggtatgatgaaaaaacacaagcaaaagaaagaaaaaatgctggaactttagtcaatagaatatggctcaaaagaagtcggaaagttgggcttgtgtctctttttgttgctcagatttcttgtcacagggtttggtttctaatgaaatctggctcaacatggacagcttgtgccttccaatgacttttcatctaatkatatgtgacaagcaccaaaaaagtactggccttaaac

SEQ ID NO: 294433 - DNA, 538 bp, Homo sapiens
aaaactggataagctgtgatttataaataaagacagaaataccaagaagaaacagataaaagagttgaaagtaattgtttctggctggggggtaactgggagtggtcaaaggattgctgtttttcttattgttgttacagtctagtagtaatgtttgaattttaaaagcttttaaacatcacttcagtcaaaattaattttttattcttcagtggttggtgctttgtaaaaataaataaataataaataaataaattttttcttttaatacaagatggcaaaaagaatgcacctggctaagttaacttagagaatgggtcaagtatgcaaggtaaccaacagggaaagttacagagagagggagagagattgagagagagaaatttccacagagaagtggaaacaaaaggatgatrtttttggaggaatgacaagcagatttaagggagccagagagaatgagaagggatgagattgaacagccagggcagagacacattgaacatttgtcatgggctatatacccagaagggagcaa

SEQ ID NO: 294434 - DNA, 594 bp, Homo sapiens
tttcacagttttaaaagtatttgtttgatataaatcttctcaaactagtcacccttgtggggtaggttggtttgtcctcatgccaatgccgcagccatcttggacacgtggatgtttgaatggcagtccctgcagctgggattcaggggtaggggtgggggcgccctggtgacaaccacggcctcttggaaggctagggagaaaacagaaaccccactgagtggacacaatcagtctggatccttatcaggtgtcgttacacatgtggcctgcaaagtaggggttttgatggggttccggggagcccagggtggaaggcagggatcatagagacttctgaggctccgtccacaagggatgctggcctcgcctgggctctgtgactygtgtgtggcctttatgagccgtgaccaatggctcaaggcctgggctggcagccgcgagccttcatcctaggcaggaattctaattaaactggggctcctgggtctcacttacaaagagctcagccccagaccctgcttttcggggccccacccacctggacatactctttcacgcaacctgcagtgatatgcagctcagggaatccct

SEQ ID NO: 294435 - DNA, 594 bp, Homo sapiens
tttcacagttttaaaagtatttgtttgatataaatcttctcaaactagtcacccttgtggggtaggttggtttgtcctcatgccaatgccgcagccatcttggacacgtggatgtttgaatggcagtccctgcagctgggattcaggggtaggggtgggggcgccctggtgacaaccacggcctcttggaaggctagggagaaaacagaaaccccactgagtggacacaatcagtctggatccttatcaggtgtcgttacacatgtggcctgcaaagtaggggttttgatggggttccggggagcccagggtggaaggcagggatcatagagacttctgaggctccgtccacaagggatgctggcctcgcctgggctctgtgactcgtgtgtggcctttatgagccgtgaccaatggctcaaggcstgggctggcagccgcgagccttcatcctaggcaggaattctaattaaactggggctcctgggtctcacttacaaagagctcagccccagaccctgcttttcggggccccacccacctggacatactctttcacgcaacctgcagtgatatgcagctcagggaatccct

SEQ ID NO: 294436 - DNA, 548 bp, Homo sapiens
tctagcctggaagctaaattttaaaactagctgtgaatttagaagatgattcataagctctgtgcataccatggttatgactggtggaaggcagagattcttacatcagtcttctttacattttaacagcaaggaaaataacaggttagaggagtactttgtatctaccctcccttgcttccggcaaattaatgaaagccaaataaattgcaacactttgatatctgtgtctctgtaacgttaaagacagccctgggctgcgagagatgaacgtggtagagcacctccgggccagcttcccagtggagcaatggtattggagaggtggacaacgtggggaggctgagggagctagatcttcgaaggcagagaacaacacggtgtgtcaggcaagccacaagctctttttgcagcataaaagcaagaggggagagtggcaggggaaaaactcaggttayttattttttttttttttctgaaaaccacttgctgaaatagaatgcctcttctgaatactgatgtcattagactatcaatttaggttatat

SEQ ID NO: 294437 - DNA, 595 bp, Homo sapiens
ttcccgggctttaatgatgaaaaatgatttggtcatttaagacagagccccccgctctgttgcctaggctggcgtacagtggcgtgatcatagctcactgcagcctcaaactcctgggctcaagtgatcctcctgccccagtttcttgagtagttgggactacaggcgtgtgccacatctggctattttttttttttaatagagaaggggtcttgctatgttgcccaggctcgtcttgaamttctgggctcaagcaatcctttcacctcagccccccaaagcaatggttcacaggttcagaggtatgaactaccatgcctagcctagctatttactcttaaaggaaaaaataattttttatttagttttcaagcctttcatgctatttacactaaagtttggccttattatttttgcttagaatcttttaatggttttaggtcacgttgggtcacatcaaaacacttgaaaatgcctctttctaaaacaaagacattcgttgacaaaaaaaagttaaaagaaaaaagaccagccaggtatttagttccatttaagagagcacaggcgactgtatgcaagattctggaaaatttat

SEQ ID NO: 294438 - DNA, 595 bp, Homo sapiens
ttcccgggctttaatgatgaaaaatgatttggtcatttaagacagagccccccgctctgttgcctaggctggcgtacagtggcgtgatcatagctcactgcagcctcaaactcctgggctcaagtgatcctcctgccccagtttcttgagtagttgggactacaggcgtgtgccacatctggctattttttttttttaatagagaaggggtcttgctatgttgcccaggctcgtcttgaacttctgggctcaagcaatcctttcacctcagccccccaaagcaatggttcacaggttcasaggtatgaactaccatgcctagcctagctatttactcttaaaggaaaaaataattttttatttagttttcaagcctttcatgctatttacactaaagtttggccttattatttttgcttagaatcttttaatggttttaggtcacgttgggtcacatcaaaacacttgaaaatgcctctttctaaaacaaagacattcgttgacaaaaaaaagttaaaagaaaaaagaccagccaggtatttagttccatttaagagagcacaggcgactgtatgcaagattctggaaaatttat

SEQ ID NO: 294439 - DNA, 608 bp, Homo sapiens
cactggaatatgtgcctacttactcaaatgcacagaaaccagtgcatagccacaaggatcacaaacaatcagggaaacataacactaccaaaggaacaaattaaagcaccagtaaccaagtttaaagaaatggagatctaatgaactgtctgacaaagaattcaaaataatcaaagaagcttagtgagctacaagagaacacatatagacaactaaataaaatcagggcaacaatacacaaacaaaattagaagttctacgatgagataaaaaccataagaaagaaccaaacagaaaatctggagctaaactggctccagttttagccagctccactggctaaactgaaaaattctgtaaagaggtcaatcacrcacaagaaagaatcactgaggtcaaagatcatttgaaattacctggtgagaacaaaaacaagaaaaacaataatgatgaaacggtgaaaaatgtatatgggaattacaagacttcttcaagtgaaccaatgttgacattatgggaatttaaggaggagcagagaaagagaaaggattagaaagcatatttaaataaataatgatgaaaaaaacccttccaaatctggaaaggga

SEQ ID NO: 294440 - DNA, 615 bp, Homo sapiens
ttgttttcatatgcttatttgttgccatatattctctggtgagacatctgttctgatcttttgcctgttttaaaattagattgtttgtttacttattactgagttttgttttgttttgagacagaatctcgttctgtcacccaggctggagtgcagtgttgcagtcttggctcactgygagctccgcctcccgggttcacgccattctcctgcctcagcctccggagtagctaggactacaggcgcccaccaccatgcctggctaatttttttgtatttttagtagagaacgggtttcactgtgttagccaggatggtctcgatctcctgaccttgtgatttgcctgcctcggcctcccaaagtgctgggattacaggcgtgagccactgtgcccggccacgtattactgagttttaagaattatttgtctattttggatatgtgttctatcaaatgtgtgtttcacaaatattttcttccagtgtgtggcttgcctttgcattctcttaacaatgtatgtcacagagcaaaaagctttaattttaatgaagttcaagctgtcaattttttatttcatgaattgcggttttggtgttctatctaaaaactcattg

SEQ ID NO: 294441 - DNA, 608 bp, Homo sapiens
tttcaatgagctgctggattcgatttgctagtattttgtggaggatttttgcatctatgctcatcarggatattggcctggagtttctttttgttgttgttgtgtctctgccagattttggtatcggaatgatgctaacttcatagaacaagttagggaggagtctttcctcctcaattcctggcaatagtttcagtgggattggtaccagctcttctttatacatctggtagaatttagctgtgaatccattaggtccagggctttttctggtttgtagactttttattactgattcaattttagaactcattattggtctattcagaatttcagtttcttcctagttcaatcttgggaggttgtatgtttctaggaattcatccatttcttctaggtttttgagtttgtgtgcatagaggtgtttgtaataatctctgagggtttttgtatttctgtgtggtcagtggtaattttttttgtttctgattttttttggatcttctctcttttttttattagtctaggtagtggcctatcaatcttatttattctttcaaaaaacaaacttttgattttgttcatcttttggatggttttttgcatct

SEQ ID NO: 294442 - DNA, 550 bp, Homo sapiens
gcatccttgctgaacttacttattagttctaggagggtttttttaatagattacttggaattttctgtacagatcrttatattatctgcaagcagggatagtttaatttctttctgtccaatatgtattgtttttatttctttttctggcttattgcgctgactacgacttccagtacgatgctgaataatggtggtgaaagtggacatttttcgcttgttcttgaccttagggagaattcattcagttttgtgctattaagtatgatgttatttgtagcgtctttgtatatgaactttatcaagtcaaggaactttccttgtatttctagcttcctgagagtttttagcatggatgaatgttaaagtttgtcagatactttttggcattgattgatatgattattcaacttttcttctttaatctgtgtaatgggaacaacacagtaaaagttgctggcctatgccacatccagatggctgaagcccgtggctgcagataagaacttggagacatctctctcatctagcagattgggctccctggtttt

SEQ ID NO: 294443 - DNA, 464 bp, Homo sapiens
cagggatagtttaatttctttctgtccaatatgtattgtttttatttctttttctggcttattgcgctgactacgacttccagtacgatgctgaataatggtggtgaaagtggacatttttcgcttgttcttgaccttagggagaattcattcagttttgtgctattaagtatgatgttatttgtagcgtctttgtatatgaactttatcaagtcaaggaactttccttgtatttctagcttcctgagagtttttagcatggatgaatgttaaagtttgtcagatactttttggcattgattgatatgattattcaacttttcttctttaatctgtgtaatgggaacaacacagtaaaagttgctggcctatgccacatccagatggctgaagcccgtggctgcagataagaacttggagrcatctctctcatctagcagattgggctccctggttttcccact

SEQ ID NO: 294444 - DNA, 565 bp, Homo sapiens
agttccaaaaataatggtacaggagactgtacccacttcacttagcctcygccagtggtaatatcttatatacctatagtacattatcaaaactgggacatcaacattggtaaaatccacagaatttgttcagatttcaccaggttatatacacttgctgtgtgtattttttttgtaattgtatcatatgtagattttctaatcagcatcacaattgagagagagaactgttccattaccaaaaagatccctactgctactcttcagtcacattttacgcttctttgatttttttttaataaaaaacttaatttctccacttgacagtatatcctggagattcacccatgttagtgtatacctaattctgcttaaatgctgaacagttctttataaaatatatttaagcatcttcctattgatggaattttaaattatttccaagcttttactattttagaccctgctgcagtgaacatcctaatatatgcatccttgtgcacatgtataaatgcttctgtaggatagaaacaaaagagtataactattgaattgtaggtcaagc

SEQ ID NO: 294445 - DNA, 634 bp, Homo sapiens
ttactgctaggtgtcctggtgcagagagggcttccaggagtactgctgttacccagggagccaattcatttagcgtcgtgacataaaagtgtgggctgacgatcttgttgcaataagggtgtgtgtctagcaccagaattatgtggtgctggtagaacaaggtttggaatgtatggaaatagatgctgatccacagagaattcttgcagctgttaaacatgtaaaattacaagctcaggatttggttctcatatatgcctagccagaataaaagtactcttttatgaggaatatgttcaatgaggcagtatatccagctacaaatataccatacattttttatgggaatcacatgaaagactatttccagggcatgaaactgtagcacaaccacaaacaacagtttctgcagatgaagttgcaccttttacacatcccaataaccaaccataaaaaaattacatcaaccgtgctaggagtgtaaattatctttcgcttatctctatgaaaatgatattacaaaatcattgtcatataaatggatgttcaaatygtatgaagccaaaaatgtaggggaaaatatcacagaggatggtcaggcaataaatgaataaaaatactggatttgtgatgt

SEQ ID NO: 294446 - DNA, 450 bp, Homo sapiens
tatgatggtctcattttgttgttgctttgataactaatgaagttgaccacctttacatatgttttttgtttatttctttagttagggtattcagtttatacttactgccccagcataattattaaaatggtccccctttcattctctaacatgtcttggtttggasaacacattgtacggcaccctaaccttagtggggtccctccgctaacatggaaatttccttcttgctcgttagtgtttaggatgatgtggtctggcatctctgaggaaagaaaaaaaaatgggataaatacagaagattgagtaaaaaccagatgagagggaaaccaaactcattaactgggattactcagtctgactcaggatgaccatttccaaaataatgtgtgatggagctttcaaatgggtacaaagcagatgagtttgagcaacataatccagcagtaa

SEQ ID NO: 294447 - DNA, 450 bp, Homo sapiens
tatgatggtctcattttgttgttgctttgataactaatgaagttgaccacctttacatatgttttttgtttatttctttagttagggtattcagtttatacttactgccccagcataattattaaaatggtccccctttcattctctaacatgtcttggtttggacaacacattgtayggcaccctaaccttagtggggtccctccgctaacatggaaatttccttcttgctcgttagtgtttaggatgatgtggtctggcatctctgaggaaagaaaaaaaaatgggataaatacagaagattgagtaaaaaccagatgagagggaaaccaaactcattaactgggattactcagtctgactcaggatgaccatttccaaaataatgtgtgatggagctttcaaatgggtacaaagcagatgagtttgagcaacataatccagcagtaa

SEQ ID NO: 294448 - DNA, 450 bp, Homo sapiens
tatgatggtctcattttgttgttgctttgataactaatgaagttgaccacctttacatatgttttttgtttatttctttagttagggtattcagtttatacttactgccccagcataattattaaaatggtccccctttcattctctaacatgtcttggtttggacaacacattgtacggcaccctaaccttagtggggtccctccgctaacatggaaatttccttcttgctckttagtgtttaggatgatgtggtctggcatctctgaggaaagaaaaaaaaatgggataaatacagaagattgagtaaaaaccagatgagagggaaaccaaactcattaactgggattactcagtctgactcaggatgaccatttccaaaataatgtgtgatggagctttcaaatgggtacaaagcagatgagtttgagcaacataatccagcagtaa

SEQ ID NO: 294449 - DNA, 233 bp, Homo sapiens
agtttaaaaatatcaacttcatggatttatcgctcatgacttaaatgcaatgatattatattacagcaaaaaataaaaaataaagtaaaataatttaggatcctgagggttggtttttaataaaccaaaccaaaatatatccacaaatattcctatttagcataaagacacttgtatgtraggaattaagtcacagtcacaggtaattgataccagttgtgaaaactaatatc

SEQ ID NO: 294450 - DNA, 469 bp, Homo sapiens
ggattcctgaggagaattttgaagctctagagaaactgaagaataacacaaaagactagctaataagaaaaaagaactccttgtgtacatggtgtgacaaaatgaatgatctaagtggggtggtttttattttgcagtggtttctactatgtatgtacttatttaacaacttacattatccccaccggatcatcctcactgaacactcattcaggataaacacacaaatgactccagcaccasaccagtcataatggaccatccattagtaatcttgattaactaaatcaaaggtctaaaccaatcaaaaggtctctaaattgaaacaatatggattatggacaataatagaaaaatctcttttgtttttacctggcagtgtcttggaacctggttttacaacaaggccacgggcccggatgatttctacctccagctgtccctttttgtccatcattcctacctgaat

SEQ ID NO: 294451 - DNA, 386 bp, Homo sapiens
ggtttcaggatgaaactgtttcacctcagatcatcaggcattaggttctcataaggagcacacaacctcgattcctccatgtgcagttcacaacaggttttgtgctctgatatggtttggctgtgtcttcacccaaatcttaccttgcattktgataatccccacatgtcaagggtggggccaggtggagataattgaatcatgggggaggtttcccccatactgttcttgtggtagtgaataagtttcacaagacctgatggtttcataaatgggagttcccctgcacaagctctcttgcctgccaccatgtaagagatgactttgctcctaatttaccttctgccatgattgtgaggcctccccagccatgtggaactgtgaat

SEQ ID NO: 294452 - DNA, 567 bp, Homo sapiens
ccttctcctgtttaaaatcaagctgacttcgaatcatacatctttgtttccacacatgaaaatatgatgccattgtatccccagatgttagagacctaaacacactcacttatcctgttagcagttttctcctcatctgactccatttggggaataggtattcactcctctttccagagaggacctcagcagaccatagccacatgttgcatggctcagctggactcacagacccaaggaagaacaaggagaagtcttgttcttccaaagagcagtctggagtataaataaatacaccagaccatgtgcatagaaaacataggctgttgggagaactggaaagagattctgaggatgagagagtggctgagaggaacgggaacartagtaactcagataattatctacgaaggtaatcagaggcaaaaagatctttaatacagtgagaaacaaaaagctaactatcaacaagtggcaattaggctgacagctgacttagcagcaatgatggaagtcagaaaacactagataagtatcttcaaaatgctgatataaaataactgtcaa

SEQ ID NO: 294453 - DNA, 539 bp, Homo sapiens
tcactgagtggatggtagtgccattaatggatattggaagtataagaggagtggttgcggcatggtgactgatgcctgtaatcccagcactttgggaggccaaggcaggcagatcacttgaggtcaggagtttgagaccagcctgggcaacatggcaaaaccctatctctacaaaaaatacaaaagttagcccctcatgatgacttatgcctgtagtcccasctacactggaggctgaggcatgagaattgcttcaacccaggagacagaggttacagtgagccgagattggctgctgccctccagcctgggtgacggagcgagactctgtcctgcactcccccaactccagaaaaaaaaaaagagatgttggggaaagaggaagagggatgagtctttgatttatgaaattttgaatttgtgatatatgtgaaaatttccaagtggaaatgtctagaacatttaaataaacacttttgaagcttgtgtcagaagcagggacataaatctgagagttacaaagtttaggtaatacttaa

SEQ ID NO: 294454 - DNA, 534 bp, Homo sapiens
tggggggaaaaagtagggagacaggaaataaattccccaaatttacccagctaatgtcatgggtggaagttggaatttgaatccagacaatctggatctggatacttcacttttaatttttctrttacagtctagaatagcactgttaaatagaacttttggcagtgatggcaatctcctacatctgccctgtcctgtacaatatggtagcgctagtcacatgtggccattgaacacttgaaatgtggctagggtaactaagttaactggatttttaattcctttacatttttaattaaattattttaaattcaaataggcacatgcgactagtgattactggatagcacagttaaaaacaattctttctgggattttttaaaacaaataagaaatagaaattttaaaataggactataacttgagggagagagaatcaaagaagagctttgttttttaaaaacagggacttacttgtgggaacaattgggtaggtgagatccagaacttaagtggagatcattggttgtaacc

SEQ ID NO: 294455 - DNA, 534 bp, Homo sapiens
tggggggaaaaagtagggagacaggaaataaattccccaaatttacccagctaatgtcatgggtggaagttggaatttgaatccagacaatctggatctggatacttcacttttaatttttctgtyacagtctagaatagcactgttaaatagaacttttggcagtgatggcaatctcctacatctgccctgtcctgtacaatatggtagcgctagtcacatgtggccattgaacacttgaaatgtggctagggtaactaagttaactggatttttaattcctttacatttttaattaaattattttaaattcaaataggcacatgcgactagtgattactggatagcacagttaaaaacaattctttctgggattttttaaaacaaataagaaatagaaattttaaaataggactataacttgagggagagagaatcaaagaagagctttgttttttaaaaacagggacttacttgtgggaacaattgggtaggtgagatccagaacttaagtggagatcattggttgtaacc

SEQ ID NO: 294456 - DNA, 534 bp, Homo sapiens
tggggggaaaaagtagggagacaggaaataaattccccaaatttacccagctaatgtcatgggtggaagttggaatttgaatccagacaatctggatctggatacttcacttttaatttttctgttacagtctagaatagcactgttaaatagaacttttggcagtgatggcaatctcctacatctgccctgtcctgtacaatatggtagcgctagtcacatgtggccattgaacacttgaaatgtggctagggtaactaagttaactggatttttaattcytttacatttttaattaaattattttaaattcaaataggcacatgcgactagtgattactggatagcacagttaaaaacaattctttctgggattttttaaaacaaataagaaatagaaattttaaaataggactataacttgagggagagagaatcaaagaagagctttgttttttaaaaacagggacttacttgtgggaacaattgggtaggtgagatccagaacttaagtggagatcattggttgtaacc

SEQ ID NO: 294457 - DNA, 512 bp, Homo sapiens
aaccaccattttactttgtctttgtgaatttgactgctctagatatttctactcatcagaatttgcttcttttttaaggctgaataatattccattgtgtgtatgtacatgtatacaccacattttgtttatccattcatctgtcagtaggcacttgggttccttcaccttctggctattgtgaataatgctactatgtatatgggkgtacaaatatttctaacaggccctcctttcaattattttggggatatacccagaagtggaattgctggatcatatgataatttaatttttgttttttgaggaactgccatactggttttctaattattgttattattattattatactttaagttctagggtacatgtgcacaacgtgcaggtttgttacataggtatacatgtgccatgttggtttgctgcacccatcaactcgtcatttacgttagatatttctcctaacgctatccctcccccaataggccccagtgtatgatgttcccctc

SEQ ID NO: 294458 - DNA, 529 bp, Homo sapiens
tttactttgtctttgtgaatttgactgctctagatatttctactcatcagaatttgcttcttttttaaggctgaataatattccattgtgtgtatgtacatgtatacaccacattttgtttatccattcatctgtcagtaggcacttgggttccttcaccttctggctattgtgaataatgctactatgtatatgggggtacaaatatttctaacaggccctcctttcaattattttggggatatacccagaagtggaattgctggatcatatgataatttaayttttgttttttgaggaactgccatactggttttctaattattgttattattattattatactttaagttctagggtacatgtgcacaacgtgcaggtttgttacataggtatacatgtgccatgttggtttgctgcacccatcaactcgtcatttacgttagatatttctcctaacgctatccctcccccaataggccccagtgtatgatgttcccctccttgtatccatatgttctcattgttc

SEQ ID NO: 294459 - DNA, 972 bp, Homo sapiens
tttactttgtctttgtgaatttgactgctctagatatttctactcatcagaatttgcttcttttttaaggctgaataatattccattgtgtgtatgtacatgtatacaccacattttgtttatccattcatctgtcagtaggcacttgggttccttcaccttctggctattgtgaataatgctactatgtatatgggggtacaaatatttctaacaggccctcctttcaattattttggggatatacccagaagtggaattgctggatcatatgataatttaatttttgttttttgaggaactgccatactggttttctaattattgttattattattattatactttaagttctagggtacatgtgcacaaygtgcaggtttgttacataggtatacatgtgccatgttggtttgctgcacccatcaactcgtcatttacgttagatatttctcctaacgctatccctcccccaataggccccagtgtatgatgttcccctccttgtatccatatgttctcattgttcwtttcaaaataaaaattcctcaggaaagtacttctaatttaatataagctttatttaactggacatattttaagatgtaaatagccaacaggcattgtccaggttagtaatcagtaaagtcctggtaactgtaaataaaccataaagaatttaattctgagccaagaaatacatacaagaaaaagaagtctttaatttcattaaaatttataagtgccttaaggtttttgagcatcagagtataaacagaaatgcaattttaaggccattttaaatgaaatccccatacactctgaattggtatatggagctgctgaatgctatttacwcaattgagtcctgtccgtgttacctactagaaagacttccaaagacacagttgcagttatttgatagaaacatcataaaatcctagctaagcagtaatgatactaggagcaatg

SEQ ID NO: 294460 - DNA, 442 bp, Homo sapiens
tttcaaaataaaaattcctcaggaaagtacttctaatttaatataagctttatttaactggacatattttaagatgtaaatagccaacaggcattgtccaggttagtaatcagtaaagtcctggtaactgtaaataaaccataaagaatttaattctgagccaagaaatacatacaagaaaaagaagtctttaatttcattaaaatttataagtgccttaaggtttttgagcatcagagtataaacagaaatgcaattttaaggccattttaaatgaaatccccatacactctgaattggtatatggagctgctgaatgctatttactcaattgagtcctgtccgtgttacctactagaaagacttccaaagacacagttgcagttatttgatagmaacatcataaaatcctagctaagcagtaatgatactaggagcaatg

SEQ ID NO: 294461 - DNA, 976 bp, Homo sapiens
tttgttcagtataatacagtatttagtgctgagtgatatactttaaaaatgcatgctttgtgaaactgataggtagagtgctagtctgaattattttgtagtaattattataaactctgaaaggaaaactcactgacagcatttgtggctaagaaattccattaaaaraaagcataacaatcatattttgatgtgaaagttccaattcttatactttaaatttcattttcaaaataatatttcttgttatttgagcagtagtgtttctttatcattgtgatacaataagctggagataaaaatttttattttctccattttaaatgtattagctaatatagaagtggttcagctagtgccacaaatgagtatcattcaaaacaaaattgctgctgtacttactcacttgaatgaaatgtaagaacttgtctttctggagatgaaacccagaatctaatgctgaagagatccatgtgatattttttcaawcatatttcaatgaaatgagataggaatgcatgtcaagcatagggagcttcagaagtgtagagtaagttcagaaaaaacatttagtatgcagcagagaaagataaatgatctaatttgactaaagtattcatttccaaactttttatttaagcaaatggaacccatttaacttttcgaagcacaggacaatacaatctctaagggtgtccttagagcatactcaaggaactaaaactatattcaagacctcaagcatagagtataagagatagagttataaatataaggtagagttacacagttttatatttataactgtataaatatttatatttatatataaatatactctataaatatatcccaaccttcccttctgaatccccaaagtccattatatcattcttatgcctttgcatcctcatagcttagctcccacttawaagtgagaacatacaatatttggtttttcattcttgagttactt

SEQ ID NO: 294462 - DNA, 646 bp, Homo sapiens
tgatgactatgtgccttggtggtgatcttttgcaatgaattttcccagaagttcttggagctttttgtatttagatgtccagatctctagcaaggccaaggaagttttcctcaactattacctgaaataaattttccaaacttttagacttcatttctccctcaggaatactaattattcttaggcttagctgttttacataatcccatttttttttggagactttgttcatatttctattcttttttctttgtctytgtctgattggattaattcaaaagccttgtctttgagctctggaattcttttttctacttgttctattgctgaaactttccactgcattttgtatttccctaagtgtgtcttttatatccagaagttctgattgattttttttgttatatatatatatctctctctggaaaatttttcatttgtatcctggatttttaaaaaatttctttaattttgttttcacatttctgttatctctttgagtagcttaatcatcaaccttctgaattttttatctggcatttcagagatttcattttggtttggatccattacaggggagcgagtatgatcttttggtggtgttataaaaccctgttttctcatattaccagaatcacttttatgg

SEQ ID NO: 294463 - DNA, 509 bp, Homo sapiens
attaagagaataaaatatattttagatacattgtttactgtttagaaatcatgagattctatagtggtaagaccttccaaactctttaagacttcagcttgataaaatttttcaagcttggtataaaaaaatgttcctcttaacagtggatacttttcaagatcacacatatttcttagtaattttttcaagagargagtttttttaaaacttctttattgtgaaataatttatggactcacatgaagttgcaaaattaatagtgagagtctcatgaacccttcacctagcttccctcagggagttgggctgcagatataacataggaagatgtagaagtaatcacatataatagtatttatagtatgagaatggatgtagcctaacactttgttcaataggacaatacttaaatgattggtactaaaggtatagagagttcagcttgagggccacttttattagggaaggcgaagtaggaatgaagaagtgggacttttaatggtttg

SEQ ID NO: 294464 - DNA, 589 bp, Homo sapiens
aaatgaggaaactgaagtgcaaagaattattatacaacttttctaaagtcacaagtagaaaactgcagaaagggctcaaacccaggtcctcagactcagctcttttttacaatrccattttgcataattcattagcaagttttgcgcccatgcatggtatcacattgcctatctgtgccttggcttcctcatcgggggcagcatagcctcacagctcagaatataggatctgcgacttggccattaccagctctgtgaccttagcacttcacagagtgatacggcttgaatgtttattcactctaaatctccggttgaaatgtaatccccagtgttggaggtggggcctggtgggaggtgattggatcatgagggcagatccctcatgaatggcttagagccatccccttggtgatgagtgagttctccctctgagttcatataagatctggtttaaaagtgtgtggtcccctcccccactgcctctcttgcttcctctctcacttcctctctctccatgtgactgctccccctttgcctgctcctgcttcaccttccaccatgattgcaagcttcctaagctcccacc

SEQ ID NO: 294465 - DNA, 589 bp, Homo sapiens
aaatgaggaaactgaagtgcaaagaattattatacaacttttctaaagtcacaagtagaaaactgcagaaagggctcaaacccaggtcctcagactcagctcttttttacaatgccattttgcataattcattagcaagttttgcgcccatgcatggtatcacattgcctatctgtgccttggcttcctcatcgggggcagcatagcctcacagctcagaatataggatctgcgacttggccattaccagctctgtgaccttagcacttcacagagtgatacggcttgaatgtttattcactctaaatctccggttgaaatgtaatccccagtgttggaggtggggcctggtgggaggtgattggatcatgrgggcagatccctcatgaatggcttagagccatccccttggtgatgagtgagttctccctctgagttcatataagatctggtttaaaagtgtgtggtcccctcccccactgcctctcttgcttcctctctcacttcctctctctccatgtgactgctccccctttgcctgctcctgcttcaccttccaccatgattgcaagcttcctaagctcccacc

SEQ ID NO: 294466 - DNA, 1237 bp, Homo sapiens
gggcaaaaataagttctctcatattctctctgagaggatgtaaattgtataatacttttagagggtaatttgcaatatttttcaaaattaaaaatgrgcatgcccttttagttagttattctatttgcagaaattatcctacagataaatcatacatacattaggtcagtacaagtttgttcacggtagcattgtatagaaaagcctaaatgcccttcaatagagcattacattaaatctatgcagtagaagagcattcaacagagttccctgaaagatgagatagatctttatgtactgacatgtaaagactctaaattatatttttaagtgaaaaacagaaagcaaattgcagtagaacatgtggagggtacatactggaatgtatgataaagtctgtatgattatgcagcaaaatgttaacaggggttatctttgggagatgagataaaagcagaggaggtaggtaagtaaggaagcaacttttattttctattataggtatttgtattattttgactttttaaaaataaaagcagatattggttttataaattaaaaacacagaaaagggaatatttttgatgcatgttttcctggaaaaaaaaaacaaggtaataattataaataggtgtatattcattagagatttacaatttgaaaataatttgctwtatccaaaatattagcaactcaagtccagtagaacatagcaaaataataaaacatgatcagactgggtttattccaagaatacaatggtgwtgaatattaaaaatcaaatagtgatttatcacactcatagattaaaggaaaataaaataggatatgctcagtagaggtagttaaagtagttaataatatttaacaatcttttatgattaaaaatatttttttaatctgttagcaaatttggcttagagagaaagtttcttaccctaataaaggattcctaacaaaaacctaatcccaactctaaacctaagggcccaatagtgaaacattagaagcgcctttgaaaaattgaaactagaaagatgctggctcatcccacaccggctattactactgtgatccaaccacactggagccccagctatagtgaaataaaaatgacaaaagatataaagactggaaatgaaaaaacaaactatcattatctatataagattttctacataaacagaacctcataatctaaggattaattatcagaattaacaacagtgtttatcaa

SEQ ID NO: 294467 - DNA, 408 bp, Homo sapiens
tggtggcaaacccatatgagtcagcaggaacctcagttcttgccccccagaagaaaagaatttgaccgagaggcataaggctgaaaagaagactgaggcaagtttcagagcaggagtggaagtttattaaaaagccttagaacaggaaagaaaggaaagtatatttgaaagagacctaagctgacatcttggaggtccagtgcagggtgtratttaaaagttcatatgctggcctacttccatgtcttgtgcccctttcccttcattcttcccttagggtgagccgcctgcatgcacagtgccctgcttgcgcttggaaggtgagcatgtgcactgtgtttactggagttgtgtgcatgctcactcgaggctttcttccattttctggtggaatgcccctggaaggtc

SEQ ID NO: 294468 - DNA, 562 bp, Homo sapiens
atttgggtagggacacagccaaaccatatcacacccagggccaacatcactcgcagctccatacttttacacagcttgttaggactgaattgccctccacaaaatttcatacattgaagccctaaccaccaatacctcacaatgtgactatatttggagatggggtcttgaaagaggtgattataagctaacataaggtcatgagagtgggccctaatctaatctgactggcatccatataagaagaagacatttggacaccagggatgtacacagaagaaagtccatgtgaggacacagcaggaaggcggccatccacaagccaagaagagaggcctcaggagaaaccaaacctacctacamctatcttggacttctagcctccagaacaatgagaagacacgttttttgttgtttaaagagctgagttgccaagatggccgaataggaacagctctggtctgcagctcccaccgtgaatgacacagaagacaggtgatttctgcatttccaactgagatatctggttcttctcattggggctggttggacagtgggtgca

SEQ ID NO: 294469 - DNA, 580 bp, Homo sapiens
ccctggcttaaaccaccctcgcaaaatccagtcccatctcctcagacctcaatgagttttaagttttcaagatcatgtratctggggtaatctttgataaataaaaagttagtttaaatgtgttagtttaaataaagaaggtttgtcttcagagttgtcaaccttaaacatgatgcagacatacaacttattctacctgaatttaccaataaaattgcttatgttggccaggcacagtggctcacgcctataatcctagaactttgggagacccaggcgagtggatcacttgaggtcaggggttcaaggccagcctggccaacatggtgaaaccccatctctactaaaaatacaaaaaattagccaggtgtggtggtgggcgcctgtaatcccagatacttgggaggctgaggcacaggaattgcaagaacccaggaaatggaggttgcagtgagccaagttcacgccattgtactccagcctgggcaacaagagcaaaacttcatctcaaaaaaaaaaaaaaaagcttatgtttaagattgttgaattacaaatacaataaattcaacctaagaacaaa

SEQ ID NO: 294470 - DNA, 580 bp, Homo sapiens
ccctggcttaaaccaccctcgcaaaatccagtcccatctcctcagacctcaatgagttttaagttttcaagatcatgtaatctggggtaatctttgataaataaaaagttagtttaaatgtgttagtttaaataaagaaggtttgtcttcagagttgtcaaccttaaacatgatgcagacatacaacttattctacctgaatttaccaataaaattgcttatgttggccaggcacagtggctcacgcctataatcctagaactttgggagacccaggcgagtggatcacttgaggtcaggggttcaaggccagcctggccaacatggtgaaaccccatctctactaaaaatacaaaaaattagccaggtgtggtggtgggcrcctgtaatcccagatacttgggaggctgaggcacaggaattgcaagaacccaggaaatggaggttgcagtgagccaagttcacgccattgtactccagcctgggcaacaagagcaaaacttcatctcaaaaaaaaaaaaaaaagcttatgtttaagattgttgaattacaaatacaataaattcaacctaagaacaaa

SEQ ID NO: 294471 - DNA, 476 bp, Homo sapiens
acttttgtcttgtaaggttattcaaaggttgtttcagaatcgatcagtgaatcaaagattaaaagtgaatggatataaaaagttgaaaaggaaaaacaagagagaatcttgcatgtccaagcagactaaattgaataaattcattataagactttggaatttggtctttgttaaaaagacaaagtgttttttggagtattggtctgctcttggtagaaaaacattataaaagatttttctttacctttaaaattatctacmtaaaaaccaaatatttcatgttttataaaaataattttctgtgcttcatgttatagtcatattaggtctttgattccttaagaaaaagaaatcttctcaatatttaaagagctaagcattttatctctacaactatgtaagtttctacatttgccttaaaagtcttttaattatataaaacttatattaaataaatttatacacatttgtcctgt

SEQ ID NO: 294472 - DNA, 450 bp, Homo sapiens
acaagctaaaaatgctttaaaaatatctgagacagttgattcaaaggaaagctacttcataactatgtaaaaggctccccaagttttttggtggcatttctttttggctgttatatttaatataattaaataattatagttgtttgttgcaacatggaactaagtatacgccagcattccatattttttagcaataattctcaggatggcgattcttaaaactagcattgttcacatggtgtggcatgcatgcttattatttttgggcttttatatattatttcaagctagggcaaaatattttatttgcattgcattgtaagagtcacactttagcaacttgccattaaggcaaaacactttatccycaaacctatttcacttgatataaaaagccagatatgtcacattgttcagtggcaggtgagcaaagttctcttcacaggaaat

SEQ ID NO: 294473 - DNA, 645 bp, Homo sapiens
ggtattttagtttctagcctctgtgccctactcacttcctttgctttcaacttaatggcagccaccttgatatcatctgaaaaaaaggatttgggtgggaaggccaccccttagttcaatttggccaataggctctctccccttcatggcaaggcctgttatttatgcatagttttttttctggagatttatgataatttcatatgttattcagtttccaaaactgtgcagattataggatctgattctttttcaacactatttattaaacaccactacgtgttgtatactctatggcatagggtaattaggattccaagtttgcaccaaagaactctgacctacagaaagataagttacctgcccaaaatttgcaaatagtmaaataggaacttgaactcatatcatctgattctaaaatggcgtgttcatccaaccataaaatattgcctcaaaatatctaacttgagagttacgaagaggttggtgatatttcacatccattcttgagacagaaacaggcacaggtatcagtggactgatgcatgatcaagtacagatctgaaagtttaaaaaaaaaaaagccaaggagtgaggtagtggatatgcaactctatctaagtagtttaactgtggatcaggaat

SEQ ID NO: 294474 - DNA, 622 bp, Homo sapiens
tgtttttctccttaatccaggattcagtcaagatttattcattgcatttggttgttacgcataatctaaaacagtactttcccttttgtttttcatgacattgacttttgaagaatccagacaaaactgtcttgtagaatgtccaacattctggatttttttttttttttatcattctctctattccctgtatttccagtaaactggaggttagacctagggatgtgattacattgagttaaatgtcataggtgatataaactttatatagtccatcgatagacacataatgtcaagatttcttactcctaggcatgctacatttcatcacttggttaagaggtgactgctagtttctctctatggaaaacatatatttttctctttataattactaagcaatttctggagtaatactttggtaccacatgaatattctgttctctaaaaattatccaataattgtaatatcyagtgctgacccttgcctgaatcaattattacactgggactgggaattttaattgagtttttttgaaacataatcaaacttaaaaatagacttaaaatgtgtattaagtctatgcttttacattatgtcataaagtggattaatatagta

SEQ ID NO: 294475 - DNA, 557 bp, Homo sapiens
taatccgatgaaggctgtgaaccaaaactttgggtaaagcagtttccatggtagttagatttccttttagaggtcaaactctcccaaactccaaagaatactggggccaaacacactacagaagaacattatgtactaactaggcccaaccctgcttagaacagcagcataaaatcctgggtacatggaagtccctcctgctttcctattcaacagcaaaatgaagactgccctataattcaaagaccttccaagatgagatgagacctggcacttttgaggtgggatggccatagccatcagcctacaactatattcagaccaacygtgaaggatgcatcaaagtgggcagcgctgtgggatcaaatcccgacctcccacaactacatcaaaacatacacaaaacaatcaacaaaatataatacaactgttgcagcagcaaacaagggccaaaaggcccaaactgaaacagttgaggtgcttcctctctctgtctgtttggcttgttcaacctgcaaatggaaagtcctttgaaatttctcaagctgagaggagct

SEQ ID NO: 294476 - DNA, 557 bp, Homo sapiens
taatccgatgaaggctgtgaaccaaaactttgggtaaagcagtttccatggtagttagatttccttttagaggtcaaactctcccaaactccaaagaatactggggccaaacacactacagaagaacattatgtactaactaggcccaaccctgcttagaacagcagcataaaatcctgggtacatggaagtccctcctgctttcctattcaacagcaaaatgaagactgccctataattcaaagaccttccaagatgagatgagacctggcacttttgaggtgggatggccatagccatcagcctacaactatattcagaccaaccgtgaaggatgcatcaaagtgggcagcgctgtgggatcaaatcccgacctcccacaactacatcaaaacayacacaaaacaatcaacaaaatataatacaactgttgcagcagcaaacaagggccaaaaggcccaaactgaaacagttgaggtgcttcctctctctgtctgtttggcttgttcaacctgcaaatggaaagtcctttgaaatttctcaagctgagaggagct

SEQ ID NO: 294477 - DNA, 648 bp, Homo sapiens
tacattaattgaatttgaatgttgaactatcttgcagatctggagtaaattcctttttggtcataaaatataattgtattcctatgcagctggattcagtatgctaatattttttggaggatttttgcatttaagttcttttctggtaccattgtgtggttttgatatcagggtaacaccaatytcagaaattagttgggaagtgttccttcttctaatttctggtaaagattgtatataattcatatcaacttacctctaaatgttgatagaattatttaatgaaactatcagagcctgaaactgtctttgtcagaaggcttataattataaatccaattactttaatggatacagagctattcagattgagtgaggtttggtagttttatcagaaggtgattaatttcttgtaagttgttaagtttatgaatttaaacctctttatgacattcctttaatatcttcttagtggctgcagactttgtagtgatattccctattttatttctattattggtgatttgcatttgtctctttttttgtcagtcgtgttagaagtttactaacttttggttttttaaaagaaccagctctttgtctcaatggacttccctgttgtttttctattttcaatttaattgattt

SEQ ID NO: 294478 - DNA, 561 bp, Homo sapiens
tctatccatcagagaactatccaggccaatagcaacaaccacaaagggctgttttatctgaaccttacacaaaactggaaattttttatttgtttgtttgcttgtttgttttgaagcaggttcctgtcacccaggctggagtgcagtggcactatcatggcttattgcagcctcaacttcctgggttccagcgatcctcccacttcagcctcctgaatagctgggactacaggtgcgtgccaccatgcccagctaattttttgtattttttgtagmggtgggatttttccatgttgccaggctgatctcgaactgctgggctccagtgatcctcccacgtaggcctcccaaagtgctaggattacagatgtgagccagggtgcccagcctggacaactgtttttatccagccaaatcatgctataacgtattttcagttctctatttcaggcttcaaattgatatgacaaatgctttataaactcagaaattatattttccattaaaaccatagctgtaaaatgtaacacctatcttttgttcttctgtaagggacaactt

SEQ ID NO: 294479 - DNA, 561 bp, Homo sapiens
tctatccatcagagaactatccaggccaatagcaacaaccacaaagggctgttttatctgaaccttacacaaaactggaaattttttatttgtttgtttgcttgtttgttttgaagcaggttcctgtcacccaggctggagtgcagtggcactatcatggcttattgcagcctcaacttcctgggttccagcgatcctcccacttcagcctcctgaatagctgggactacaggtgcgtgccaccatgcccagctaattttttgtattttttgtagaggtgggatttttccatgttgccaggctgatctcgaactgctgggctccagtgatcctcccaygtaggcctcccaaagtgctaggattacagatgtgagccagggtgcccagcctggacaactgtttttatccagccaaatcatgctataacgtattttcagttctctatttcaggcttcaaattgatatgacaaatgctttataaactcagaaattatattttccattaaaaccatagctgtaaaatgtaacacctatcttttgttcttctgtaagggacaactt

SEQ ID NO: 294480 - DNA, 561 bp, Homo sapiens
tctatccatcagagaactatccaggccaatagcaacaaccacaaagggctgttttatctgaaccttacacaaaactggaaattttttatttgtttgtttgcttgtttgttttgaagcaggttcctgtcacccaggctggagtgcagtggcactatcatggcttattgcagcctcaacttcctgggttccagcgatcctcccacttcagcctcctgaatagctgggactacaggtgcgtgccaccatgcccagctaattttttgtattttttgtagaggtgggatttttccatgttgccaggctgatctcgaactgctgggctccagtgatcctcccacgtagrcctcccaaagtgctaggattacagatgtgagccagggtgcccagcctggacaactgtttttatccagccaaatcatgctataacgtattttcagttctctatttcaggcttcaaattgatatgacaaatgctttataaactcagaaattatattttccattaaaaccatagctgtaaaatgtaacacctatcttttgttcttctgtaagggacaactt

SEQ ID NO: 294481 - DNA, 567 bp, Homo sapiens
ctgactcaacaaaggaagtaacacctagggcaagtgtgggaactcgcacgtgatgcggttacttcccttacaaacgcttccttagagagggtgcccatcatcatcatgttaggatctcttttatccttgtggattcccacttagtataagcattttctgttcctgtaaccactgtagactgatgaggagcacatagctggcactgatgagcacaggtctcctggtactcagccctctcatttcattttccctgttggtggcagtttcttctgggcacctctggaaatgtgcatgggacccactgcatctcagttgccctggtgcagtaaatcatcctgcagcagccagctcacatgccaagttcgaattagtgtaaaatgtcaccattattgccgtcccagcaactctaacatatctgggcttttaacatgtcctacaacatagaacaagcttcagagcrtgtcttcctccttagggccagtgaaaggcagcccgcaagataccagcctgtgctatagggtcgagggcccagggtgctgagtgctatagagaaagagtgggtctcat

SEQ ID NO: 294482 - DNA, 567 bp, Homo sapiens
ctgactcaacaaaggaagtaacacctagggcaagtgtgggaactcgcacgtgatgcggttacttcccttacaaacgcttccttagagagggtgcccatcatcatcatgttaggatctcttttatccttgtggattcccacttagtataagcattttctgttcctgtaaccactgtagactgatgaggagcacatagctggcactgatgagcacaggtctcctggtactcagccctctcatttcattttccctgttggtggcagtttcttctgggcacctctggaaatgtgcatgggacccactgcatctcagttgccctggtgcagtaaatcatcctgcagcagccagctcacatgccaagttcgaattagtgtaaaatgtcaccattattgccgtcccagcaactctaacatatctgggcttttaacatgtcctacaacatagaacaagcttcagagcgtgtcttcctccttagggccagtgraaggcagcccgcaagataccagcctgtgctatagggtcgagggcccagggtgctgagtgctatagagaaagagtgggtctcat

SEQ ID NO: 294483 - DNA, 560 bp, Homo sapiens
ctggggacattaataatcctccccctcagcgttactcagaaggctcttccctagacattcccccagaccccctttcagtctgttttagcctttgcttcagtgtctcttccaaggaaaccttccctgacgctctgtctaaaggaccacccacttcccttcagctccagtttttaccctgagttaattttctccatggggccgtggccagctgatttcatagtagatatgggtgtatttattgaattcctcccactagcctgtggtcagtgggttcacaggcattgtgcctggaagagtgccccacacatagtgggccttcagactgtttgctgagtggatccctgttgcctgtgttagtttcttaaagaaacagtggatggtcaggtttccttaaagcagagcctgagatggggtagatgatttactgagggttggggtttctcagaagacatgtgagtgatgcaaaaagggaagagatgcggaagggactgatggagcctgggagagaagcaggayaaagacgtcggcctggctgaagcccagctgaagctgatcccatg

SEQ ID NO: 294484 - DNA, 564 bp, Homo sapiens
gcaacaggaaagacacatttcagatgttttagcagtaatacaagtaaatggttctcgaagtgtgcaatagacaagcctcgccctgggaaaaccaccttcatgatcatggtatcttcccttccaggtaagtgtaattctcagaccttacagggaggcagaacagcatattgtaaagaagttgggtttcaaaagtgaaatggagctggatcccaatgtgctaattcacaattatctgggccacccataagcctctctgagccttggtttcttcatgcaaaaataaggatgtatttcatacctgttgagaagacgaatggatttagctatagaaaggaagaggtcacaacaggtggtctacgtgggcacagaccctgcttctgyagatgaccagctgtgtggccctggatgggtggcctctctctgccatgccttggtttccttatcggtaatatcagagaaataattcaaccacactctttgaagttctgtgaagcttacgtgggttgaacatgcatggctgtcctgtgctgctggggaagttgatgtcagctctctttctcccat

SEQ ID NO: 294485 - DNA, 563 bp, Homo sapiens
tctgttaacattggttataaattaactacggaactttggacatatcccactttctgtgagcagaagataycaatctatttcaatttgttgatatccctaggagtattacatatttaaaactaaaacccagaagcttgggcacctgagtcatcaatctcttttgctccatttcagctatttcatgtgcttttgttttgtgcatctcacacaggtggaatttttctttttctgagttaaatacatttaacttgatatatagagttattgtgtgaggccagaatattttcagttcataccttcacttctgttttgttgttagtgtgttattcatttctagctttgagtggcagaatctctcctgaactctaagaaaattaaagaaataaaggaaatgtctgcaggcatccgttggcatgcctttttattttacctgtcacaccgtagcagtcaaacaaacatagcagttttataaatgatccattgaatgacaaagagcatcccattctcgatggtttttacatggggtttatttattctctatgttgttatccaattctttgctt

SEQ ID NO: 294486 - DNA, 558 bp, Homo sapiens
tcctaactcgaccactcttgagctgtgtgatgttgatctaacagccaaacctctcagcctgtctttcctcaactgcgaaatgaggatgttaagtcttcaaattaargtgaggaacatcattcatgaaacgtccaccacactcccttgctgtgccagtgcttgaggggaaatatctcactgaggcttctcaatagtatttatgagtgaggtgctttgatttgttctattttacagatgcagaaactggggcgccgagaggttaaatcactcatctggagacacacagccagggaggatagtaagcagccaggatccaagcccacatccataggacctgaggctacagtgtaccatccctcacctgctccccactgtgcttcataacaccaggtgcagaggacagtggggccagaggcggtggtggataagaagtgactaggatgaggatgtgaaaagggcaaatattcacttgcctctcttgtgacatattcacataccatagaaagctatttctccatctctagctcctcagagaactttctgtggaattgtaatgca

SEQ ID NO: 294487 - DNA, 671 bp, Homo sapiens
gcgtccattaaactatatttgtataagaaaatttacttctggggtggcaatgattaacttaatatacatcgggcttttaaagaggatgatgccaaggatatatttactgccatagaaatatgcccaaaacayagtgacaaaagactatatattacaattctactttttaaaatgttcatatgcataaaaaatacaaaaagcaacaaaccagaatgttttgagtggcaaaatttaagacttttcttcatattttgtcttccaaattattacaaaaagaaagtgattttctttataatcagggagaagtattattttcatttatttacatataaatttattttcttttccttattttttctcatgtatgtatcacatgtactctagagagcttgaatccccccctcttgaggtaaatcagcccatttccgtctctatccacttgccttttttggacatttcaaatcaatggaattatacaataagtgtctggcttttttacttagctaatgtttttgaggttggtccatgacatataacaggttttggtagtttgttcctttcattactgagtagaagtccattgatggatatataccacattttgtcagcagagaacatttaaactttactttcaacttcctatggtctaaatgaaaccgctggaacacagg

SEQ ID NO: 294488 - DNA, 562 bp, Homo sapiens
ccagaaaaccccaaaacagtgacttttttttttttttacagccaaggcaggtaccatgttggcagccccagacctgacaccgtggctcccatgtcccctctccacttccgtcctgcacatcacctatactacatgctgtccctgatgaatccaagctgtcagctttcatcagcttggctgggaagtcatgctgaccataagtagaatggtgctgcctgagttgggggctaagtgggaatgggcctggcatggggtgggggaggtrggggtgaggcaggtgtctggcacctctctgcttatcttcccttctccctggcccacaaaggaagcatcttctccatgtacctctgccacctcgggaacataaaatactgcctcaggtctgtcttcccttggacataacccatctaccttcctgtgggactcagggctttgttttgtcctggggcccacatgagaagcaattatccctgctctgcttagctgagagaggacaaactgaggcagagcaggggaacaactctgtcatagtctggctgttaatggcagagtcaagaccagc

SEQ ID NO: 294489 - DNA, 509 bp, Homo sapiens
attttaggccttggttattagacagcatttctgggcccgtcttaggccagaggggagcccattgccttgaagggtgagtcccaggcctggaagcattcaccacaagtgccttcagagcccttgggccctaagagaacatcgacagtagcctggcagcactccgtgtgcgcctgtggtggtggccacagggtgaggctcctctgcctgtggaaggggaaagacagagtgggaaggactttgtytcatggtttcggtgtctgctcagccgccttagaataaagccccaggtaaatttttaaggtttttggctgcagtccctggctcccagacagcatttttggacatgatagggcctaagggaacttgttgccctgaagggaaagacacaagcctggctggctttgacacctgctgacagtagagccccagggcctcgagtgaacataggcaatagccaggtagtgttgacagtgggccctgagtgagacccagtgctttgctggctttag

SEQ ID NO: 294490 - DNA, 1128 bp, Homo sapiens
attttaggccttggttattagacagcatttctgggcccgtcttaggccagaggggagcccattgccttgaagggtgagtcccaggcctggaagcattcaccacaagtgccttcagagcccttgggccctaagagaacatcgacagtagcctggcagcactccgtgtgcgcctgtggtggtggccacagggtgaggctcctctgcctgtggaaggggaaagacagagtgggaaggactttgtttcatggtttcggtgtctgctcagccgccttagaataaagcmccaggtaaatttttaaggtttttggctgcagtccctggctcccagacagcatttttggacatgatagggcctaagggaacttgttgccctgaagggaaagacacaagcctggctggctttgacacctgctgacagtagagccccagggcctcgagtgaacataggcaatagccaggtagtgttgacagtgggccctgagtgagacccagtgctttgctggctttagwtgctgcttacattaatataatttatattttgtaagctctttatttcttcatataaactcttaggaatttaaagtacatacacacacacaagcaaacacacactagaagcttgggaccttaaagagttgctcatcataagccaaacatgtgcctggtaaataaattggagtttgtattgaagtcaatttcatcctttcagcattaatcagcctggatacattttcttctagaataatggacctctttcagagtgtttgtatacgctgtttttctaaaataattwctatattgtcctagtaaccaactatttcaccttaatatttcattttcatgctataatgtgtatgatttttttctccataaatcatacaagacttgaaattagaagaaatctaatattttcataaaataatcttttcttatgcattaatctatagaaacttcaaatgcattatgatattaatctgagattttttaaagactaatatgtttcatagaaagaagtgtttttggacacattaagattcccaaacatatgtatgatgagcagttcccaaagactttctggcatcagcaaacttagtaaattatatgttgggattcttctaaaaggtttgg

SEQ ID NO: 294491 - DNA, 551 bp, Homo sapiens
gacttgaattcttttccatagcatgaagaatggtttaaaactgcagtaatttaatgaccagtagasggcaataaagttgaaattttatttatttaaaaaaaaaattcactgggctcattttaaactcactttcagacccaattctagccgggaaacgcctcctccagagtagtatcatgatttcaatttagtgcagctaaaaacctcttgtaccacgttaggatccccatccccatccccgttggggatccctctttcccctatcacacagagtaaacgggggaggtgtgctacaggatcagacgggtgtacattgacttatacaccacagctctctgtggttgtttaattcctggtctaatcaaaattatttgacagtggatactacttacaagtgagagtctgtaagagagccactgggtaagatgtggagtatggtagtgattttggctttaagcttcatgtgataggaaactgcatattcagaaagataccaattccatttaaaagaatcaatccaaacacatacccacatttatacatataaataa

SEQ ID NO: 294492 - DNA, 668 bp, Homo sapiens
ttttccttttcatgatgtgggattttcctgtgattatatgcttatagttagactctgaggtaatgtgagataatgtgcacacatgtgagtgtgtgtgtgtttgtgtgcatgtgtgtgtgtgttttaagatttttgtttgtttgttttagtagtgctttctgggggcctataagaaaactcaataactgtgagcatctttggagctgaaggacacaggattcttgttttktttctgatatcctatagagttcatccttcaactagtgtaggtcatatggatttgttcttcaacactgataacaacacaaacagtaagagctatcaagtagaggaaagaaaacaaaatagaaccgtgactgaatttagggaagggagcctcccagtagcagaaccaggtagcaaatgggaactagtggctttggctgggagggcccagaagtgggactggtgacaggcttagatcacagacttagctggacgctcagcagcaagtcaacaacagtggacctgcatacacacagcccaacacaagatgaagctgtaaataagtgtgcttactacaaagaagctaaaagcagagaccaaaaaaggaaagaggtaaggacaatctcacaaatccacaaggtgatcaaattagaaagtcaaaaaacaaagaagagctaaaacac

SEQ ID NO: 294493 - DNA, 636 bp, Homo sapiens
tgtgagctggaaggaggttgcatcccagagcaccttgtggagcagagctgccgtacagctctagaacacatccccttcagacttttacacatagagaaatcaacatctgtcttattatgctagtaatgttttgtttttgtttctgtttctcccagctgaacttaattctaatctactcactgtgttttgttytgttttctctttgacaggaaaatattttgggagaaatcctgatgagttaaggccccctctatactacccatttttacatttcatttaaaaattatatgaaaatatgacatgaactgttagttatggaggatataaagttggatgttgcttgtattaacaagaaaaactatgcagtaagttcaattctaaaaaccaactaagataatgtttacaaaaataattttagttaaaatctcatgtataaattatggcctgagatatatcccaaaaggaagttatctgtggttctaaataaaacttgtggtcaaggcagagtatttagaatacagagaagggggtgtgatgaacagagggtagagatggcccactctctggaaagaaggtctgagatctgggtgcaacaatacaggcctctgactgtcatttccctgagtgacacacaca

SEQ ID NO: 294494 - DNA, 476 bp, Homo sapiens
tgcatgcacggacttctacatacagaatacttaaacagttcattgtattgaaacacgcttaaaaatggccctagcacttgctgcaatcctgctgtgtaggagttagccaggttgtgtctgctccctctagactattctatacatcaagaactaaaaaagaagagcaatcccagcatgtggctggatgcacatcaaagccaagtctgccatgaattattttccttcctgttcctttcattcaggtcatgaagcacacatactgctacaggaaagggcaaaaggcaatgtcaagtgctgtgtaattgttgggttctttagtggcaaaggccagcaatgttgcagccaaaagggcatttaagagtacaagatgtgggtttttacatggcattcaataatccctcacttatggcaatcaaaaattatccgttttttagkttttttttacaacctaccttcttaaaaatacaaagtgaaag

SEQ ID NO: 294495 - DNA, 567 bp, Homo sapiens
tttcctgttccttagttagaattaacctctctttctccctcacttccatgactcttgctttgtattactccctgcttatatggaagcccattctattctatttatcagaaatatttactaatttatctgtctctatgacaaaactgtgaattcctctaagaattgcctttatgagtactctactgtgtctaacacggttctgggkatgtgcagagttactcagtaaaagtttaaaaatttgaactgaattgaatctgtacaatgcacatgatctatttactcttgtaggagtcaaaaatgaatattctttgtaatcaattcactaggctctgaataataagcatgcaaagatcaaaagtggtttaaagggaaaaaattaccaatctagttgttcaaaacaattacatggatattttataattttatccttaattttatctgcaaaggcacactggggtgcttagtttggccattggtataactggctaatttgctgacagaagccaatcttcctctagtttacacctgcgacatgcctgtttataggcttctgtttaatgagcactg

SEQ ID NO: 294496 - DNA, 1181 bp, Homo sapiens
ctctttgcctctttcctgtgttggttcttcctcattttgatagagtacatccttcagtagtttcttctattcctcacagaatgaatgggaagtaaaatgttaagaactttaactttaaatgttaagaactgctctcatttctttcttatccagatctatcaaaaaaccaacttaggctctgttgtgtctagattgtatcattactttttattcatcactctttgggatyaaagttctatctctcccttttatatttcaaatgacaataatagtatttatacatgattgttgtttctcctaaaaaagtcataaatacaaatcctaaaaaaggcgttctcaaaaatgagaaatctcccagacacttttgtgtctggagatatacttgagagagttgcccaagtgatgagcaatgatattcagaaaactgcatcgcacagacaagcaatatcgtagaaaagatagagggagtgttataagataataatactccatgctttcagtgccacaaaattcaccccatctaatctcccacagtaagattcagttctggtaaccatgcgaggcagatgagtcctatgtgtgatataaccwctctttgcctctttcctgtgttggttcttcctcattttgatagagtacatccttcagtagtttcttctattcctcacagaatgaatgggaagtaaaatgttaagaactttaactttaaatgttaagaactgctctcatttctttcttatccagatctatcaaaaaaccaacttaggctctgttgtgtctagattgtatcattactttttattcatcactctttgggattaaagttctatctctcccttttatatttcaaatgacaataatagtatttatacatgattgttgtttctcctaaaaaagtcataaatacaaatcctaaaaaaggcgttctcaaaaatgagaaatctcccagacacttttgtgtctggagatatacttgagagagttgcccaagtgatgagcaatgatattcagawaactgcatcgcacagacaagcaatatcgtagaaaagatagagggagtgttataagataataatactccatgctttcagtgccacaaaattcaccccatctaatctcccacagtaagattcagttctggtaaccatgcgaggcagatgagtcctatgtgtgatataacc

SEQ ID NO: 294497 - DNA, 590 bp, Homo sapiens
ctctttgcctctttcctgtgttggttcttcctcattttgatagagtacatccttcagtagtttcttctattcctcacagaatgaatgggaagtaaaatgttaagaactttaactttaaatgttaagaactgctctcatttctttcttatccagatctatcaaaaaaccaacttaggctctgttgtgtctagattgtatcattactttttattcatcactctttgggattaaagttctatctctcccttttatatttcaaatgacaataatagtatttatacatgattgttgtttctcctaaaaaagtcataaatacaaatcctaaaaaaggcgttctcaaaaatgagaaatctcccagacacttttgtgtctggagatatacttgagagagttgcccaagtgatgagcaatgatattcagaaaactgcatcgcacagacaagcaatatcgtagaaaagatagagggagtgttataakataataatactccatgctttcagtgccacaaaattcaccccatctaatctcccacagtaagattcagttctggtaaccatgcgaggcagatgagtcctatgtgtgatataacc

SEQ ID NO: 294498 - DNA, 590 bp, Homo sapiens
ctctttgcctctttcctgtgttggttcttcctcattttgatagagtacatccttcagtagtttcttctattcctcacagaatgaatgggaagtaaaatgttaagaactttaactttaaatgttaagaactgctctcatttctttcttatccagatctatcaaaaaaccaacttaggctctgttgtgtctagattgtatcattactttttattcatcactctttgggattaaagttctatctctcccttttatatttcaaatgacaataatagtatttatacatgattgttgtttctcctaaaaaagtcataaatacaaatcctaaaaaaggcgttctcaaaaatgagaaatctcccagacacttttgtgtctggagatatacttgagagagttgcccaagtgatgagcaatgatattcagaaaactgcatcgcacagacaagcaatatcgtagaaaagatagagggagtgttataagataataatamtccatgctttcagtgccacaaaattcaccccatctaatctcccacagtaagattcagttctggtaaccatgcgaggcagatgagtcctatgtgtgatataacc

SEQ ID NO: 294499 - DNA, 385 bp, Homo sapiens
gaaagctgcaaagacttaacggaaggagaaaagaccacagcagctgccaaagccatctgaaaccaacatgaaccaccatacagctgcctcttgttcaaactaaaaatcttagagatattaatacatgagtgataaaaacaggcaaatgagaaggaaaaaataaggactagatagtatactaagaactatcttccctaaatttggttagaagcccactatattaccatstcagggccatgaactttctatcttgtgaatctcaaagaaatgcaagtgtgttactgttgataacttactttagaatcattggcttcaaaatacctagagtgtctgcaaaaatacagacttctatattgtaccctttaagcaagtggaaccccaaaat

SEQ ID NO: 294500 - DNA, 579 bp, Homo sapiens
aatttattaatacttttttagaagtttagtaaatattcaatgtaaatgctttattgctttgagagacatgaaaaattatgttgcattaaatattgatattggtaaaatgtaactattcagctcgtcagaaactacaatgattttggttggataaagaatcaccttaattttgtaagcacaaggtcttttgaaaagatgtgaccaaagtaagtgtttataaatggccaagtaagagaaatatccagttcctatttatttattattccaaattaatattgtactatatagacgcttgcttcaagcagaaatagtccttcttcttttaacaaagaattagatggacatttaaattcatactgaaatatttaattcatcttctccattctaggagagtcagagcaccctaaactatgaatctatactcatgtgctagtaygtagcaatgatctctacataattcctagcatatagtttgttttctggataagctgttattcttgttttgacacccaactacagtaatgactttgtttaatggtgcactcaaatccaatacaaaagtatagggctcagccaggc

SEQ ID NO: 294501 - DNA, 517 bp, Homo sapiens
aaataaataaaagtgtaaaattttcacgagatgaaaaggtttgaggggcaggtccagtggctcatgcctgtaatcccagcactttgggaaaccaaggtgggagtctcacttaagccaasgagttcaagaccagcctgggcaacatggtgagaccttgtctctattaaaaataataataataaataaaaatgttgagaactgctgctttactgcaagtcttctgcaagtctttgatacactaaagcacattgcaaatctgaatttaaacctaagtctaatatataataaagctgtaggaggcagggaggttgacaacttttaagtcttgaaaacttgaaatatttctttttccttattcagaagttcctctttaaaaaatagaagaaagatatcacaccttatcaactaacaaagtaattaaaatgtagtatatttgctggaattagttgacagtaaagggaagatataatggaacacttgttgatacttagaagatgaagtgtctctggagagcagt

SEQ ID NO: 294502 - DNA, 549 bp, Homo sapiens
actgcaaattattcaggctggctgaagccttgaggaagaagtgggcagtggggagaggtaggctgctcatatgtgcaaagtccaatagcaaagggccccattagccatggtaaggaggctaaataccatcctgaggttaataggtgccatgagaggaatgtaaagacagagtggcacaatcttatctgtgttctaaattggttgttctggctgatttgtgatgggcaacttggaaaaggactgacattggggagcgaggaggaagggggaagaaaggaaatcaatatttatttaatacgtcttatgtaccaagcactagactctcacattgatagcagacatgaatcgcagtggtacagtcacttcattcttccaagtctgggctcacagtccctgttgaytgggcagtgggctatagaatccctcccacccaccaacctgaatatcactgatcagagtgggaatcactgacccaagaggagcctataagattctctctctctccaccctcataccctccctcaggaatttggagcaggggcagagatt

SEQ ID NO: 294503 - DNA, 491 bp, Homo sapiens
tttcatatggcacacagtatgttatccacggtggcaggccccatgtctgttctgttctctctgtgctgcttagtgttgcctggaggctcctggcaggtctgaytcatgggcttagggcccaggggctgcaaagagggcagcacttggaggaacagtgagtctgaagctccagaaaaatctgctttcactgaacataggcgggacccagtcctgggggaagtttaatcttaaagcttcatgggtcagaggagtggcacattcatggtgaaggctgtggctgaggttgcagagattgtatgctttttcagggttagtgttcttagacccaccccatcccagaaccagcaggaacttgagagattacccaggcttcaatctaatagtggaagagaatgaagagcagactggggactggcccagggtctcataccaggaagtgactgcctggtctcactcacccacaccagaccagggtgctcctctgcagcccc

SEQ ID NO: 294504 - DNA, 491 bp, Homo sapiens
tttcatatggcacacagtatgttatccacggtggcaggccccatgtctgttctgttctctctgtgctgcttagtgttgcctggaggctcctggcaggtctgattcatgggcttagggcccaggggctgcaaagagggcagcacttggaggaacagtgagtctgaagctccagaaaaatctgctttcactgaacataggcgggacccrgtcctgggggaagtttaatcttaaagcttcatgggtcagaggagtggcacattcatggtgaaggctgtggctgaggttgcagagattgtatgctttttcagggttagtgttcttagacccaccccatcccagaaccagcaggaacttgagagattacccaggcttcaatctaatagtggaagagaatgaagagcagactggggactggcccagggtctcataccaggaagtgactgcctggtctcactcacccacaccagaccagggtgctcctctgcagcccc

SEQ ID NO: 294505 - DNA, 491 bp, Homo sapiens
tttcatatggcacacagtatgttatccacggtggcaggccccatgtctgttctgttctctctgtgctgcttagtgttgcctggaggctcctggcaggtctgattcatgggcttagggcccaggggctgcaaagagggcagcacttggaggaacagtgagtctgaagctccagaaaaatctgctttcactgaacataggcgggacccagtcctgggggaagtttaatcttaaagcttcatgggtcagaggagtggcrcattcatggtgaaggctgtggctgaggttgcagagattgtatgctttttcagggttagtgttcttagacccaccccatcccagaaccagcaggaacttgagagattacccaggcttcaatctaatagtggaagagaatgaagagcagactggggactggcccagggtctcataccaggaagtgactgcctggtctcactcacccacaccagaccagggtgctcctctgcagcccc

SEQ ID NO: 294506 - DNA, 587 bp, Homo sapiens
tgtggcaggcattctgaggctgggtctgtccagtttggggatatcctccagggctgtcttttgctgctatgttgggaaccagagcacaagtaaatgcaggaatggtcaagagaaacaatcttctagttgtccggaatctccatcatctcacaacgtcacatcttcctttccccaatacacaccctcaccagagtgtttcctgacatgagatgtgtaaagaggggcaagatggaagaaaatcagcaaaccaagcagtcttaatattaatgtgaggaagcgctgtgaattttacaagtgagaacatcagtctccactaggaagatcacaaggagagaaaaagaagatagactgagcgrtgaacttaatacccagccaattcagagggtgagagaagccaggccctcaggatgctgacaggagaatctaataaaatggcaattgatgtaatcaagagtaactacagctttagatgtgagaatgaattttaaaaggctgagtactgattttccaacactagtacagtgttgaccaacagaagggacaccatcctagcctttccatttgcagcttcaagtgaatttcataaa

SEQ ID NO: 294507 - DNA, 561 bp, Homo sapiens
ctggctaacacggtgaaaccctgactctactaaaaagctaccacgcctggcatatatattttaatgaaatcagaaattttgaagcagccttggcatttcctttaaatttgtctggaaatgactgttrtattagcttcatgggaaggacttaccagcttctaggtctaaggctaacgtgatgatcatttgtctaaggctagaaaggtactaatgagatgtaaactataaggagagaaaaagaagatgagggcttttcctggaggctgatagctaaaactcaaaggattctagaaaatgacacagtagcagcctttcttgtctttttctttccgtgtcgattctggtgaagaaggaagttactgctcttgaaatttccttataacttggacaagttaatggaaagcttaatctacattcattctaatctttgctaatgccttctgggtatgctgccttaagttgccgtactaactgtgtccttcctgtgtttcttgtctttaatgatccagatctgctttattgccaaataaaatcattggaaactcatcataatcctttact

SEQ ID NO: 294508 - DNA, 1099 bp, Homo sapiens
aaaacctactccacccctgggccaaacccacctgaaagccagagggcaaaggagtyggttggtgtcactgtgggccaacttcccagggcacagagcagaacagaggaggcggagagtgggtctgggttgcaaataatagatcccaggactacaccagatactgcctcaggtgttggatttatcatgagaaataacatggacatggtctctgcccttgagcagtttattgtttagtgagaaaaagaagctggcaaacaggcattacaatgcaatctgctgagtgctgtgctatgggagcactgggtgacacaagaggtgacttcaagggctgcctagcagaagatgcatttctgcatgacaggaattaaatgaatgagtcattgaaacatgccctgaggtcccaagtggaaggggagagagaggcaaatggagtgcagtgaaattttcaaaagagttgggaataaaagacattaacaagtgtattgtaaagttgtgctatcacaatggtcaacttatgttagawtctttcagtttcagcatctcagctcatacaatgaccatatgtaaagactgaatttgtcagtgctacctgacaataatcttacagaaattwaaaatcacataaatttcagagtcaaaaaagaaaaccataaagatcatataatccaaaccccttatttcacaaatgaaaaggaggcccagagagactcgtctggactatagagttcagacaggcaaagtaattgtccatagttacacagctagtaaatgttagaactagaactcaaataatctaacatccagtccaacactcttagatatcacataatttcaaacataattctgaggtgtagtaaaattacgaatagcaacttataaactacagaaatctcagccaatttctcaagtatacaaatagattagtacaaagatgatctttctgtaacattagtaaggcagcaggaaaaataaggtaagataatgtacaattttttagcctgaacattttttaactttacacctaaggtagtgttataaaagcactgaataggtgaagatagaaggcttaggaaaaaaataatactaactatcagaaaat

SEQ ID NO: 294509 - DNA, 576 bp, Homo sapiens
tctttcagtttcagcatctcagctcatacaatgaccatatgtaaagactgaatttgtcagtgctacctgacaataatcttacagaaatttaaaatcacataaatttcagagtcaaaaaagaaaaccataaagatcatataatccaaaccccttatttcacaaatgaaaaggaggcccagagagactcgtctggactatagagttcagacaggcaaagtaattgtccatagttacacagctagtaaatgttagaactagaactcaaataatctaacatccagtccaacactcttagatatcacataatttcaaacataattctgaggtgtagtaaaattacgaatagcaacttataaactacagaaatctcagccaatttctcaagtatacaaatagattagtacaargatgatctttctgtaacattagtaaggcagcaggaaaaataaggtaagataatgtacaattttttagcctgaacattttttaactttacacctaaggtagtgttataaaagcactgaataggtgaagatagaaggcttaggaaaaaaataatactaactatcagaaaat

SEQ ID NO: 294510 - DNA, 576 bp, Homo sapiens
tctttcagtttcagcatctcagctcatacaatgaccatatgtaaagactgaatttgtcagtgctacctgacaataatcttacagaaatttaaaatcacataaatttcagagtcaaaaaagaaaaccataaagatcatataatccaaaccccttatttcacaaatgaaaaggaggcccagagagactcgtctggactatagagttcagacaggcaaagtaattgtccatagttacacagctagtaaatgttagaactagaactcaaataatctaacatccagtccaacactcttagatatcacataatttcaaacataattctgaggtgtagtaaaattacgaatagcaacttataaactacagaaatctcagccaatttctcaagtatacaaatagattagtacaaagatgatctttctgtaacattagtaaggcagcaggaaaaataaggtaagataatgtacaattttttagcctgaacattttttaactttacacctaaggtagtgttataaaagcactgaayaggtgaagatagaaggcttaggaaaaaaataatactaactatcagaaaat

SEQ ID NO: 294511 - DNA, 585 bp, Homo sapiens
ggctttggaaccaagcagtgggctttgaggcgtgtaaatgaaaacctcaagaaagaagcctcatagtctttggtaaggatgcaggtgaggacatggaggaaagtgaggtaatgttatcagaaagcagaagaagaggaatcctggttaagaagaggcggaaggcttagcaacaccattccttgcagtaatgtggactgtaaaaaatcaatggggtgatgtaactaagatttccaaccagtgttcacagtgccacctgggtttttcttgtgcttatgtgaaaaaaagagataagctaaaggaarggctgttaaacaaaaatgagccaggatgttggggatttaaaaaattctcatcttctccagatgtgaaacaatgctaaaattaagaaataacttctgagcaaagaccaaatccaaggcactgccaggaaaacatggtccaaagataaaatcaaggatatgaccataaaatcttaagacccagaaagatcaaaggcactaatcattccaacaaagggtgctattaaaaattataaagaatgcacctcataaatccaattaatcacacaatagggcttaattaaga

SEQ ID NO: 294512 - DNA, 540 bp, Homo sapiens
gaaacaaatacaatttataataatgaaaagagtccagggactgttaatgaggcttctggtctaagctaagagacgagaagttgcaaccggcagagctgctctctgctgcttttcacaaagaccagaactcrgatgtcagtgggctgagccccaggccagagtcgttagctggtcacactttcttagacatgtgatttcagtaactgagacctgtctaaatgatttctagggttcacggcactttttaccttccaggaagctcaggttttctatgttctggtttcaactctgagggagtaaatgaacccaaatagaactccacatacaatggataaacatacaacacacaggggcagcagcagcagccactacccaggccaccaccaccctgtgaggcaggtcctctcatacccacagtgctcctgagggagtggaggacatgaagctgacaggccggcagaaccgggacttaaacacggcccacaaaacgtggctgccgatctccagtttccaggcagaccaggctccagccagaatgcg

SEQ ID NO: 294513 - DNA, 579 bp, Homo sapiens
acttttgtatttctgtaatccaaactagctgtttaactttattctgtgatattttgtctgtttgtagtagttgaggatagtagcttgtaaaagtccatgatgccttaktatgtgtagggcatatggtttttttcccataatacttgttattgaatcaaagactgaaacaactatccactaatatcttatattgtcagatataccattaccatttttcactctttatcatttttagatttacgtaatttagattatgtttagaatgttaaaaaaatcaaagagtctataatcactgtagttattagtatcttgctctattacatttgtcgatctttaccttaaaagttttagacttgctactgaaagccattaaattcagactttcataattaggaacagaagtaggacttttcattgtctggtcacgcagactttctgagtttgctatgactgagggtctttggttatggaggttagtgaaatgaggttaaagtttcttcttcctgtcttaatggattttgaacatgtttaggtacttggtaaatatttgatgattgagacttctcaggctgtgttttc

SEQ ID NO: 294514 - DNA, 503 bp, Homo sapiens
cctttatttttattatggtaaaatatacctaaaatttaccattttgattttctttaagacaagagtcttgctttgtcacccaggctrgagtacagtggcatgatcatagctcactgtaacctcaaaaatatcaaacttctggacataagcagttttccctgtctcagacccctgagtatctcgaactatagacatatgtcaccacagccagctaaattttttttttttttttgtagagacagggtcttgctatgttgcctaggctggtctcaaactcctgaccaaaagtaatcctcctgcctaagcctcccaaagtgctggaattacaagtgcgaaccactgggtcagcctttttgttgtgtctttttctggttttgttatcagggtaatattggcctcttagaatgaatctgaaagcattccctcctctttgattttttggaatagtttgaataggactggtattagattgtctttaaatgtttggtagaattcagcagtga

SEQ ID NO: 294515 - DNA, 503 bp, Homo sapiens
cctttatttttattatggtaaaatatacctaaaatttaccattttgattttctttaagacaagagtcttgctttgtcacccaggctagagtacrgtggcatgatcatagctcactgtaacctcaaaaatatcaaacttctggacataagcagttttccctgtctcagacccctgagtatctcgaactatagacatatgtcaccacagccagctaaattttttttttttttttgtagagacagggtcttgctatgttgcctaggctggtctcaaactcctgaccaaaagtaatcctcctgcctaagcctcccaaagtgctggaattacaagtgcgaaccactgggtcagcctttttgttgtgtctttttctggttttgttatcagggtaatattggcctcttagaatgaatctgaaagcattccctcctctttgattttttggaatagtttgaataggactggtattagattgtctttaaatgtttggtagaattcagcagtga

SEQ ID NO: 294516 - DNA, 503 bp, Homo sapiens
cctttatttttattatggtaaaatatacctaaaatttaccattttgattttctttaagacaagagtcttgctttgtcacccaggctagagtacagtggcatgatcatagctcactgtaacctcaaaaatrtcaaacttctggacataagcagttttccctgtctcagacccctgagtatctcgaactatagacatatgtcaccacagccagctaaattttttttttttttttgtagagacagggtcttgctatgttgcctaggctggtctcaaactcctgaccaaaagtaatcctcctgcctaagcctcccaaagtgctggaattacaagtgcgaaccactgggtcagcctttttgttgtgtctttttctggttttgttatcagggtaatattggcctcttagaatgaatctgaaagcattccctcctctttgattttttggaatagtttgaataggactggtattagattgtctttaaatgtttggtagaattcagcagtga

SEQ ID NO: 294517 - DNA, 503 bp, Homo sapiens
cctttatttttattatggtaaaatatacctaaaatttaccattttgattttctttaagacaagagtcttgctttgtcacccaggctagagtacagtggcatgatcatagctcactgtaacctcaaaaatatcaaacttctggacataagcagttttccctgtstcagacccctgagtatctcgaactatagacatatgtcaccacagccagctaaattttttttttttttttgtagagacagggtcttgctatgttgcctaggctggtctcaaactcctgaccaaaagtaatcctcctgcctaagcctcccaaagtgctggaattacaagtgcgaaccactgggtcagcctttttgttgtgtctttttctggttttgttatcagggtaatattggcctcttagaatgaatctgaaagcattccctcctctttgattttttggaatagtttgaataggactggtattagattgtctttaaatgtttggtagaattcagcagtga

SEQ ID NO: 294518 - DNA, 550 bp, Homo sapiens
tgtgtttgtggttatatatttgtgtgtctgtgtttgtgtgtttatttcactaacctctccttttcatagaatagaaattccagaaaaaaaaaacctggtgagattgcagttagtttgtgtttcacacacaacttcacattgtagctcatggatattgaacactcagaatctgccactaattttttcacactaccttaattcgcttacaattttcttcaggggaccaaattttaacaatccctttggtgcctgaacataacggaacctcaatttgagaacaagttatcatactttcccacagatttttagagccacagaaagaatatgtggttgggcaccagttttggatttcrcatgttctctggcagtcttgaggccgcttgtctgacagcatgcaaatgacttccatgagaacctaaagccacatgatgccacatggattttatctatgaaccaggaaagttatgttactgaatgagaaggaaaaaaactaactaagtagtatcagcagaacatttctgtcgagaaaacataaaatgctgtaatagaa

SEQ ID NO: 294519 - DNA, 1018 bp, Homo sapiens
ctgtgaggcaagattatgcagtatttcccttcattccacttctgatgaaaaaaagttcaagatatcacaagatatctagtatgatttttggcatgtataattgttacaaaaattattttccctcactttgaacttatagtttttgaataccactaatttgtataggtttaccctctgcaaaattgtaatgttctatctttattttttttttctcaacccagttgtcctttaagattttaaatcacytatcaacattcccttaagctttttattcaggccaaattttctcagtaacttcaatagtttccctgtggagaaagcaccaaaacctttagtaatataaatggtgtatagttaatcctgaaaatataatacctatttgtcttcatttatgttttgttgtgtccaatgcaacccgaaattataattctttaaagatttaaaaaaacatacgggtgtctatcaccatagatcaggttacgctgcagtgtaaccaccctctgccaaatctcagtcacttawaaaaaaaaaaaactcttcccgctgacttatattgtttttgttcctaagtcttgattagagatattgagtttgagtcataccactgatatttcaacttgcattaaaaatgaagatctttattttaatttttaagctagaaatcagtgccttgggttatagggaattgctcttagactagttatgtttacaacaaaatgaaatcatacatcttcataggaatcatttaaaaggttagactacatttagtataacctgtttagagattcaaggaaagtctaataagtgwttaaaatctttgtttccaaaatttctattcttttgggcctgaattcccaaaggataaatccttagttaccccaaatcttgagcataccgcatggatatttcccagaactgtttccactagttgcattgtcttaagagatgaattactgtaaagtctgctctccgctgtaaaaataaagctgcttttagaacaggttttctaaaggagaaa

SEQ ID NO: 294520 - DNA, 496 bp, Homo sapiens
aaaaaaaaaaaactcttcccgctgacttatattgtttttgttcctaagtcttgattagagatattgagtttgagtcataccactgatatttcaacttgcattaaaaatgaagatctttattttaatttttaagctagaaatcagtgccttgggttatagggaattgctcttagactagttatgtttacaacaaaatgaaatcatacatcttcataggaatcatttaaaaggttagactacatttagtataacctgtttagagattcaaggaaagtctaataagtgattraaatctttgtttccaaaatttctattcttttgggcctgaattcccaaaggataaatccttagttaccccaaatcttgagcataccgcatggatatttcccagaactgtttccactagttgcattgtcttaagagatgaattactgtaaagtctgctctccgctgtaaaaataaagctgcttttagaacaggttttctaaaggagaaa

SEQ ID NO: 294521 - DNA, 584 bp, Homo sapiens
ctaggcacattaaatgctgggccagttattcaagaactatttattggattactctgtgccaggttctctactatgctctaattatcagacacattccttgtcttcatgaaaatcataatctatgaggtggcatggtgaaacaagtaggcaaataaacaactacaacttatcatagttctctgaagaaaacattttgctttcaagaatgaaaaagagccacttaggcttgacagtacgtaatctccatccttacctttattattttcaaaccatttggtatgactccagttcagaaattcccaaccacttggggaaaataatgtccttgtagatcctctataacggtgactagaaatgtgtttctcaaacaatctttctgagtaagaattagatcagaaactggggagagagagtrtatgagactctcaaggtagagaattggaagttcagcagagagtgtcactaggttaatagagagtgggtggagggagataggggacataactattattactgtaaagtactctctaccccagaatatatcacacttagtaaataagtagttgcatatttcatggtaataa

SEQ ID NO: 294522 - DNA, 591 bp, Homo sapiens
tcattgttggcagaatccatttacttataactgtagaactcatggaagcttgcttcctcaaggccagcaggagagtgtcttgctgttttgaatctccttttctagggagggtatgaatgaacctttattttttttttttaagagctcacttgataggttaatcttacccaggataaatctcttttgagkaactcaaaatcaattgactagggatcataattgtacctgcaaattcccttcgcctttgcctcataatataacctaatcacaagggtgaaatcccatcgcagccaaagttctcacccacattcaaggttatacagggcatggataccagggtgttggaatcttggggagcattaaaaaaattcttatttttgtaatttctctttaatgagaaaatatatctcttattttgttaaaccactatacatataatttcttatagacgaagaataatcattaagtaatagtctttgtgttaatgtatttttccatctcaaaaataagcataattaagcatacctatcacaggagtttaagaagtgtatactgtaacctttaaagaatggttctatggactaaattatg

SEQ ID NO: 294523 - DNA, 591 bp, Homo sapiens
tcattgttggcagaatccatttacttataactgtagaactcatggaagcttgcttcctcaaggccagcaggagagtgtcttgctgttttgaatctccttttctagggagggtatgaatgaacctttattttttttttttaagagctcacttgataggttaatcttacccaggataaatctcttttgagtaactcaaaatcaattgactagggatcataattgtacctgcaaattcccttcgcctttgcctcataatataacctaatcacaagggtgaaatcccatcgcagccaaagttctcacccacattcaaggttatacagggcatggataccagggtgttggaatcttggggagcattaaaaaaattcttatttttgtaatttctctttaatgagaaaatatatctcttattttgttaaaccactatacatataatttcttatagaygaagaataatcattaagtaatagtctttgtgttaatgtatttttccatctcaaaaataagcataattaagcatacctatcacaggagtttaagaagtgtatactgtaacctttaaagaatggttctatggactaaattatg

SEQ ID NO: 294524 - DNA, 367 bp, Homo sapiens
tgtaactgtgcaggaggatttatatattgaaatacatatcttttttgttacaaattaccatccctcatttgaattctcattactgttgtgagcactattttgtttttttcttttttgttttgttttgttttaattatctgtgtcaatagattatattatcaatgagtctaaattgaaaacattaaggaaagtgttacaatttttctttaatttaaattgttgagtggctagggtttaaaactatttacccaatgttgaatctaatgtatcatgacattagatgccgtcaacatgtrgtcctcatttacctccttcaccccttcatatgaacaccctgaatgtctgctcagatgcagattgttttttc

SEQ ID NO: 294525 - DNA, 509 bp, Homo sapiens
gatattagatagattgctgttttatatgggacactcaggggtaataaataaaagctgaaactcagcaaacacactacaaatacatatgcccttasatattctacttttgttttcatttgcctagtcatttacctcctgagatatgccagaaatcttcatacttttgtctatttaattgtgggtaatataaaatctctatatataacatgaatttttactgcaaaatttagtattctaacattttgtcaaagagatacacatttatttggagctggtcctaacaatgggagaagaaatatggatagaaattgatttacagaaagaaagagttttgtaatcaacatacatactggaagaatgtttttcatataaagttacaggagcctatacaaaggttctccctactcttccaaaatggcaaagagcatttctagatacatagaaagaggagactgaacagatcttagattgaggagaattaccctcaaacctttcttgtggtgtgaaga

SEQ ID NO: 294526 - DNA, 641 bp, Homo sapiens
ttagagcagcttgtatataaaggtagaatcaaaaataattttgctgaaatcatgggaccataaacagaattaggtaacaggtcaatgtagtcacagtgagattgggataacattatcagtttgaactcagcatttagaatttgaagtgtcactggggaaattatttactaacacttagcagttttaattgcatgttaaaatttgtgaggtactttgctttactggagagcttcatttgcaacattcagcatgaaactttaaggctgcaacttgcccaaggcttaccacactggaatcttctccaaaatattaagtgacttcactttaggcttctattagtttatttgacttcctttcctgggcctactgtgttttcttttgcttaggtccttggagaactaaggggatttttttcctataaatctcaggttcctctcagaaggaagaaatcaaaactttctcacagattctaccacaggtcactgaactctggaactaacgtcctctcttcaatgatgtgggaatgtygtgtcaatctttatgaacaattcctggcttctctctatttctcttttcttccctttccgaggccacagatcttcaagggtgcagtgcagaggagaattcttctttctttacaa

SEQ ID NO: 294527 - DNA, 589 bp, Homo sapiens
gaacctagttgaatgctttgtaaagttttgatgttagtgagttgctaaaagctttgttgtcaaattgatgggggtgggaaaaacctaaaaagcagagagaaaaattatgaaaaccaaaagagttttgtatttaaattgccttgcaagtttttctttktcgtaatgctatctctactttagagaaactgaaaagataattaaatattataatataacaatggtctatgcaagcacagtgactcagaactcctaagtgatgtaaagaaactccaagaaaggcatgtctctggaaccatagactagtgactggatgctatttctgtcagatattaaataattttcttataattccatctttttatgactttcatgacttagctaaacaaaaactccccccaatttcatcagaggagagagtttttaatatacatataaatcatttaggataggctagttctcctctgtctttggttattttaagcttacagaaaatttgcaagataagaacgataaactgccctatatttttcacccagattcaccattgttgatatcttgacactgttgctttcccagttgtttactgtat

SEQ ID NO: 294528 - DNA, 589 bp, Homo sapiens
gaacctagttgaatgctttgtaaagttttgatgttagtgagttgctaaaagctttgttgtcaaattgatgggggtgggaaaaacctaaaaagcagagagaaaaattatgaaaaccaaaagagttttgtatttaaattgccttgcaagtttttctttttcgtaatgctatctctactttagagaaactgaaaagataattaaatattataatataacaatggtctatgcaagcacagtgactcagaactcctaagtgatgtaaagaaactccaagaaaggcatgtctctggaaccatagactagtgactggatgctatttctgtcagatattaaataattttcttataattccatctttttaygactttcatgacttagctaaacaaaaactccccccaatttcatcagaggagagagtttttaatatacatataaatcatttaggataggctagttctcctctgtctttggttattttaagcttacagaaaatttgcaagataagaacgataaactgccctatatttttcacccagattcaccattgttgatatcttgacactgttgctttcccagttgtttactgtat

SEQ ID NO: 294529 - DNA, 574 bp, Homo sapiens
cttatttggataaacaggttgagtatcccttttccaaaatgcttggaaccagaagtgtttcagattaatttttttttgtattttgaaatatttgtatacatattatcactgtcttagaatgggactcaagcctaaacatgaaaattatttgtttcatatacactttatgcacatagcttgaagataattttattcaatattttcaataatttgtgcatgaagcaaagcttgtatacattgaaccaaaagaaagcaatgggttcactatctcagccacccatrtggacaatctggttatttggtatcaccataatgctgagcaaattactggaagttggggaccagtcaggacattattgcaatcatcctgctaagatgtagggtagatgagtacatgatagtgactcattgagacaatgtgaatttacaattaacagtgatagaaacaaaaggaataaaaaataccatggatcaaagaccaaaatctctataaacaggtgcattcattcactgctagtggaaatataaattagccaaatctccagatagggaatttgggaatgcatgccagaaa

SEQ ID NO: 294530 - DNA, 577 bp, Homo sapiens
tacaatagtggaattagaaagttcctaatataaataaatgataaatacttgaagtgatgaatatcctaattaccttgatttgatcttcatatgcttgtatcaaaatttcacrtgcaccccagatatatgtacaaccattatgtatccataataattaaaaataaaaaaaagaaatggctaatgacaaaattttagaaaatttaagatgaaatggctgacagattttttttttttttttgagatggcatctctgtcacccaggctgcagtgcaactgtgcaatctcggcccactgcaacctctgcctcccaggttcaagcgatttttccacctcagcctctcgagtcactgggattacaggcacccaccatcatgcctggctaatttttgtattttcagtagagacggggcttcaccatgttagccaggctggccctgagctcctgacctcaggtgatcagcccgccttggcctcccagagtgctggaatttcaggagtcagccaccatgcctgaccagaattttttaatattaaaaaataataactggcttccaggaagtctagtgcttatttttaa

SEQ ID NO: 294531 - DNA, 577 bp, Homo sapiens
tacaatagtggaattagaaagttcctaatataaataaatgataaatacttgaagtgatgaatatcctaattaccttgatttgatcttcatatgcttgtatcaaaatttcacatgcaccccagatatatgtacaaccattatgtatccataataattaaaaataaaaaaaagaaatggctaatgacaaaattttagaaaatttaagatgaaatggctgacagattttttttttttttttgagatggcatctctgtcacccaggctgcagtgcaactgtgcaatctcggcccactgcaacctctgcctcccaggttcaagygatttttccacctcagcctctcgagtcactgggattacaggcacccaccatcatgcctggctaatttttgtattttcagtagagacggggcttcaccatgttagccaggctggccctgagctcctgacctcaggtgatcagcccgccttggcctcccagagtgctggaatttcaggagtcagccaccatgcctgaccagaattttttaatattaaaaaataataactggcttccaggaagtctagtgcttatttttaa

SEQ ID NO: 294532 - DNA, 597 bp, Homo sapiens
cttttcttttacagagcttaactctcttctccctgcttattctcagtcctattatatacaattgcctttatcagttatttgaaatcttttatagattgatggtctatatagtttaaaaacatatagtgtataattaactaatgattctattggtcattattcaggacaargcaactgagagatcactttaattaatttctacaattgaataaaaatcctatagctatcacttctgagcatctcacttttccaggaaatcttcgaatgacacattttttctatgattattttgccaatttgaagttttgatcttttaaaatgatcaagatttgatcgttttttaaagaataaaaagtatttttatttattatgagaagtcattgcatgtctttatggttcaggtaaatctttattgaccaaggttttttaatttcacaggtcggaaaattcttcgcaaatcctagctaaccaaaatgcagataaaaaataaagtttatttctaaaactgaatctatctgtgtgacacagttgaaaatggtccactctctccatttcttctagttcaacccctttttgccctgtgtgttattgcctcca

SEQ ID NO: 294533 - DNA, 537 bp, Homo sapiens
tatagatttattttgtttaaaaaaattaattgacataataattgcacatattcatggggcatatgtggtatgttgatacatgtatacaaagtgtcattatcaaattatcaaactgcaaagtgtaattatcatcatcctcaaatatctatcatttctttgtgttggtaacattaaaaaycctctcttctaactattttgaactatacaatacattattaagtatagtcatcctgctgtgctatagaaccctagaacttattcttcctatctaaatgcaatattttacccattaaccaagctcttcctattcttccctccctgctacccttcctagactctgataaccactattctactctctccttctttgagatattttttttttagctcccacatatgaatgagaacatgttgtatttgtctttctgtgcctggctcatttcacttagcatacaaaaaatcctaaaaatagaattaccatatgatccagtaattccggatatatatccaaaggaaagaaaatcagtacatcaaaga

SEQ ID NO: 294534 - DNA, 568 bp, Homo sapiens
tatttgttttttaacagagctctttcttgagacatagtgaaatgcacagatcttaagtgtacaattgtataattggatgagtttgaatagacgaatacacttatctaactgaattcccaatcaagatataatttgcatctccatagaaaatgttttggagattcattcatgttctcaggtctatcaatgttcattttctttttaatgctaagtattaatattatatcatcttgtgagtatgccataacatacctagaytgcataagtctattgatgaatcattgtgtcatttcaaatttggggctatatgaataaatctccaataaatattctacttatttatttttattttatttcttatttcatttttatttatttaggggttttatttatttacttttatttgtaaggtttttattttttatttattcatcatttattattaatttatttcaaggcaggatctcactctgtcacccaggctggaatacagtggtacaatcatagctcactgcagcctcctgagctcaagcaatcctctcacctcagcctcccaagtagggaggac

SEQ ID NO: 294535 - DNA, 552 bp, Homo sapiens
tcattagttaatctttacacaaagaaaacatcagatctaggcaattttataaatgagttctacaaacttttaaaggtatagatgattttggtcgtaaaaaaattcctaggcagtagaaaactacagaatagattttttttgcaatactaaagtaacttcatatcaaaattagatagayggagtaaaataaaaataacaggcccgtctactcatgaacatagagggaaaaacacttaagcaaaatagtagcaaactgaatttagataacataccaaatattaaattcttgtattctagtttcaagtttggcttgacattagaaagtatattaataaatttgctacattaacagattaaggaatgaaaaaatttcagatgttcttaatagaagttcatcatttgataagaataaaaattcattgttgatgaaaaaacattacaagttaaggataatagacagcacatactaacaatctagagcaaatgttatacttaatagaaaaatgtcagatacgcttttttttaatcaagaataaggaggatattcaatat

SEQ ID NO: 294536 - DNA, 567 bp, Homo sapiens
gtgtcgttgcaaaatactgttctctaggttagtggtgtggtttggtataaaagaagtaatagaaatgttcayaacagagacccaggatataaaagtccctttgtgtttttcattacaaggtcattacttgccattctttacaaaataaacatgaagaattgtttccaggttctaaagttcaagagtttttggacaaacttagtaaaatggtaagtgaaatacttaaagaactgtaactgaaaagcaaaaatttaaagatgtatattttcatagcaatagagataggattattatttctaaaagcttaaagtgtgtctaaacatttccattcaaaaaggttacagtaaatttctgcaactttacaatttatataaccaagaggtggcagtgttccatctagtttcctttggaaactcattctccagaggtaaaattttcagatgtattctaattaacttttaaaacaattgacttttattaaattaataaatactactatcacatgtacttaaaataattataattgagtagcattttttgagtataagaacattaaagcattactgt

SEQ ID NO: 294537 - DNA, 573 bp, Homo sapiens
catgctagcctgttcttgggcttacaattgcagaggcaagcacccattgaaatctgtatatttagatttatagactaagctgagaatatttgaactgctctagatttccatggaaataactttgggcatctagagagctcttgaaaagcttgactagttgtgagtgttgacacttgtctgactctgtgtaagggatgttattagattgatctttttctaatgtgcctttatcactgatttaagaagcatgcttaaaatatatatgtagtatgtagtatatttacatatgtggagtttctggattattgtagaaattgtagacaattttgcttaactttatttccctagaagtggttggaggaaaacacaaatcttagaagrctttttagaagacacagtattaagtgagattgcatattggattagagcctactattaaaagaaaatatctcatgccagaatataaaattattggatggtaagaagttaattccttagagtcaaagataattattcattataagtgagaactgacaggatataatttccacagctacttaggttattttcttg

SEQ ID NO: 294538 - DNA, 480 bp, Homo sapiens
tttgttttgcttactaccgtacactcttccttacctcaatccctagcacacagcaggtattcatatacatgtataataaataaatataggaatatatgttggttttcttgttttttttcagatttttttttattgtttcataaggaaggctaaatccagactctgccattccagtgaattcaaaagcagaacccctcaaccatctactgtggcacagccctgctcatgccayaaaatagtattaatattagttctaatagtatatatatattttttacttccttcttcaaaggaaattcaaataaatagtgataactagacagaatcctaatgtcacacatttattttcagtttcacactacctgtgttggtacttaaaaacatatgctagtgtaatagaatctctataattctttaatgaatatattactcttgaggaagaaaaaaaggtaattcaaaaaatacataaccatgcaaaaa

SEQ ID NO: 294539 - DNA, 598 bp, Homo sapiens
atgttggatattaaagtaattttaaagtgtcagtacaatgttgctatcacccagagatctgcatggtaaataagaaacatcttaaggtagtaggagacactcaccttaacagtaagggaagtgttacatattcacacaatccatggaaatcccgtcrccttgtggttatgtcactacatcaaagcatccagatcattttttttttcaagagttgctccatagacccattgtaggttccaggtgaatatgctgcagagagatttagttccttcagatgtcaagtaatttgtatggtaaaatcatatctcagaataattcagaataaagttccatgtttatttttcattgtctcagcacaactgattagttatgaaactgaaatttctcggcaaaaaatttaaatctcattataaatgtccattgaagtaagtatgacagctctgtttcttattatgcacatgtgccatgtaaagatattagccataaaatttgctgaatgtcctttaggggacttcaaattttagtatgtttcaaataacttaaagaacagcatttgtttatggtttttcatgtgtatagacaataataaatataactg

SEQ ID NO: 294540 - DNA, 623 bp, Homo sapiens
gataggaggaggtgtgttctaaaagaatgaactgagtccagaaagaatggcatgtctttattatgggagcatcataaagggaaggggaagggttctttggagagaggataacgaaagcactgaaacaaggtcaactttcccaagaaataattagattgaaaacataacaaaacaaaacaatattcagaaaaacacactccggctgtgttaatgagggcttagaaattgaaatcctgggatgaaatctgttatctttcgattacaagttttgggctctttgacaagttataaaactagtggacttaagtagggtcacggggattaaatgaaatatgtaccacacaaatgatacttaaataagttaccatggcttcagccaagggggaatgcagcaggagttgctgagtggaaagagatgactagattttgacccattcatgcaatttttcattcaattaatatttattaaaagatttctctggattatgtattgtgatgtgttagatgctayatactttttggtgatcaaattccttattctgttcttcacttttttgtgtactgctgaaagacattgtttaaactaacaatgaactagcctctaagtgcagaacagtaggatg

SEQ ID NO: 294541 - DNA, 555 bp, Homo sapiens
agtgatagatttgattcgccaggcatatatttaaagaagattgagcaattttgtgggcaagaagtcatcttaagaaaaagatgagctgcagtgatatttttttaagtctataactcagagttacttctggcacagcttcaatagatgcatgtttaactcctagaaagaaagggaatcaaagaaaatctaatacatcccttttacccaaagtctctaaaatactgggaagacaaggtagcactactttggaacttagttaacagactggcagaagtggtgaacaaagattctctctatatgagaagaatggcttctgagcagttccacattgggtcaggatggcagcaacagaatgatctccgaaattatcttctgtattagtcatcagcattgacttcaaagagtagtaccagctcaaagctgagcggagcagcaatctgacaacactgggagttttaatgtgcatcaataactataccaaagcaaagcaagagacaatgccagtratgggataaagtggctccaattgcaagagaaaaattcccttgtatgata

SEQ ID NO: 294542 - DNA, 601 bp, Homo sapiens
gttaaaatcaattagaagcccttatacgttatgtccatttaaaaaaattcataaactgtattagagaagtttttggcttacagcaaaattgagcagaaagctctgatttccccaccacacacacacaacttccctcactatcaacttctcccatcagagtggcacctttgctataattgtttaacctacataacctgcataatctaccactcaaagtccataattcacattaggattcactcttggtgttgtgcattctatgagttttaacaaaggtatagtaatttgtatttgtcattggtagtattgcattaaatagtttcactgatataaaaacmttctttgctctgttaatcccatttacttccctaatccctggaaaccactgatcttttcgcagacaacatacctttaccttttccaggatgttataaagttggaaccatacagtatgtagccttttcagattggcttcttttacttagtaatatacatttaagttttcttcgtgtcatttcatagctcgatatcataattcatttctttttagcactgaatatttcattggatatagcacagtttatttgttgattcaccttct

SEQ ID NO: 294543 - DNA, 601 bp, Homo sapiens
gttaaaatcaattagaagcccttatacgttatgtccatttaaaaaaattcataaactgtattagagaagtttttggcttacagcaaaattgagcagaaagctctgatttccccaccacacacacacaacttccctcactatcaacttctcccatcagagtggcacctttgctataattgtttaacctacataacctgcataatctaccactcaaagtccataattcacattaggattcactcttggtgttgtgcattctatgagttttaacaaaggtatagtaatttgtatttgtcattggtagtattgcattaaatagtttcactgatataaaaaccttctttgctctgttaatcccatttacttccctaatccctggaaaccactgatcttttcgcagacaacatacctttaccttttycaggatgttataaagttggaaccatacagtatgtagccttttcagattggcttcttttacttagtaatatacatttaagttttcttcgtgtcatttcatagctcgatatcataattcatttctttttagcactgaatatttcattggatatagcacagtttatttgttgattcaccttct

SEQ ID NO: 294544 - DNA, 601 bp, Homo sapiens
gttaaaatcaattagaagcccttatacgttatgtccatttaaaaaaattcataaactgtattagagaagtttttggcttacagcaaaattgagcagaaagctctgatttccccaccacacacacacaacttccctcactatcaacttctcccatcagagtggcacctttgctataattgtttaacctacataacctgcataatctaccactcaaagtccataattcacattaggattcactcttggtgttgtgcattctatgagttttaacaaaggtatagtaatttgtatttgtcattggtagtattgcattaaatagtttcactgatataaaaaccttctttgctctgttaatcccatttacttccctaatccctggaaaccactgatcttttcgcagacaacatacctttaccttttccaggatgttataaagtkggaaccatacagtatgtagccttttcagattggcttcttttacttagtaatatacatttaagttttcttcgtgtcatttcatagctcgatatcataattcatttctttttagcactgaatatttcattggatatagcacagtttatttgttgattcaccttct

SEQ ID NO: 294545 - DNA, 632 bp, Homo sapiens
ctttttagcactgaatatttcattggatatagcacagtttatttgttgattcaccttctgaagaatatgttgtttgattccaggtcttggaaatcataagtgaaaatgctataaatattcacctgcaagtcttggtgtgaacatacgttttgaactcatttgggtaaatgacaaagagtgcaatagctgaattgcatggtaagactgtgtttagttttctaagaaactgccacattgtcttccaaagtgaaaatatactgttttgcattcccatcagcagtgaatgagaatttctgttgctctacatctttgccagcgtttggtgctttctgtgttttgaattttgattattctaatggatgtgttttggtatctcattgttgtttaaatatgcatttccttgatggcatatgataagcgtctttccatatgcttacatgcaatttgcattgttttcagtaagatgtcacttcaggattttgcgccccccrccccccatacataattaggtttttcattttcttatttttgagttttacaaattatgtgtacattttgtaaaatagcctttattatatttattaaacaatagtccttaacattagaaaataatctgcaaattttttctacca

SEQ ID NO: 294546 - DNA, 1161 bp, Homo sapiens
aaaggatttgtgagactagtcttgagctgtagataatctggtgtactttgtggtataaatttgtctttctgtgtctttttgtaatggaaagtggtacaacaggataaaatgtgggmttaggacccctataagcctgttgttcaagctagttcggcagatttgtcagttacaaactttgctgtgggtccctgaaattaatactagatgaggtttccctttcatcttgtttaatgctcttgtgagtttgaccttgcaacagtctggtggtactttctcttggtccctgccatccagaggacagaaatgttgtggttcatatcatagttagctctaaaaaatatcttgagcagataaaaactgttgcaagctcgaaactggctgttctaggttcattctgggaatcataatgaaacctgaccaatgctgtagctcaaaagctaaggctttgtcttttcacaatggtggctcaggttcaattttccacctagggaatgaatactttctgtgtattcaacctttgccatttgttgattctcttcccctccataaacaacttatgacttcccttcttaaattttccwaaaggatttgtgagactagtcttgagctgtagataatctggtgtactttgtggtataaatttgtctttctgtgtctttttgtaatggaaagtggtacaacaggataaaatgtgggcttaggacccctataagcctgttgttcaagctagttcggcagatttgtcagttacaaactttgctgtgggtccctgaaattaatactagatgaggtttccctttcatcttgtttaatgctcttgtgagtttgaccttgcaacagtctggtggtactttctcttggtccctgccatccagaggacagaaatgttgtggttcatatcatagttagctctaaaaaawatcttgagcagataaaaactgttgcaagctcgaaactggctgttctaggttcattctgggaatcataatgaaacctgaccaatgctgtagctcaaaagctaaggctttgtcttttcacaatggtggctcaggttcaattttccacctagggaatgaatactttctgtgtattcaacctttgccatttgttgattctcttcccctccataaacaacttatgacttcccttcttaaattttcc

SEQ ID NO: 294547 - DNA, 573 bp, Homo sapiens
gtttttttaaaacactgcagtacacctgttgttcttgaggagagtttttcagcaatttggacaaaatcttaaattcattgtggcgacaagtccccaaactaatgcttttttttttttaaactgggaatttcactttttatcctatttatttattttatcctattgtttatcctatgctatccattttttatcctatttatttattttatcctattgtatccattatttaccttataatatgccatctatttaaatgctgcacctaagctatagatgagaatactaacacctttgttatgaaagccttggaaccccagtctggcctgcttgaatatgttcagacagctcagacagctgcaaagtgattctactcctctcaccttggggtcaacatctaccccaytaccactccgtcagcaggaaggtgttagatctgttgtcaacctttttctatctttattagcccacaccttaagattaaaatgttataaaatgcaaaggaaggaattaaaaccacctttgcaaacattataactaaagtaattatgacagtgaaagagatcagacctagcc

SEQ ID NO: 294548 - DNA, 573 bp, Homo sapiens
gtttttttaaaacactgcagtacacctgttgttcttgaggagagtttttcagcaatttggacaaaatcttaaattcattgtggcgacaagtccccaaactaatgcttttttttttttaaactgggaatttcactttttatcctatttatttattttatcctattgtttatcctatgctatccattttttatcctatttatttattttatcctattgtatccattatttaccttataatatgccatctatttaaatgctgcacctaagctatagatgagaatactaacacctttgttatgaaagccttggaaccccagtctggcctgcttgaatatgttcagacagctcagacagctgcaaagtgattctactcctctcaccttggggtcaacatctaccccattaccactccgtcagcaggaaggtgttagatctgttgtcaacctttttctatctttattagccyacaccttaagattaaaatgttataaaatgcaaaggaaggaattaaaaccacctttgcaaacattataactaaagtaattatgacagtgaaagagatcagacctagcc

SEQ ID NO: 294549 - DNA, 572 bp, Homo sapiens
aagtaatccaaatctacttcaaaaaatactatacaaatccataggyagcgtaagtaccttaaaacaaatattcccaattgtttccacttatcattcatatagttgttatcatttattttacttataaataagaatatataagtagtggatgtatttgtatatttatagacagatagatatgaatatatttgtaagcatgtgtaattgaaaatattattgctcttattattttaacaaacattagattagttgagaataagaaaaataaatgtattttctttttgattacttataactgatgatcttttttgaatatacatttatgtatctgatcaacacctttttttccctaaaaaagtttttttttttttttttaacatttcttgcaagataggtcttttggcaaaaaatgtcctcaattattctctattctaacttgctgttctcttttctaagtgaaggataattttgcagggtgtggaattctaagttgacatttttgttctttcaaaacttcaaatattttacttttctctcttcttgatggtatgatttctgataaattagaaaca

SEQ ID NO: 294550 - DNA, 614 bp, Homo sapiens
agtgaaatcacaaggcaggctgtgaaaaaacaaaaaggctggatgtgcagaggcctgcagaggacagaaggcccttccagtgcmtaggcgtttatccaggaaggactgttaggtgtcataggtcataaatgaagaatatgtattaaaatcactgtagccaaaatgttatattgtgaagtgagtcattttattacaaatgttgccccctcaatgttcaactctgtagcttgatgtggataaaatgtctttttctccttgagatttttgtgcttatgcattctggagaactgataaaatcagagtcctcagaaaaatagcgtatcttgacaaccactcaagttgtttcatttctctattgtatctgtgtatatatgtttttaaaataatcattaaatcctgtaatactgctattttattgaagattggagataaaacttagaaatatattcctaatgaacagagattctaaaatgccagttaacttacttaccatgtcaaagcaactaagcaaaaggaaataaaaacctgctttgtttttccatcacccacatatccgtcctccttctccaccatcatttaaagtctgtttctgttcactttgacatagaagcagg

SEQ ID NO: 294551 - DNA, 596 bp, Homo sapiens
aatattgacttggtcttgacatatcttatgttgaaattgtctgatcttaagtttttttttaattttaacctctttttattataaacgtctttaaaatttatgactctattcaaattttatttcttttcacttcaatttttgtaagtttggctaatttcatccaatgttatttggttgttaatatcctcaatattatcaatttaatgtctgtagaatccccccttttaatttataattaataattagtgttttcagatcgcttttccttcaatagtcacttttgggatgtatatacatactaaaatacacatatatttatataatcaagggatcaaacygtttaaaaatttcttaatttacgtgtgttttctattttattatttataatatttagaattatttttctttttaaattatcaggcttaatttgctcttatattttagcttctttagatgatatcttgattaatatgtttcctatttttctttttgtaataggtgaatttgtgactataaattttatgcttataacaggtttaattgcagctacaagttttgatatgctgtgttttattattattgtttactaatttata

SEQ ID NO: 294552 - DNA, 559 bp, Homo sapiens
caaggatatttttcatcagaggatttatatagttctgtatgcaatatcttagagcacaaattaatttcttaaatgttgcaatagattttatttgaatattttaacttatttaagtttacacagctaaactaattttttaattaaaaaaaagaaagagatttttgcagtgaaacgcagatgacctcaaagatttttgttctatttcatattatagtrttgactctagaaagagggaattatgaaagaatataactatttctagacaatagaataaaatagaaatggtgtatgacactgctgtgaagagattaaatatcttgtgtacattccccactgctgtttaccttttttagttaccaaggaggtaatacgttgaatagggcagcgtcctaaaatggaatgagtctcgataccttagtaacagcttgaagaaaaatttcccagaaaaaaacactcaaccagcatctccattagatttttccacaagtaatgaagaactatgaattgaagttgcatttaagccccaagtgctgtaaattttactataaaagaagttgag

SEQ ID NO: 294553 - DNA, 578 bp, Homo sapiens
atttcacaagtgttgttttgacccagttttgataacatggctaaaacctcccaattcgacttcacaggcagtatgctaagtccccatcccaactacttcctttatcagccctatcccaaactgccaagtaagtacccctagatatttaacaaacatggatagccctttgttcctagggccctaaaactacatcattatacattgtttgttttagatttaatcaactacacctatggtaaaacctaaaagattggatcatgaggccttgaaatctacattttcaattccctgttcatagcatcctcaaagtgtagatgagctgactctagagaaataaatacataacactgataatcttgcaatatttccttatgaactcaaaaacctgaaccataaacatgtaaagacccttatgcacattaaattcaytgacctctgtatgaggacagctatgccattctgcatgttccttttatacaatctattgtaagatgcttttattgagatatacatatagaaataatctaactctaccaaataaaaatttttggaaatttatatgttcatcaccctgtatt

SEQ ID NO: 294554 - DNA, 436 bp, Homo sapiens
tttatgcatattcatgaatgtacatattyacatacataagtacacatgcattcagagaagacaagtgtagaatttataaattaatgatgatgttatttggctataggaggtggttgtacaataaatcttcataagggtaaaaaaaatcagaatattatcacaacatgaccaggcagcttttgttctaaacaatgctggaagtaaagaaaaaggtaactggatttctgacaaaatcaactgtaatgtttagtcaagtaaaatatgtaacatttatgaagagataaatggctcttttgatcattatatgtctgtgaatgtcaggtggaagaaaggtcacaagtgtaaaactgatagtatttactacaagaatgtatgtgactaggcactaactggtttttgctgactcagcactgattttgaaatcaataagttaatt

SEQ ID NO: 294555 - DNA, 536 bp, Homo sapiens
ccctatctctaaaaaattaaattaaatcaaattaggctgagtacagtcacttactcctgtcatcctgacactttgggaggctgaggtgggaggattgcttgagtccaggtgtttgagaccagcgtgggcaacatagtgagaacctgtctctacaaaaaacagaaaaaattaactggacatggtggtgagcacctgtggtcccagctactygggaggctgaggccggaggatcgcttgagcccaggaggagaagctgcattgagccaagatcgctccactgcactctagcactgtaggctggatgacagagcaagatcctgtctctctctctttctctctttctcttttgtgtgtgtgtgtgtgtgtgtgtgtgtgtgtgtgtgtgtgtgtgtgtgtgcacgtgctcacatatatgtttaggggaccttgggctcacatatatgtttaatcagcttgggctttggtctccttatttgcaaaataagacatggtgcttgtcctgcacacacgacaggacagagggctggtgtcagggc

SEQ ID NO: 294556 - DNA, 524 bp, Homo sapiens
ctgcagcatatggcagatgacaccaaacagagatggtacattttggggttgggtgcacagggacagatcatctggagtatgacgtggtttcctttgggtgtcctgaagtccccagcaagaatgctgaaacatgtctgtcatgttcccttctacaggagaaagagatagaagtggcctggctttgaaacayggtgctatcccctagcaagcagaggaggagcttccagacagaaaatggtacctttccccagagtctatgttgaggtgcaccagcctttccagtcctgagaaaagacagagtcatggctccagggcaggtgggcatgcctgtgtcccaggaggcactgttcttcctggccagagacccatgcccacttcagaggagccatgaaggagaaacaccaggccacagtggaggactgtgatcaaggaaaaattgaagacctgctgcaggaaattggagctgccaatctcctaacaattggaatttttttatactgtgcatttcacaaatgtatggtaag

SEQ ID NO: 294557 - DNA, 515 bp, Homo sapiens
gcatggtccctctctcttccagggcccacaccaaaaggtgcttcagaaagcatggccttgttccagactgtagggggttttcactacctctcttctattgaggctctgccaaagactccccatgcattttcayccacctcacatacctctagagtgtctaatctgctgggacatacaaccctagtgttggattgcaccagtggctaaaacccctgcagacctttattttgctttgggctccactcaaaactagaagctttgccagtcaccccaaaattgagtcagattggtgttgccaaatgtgctacatactgcctcaaaaatccagagacccactaagcacagtgcctgtttcttagtggaaggaggtatgcaatccaacagtttgtcttttaccttaaagtgtgggtcttagaatgctccaaaccactagacccctaaaaacatcacctatgtgcatagtcctagattttcattcagttatctcctacctcctgttctcaagtgcttaataa

SEQ ID NO: 294558 - DNA, 581 bp, Homo sapiens
aactagaagctttgccagtcaccccaaaattgagtcagattggtgttgccaaatgtgctacatactgcctcaaaaatccagagacccactaagcacagtgcctgtttcttagtggaaggaggtatgcaatccaacagtttgtcttttaccttaaagtgtgggtcttagaatgctccaaaccactagacccctaaaaacmtcacctatgtgcatagtcctagattttcattcagttatctcctacctcctgttctcaagtgcttaataaaatctccaagctttccattttgtgctcaccaggtacaatttgcttgatgtcatcaatacagtgagccagtgtgatattctgcggaattgaagatgactacagtccctttggactacactatgacaaagaacaagagtgttagcacagccctggggtaagacaacaaatgtgtccccaccatatgaagatgaactgactttgatcctccctactgatggggaagaaggcatttgcttgatcaatagcctcttacaaatgccagaggctatttgacctgctctagtaaaattaccacatctggcacagaagctgc

SEQ ID NO: 294559 - DNA, 562 bp, Homo sapiens
attgagggcttccagaaacatgcaaagaggcaggggaacagaagaggaagatctgagctggttttaggaagcttcttcaagggcaggagggtcttaagctgagacggggagctctgtctacacagagatgcagatttaacactcactttgtctaaccctttcctcctccacatgccttcctttctcactcacacacctgccccttgcctctttgagagagatttactttattaattaaaaaataactatgcttttttttttgatggagcctcactctgtcgcccaggctggagtgcagtggtgtgatctcagctcactgtaacctctgcttcccaggttcaagtgattctcctacctcaacctcccragtagctgagatgataggcataaaaaataactgttttcttaattataaaagtagatgcttgttagacatttgagaaacactgaaatgtaggaaaaaattcaaataacccacagttcacccagagagttgccgctgacatttccgtgtttattttagatagaaaaacaccacttttttcaaccagcatcataatat

SEQ ID NO: 294560 - DNA, 562 bp, Homo sapiens
attgagggcttccagaaacatgcaaagaggcaggggaacagaagaggaagatctgagctggttttaggaagcttcttcaagggcaggagggtcttaagctgagacggggagctctgtctacacagagatgcagatttaacactcactttgtctaaccctttcctcctccacatgccttcctttctcactcacacacctgccccttgcctctttgagagagatttactttattaattaaaaaataactatgcttttttttttgatggagcctcactctgtcgcccaggctggagtgcagtggtgtgatctcagctcactgtaacctctgcttcccaggttcaagtgattctcctacctcaacctcccaagtagctgagatgataggcataaaaaataactgttttcttaattataaaagtagatgcttgttagacatttgagaaacactgaaatgtaggaaaaaattcaaataacccacagttcacccagagagttgcygctgacatttccgtgtttattttagatagaaaaacaccacttttttcaaccagcatcataatat

SEQ ID NO: 294561 - DNA, 515 bp, Homo sapiens
attgttattcttattcttaaaaatattccatataatattggaaaaattatttctatttcaatataaacttaattattagcctccccagaacatctacatatagttcttcatatctcatttttaaattttacattttttttgtttttttttttactgttttttcttttgacacatattctctcaggtacttggctctgagcgtagcgtgccgggggtgaaactgagaattaaataacmtcaaaactgcaaaaacccttcaggctcatgatattagctaagccttagcttagagagctattgtcagtgtccaaataagaaagcaactctccactaaaaatattgtttatagttaagaaccagagacatcatcagatggttaagacgtggcacatgctcagaatataaggaaataatctttcttcagcagagggtaataaacagactacatgggagtgatagcatcaggaatggtccctgaaactatgggatctgtcaagcagtttctaaagcaaatt

SEQ ID NO: 294562 - DNA, 602 bp, Homo sapiens
gagaaaacctctcggaggaggccgctcctgtttccctaagggcaattcttcaaagaaggaggaatctatcagccattagcagtcaacactcagaacagctggggattgggtgtactggcccagaaaagaggatttgcaatcctgctacaagtgagttatgacaaagtgaacaataaaattttgaaattaacatgtaatttcataactttcaacttaccaargtagttatttcattttatcaaagaaagacaaaaatatctatactgaatgttttattttctcttaataactgactagtgaagtacagatgttttaaaatggtattacataataatcttatttttataatccaagatcatttattacatcctttgtaattagtaataagataatgtttacttaatactatcaagtggctaaatcattggtgataccaccacttgaaatcttctatcttgggtacaaaaccaaatatctacagaattaaaaaaattaatatgaatgcaaggaaagaatatttttattataatgtcatatttatattctttgttaataatattctttgaaaattgtctgaggtttatgctaatataaactatcta

SEQ ID NO: 294563 - DNA, 1015 bp, Homo sapiens
atgatgataacccgaatctgagtatcactgtattagatcatattgttctagttctgatcattttagaattcagaaaagttaaatgaaccaaactcatcggttcctcaaaactctatttctctgttctgtttttttttatttaaagaaatgtcaagtaaaacatcatttttcttttttttaacagttagagttaatgttaggcagaactcataatgtatggaaagaacatttcataagtgtcactgaaaaaattgctcacaacaaaaatctatgagtcatccttgaattttttccccctcgtctccatgttcaacacacaagcaagtcttttggcattacttctaaaatacattttaaacatrtcaatttatatccatttttagtgccaccattgtagtccaagttatcattatttcttttctaaagcacagtagtagtcatcccactttttctttgcttttctcatgcctgctgttacctccaactgcctaatctatccaggcagtcttaacatttttctcgcagtctggttcaaactatgggctgtttcccagaataattgcttttaaaataaaatatttagaattacaggaaaagaggactatattcaaagatwgttatttaaattagtaattcatgaatatatcactgcttaatctgctaagctcagcagtacacagtaattatcagtgacagaaagcagacttaagaacacttgctgcctgcaaattattgaagggtagtccaagaaagattaagctgggtgtgagttatttatgaagagtaaatgaaacaaagtgccatagcattcattaaattaatgagaaaaawcccctaaaatcgcattttaagggcgtttccttggggttagaattcaaaaaaatgccatttttgttctcatgcggttcattgtaacttagtcaggcatttaaaacaattggtataatatgattaggtaaagaaagggggtatgagatttttggtagatatatattttttaaaagtacaagtatca

SEQ ID NO: 294564 - DNA, 614 bp, Homo sapiens
gaagaaactagaggcacatgactgactgcagatcaattcagaagcatgtgttcattttcagaggatatatagtcatggttgaacaatggtttaatctcttcaatggaagctgcccacagaaatctacaaagccgtatttgccacatttctgccaggagtggcatagaatttagagagctgggattgtatcttttagaagtcaagctctctagctcagttaatagattgttgcatttgaaaatgccttatcctactgtggaacaaacgagatatccttcaaagggaaaacctataatggttccttgtcagagaggtcatgaagaggatttttgttttagaatacataacccttaatatcccttgctgccctaagtttctctgaattaatgttattttctggccgttactcgtgtctctgacatgatttattttcaatttatgtgcatgtttgctatataacttgctctgggttaccttcaataaaggaaatgtggtaggtaaataatgaaagtaacattacagtaagatttttaacayagaacactgaacccaccaagagaagaggatattactgtagccagtcagagatgtaaccacgtaacagaaaatttaca

SEQ ID NO: 294565 - DNA, 521 bp, Homo sapiens
gaaatgtctcaagggcatgtagaaatctttgcagcagaccctcagtcccaggtacctaggaggaataattagtttcctgggccaggccaagagcccctactgctctaggcagccttaggacttggtgccctgcgtccagcaggggttataaaggccaaggtacagctcaggctgtggcatcagagggtgcaagccccaagtcttggtggattacatgtggtgttgggcctgcaggtacacagaagacaagtatgtagttttggaaatctctacctagatttcagaggatggatggaagtgcctggatgaccaggcagaagtctgctgctggggtggagcccacatggagatcctctcctarggtagctcaaaggggaaatatgaggttagagccctcacacaaagtccccactggggccctgcatagtgggactctgagaagagggccatcctcctccagaccccagaatggtagatctactgacagcttgtaccatgcacctggaaaagctgccaacact

SEQ ID NO: 294566 - DNA, 593 bp, Homo sapiens
gcaagtacttaaacctcaggaaacgtgcttgggaaaatagtccttaataagaaatgaaaagcttaattaaaaatatctcattcttagttgagaaatgaaaatatttaattaatattaatatatttaattatatcaaatttactaatatcaaataattgtagtcaatagtcagaaaaatagatattccaattacttgttagtctctyataaagtatcttataaaaataattgaaaggagtgtctaagaagatctaatttacctaaaagcattgaaactttcttcctttacaatccccataaataaaatattatgtctaataacacttaattgtacttaaaaggcatcatctttattttaaaaaactagagaaggagatccatcactgaatgcagtcagctcaattacaactcctgtcatcttgcaaggagatcagaaaatgaggaaaaaataaagaacactttatgcattttcagtaagttaaggtatttaccatttttgtaggaaaaaaatgccatcattgacatagagtatgttttttaatgtcactaaagttgagcttgactatgtgacttactttggcctatggaatgtt

SEQ ID NO: 294567 - DNA, 1176 bp, Homo sapiens
gcaagtacttaaacctcaggaaacgtgcttgggaaaatagtccttaataagaaatgaaaagcttaattaaaaatatctcattcttagttgagaaatgaaaatatttaattaatattaatatatttaattatatcaaatttactaatatcaaataattgtagtcaatagtcagaaaaatagatattccaattacttgttagtctctcataaagtatcttataaaaataattgaaaggagtgtctaagaagatctaatttacctaaaagcattgaaactttcttcctttacaatccccataaataaaatattatgtctaataacacttaattgtacttaaaaggcatcatctttattttaaaaaactagagaaggagatccatcactgaatgcagtcagctcaattacaactcctgtcatcttgcaaggagatcagaaaatgaggaaaaaataaagaacactttatgcattttcagtaagttaagrtatttaccatttttgtaggaaaaaaatgccatcattgacatagagtatgttttttaatgtcactaaagttgagcttgactatgtgacttactttggcctatggaatgttwctacaaatgacacctactaattttttccacagtctactggcttgaaatagtcacacattcaaaccatgctgcaagaaagcttagaattttaatattccatgtgttcaggaagaagagaaattctggagagcctaagtattagtaacattgaatacatattctcagttcctaaggactgtaattcaattatccaattttaaggcggaaacaataaatatcatgtcatttttgcgataatgaattaaagcaatgtatttaaatcttatgccttgaagaactgttatataataaatctattttcttatctactgttcacagacttctttcacagwggtgctattggaacaagctgatcttgtcactagcaccttgaatttatgcaagcagttactctcaagaagctgcaaaatacatttcttcagactggtgagtaacacatggactcagatttgcttgagatttagcaaaatattctgaattaaaatacataagtcaaatcatttttactaactataaagtaatgaaatgcttggattttcagaataaatttagtctttataactcagcaccactggtccaact

SEQ ID NO: 294568 - DNA, 485 bp, Homo sapiens
gcacctgcttaatttttgtattttttgtagagacagggtttttccatgttgtccaggctggtgtcaaactcctgagctcaagcaattcactcgccttggtcgcccaaagttctggactacaggtgtgagccaccacacctggcctcacttattttttgacaattaatgtatttttctcagcataattctgaaaaacatatagacacattgtgtaaaaaccaatgtgaagttatcagaaattctaaattttaraaaaagtaatgaaaaactgtctgcagacaaacttgctgtctgtatgtgctccaccatttattaattgttttaactttgagaaatttgagtacattctcttgaaatatatttatagacatgctagttttccatcaatatccagatactcctttctcagaaaggatttttggatgtataatctttcaaaatgaagacaatattttctgtttttccttcccttatgtatgactaat

SEQ ID NO: 294569 - DNA, 619 bp, Homo sapiens
tcagttacacatagattgtaccttatgaaacagcatcacagttcttgtatattctattccttttttaaattcatatttctctatgctttcagttggggaagtatctactatttacttacacatcttcaagttcactgattctttccttggccrtgtctagtctactggtaagcaaatatgttcttcatttctttctcagtgcttttagttgtagtatctttttaaaaatactttattagagtttctctctgtttgcattacctatcaattattatgtctattttttccttttagaccccttaacaccatattatagtcattttagaatttcctgataattccagtgcttgcattatatctgagtctggttttatgcttgcttcatctgcttaaaatctatctatctatctatagccttttagcacaccttgtaactttttgtttgtaactttttgtagttgccttgtaactttttgttgaaagttagatgtgttgtaccaggtaataggaactgaggtcaataggcatttagtgtgaggtttgatatcattctggctaggagttgggctgtgtttaatgtttgttgtagcagtagagagcagaggcttcaaattcttct

SEQ ID NO: 294570 - DNA, 619 bp, Homo sapiens
tcagttacacatagattgtaccttatgaaacagcatcacagttcttgtatattctattccttttttaaattcatatttctctatgctttcagttggggaagtatctactatttacttacacatcttcaagttcactgattctttccttggccgtgtctagtctactggtaagcaaatatgttcttcatttctttctcagtgcttttagttgtagtatctttttaaaaatactttattagagtttctctctgtttgcattacctatcaattattatgtctattttttccttttagaccccttaacaccatattatagtcattttagaatttcctgataattccagtgcttgcattatatctgagtctggttttatgcttgcttcatctgcttaaaatctatctatctatctatagccttttagcacaccttgtaactttttgtttgtaactttttgtagttgccttgtaactttttgttgaaagttagatgtgttgtaccaggtaataggaactgaggtsaataggcatttagtgtgaggtttgatatcattctggctaggagttgggctgtgtttaatgtttgttgtagcagtagagagcagaggcttcaaattcttct

SEQ ID NO: 294571 - DNA, 589 bp, Homo sapiens
actttttgaacactgacatggcaccacaagtagaaattttccacaggtgaccttcatatgatgggttatgttcaagacacaggtgcacaacatatagttaattcagtgtccccaagagaaaaagggccttcccgccccagttcatctgtgatatatcttttccatgcacactcatattcccccatgctagtatatccacaaagggtaatagaatggcttgtgtccaggctgaataaaccaacagcagtttcctcaccatgctccacctgggaccaagaacaatgtgcattattctctgtggtttttgcttattctctgctttgtggttcaaagattttactgaaaaatgtccaaaaaagcctgcagattcccctatggataacagtgataagaaaaaagtaagcacttaacatttatctgtagcacagaaagtcaacttggagaaaatggacagcaatgtaaatgtraaatgtcttatgtaagtgtaagacgtttggagtaaaataagatggttgaaattaccaccacgtatcatctgaagaaacagaaggataaactgttgaagcactatgctggaagtgattaacag

SEQ ID NO: 294572 - DNA, 1319 bp, Homo sapiens
cactcatgagatagcgcttacaggaattaaggatgtcaaggacaggataagtgtgctgagatgtgctaatgcagcagacagacataagtgtaaagtttttgtgataagcaaaagcttgagtcctcacttttttcagagggaatttcttaccagttaattattatgttaacaaaaagatatggctcatcagggacatcttttcctgatttgtctcttaaacattttgtcccaacagatcttgctcgctgcagggaagctggactggatgmcaactgcaagattttcttattccttgacaactgttctgctccttctccagctgaaattctcatcaaaaataatgtttatgccatgtacttttccctaaatgtgacttcattaattcagcatgtgaccagagtatccttaggtaaatgaagagtaaatatagagatacttttttgaacatcatgctagcagcagggaacagaggcatgagtatggaagtttttcaaaaggagtttagtatgaaggatgtcatatattctgttgccaactgttggaaaacaatgactaaagacacagttgtgcatgcctggacccaacatctggcctacaactatgttcagtgattatgatgaacaaggtgctggctttgaaggatgtcaattgtgtgatggwcactcatgagatagcgcttacaggaattaaggatgtcaaggacaggataagtgtgctgagatgtgctaatgcagcagacagacataagtgtaaagtttttgtgataagcaaaagcttgagtcctcacttttttcagagggaatttcttaccagttaattattatgttaacaaaaagatatggctcatcagggacatcttttcctgatttgtctcttaaacattttgtcccaacagatcttgctcgctgcagggaagctggactggatgccaactgcaagattttcttattccttgacaactgttctgctccttctccagctgaaattctcatcaaaaataatgtttatgccatgtacttttccctaaatgtgacttcattaattcagcatgtgaccagagtatccttaggtaaatgaagwgtaaatatagagatacttttttgaacatcatgctagcagcagggaacagaggcatgagtatggaagtttttcaaaaggagtttagtatgaaggatgtcatatattctgttgccaactgttggaaaacaatgactaaagacacagttgtgcatgcctggacccaacatctggcctacaactatgttcagtgattatgatgaacaaggtgctggctttgaaggatgtcaattgtgtgatgg

SEQ ID NO: 294573 - DNA, 565 bp, Homo sapiens
actgttggaaaacaatgactaaagacacagttgtgcatgcctggacccaacatctggcctacaactatgttcagtgattatgatgaacaaggtgctggctttgaaggatgtcaattgtgtgatgggcttcttggagggctacaccagtgttcattcacaacagaacaagaaatcaggtaagtttataaagtcaaaragacttctaagaaagaaaaaagcacattgttgattaggcagatgcctctaggagcaacatttttaaaaaccatccagtggaatgcttcctcttccctagaggactcacttcctggtccttcaactgcctgtgatgtttcaactcacctaaaaaaaatgttaaccaaagcacagccttttaggagaagactgaaagcctgctgttgctcgttattgctattgtttaacagctgatataggtattctgttgatgctattgtacttaattaccctgaacacattatttttctttcactgtatttactatattataatattttttcctgttatgtacttatgtgtgaataagtgtaagaaaatgattgtttat

SEQ ID NO: 294574 - DNA, 1131 bp, Homo sapiens
actgttggaaaacaatgactaaagacacagttgtgcatgcctggacccaacatctggcctacaactatgttcagtgattatgatgaacaaggtgctggctttgaaggatgtcaattgtgtgatgggcttcttggagggctacaccagtgttcattcacaacagaacaagaaatcaggtaagtttataaagtcaaaaagacttctaagaaagaaaaaagcacattgttgattaggcagatgcctctaggagcaacatttttaaaaaccatccagtggaatgcttcctcttccctagaggactcacttcctggtccttcaactgcctgtgatgtttcaactmacctaaaaaaaatgttaaccaaagcacagccttttaggagaagactgaaagcctgctgttgctcgttattgctattgtttaacagctgatataggtattctgttgatgctattgtacttaattaccctgaacacattatttttctttcactgtatttactatattataatattttttcctgttatgtacttatgtgtgaataagtgtaagaaaatgattgtttatwactgttggaaaacaatgactaaagacacagttgtgcatgcctggacccaacatctggcctacaactatgttcagtgattatgatgaacaaggtgctggctttgaaggatgtcaattgtgtgatgggcttcttggagggctacaccagtgttcattcacaacagaacaagaaatcaggtaagtttataaagtcaaaaagacttctaagaaagaaaaaagcacattgttgattaggcagatgcctctaggagcaacatttttaaaaaccatccagtggaatgcttcctcttccctagaggactcacttcctggtccttcaactgcctgtgatgtttcaactcacctaaaaaaaatgttaaccaaagcacagccttttaggwgaagactgaaagcctgctgttgctcgttattgctattgtttaacagctgatataggtattctgttgatgctattgtacttaattaccctgaacacattatttttctttcactgtatttactatattataatattttttcctgttatgtacttatgtgtgaataagtgtaagaaaatgattgtttat

SEQ ID NO: 294575 - DNA, 875 bp, Homo sapiens
tccctccccaccccacaacagtccccggtgtgtgatgttccccttccaatcatgtaacattcttccgcctagtattcttccattttaatcttaaataatgtaaggtccagttcaagtgttacttccaaatacaagcgttctctgattctcagggagacttkttttccactgtcatagagtgtagtgatttgactgaacttagtcaatttacttaaactcttgacttgagttcctctctctgaagaaaaatttgtagtatatgcagatatgttacaaagtgtccgaaacttagtaagaactatataagactagctattattattwtggactttgtatgttagtatgatagaagagtcaactcatatatatatatgttacatatatatgttwtatatatatatatatatatatatatatatatatatatatataaaacaaaccagaccctatttcctttgtactctgttatatttctgtattctatgttctgtaataaagtgaaagaaacaatgggtgcttcacatactttgaaataaaagtcaattttaaagacaaaaaactgattattaaaatttttctgaacttccttatcctcagtagaggttattataaaatctgaatggcatacctattttataccttgtaagtcttcatacacatgatattttacatttttaaagacttattattagaaatccaaattaaatatctattaaaagttcaatcatgatacaacctgacagtggccaagggaattctcagtagcttaaaaagcatgaggaatatcagcataataatatgtgtgaagcacgagcttataagtggacaaaagtaagagaaagttaatgttatccatgtatgctagtatatacaca

SEQ ID NO: 294576 - DNA, 461 bp, Homo sapiens
acaccagggttcaagtctgggatactgcaattagtatgcaagtcccacaagaaaaagaaaacaatatcagggaaataaaaacaataaaagatagactggttgatgatagttgaaattgggttggattagaagtaggacaaaaacaaattaaaatacatgagaacagcgcayagaacttgggaaaggtatctgaagtttcatacttagggaagtagctatttcaactatccttgaagaatagttgtggataacattaaaccaaaattaaaaattcatggttttacctctacattaaccattaaaacaatggcttatgccttcgttctcagcaaactaacacaggaacagaaaaccaaaaccgcatcttctcactcataagtggaagctgaacaatgagaacacgtggacacagggaggggaacatcacacaccgcagcctgttggcgggtggggcggggcaa

SEQ ID NO: 294577 - DNA, 461 bp, Homo sapiens
acaccagggttcaagtctgggatactgcaattagtatgcaagtcccacaagaaaaagaaaacaatatcagggaaataaaaacaataaaagatagactggttgatgatagttgaaattgggttggattagaagtaggacaaaaacaaattaaaatacatgagaacagcgcacagaacttgggaaaggtatctgaagtttcatacttagggaagtagctatttcaactatccttgaagaatagttgtggataacattaaaccaaaattaaaaattcatggttttacctctacattaaccattaaaacaatggcttatgccttcgttctcagcaaactaacacaggaacagaaaaccaaaaccgcatsttctcactcataagtggaagctgaacaatgagaacacgtggacacagggaggggaacatcacacaccgcagcctgttggcgggtggggcggggcaa

SEQ ID NO: 294578 - DNA, 461 bp, Homo sapiens
ttatatatttcttgctgacaagaataaatacgaatagctgcattagatataatccccttcctcagaaaattttaaatgttacataaatcgatatattgattttattatactgcttacagatcattggtctctcaaactcktgatgaaaaatgtggcacagcctctcttttattaaaatattggatatccttattttgtaggtgaaaattttttaataatgctttccctttcctcttggccttagatttctaagctgtttaagattaaaaaaaatcacagggatcaactagttatttaccaaaatgtataatatgtcatctcttgaaaatagcaccaaagacattagtgtaatctcagctaacaacttgcgaatcatatttaaaatgtaattaaaaatctaaatcttgaaaaaagaaagaacctctaaaaattaataagttaccaatatgttcaccaccata

SEQ ID NO: 294579 - DNA, 590 bp, Homo sapiens
cttttaaaattttatttttaaatatataatagatttacatatttgggggtacatacgataatttaatatattcatataatttttaaatatcaaatctgtataatttggatatccatcaccttaaatatttatcttttctttacactagaaacattcaaattattctcttctagatattttgaaatttgcactagattactgttaactatagtcaccttactgacctgtgaaagactaagtcttatttcttctatcaaactatgtttgcacccattagtcaagttgtctttattctctgttttctcctactctttttaataagcaccaatctattctctatcttcatgaaatccacttttttagtttctccacatgagtgggaacatgtgatatttgtctgtctatgcttggcttattttacttaacataatgacctttagttttatctatgtgcctrcaaatgaagtgcgtttcattattttttacagctgaatagtatttcattgtgtttatatatcacattttctttatctacttatccattgaatgggaatttaggttgattcaacattttggccattgtgaatagt

SEQ ID NO: 294580 - DNA, 495 bp, Homo sapiens
gacttacagaattctgtggaataaaagtggtctttcacttttcaaaggtggacacccttgtcttgttccagatcttagaggaaagacttttaatttttttctgtttggcaagatgttagctgtgagcttttcatatagggcttttgttattttgagatatgttcctcctacacttggttgaggaattttgccataaagggatgttgaattaaatgcttttccagcgtctattgaaattatcaaatagtttttgttcttggttctgtttatatgatgtgtcacatttattgatttgcatatgttgaaacattcttgcatttctggcatgaattccacttgatcgtggtgaataatctttttaatgtrttcaatttgccattattttgttgggaatttttgcattcatgttcgtagaaaatattaaactgtagttttctttttttgttgtgtccttgtctggtttcggtatcagggtaatgctggccttggataatg

SEQ ID NO: 294581 - DNA, 607 bp, Homo sapiens
aagtctgttgcccaatgaattggaactcttttatatattatttgcttcatttttcttgatgcttttaggtttctctttttgttcttgacttttgaaaatgtaattattacatgccttggggtagtcttatttgagttgaatctatttgttgttctctaacctttctgtacctggatatttatttctttctcaaattttggaaagttctctgtgattatttctttgaataagcattctaccctttgatttttctcaactccctcttgaacaatagtaattcttagttttggtctctcgaggtaattttctgtatcttttgggtgtttmtacccattttttcttaattttttctcctctggtcattttcaaatagccaatcatcaagtacactgattatttcttctacttgattcattctgctgttagagcctctaatgcattcttcagttcaccaaatgtgtttctcagtttcaagatttctggttttttattatcattatttcaatctctttgccaaatttctgtgttgcttttgtgttattatggagatcactgagtttccttaaaactactattttgaattattgatcagaaagataacgtattg

SEQ ID NO: 294582 - DNA, 557 bp, Homo sapiens
tagcatctagtatgtcactgaaattgtacataagctggtattttcatttggaaaatccagactttgtacgagtcatagtatacagttttaaagaagaggaccagttccaacttgtaaaagcaaaagtgagcttagttaaggctgttagtagcccccatgacttcaggacaagtaagacccagatgtaggtgccaagaacagcatttggaggtgacacccagccactgggcaagagtcctctggtggctcacacctgtartcccagcacttttggaggccaaggcaggtggatcacctgaggtcaggagttcgagactagactggccaatatggcttaacccagtctctactaaaaatacaaaaattagccaggtgcggtagtgcgcacctgaaatcccatctactcgggaggctgagggaggagaatcatttgaacccgggaggcagaggttgcagtgagtcgagattgtgccactgcactccagcctgggcaacagggcaagactccatctcaaaaaagtaaataaagagtcttctgtccgcatccccgaaactgc

SEQ ID NO: 294583 - DNA, 557 bp, Homo sapiens
tagcatctagtatgtcactgaaattgtacataagctggtattttcatttggaaaatccagactttgtacgagtcatagtatacagttttaaagaagaggaccagttccaacttgtaaaagcaaaagtgagcttagttaaggctgttagtagcccccatgacttcaggacaagtaagacccagatgtaggtgccaagaacagcatttggaggtgacacccagccactgggcaagagtcctctggtggctcacacctgtagtcccagcacttttggaggccaaggcaggtggatcacctgaggtcaggagttcgagactagactggccaatatggcttaacccagtctctactaaaaatacaaaaattagccaggtgcggtagtgcgcacctgaaatcccatctactcgggaggctgagggaggagaatcatttgaaccygggaggcagaggttgcagtgagtcgagattgtgccactgcactccagcctgggcaacagggcaagactccatctcaaaaaagtaaataaagagtcttctgtccgcatccccgaaactgc

SEQ ID NO: 294584 - DNA, 576 bp, Homo sapiens
gatatttactctctcaccttatttatacagagttttgccacaatggttctaatatttttagttggaacgtgttggagaacaagaacatttggtggtgtattagtccattttcacactgctgataaggacatacccaagactgggtaatttataagagaaagaggtttaattgactcacagttccacatgacgagggaggcctcacaatcatggcggaagatgaaggaagagcaaagggatgtcttacatggcaaagaggtaatttgtgcagggaaactcccctttataaaaccatcagatccccctgagacttattaactaccacaagaacaktacaggaaagacctgccctcatgattcaatcacctccaaccaggtccctcccatgacacgtggggattatgggagctacagtttgagatttgggtggggacacagccaaaccatatcaggggaagttgatattttgctaggaatctatgtggaattcactgttacttcagcatcatccttcaaacatggcatctcagcccaattgtgttgctataacaaaatgccacagactgagtataaaag

SEQ ID NO: 294585 - DNA, 569 bp, Homo sapiens
tatttgtatgcaaaatttaaaaagcaaaggagatgtgtatccttactttacatcatatacaaaaattaactcaaatatttcatagacctaaacataagagcaaaaactctaaaacttctataacatatttgaggagaaaagtccttgtgaccttggattggtcagagttcttagatagcatatcaaaagtctgagctataccatttctaacataaatacataaatcggacttttaaaatgtttaaaatgtgctgtttcaaagacgtttttagggaaaatgaaaaagaagcttcagactgggaaaaataattaagtcatatatgttattttaaaaaatcttgtgtytgcaaataaaaagtacttttacaacttgataatgagacatagaacaagacaacccaataaaaatataacgggaagaacatttgaagaaatgtgaaacaaaagagatatatatggtaaataagtgcaatgaataaccagtgattaatgttcaacctcattaatcaccagtttattcaaaatgaaattagttattttaagatctgataataatactaagcattgag

SEQ ID NO: 294586 - DNA, 565 bp, Homo sapiens
tagtctgtgccatttgacaattattgaacaagaccacttaataattcagtttggtttgtttatatctattagcatgagttttgaaaatgaatgtaatcacaatcttacctaatagatacttgttatgtttcagaatgctatgaacatcatcaatttttctcacatgtgaagaaatctgcacattaactcaggcagtaaccagaaggcaggcacctgccatttttggggaatatactcaacggcacagaccctgttctcctttatacatgtgacrtctgcaacacctcgagaaagcattggcacccagaaaactcactgactgttggggaactagcagtgtttgagtgctaagtagaagaactcagggactcaagagggacccatcccctcacctgggactgcaggtgcactggttccctgtgtgccccttctttagaatgaactatgtcctaagcccaaacgtacgagtttgattatagctactcatccagtatactttgagttttgatcgtcacttttaggaagctctatcgtattttgtcatttcatcctttactccttagaa

SEQ ID NO: 294587 - DNA, 610 bp, Homo sapiens
caaaagaatgtaataaaatttctagcaagataaaaaaaaagaaatgtataggtattttctagtttatttttcttattttgagttttggcttgcttccactgacatcaaaatttatactgtgaatgatttcaggcctgtgaaatttgttgaatcttgttttagggcctagaagatggccaattttttgagtgctgtatcatccctcaaaagaatgcttattctgtagttattagctgtggtgttctatgtatgttaattgggacatacttagtaatcattttattcaaatcttcttcatctgcactggtttatgcctgctctattaatttttgtgaagtgtgctaaattatccaaatatagtcaagcgtggtggctcatgtctgcaatcccagcactttgggaagccgaggcaggcagatgacctgaggtcaggagttgagagcagcctgatcaacatgatgaaatcctgtctttagtaaaactatagaaaattagctgagcatggtggtgaaygcctgtaatcccagctactcaggaggctgaggcaggagagtagcttgaacctgggaggcagaggttgcaataagccaagatcgcaccactgcacccc

SEQ ID NO: 294588 - DNA, 578 bp, Homo sapiens
gaacttcatgggtgaggtcatgccccaccctacttccgcttgccctctgtgggttgcacccactctctaaccagtcccaataagatgagctgggtacctcagttggaaatgcagaaatcacccaccttctgcgttgatctcactgggagctgcagactggagctgtttccattcagccatcttgctagccaatgtgcttctatacattttaatacatttatgatagcactatcaaataacacatttgaaagtctgacytttgacttgtagctgtgctgcaatgaaattatattccatgatagcatctggaagataatatttattcataactaaatacaagcggaatgcttattattcttttctatctaacactgttgtagaggagagaaatgatcatgataagggatgagtatagtataggtgaagggttgcagacactgatagttttttatccaatagtcttttgccttgataacagaatatctttatttttttgatttgcaatgtgatcagcttgtggtaggcagaataatgctcacttgcctctccccacccccacatcccccatcaagaccacc

SEQ ID NO: 294589 - DNA, 539 bp, Homo sapiens
aggagctcacaattgtttggcccaatcaaatctgggaacactagagaagttatcacccatcaaggtaattactttcaagttgaaataattactctatcaatgttaatggtctttcaacttcaataaagcactcacctgccgatratcacagctaacctcttgctctaatgcaattccctctctatttagtaggttatattacagctgttacagtggtcacttgtcctgaacagctgctgaatttcacttttatcggctgtgaaccataaaaaaattggtcatctgtgtatgatttccccctcacccataagcccttgcagagctaaggatatgatctcttggctgtaatagggtacttcggggcagccatcttgtctcaggtagtggctactttccatctgtgacaagagcagagtagttcaattaacttctgcccttcactgccatttacagcttgctgtctctgctaaatggcatatattctgaatttatggcctgggcctgttagtatgtggactagttcattttactttcacaga

SEQ ID NO: 294590 - DNA, 515 bp, Homo sapiens
ctaacttgttttctttctccccatcactttcatgtacatgaatcaaatgtaggtttggtcttttcacatagtcccatatttcttggcagctttgttcgtccctttttattcttttttctctaatcttgtgttcttgctttattttattcagttgrtcttcaatctctgatatcctttcttccactttattgatttggctattgatacttgtgtgtgcttcatgaagttctcatgctgtgtttttcagctccatcaggtcatttgtattcttctctaaactggttattctagtttgcaattcatctaacctttgttcaaggttcttagcttccttgcattgggttagaacgtgctcctttagttcagaggagtttgttattacttaccttctgaagcctacttctgtcaatttgtcaaactcattctctatccagttttcttccttgctggtgaggagttgtgatcctttggagaagaagcattctggtttttggaattttcagcctttttgcacc

SEQ ID NO: 294591 - DNA, 515 bp, Homo sapiens
ctaacttgttttctttctccccatcactttcatgtacatgaatcaaatgtaggtttggtcttttcacatagtcccatatttcttggcagctttgttcgtccctttttattcttttttctctaatcttgtgttcttgctttattttattcagttggtcttcaatctctgatatcctttcttccactttattgatttggctattgatacttgtgtgtgcttcatgaagttctcatgctgtgtttttcagctccatcaggtcatttgtattcttctctaaactggttattctagttygcaattcatctaacctttgttcaaggttcttagcttccttgcattgggttagaacgtgctcctttagttcagaggagtttgttattacttaccttctgaagcctacttctgtcaatttgtcaaactcattctctatccagttttcttccttgctggtgaggagttgtgatcctttggagaagaagcattctggtttttggaattttcagcctttttgcacc

SEQ ID NO: 294592 - DNA, 562 bp, Homo sapiens
atccctctgctcacagagatagatgcatagtctgattgcctcctttggaaaggcttatcagagactcaaaagaatgcaaacatttgtctctcacctacctgtgacctggaagccccccggtgggggctttctttgagttgccgccacatttctggatgaaactaatgtacttattatatatattggttgatgtctcatgtctccctaaaatgtataaaasagagccatgccccaaccaccttggttacatgtcgtcataacttcctgatgctgtgtcacaggtgtgcatcctcaaccttggcaaaataaactttctaaattaactgagactggtctcaaattttcagggttcacagctgctaacagtacacaagtatatcttacagctcaagtttcctgcctccagaaagagcagctgctcctctttctcacttcagttttaagttgttgggaataggacacttattggtcaaacatggggtcagttgctcgctggttgtggcaatcacaaggccatgggagtgcctttactttaaagtgcatcactttaattagattctgg

SEQ ID NO: 294593 - DNA, 559 bp, Homo sapiens
aaaaataattcaatactatgggccagctacctgggcacaagatggatcatagggataccgcactcctatttacatgcttcaccacrtcataaggttgcaggcagtacttgaaataatcactaatgaagcagcaaatgcattagatttactggcccagcaaaccacaaaaatgagaaacactatctatcagaacagattagctttatagactacatcctagcccaggaaggaggagtatgtggaaagttcaatctaactaattgttgtctggaaatcaatgacaatggaaaagcaattatgtaaataactgcaagaatgagaaaattagcccatgttccagttcaaacctggaaaatgtggtccccagattctctctttgtaggccagttttcatttttcagaaggtccaagactttaataggagtggttctggccatactaggaagttgcctaatactcccttgtctcttccttctctttgttagaagcattcaatcaactatagagacaatagtagctaggcaaactaccactcagctaatggctctgcttaaatatc

SEQ ID NO: 294594 - DNA, 559 bp, Homo sapiens
aaaaataattcaatactatgggccagctacctgggcacaagatggatcatagggataccgcactcctatttacatgcttcaccacgtcataaggttgcaggcagtacttgaaatmatcactaatgaagcagcaaatgcattagatttactggcccagcaaaccacaaaaatgagaaacactatctatcagaacagattagctttatagactacatcctagcccaggaaggaggagtatgtggaaagttcaatctaactaattgttgtctggaaatcaatgacaatggaaaagcaattatgtaaataactgcaagaatgagaaaattagcccatgttccagttcaaacctggaaaatgtggtccccagattctctctttgtaggccagttttcatttttcagaaggtccaagactttaataggagtggttctggccatactaggaagttgcctaatactcccttgtctcttccttctctttgttagaagcattcaatcaactatagagacaatagtagctaggcaaactaccactcagctaatggctctgcttaaatatc

SEQ ID NO: 294595 - DNA, 559 bp, Homo sapiens
aaaaataattcaatactatgggccagctacctgggcacaagatggatcatagggataccgcactcctatttacatgcttcaccacgtcataaggttgcaggcagtacttgaaataatcactaatgaagcagcaaatgcattagatttactggcccagcaaaccacaaaaatgagaaacactatctatcagaacagattagctttatagactacatcctagcccaggaaggaggagtatgtggaaagttcaatctaactaattgttgtctggaaatcaatgacaatggaaaagcaattatgkaaataactgcaagaatgagaaaattagcccatgttccagttcaaacctggaaaatgtggtccccagattctctctttgtaggccagttttcatttttcagaaggtccaagactttaataggagtggttctggccatactaggaagttgcctaatactcccttgtctcttccttctctttgttagaagcattcaatcaactatagagacaatagtagctaggcaaactaccactcagctaatggctctgcttaaatatc

SEQ ID NO: 294596 - DNA, 559 bp, Homo sapiens
aaaaataattcaatactatgggccagctacctgggcacaagatggatcatagggataccgcactcctatttacatgcttcaccacgtcataaggttgcaggcagtacttgaaataatcactaatgaagcagcaaatgcattagatttactggcccagcaaaccacaaaaatgagaaacactatctatcagaacagattagctttatagactacatcctagcccaggaaggaggagtatgtggaaagttcaatctaactaattgttgtctggaaatcaatgacaatggaaaagcaattatgtaaataactgcaagaatgagaaaattagcccatgttccagttcaaacctggaaaatgtggtccccagattctctctttgtaggccagttttcatttttcagaaggtccaagactttaataggagtggttctggccatactaggaagttgcctaatactcccttgtctcttccttctctttgttagaagcattcaatcaactatagagrcaatagtagctaggcaaactaccactcagctaatggctctgcttaaatatc

SEQ ID NO: 294597 - DNA, 515 bp, Homo sapiens
acaacaaaaacttggaaacaaaggtggctggcaagatggccaactaggaacagctccagtctgcagctcccagtgagatcaatgcagaaggtgggtgacttctgcatttccaacggagaaatccagctcatctcattgmgactggttagacaatgggtgcagcccacggagggtgagcagaaacagggtgggttgtcacctcacccaggaagcacaagtggttggggaactccctcccttagccaaggggagctgtcagggactgtaccacgaggaacggtgcactctggcccagatactacaattttcccatgatctttgcaacccgtagaccagaagattcccttgggtgcctatgccaccagggcccagggtttcaagtacaaaattgggtggccatttggacagacaccaagctagctgcaggagtttgtttatttttttctcatatcccagtagcacttggaacactagtgagacagaactgttcactcccctgcaaaggaggctgaagc

SEQ ID NO: 294598 - DNA, 505 bp, Homo sapiens
ttcacaaccagcagaccaggagattccctcccatgcctggtgtggcaggtcccatgcccatggaaccttgccccttgcttgcgcagcactctgagtttgacctacgattctggagcttggtgaggaaaggggcgtccactattgctgaggcttgggtaggcagttttatgctcccagtgtaaaaaaagcagcaggaaagcttgaactgggcggarcccaccacagttcagcaaggcctacttcctctcgagattccacctctgggggcagggcatattggaacaaatggcagcagacagtttctgcagacttaaacttccctgcctgacagctctgaagaaagcagttgttctcccagcatggcgttcaagacccgataatggacagactgccacctcaaatggatccctgacacctgtgtagcctgattggaggacacctcccagtaggggccaacagacacctcatacaggtgggtgcccctctaggacaaagcttccagagg

SEQ ID NO: 294599 - DNA, 601 bp, Homo sapiens
tctgttgactgaagaacacacatggaggtggctggaggccctggttgggaggaccccacccagtgggactggggacccacttaaagaaggagtctggccacattttggttgaggagctgtgctgtgttgagggatccattcagccctggattgacttgaactttccagagcccaatggctgaaacaactaagttgctcaaacaacaaacaaggcagcccrtctctccctctgggagtgccatcccagtagcgattcaaatctctgtcagctggagatcatgagtgcaattggctggaggcccaagttcaaaattcccccccacccagtgaggagggacagtatatctgctttaagtatctgcctaaagcagcagtctggccatgttttagtagagaaactgtcctgtgctgggggatcccttctgccctcagtcagcttggactctccaaagcctgaagggtggaatggctaaggtggccaaatggcaaagatggcagcctgccccacaccctggtagcttattcttagggagctgcaatgctgctacaattggctggttgaaattgcaagcctgtaggccttatcttgtgaggtgctgtg

SEQ ID NO: 294600 - DNA, 567 bp, Homo sapiens
atgtatgtattccattagttctgtccctctagataactctaatacagaattctaattgggggagcaaaaggacaatatctaccatgatgcaaacacacacacaaaaatactcactcttagagcagatacacagatgagaaagagaaagtagccaaaggttaccactatagagaaccatccaatgacagtgataaactataaaagaggatgaaagaagcaaaagatatataaaacagtgaaaaacagttaacaaaatgacagaaataagtccttatctatcaatagtaactttgaatgaaaatggaataaattcctcacttacaagatatagacaggctgaaataattaaaaaacctaactatatgctgcctatatcacttcacctttaaagacacatataggctgaatatgaagggatagaaaaagattccatgcaaacagaaaccaaaagtgagtagcagtagctatatttrtagcagataaaacagaatttaggtcaaaaatagtaaaaaggacaagaatattatatattgataaagggataacttcagcaagaggatataataa

SEQ ID NO: 294601 - DNA, 626 bp, Homo sapiens
ttgctgcagaataccacattcttctcaccacatgtatcattctccaggataagccataggttagatcacaaaacaagtcttaataaaagaaaagaaataatatcaagtatcttctgaccacaatggaataaaactagacattaatagcaagaggaatgttagaaactatacaaacacatagaaattaaacaacatgctcctgaatgaacagtgggtcaatgaagaaattaaaaaggagattttaaaatttcttgaaagaaatgatggtggaaacacagcataccaaaacctgtgagattagtacagcaaaagcagcaccaagagggaagtttatagccaataagcaacctatatmaaaaaaaacactacaaataagtaacctaatgatgcatcttaaaaaacaataaaagaaccaaacctaaaattagcagaaaaaataatatgacagcagaaataaataaaattgaaatgaagcaaacaatacaaagatcaatgaaccaaaaagccatttttttgaaaatataaaacaaaattgataagcctttagatagactaagaaaaagagagacaagatccaaataaattaaatcagaaataaaaaagagacattgtatctgataccacag

SEQ ID NO: 294602 - DNA, 619 bp, Homo sapiens
  misc_feature (1)...(619): n = A,T,C or G
nnnnnnattttgttactctttggttggcttaatggcaagatttacaattcaattcataaatttttatcactttcccaagtggtatgtttttgtctcaaaccttcactcttttaccaaattcaagccagttacattactttccagtgggcaaatgtcttctggcttggcagagatttctaccctacggtaatttctgaaacagagacccaaagactttgtctatggaggggaattcagagccgagatggagagatgaaagaaacccattaactgcttggtaaaacattccttaytggctcttagacaacaagtagaaacctgttttgtccctaggagagtctgagattttgattagaaaaaactcctgggaagtgccgccaaaaagatagtcattcattggctgatcatctgatcaaaccctgccaagatgatagaaaggtctacggaatcatccaggaactttaaggtgatgtcacattcatcttttctgacaacatgactaagaatcatgatgcctgtgttttttctgtcaatggtttgtggttccatagaatgagtgctgggtttggattcaggagtatgggctagagtcttcctaggttcttgtaactatttataa

SEQ ID NO: 294603 - DNA, 619 bp, Homo sapiens
  misc_feature (1)...(619): n = A,T,C or G
nnnnnnattttgttactctttggttggcttaatggcaagatttacaattcaattcataaatttttatcactttcccaagtggtatgtttttgtctcaaaccttcactcttttaccaaattcaagccagttacattactttccagtgggcaaatgtcttctggcttggcagagatttctaccctacggtaatttctgaaacagagacccaaagactttgtctatggaggggaattcagagccgagatggagagatgaaagaaacccattaactgcttggtaaaacattccttattggctcttagacaacaagtagaaacctgttttgtccctaggagagtctgagattttgattagaaaaaactcctgggaagtgcygccaaaaagatagtcattcattggctgatcatctgatcaaaccctgccaagatgatagaaaggtctacggaatcatccaggaactttaaggtgatgtcacattcatcttttctgacaacatgactaagaatcatgatgcctgtgttttttctgtcaatggtttgtggttccatagaatgagtgctgggtttggattcaggagtatgggctagagtcttcctaggttcttgtaactatttataa

SEQ ID NO: 294604 - DNA, 493 bp, Homo sapiens
caggtctacagtgtgctatgatcacgccactgcactccagcctgggcaatagagtggaacctggtctcaaaaaataataaaaataataataaagtacctgagaagttacttgtaggatttcaagaatcatttgctccctctccttttcctgctccttttttcatgataccatcataaggtcatagcagttccgagaactttctggcaactggtttctctagaaggaggacygtgggaggaaagcactttccagacctaagtttaaatgcaatcctcaggccagcctctaataattccatggcctccccacagcgaccctggactactgaacacttgcctttcccttccccaaagtcgaccttctcctaaatctgcaactctggaaaagactcacccttggaagccagataacatggtaaatactttgcctaaggttttaacaatgtttccagtaaattaatttcatatgaggaaggaaagaacttattaaagg

SEQ ID NO: 294605 - DNA, 634 bp, Homo sapiens
tcatctaattatcctcacgaattacaccatggaaagtcttcccttgcacacctcagccattctactaaaagcttctgagttataaatccaaaagggttgttcatttatatatcattagcttacattaattgagcgcttactatattatatgtctggtatgctcgtatttttcatgtattgtctcttctcattacaaggtgatattgtttgaatatatgtccccaccaaatctcacgttgaattgtaatctccaatgttggaggtgggacctggtgggagatgtttggatcataagggtgggtccctcatggatggcttgagccatcccttggtgataagtgagctctctctcagagttcacacaagatatggtggtttaaaagtgtgtggcaccttcccccacaactatctctcccttgctcctgctgtcatcatgtgatgtgcctgctttcacaacaccttctaccatgactgtaagcttcctgrggcctctctagaagttgagtagatgccagcatcatactccctatacagcctacagaaccatgggccaattaaatatcatttcttataaattactccgtctcaggtttctatttatagcagtgcaataatggcctaatgcagaaaattg

SEQ ID NO: 294606 - DNA, 633 bp, Homo sapiens
acacctgccctcttcattgtactttgaaaattccaaaatattagttaagcttcccatttaataattttttaaaaggtcagtttattccatggtttaactagagtgaaagaaaatcttatctctcagtattccccttttttaatagaaaatgccaaacatgagcaaaaatagggagactaatacaatgaacttttcatttattacctagcttcaacaattatcaaataatggccaaacacatttcatctctaaccttgcacgctcccctctgccaatactggattccttaaggcaaatctcagacatcacataatcttatctgtaaatatttcaatctgtaaatatttccatctgtatctttgaaggataagggctcttttttaatatggccattaacatatataaaaactgaaaaataattctgtaacaccaacaaatatccagtcagtaatcagacttccctgattgtctcataatagttttcattgtttgttcaaatcaagatccatgtaytgcaattgacatatctcatatctcaatctatagtgttctttcttcccctgtctccacccacccaccccccacacatacaatttgtcattgaagaaaccaggcttttttcctgaataattg

SEQ ID NO: 294607 - DNA, 652 bp, Homo sapiens
aaagctcacttctcagtggtgttaattcatcaatcattggaaatacccctgttcaatcatgtctgaagctggtcacaacatttttctgcttcttggtagaagtgtggtcagtttcatccccattgattttatctgggcaaatgggctcccctttaagtgtgttgaggtgtgaatatcagctcctagagttttctaattttgtatatggctaagaaaccattcaggttttctcctctcctggtttgggccatcttttaagtttgtatttttgcrcatgctgcaacttgtagaagaatgggtgttgagttgctatcttaaaaatgtgttttcctttcttttaaggatcacaataaatggtgttcttctcagaaactagtatacagtgtttatagcagcattatttaacaacttgtgtccatcaatagatagataaataaaatgttagtacatacatacaatggaataatgatctagttataaaaaggggtgaagggccgggcacggtggctcacgcctgtaatcccagcactttgagagaccgaggcaggtggatcacctgaggtcgggagtttgagaccagcctgaccaactggagaaaccccgtttctactaaaatacaaaattagccaggcgtggtgtcgcatgcctgtaa

SEQ ID NO: 294608 - DNA, 596 bp, Homo sapiens
ggacttatctctcaatgtgtgtcccccaccctaccccattgagagtggcacaacaatttaaggcctttattaagaaaaggtctaccagggtgagtgggggaagaagctgactttgggggaaatgcagtttgtcaagtggcaatggtatcttcttcctctttttgccttggggaagagaaggtatttgttttgttccttctactttctacaagattgaggggtttagtcttttctctccatagttagaaacacagtttattctctgaaagttactatgctcctaaacctgaaaccatcagaatgtgcagcactgcccatgaggggaaggagctagagagagrtggcggaagaaagagggtgctggtgtggggcaggaggcagtctgctttcccattgtctgacttgaccaagggatagggtgttccctgtggtcaagggaagactgccaatgggggcagggcttaagttatcttgctaggagcctccaagtgtgatgtctatttgggtgaggggacctaagccataaaaaggtgtggatgggccatcgttttagtggataagggtttttagtggataagggtggggaggaagaggca

SEQ ID NO: 294609 - DNA, 572 bp, Homo sapiens
agccaggcatggtggtacgtgcctgtagtcccagctactcgggaggctgagggaggagaatcacttgaacccgggaggcggaggttgcagtgaggcaagatggcaccactgcatgccagcctggctagcctgggcaacaagagcaaaactccacctcaaaaaaaaaaaaaaaaaaaaatatatatatatatatagttcttctgggtgatatttttaaatcttctaataggtacaaatctcagtgactcagctgtgtaagtaatatactagagcttttgctacttttctatgtaaatcttccattctgctgaagtagcagaaacttcatgtcagtgatttgtarttctctagatctgtgcctaaatccaagaggtgggcagacacctgaaagagggaaatagtctgtccattgatggcatttgtacacaccagcatccattaggattgtattctgtcagcctgtctgcttgttgaagaaaatcaacctcgtggtccctttgggacaatgcatggcttggtggcctctctacctggtgaaatctttctgcagctcccccacgttatggagttta

SEQ ID NO: 294610 - DNA, 665 bp, Homo sapiens
aagatatttcatagatatcaacagattctttcaaaggagctcagaatgcaaaagggtaacaacccttcatgatrgtggcagtgaaccatcatctccaagaaatattaataataaaatattaataaaatattttaattaataataaaatattaataaaatactttaattagtaataaaatattttaattaataatacaatattaacaaggggactcaatgttttcaagaattgagataaccagagagagacgatactgtgaatgtgagaaaacagtgtttggtggctcatttgtagcattttatcaactagttatccagtgtcgaactgcccagagagtgggatctcagctaatccagagaggtctacctatagcagagatttcggtaaggaccacattagggacccagttcatgatgataagatctgtacaaattaaggtgctgataagtagaatctcgagatccccattgtagaaaagaatgaaagccctgacagtgatttaaaccaggtgaattttcaaaaggattctaatgtgcactttgtaagtgagaatctggattcagccttacaaaaaatccagttagacaaccacacccctcaggccatctcactttgaaggggaaggaaggagttgaattacagaaatgaatcatatagtgatgca

SEQ ID NO: 294611 - DNA, 620 bp, Homo sapiens
tgtcttttggccacagtccttacattggctcaaagtctcaaaccacagattatggccagtgtcccctgggttccagatcctggcattgtgatttatagatttctcacatttgaatttagtttggaccccatcaactcagttgagatttcacttcttacttgatgccagtagaaaatggagttcccaaattcttaagtgcctagaattgttcatctggctctacattgaggtctttaaagcaaaatcaaacatcacaacatccaaactctcagcttctgaatttatcatccacctcagagccaaatgtccccaccctaatgaagtttgttttgccaatagccagggtttttcttggatctattttgctttagttgttggatcatagttaagttcaacttataaatttaactttataactaaaaaatttctttctttcattaaggatgctcactgtttttgaggttcctccttctctcctgtctccataaatagtcttaattgtctgtacaattaagatygactaaccaaagatgtatgatagggcaaagtgcccagatacaaggagatagcaacaatcttgtaactgctgtatccatcacttttcacaatactttaaaagg

SEQ ID NO: 294612 - DNA, 585 bp, Homo sapiens
ccctaactttcccttaatgatgtctccttccatctttagtccagcccagcaatgtacatgttatcctycccgtttgaagatgaagacactgaggctcagaaagatcaaacgcctttcccaaactcacagctacggcctgacggaggtagggtcaaatgcagctccactgatttcagagacggtgctgttaacacagggggctgtctgcatgttggaaagtgagatgtgctgttgctgtcacgttgcagtgggagtggggaagcaggctgtgatgagctagacccaagaggaatcagagagcaggtctccgggcttcatcctgggcatctcctagccccgctgtctgtctcataacacccacccactgcgcctgctcacctcggtttgttggctgtttttttttgaaatcatttcctggatcttagtaagtttattttccagttcctttcactttttgggactaggcccccagatgccaggtggagagaactgaaagagggagaaatccagcgtttctcaccaggcttgtcacgtagctacacaagcaaatagctacaggaaccaagtttcaattttcgtgcatgg

SEQ ID NO: 294613 - DNA, 629 bp, Homo sapiens
aaatcttactcctcatttttaatttattttatcttgctacatgttatgcatttttataagccactttaaatctcttttggaaagaggtattgatgaataaataaatacaaaataaaattgcccatttgccacatgtcagaataatcggaatcatcagccctctctgcattagmccaataacagtgccgccagaggactttgccaaatgggttctggaaagacagtgcataaactgtggttcaacctaaatcagactgatctatggatgacagaaaaaggcagatgctcaagcgagaaaatgaaaacacttagggaggtctccaggtctgtgctactacagccagctcctgaagtctttgtaaaccaaaatcccaaaataatgacctaggctttccttttgagacagtgaatagtctgaagggggattgggagagggtctcctaactcacagtacacattaatgtgatccttctaagcttcaactctgtccattttgcaatgggcagaggaatattttaaagactaaggttgcccaatggtcgctcatcttcagaggagctagaagtttggttctctccaagaacagttgcaccttgccatgtgatacatcgcctaaattcgtagactgg

SEQ ID NO: 294614 - DNA, 629 bp, Homo sapiens
aaatcttactcctcatttttaatttattttatcttgctacatgttatgcatttttataagccactttaaatctcttttggaaagaggtattgatgaataaataaatacaaaataaaattgcccatttgccacatgtcagaataatcggaatcatcagccctctctgcattagcccaataacagtgccgccagaggactttgccaaatgggttctggaaagacagtgcataaactgtggttcaacctaaatcagactgatctatggatgacagaaaaaggcagatgctcaagcgagaaaatgaaaacacttagggaggtctccagrtctgtgctactacagccagctcctgaagtctttgtaaaccaaaatcccaaaataatgacctaggctttccttttgagacagtgaatagtctgaagggggattgggagagggtctcctaactcacagtacacattaatgtgatccttctaagcttcaactctgtccattttgcaatgggcagaggaatattttaaagactaaggttgcccaatggtcgctcatcttcagaggagctagaagtttggttctctccaagaacagttgcaccttgccatgtgatacatcgcctaaattcgtagactgg

SEQ ID NO: 294615 - DNA, 524 bp, Homo sapiens
ggagtaggtatgcaaggcattatcagttccatgttatagataaggaaaccaagacacaaagatgctaagtgcctcgcattattgcaagggagaagcraaagtattaagtcccagcacattgtgctcccagaaaatcacatgtagctttgaccccaccctgagcgccagagggagtgggagaagatccagcagcagcctgtctgtggcacagagagcctggactctggttacaccatctccccttatgccttcagccctcctgctgcagctaatctctgcatgagctcatctatcccttctgctcctccagtgttttcattctgtaaccaatctcctctattaaattctctgaaataccaaaaacaaaacaaaacaaaacaaaaagaaacaaagagaaaaacccattttatgttagaggaaactgaagttcagattatcaagtacatttccagtctggtctgtagtgcattttctctctgatctactatggccatgctcaccttcagcaggaccaaaaggtcctt

SEQ ID NO: 294616 - DNA, 601 bp, Homo sapiens
gatctgagttccagtcctgatattaccactgagtaactttgggaatggtgagccagtggcaaagaaaaaccaagttcattcccagcagagtctgcagttgagctttgagacaaacaaggcttacgagttttcatgagctcccataagatttgtttttattctctcagaagtgtgcagaagctgagataatgagcctctgctgaagtgtggtctccctgaccgggccggctattctctggagtcccaggggctgtcccaggtcctgattcatgattcaaggaaaaccactgagatcactgcatccctcccataaaactatccccaaaggcaatttaaatatcccactggtttgcttagtaagaagaaaacctaaagtcagtcagctacatacrtctatttgagcaatcttagctgctttctacaaaatgcttaaacaaccttagcttagcttgactacaaggccaagataaatccaactgaattattccaccaggtaattaagacttaattattaccttggctctgaagtaaggtccacacaaactagagaaggtgtaactgggcagagaatcttgcctttgtcatcagaagttgtcatctg

SEQ ID NO: 294617 - DNA, 569 bp, Homo sapiens
caatatcatgtacacaaattttaaaacacaccacagccactatattttaatatacatatatttctaaataaatatgaaaagaataaacatagaaggatatgtattttgaatacactggagtgcacacttaagaggaacaggggaaggagtaagaatgaggcaggactaacaaaaataataaaataaaataaaatgaagaagagccttgccctgaccaatgatgatggtttatcaggaactgaggagtaaaggccattcaattttctacctaaggccccaaaatattatgtttaagtaactataaatcacttgaaatagtgcctgcattgctttatatactcagtatttagtagmtacagagcctaaatacctagacatataaatcatggattgtgagaaacaaaagattcagtggtcatataacctagctctgccatttcatagaatagaaagcgaagtccatgttgaagggaaaataaacgtttgaagtttactcagctagtgagtgcctgtcatagaggtgacaaccacagagcttgaaccataccatgaaggccttccaaagaagc

SEQ ID NO: 294618 - DNA, 458 bp, Homo sapiens
aataagaaatagccaagcactaatcagatgttcaatatagattgctctcttatcttctcttycctttccctcactttctgatgtcaaccctggacccttgctagaatttaatggccactgacaaaagcaaaatagatcaccaaccaatgatgataaaagtcaatgaaagcaatgaactgaggaagatgtataactcaatcctttgcaccaaggaataaaacaaacgagtacttacctggaaaggtggagtgcatgtatctatatcccacatagtcaagaataataaaaggatgtatttgtaagtgaatatgttattttatgaatatatgaactcctctacccagctttgattttatgaaaagttgatcctcattgcctctccatatggaaacaacaattttattaaaataattcaccaaatatcttgtagttgactgattcagaaataagcacctgac

SEQ ID NO: 294619 - DNA, 527 bp, Homo sapiens
ctcaagaaaagaaactcaaggcaggtgatgacatagttcataggagagcaaaaatagattacgaaagtgctcacaaggaattgttgggataactgggaatgtttgacttggagaagaagaaactatataaaagtgggcattaccactatctgtcttagaagagagttggttttacccaacacacagagccaagcataatactaatgtgtaggaggtatagaaagagcaatctagcttactcaacaagtagattttccaaaggcagagtggacagaaagcctccatcacataaagagctctgccactgacaaccctggaggcaccattcacatgacatctgtatgaatggccctgcctggagtcatgcagccacagcctaagaagccacatagaggcagccytcatgcacacctgagctagataacaatttggggagattattctagcacagagggaccccatattggtcccttccagtcttgatggtctaacattctctggtcttaaagaaaacatcccagacaata

SEQ ID NO: 294620 - DNA, 587 bp, Homo sapiens
agtaactccgccaaatcctcagaggaagacaagatagtgtctgtcttttacactgtaatcatccctatgttgaaccccttgatctacagtctgaggaacaaagatgtaaaagctgcatttggaaaactcrttggtaaattccaatttccaacgaatgtagcttttgatgagggtccttcatcatgacccatcttttctccaggtcttcatattctggtgggcatcatcaccagatggtgatttccctcaacaatgtacagtaggtagttttcttcagtgcctgtaagtgggcaggaactacctgtcctgtagaggaaaatgcaagtttcatgatgttggtttggatgacttcctctacctccatttttcttccccgctctctccttagccctcccaaactttctggattctagggctactctctggcatcacagagataaaaagtagcatagtcataagcgaactgattaccatatccaacctcccactccccaactcagccatgcttgggtttcttagttgcccttacttattcttctgttactgtgctcattgacactgactttactctttgtagaaaattatag

SEQ ID NO: 294621 - DNA, 1175 bp, Homo sapiens
agtaactccgccaaatcctcagaggaagacaagatagtgtctgtcttttacactgtaatcatccctatgttgaaccccttgatctacagtctgaggaacaaagatgtaaaagctgcatttggaaaactcgttggtaaattccaatttccaacgaatgtagcttttgatgagggtccttcatcatgacccatcttttctccaggtcttcatattctggtgggcatcatcaccagatggtgatttccctcaacaatgtacagtaggtagttttcttcagtgcctgtaagtgggcaggaactacctgtcctgtagaggaaaatgcaagtttcatgatgttggtttggatgacttcctctacctccatttttcttccccgctctctccttagccctcccaaactttctggattctagggctactctctggcatcacagagataaaaagtagcatagtcataagygaactgattaccatatccaacctcccactccccaactcagccatgcttgggtttcttagttgcccttacttattcttctgttactgtgctcattgacactgactttactctttgtagaaaattatagwagtaactccgccaaatcctcagaggaagacaagatagtgtctgtcttttacactgtaatcatccctatgttgaaccccttgatctacagtctgaggaacaaagatgtaaaagctgcatttggaaaactcgttggtaaattccaatttccaacgaatgtagcttttgatgagggtccttcatcatgacccatcttttctccaggtcttcatattctggtgggcatcatcaccagatggtgatttccctcaacaatgtacagtaggtagttttcttcagtgcctgtaagtgggcaggaactacctgtcctgtagaggaaaatgcaagtttcatgatgttggtttggatgacttcctctacctccatttttcttccccgctctctccttagccctcccaaactttctggattctagggctactctctggcatcacagagataaaaagtagcatagtcataagcgawctgattaccatatccaacctcccactccccaactcagccatgcttgggtttcttagttgcccttacttattcttctgttactgtgctcattgacactgactttactctttgtagaaaattatag

SEQ ID NO: 294622 - DNA, 587 bp, Homo sapiens
agtaactccgccaaatcctcagaggaagacaagatagtgtctgtcttttacactgtaatcatccctatgttgaaccccttgatctacagtctgaggaacaaagatgtaaaagctgcatttggaaaactcgttggtaaattccaatttccaacgaatgtagcttttgatgagggtccttcatcatgacccatcttttctccaggtcttcatattctggtgggcatcatcaccagatggtgatttccctcaacaatgtacagtaggtagttttcttcagtgcctgtaagtgggcaggaactacctgtcctgtagaggaaaatgcaagtttcatgatgttggtttggatgacttcctctacctccatttttcttccccgctctctccttagccctcccaaactttctggattctagggctactctctggcatcacagagataaaaagtagcatagtcataagcgaactgattaccatatccaacctcccactccccaaytcagccatgcttgggtttcttagttgcccttacttattcttctgttactgtgctcattgacactgactttactctttgtagaaaattatag

SEQ ID NO: 294623 - DNA, 321 bp, Homo sapiens
gaatacagcacgctcttcgtaagtagggtaatgtaacctatcatttaagctgactgctgatatggtttgatggtattctgccatcttatataatttctatttattatgctgggtcattgctttctgttaataaaactataataatagaaataatagagatttttatttagttttctagttcttatgctttctccctttccyttttttttttttttttttttttttttttgagacagagcctcactcagtcacccaggcaggagtgcagtggtgcaatcttgactcactgcaacctctgtctcccgggttcaagcaattctt

SEQ ID NO: 294624 - DNA, 935 bp, Homo sapiens
actagtttcataccattgtggtaaaataacatatttggtttgatttcaatcctttgtgatttattaaacctgaccaacatgtgatccattttggtgaatattctatatacacttgaatggaatttgaagtctgctggtttgggatgtagcatttcctatatatcaaataggtgaggttgcttaatagtgtttttcaaatcttatttatcctaaatgattttttgcctactctttctataaattatatatttctatacattatatataayatataaaataatataaaatatataacataatataatatataaaacatataacataatatatataacattatttctgtacattataccttattgtattttgaagctatgttattgggtgcacagatatgtaaggttgttatggtccatctgataaattcatcatcttgtcattatgaaatgtttttctttatctctggttatattatttgttccaaagtctcttttgtctaacattaatataggcaccctggctttcttatgcttagtgtttgtgtggcatataattttccgttcttttattttcaacccatttgtgtccttttccttgaactgtgtcccttgcaagtagcatataggtggatcttatttttaatwtttcattcactgcaaattgaaacagcccttctggagagaattccattattagcttattttaaatgtcctgaatttcataaatatatacwaatattatctgtgaattataaataaagctttaaaataaaataaatgttctgattctgccatttcattagtttctattctttatcctctcatcccacctatccctgagtcacataatggcttccagaactagctgccaccagcacctccccgggtcctcataccaatcctcttgtaataccagttacagattgagtagaatca

SEQ ID NO: 294625 - DNA, 385 bp, Homo sapiens
acgtttgacattaaaaacatctatgttctcccagacctgtcaggacagacagccattgttggacactttgacttcagagcaccttctggaaaagagcttctgttggatgacagcgcaattgtctgggcagaaggaccyttaaagattagagctgagagaaccctaagaaccaagaccacacagcacctctcacatcccaagctccaggagtatttgtcatattgaactcacttaggatactgggtcaaaaaggggtggattattgacttacacaactttgaggctgttcagtaaataaaaccttccaaactccctggctcccaaaattagggaccttgctaaaggcaaagataactaatgagcaaatgggaaaacaaattagata

SEQ ID NO: 294626 - DNA, 608 bp, Homo sapiens
aagttcattcaattaaaattgggaactatatcaaaagatacagttttcttgctacaagtcratatattctaagccacaattatgcattttcagaattacatgtcatgcactgcttttgcttcttttttcgtttctcctttttatacaggggataaattttgatgctttccagtttgcaagatcagttttcaatatttggaatttgctaatgtcttcaaaatttgaatgtttttgtgctttatttaccacaatttgtgacaaaagactaaagatttctaactgattttgaagaaaatacaactagaattttgagaaaatgttcacgagtggattcaatactattgtaggttagttacagagtcatattttaaaagcttaaacacttctccggtcctgtggattagaggcaggaaagcaacaatgagttgcagcactgccctgcagaagggtttattgtttatttttgtttttttttgtatctaatttcatgttgataaaaaaatttggtaactcaacttctctaactctgtctattctaaaaatgtttgtaaatttgagcaattatagcttctattttgatggaaagacaatcataacttgtttagatg

SEQ ID NO: 294627 - DNA, 601 bp, Homo sapiens
agaaaaatgtccaggaagccacattcctgtttccttgagttatcatccgagtaatatgctttttgacctgctaaactttgcagctgagactctcatgttatttggaagactaatctattggttaccagtatatacagcagaatacactgaagagatgacaaccccacacccgtctgaagctcattagcaactgtaagcagaagcttttcagccacacatcaaggtgcttgattacaacagaaaatgtgaagaaatgtgaaaaccaggaccagcattcacatctgctaagtgatcattttctgacatactaaggtcataatttcttccatgagaaatatagtaaaggggtaacaaaaagtattgctaaagaagaaaaatccagccagaaatgaaaattaagatttgacactgaagaaagaataatgatttaatagaatagacatctagatgtgaatttcatgtatccaaaaatacatggatacaaatactattttaaaatgtgttayatgaaaaaaataaacactacgaagtaaattgagcaattcttttaaagttgtctttgttttatagatgtttttgttgtatgtattataagtctttt

SEQ ID NO: 294628 - DNA, 410 bp, Homo sapiens
aaggtcttctgcaggctgccttatccactaataagattaagtgttttggcttagcaataaaaatcaatgcmatggattttttttttttttttgtcctgtgatgaagctgagagagttgaaaaggaatgggaattgttactgtttcccaatccaacattattttgttgcatctttataactattattggagagggttaaatgcacagcccaagagagatggctttccttcatttagtacagtggggtgactatagttaatagaaattaatcatacatttcaaaataactagaagagaagatctgaaacattcccaacacaaagaaatgacaaatatttgaggtgatgactattgtaattacactgatttgatcattacacattgtatgcatacaccaaagtatcacatgta

SEQ ID NO: 294629 - DNA, 670 bp, Homo sapiens
gcatgtcactcatattatctcagaatttagtaaaaataattctaagtgtgtgtcagaccatgtgcaacatactgtgtaaattatgtccttyacaataatattataactttggcattgtaatcctcatttaaccaagaaggaggctgaaattcagaaaggttaattaaattgctcaaggtctgaaggtattcaaacctacaccttatttcaaagcccatgtcttttatactacaccactaggatttcttcaacaaagtgcttttttcctccacaggaggctgattaagttttctaatttgggacctgtcagaagttttggaagtgcctaaggaaatgatgtctaacctaggctttgcctatttaccaattgtgaaatctgggtcactttacttcttttgccctcatattcttctgtcaaaaataggattaacaatatgtgtttcatgcaggaacagaaaaccaaacactgcatgtccttacttataagtgggagatgaacaatgaaaacacatggacacagggagggaaacaacacatactggggcctgttggggaagggctgtaggcgggggggtggcattaggaaaaaaagctaatgcttgctgggcttaatacctaggtgatgggttgataggtgcagcaaaccaccatgacacacatttacctatgt

SEQ ID NO: 294630 - DNA, 609 bp, Homo sapiens
ggtgtggtcagaaaaggcttctgagagaaattaacgtttaagcagaggcttcaggaataagtatgccatagtcatgggttgtgaagactcttctagacagaaagaattgcaaatgcaaaggtctgtgaaatgggatgccttgaggaactgggattggctgtagcatgagggagcagggcttagtgtgagaygcaactggcgaattccatagaaactgtcacagagccttgcagatttgcttggggacttgtggactttatttcaaaagtagagtgcgaaatgatcagatacgaatttttaaaagattcctttggctgcagtgtgatgagtggaaaggacgctggtggtggtggagttggagggaaatagaaccactttgtctatgaaacaacagttggtgcatcccagtgcatggcatttgatttccatgcaatactgtatgcttcattctaggacacatgttatgttagagaaagctagcaggtgcatggctttgatggtggtttaggactgattcttggcaaagtggcaaaattagggaaatatgtttttggtgatgcccaccttttcattggtccactcttccttccataaagtgtgacctttctc

SEQ ID NO: 294631 - DNA, 609 bp, Homo sapiens
ggtgtggtcagaaaaggcttctgagagaaattaacgtttaagcagaggcttcaggaataagtatgccatagtcatgggttgtgaagactcttctagacagaaagaattgcaaatgcaaaggtctgtgaaatgggatgccttgaggaactgggattggctgtagcatgagggagcagggcttagtgtgagatgcaactggcgaattccatagaaactgtcacagagccttgcagatttrcttggggacttgtggactttatttcaaaagtagagtgcgaaatgatcagatacgaatttttaaaagattcctttggctgcagtgtgatgagtggaaaggacgctggtggtggtggagttggagggaaatagaaccactttgtctatgaaacaacagttggtgcatcccagtgcatggcatttgatttccatgcaatactgtatgcttcattctaggacacatgttatgttagagaaagctagcaggtgcatggctttgatggtggtttaggactgattcttggcaaagtggcaaaattagggaaatatgtttttggtgatgcccaccttttcattggtccactcttccttccataaagtgtgacctttctc

SEQ ID NO: 294632 - DNA, 659 bp, Homo sapiens
tttttttccttctcacttctgagtgtatttcttttaagaactaggctttggaattatacatttttagctataatattttggcctcaatttaccaacaatgatattggaaagatgaagaaagcagatcctcaaagtctcaactgacccattaaaatcaattcaccaagaggcyaaagtactatgttcttgatcacttagagcgacaccaaaactttaattatggatttgtatttttcacatatattaagttgattgagtgtaggtgtaaatctaaattaactagattatcagcatgagggcatgggtctagtgtagaatgatggagtgtaaaccatacaacacgtaatctagggcctttggcagaagtgtgtatatatatatatatttactttttgtatatgggaatgcattttgtctgagggagccacagtgcttcagataagagcaaaaacaaccacacacaatttttcttttgtcatgaagatcaatacaagatggatagaaatacttaccagatttctttttttcctccttgctccaattctatttgtctaagctacagggaagagaaaatgccatcaaagccatgtgcaaatgaccacaagaacagagctgcccaagccccaatgccaccatccccatggttctcccatgccttt

SEQ ID NO: 294633 - DNA, 659 bp, Homo sapiens
tttttttccttctcacttctgagtgtatttcttttaagaactaggctttggaattatacatttttagctataatattttggcctcaatttaccaacaatgatattggaaagatgaagaaagcagatcctcaaagtctcaactgacccattaaaatcaattcaccaagaggccaaagtactatgttcttgatcacttagagcgacaccaaaactttaattatggatttgtatttttcacatatattaagttgattgagtgtaggtgtaaakctaaattaactagattatcagcatgagggcatgggtctagtgtagaatgatggagtgtaaaccatacaacacgtaatctagggcctttggcagaagtgtgtatatatatatatatttactttttgtatatgggaatgcattttgtctgagggagccacagtgcttcagataagagcaaaaacaaccacacacaatttttcttttgtcatgaagatcaatacaagatggatagaaatacttaccagatttctttttttcctccttgctccaattctatttgtctaagctacagggaagagaaaatgccatcaaagccatgtgcaaatgaccacaagaacagagctgcccaagccccaatgccaccatccccatggttctcccatgccttt

SEQ ID NO: 294634 - DNA, 579 bp, Homo sapiens
ggggaaagccgatagaagttgaaaagaaagtgggctgtcggcttccctgtagcggatctgcgaagttgcttgtggagatcaagatgcttcatggacattatacaattcgtccttttggtcctgttgggaaagaaactctcagctatttccactcatctcttcttcaaaaatcgtgaggttttctgaaaatagttgaaaagaacattgtgtctttttctttttctcaacatctttgtycttatttaaaacataatagtgaaacacaaaaataaaaaatgacagcaagagcagcaaaaaagtgcttttgatcttgtaatagaatgaatatctaaactctttctaattctacccttactaaatatgcttctttgggtattaaaacccctgaaaaaagcattgtaaaaatagcctgttgacatctgttgttttatatatagacagagcctaaaatatttcattcattaattcaataaattagctctttattgaggagctactatatgctgggaactctgtgtgggtagggactttgctcctcactgtattcctggtgtgtcacttaggacttggcacatagtt

SEQ ID NO: 294635 - DNA, 583 bp, Homo sapiens
ctgtttctgaatgctgttaaggctgaaaaacaacatgttgagattgagcctctactgtggaatgagatttatatatgatcttgtagacctcatcatcatcatcataatatattaaaattggaagtacagtgaatgatttcaaatctcttctcagaggggtggtgaaggttcttggctttttgttctagtctgtgttcttcctttgccagtgttggttctgtagccccacttcctttgccagtggggttctgtagccccaacatyggaggttgggatatttgattcctcgggcaagaggaaaataataggaatatgatcattcaaagcctcttttattactttcacacacacaggagaattctgcctttaattgctcagtttctgaacttttgtgatgtgaaactgggacaacagatagagtggcaaaactcaaggagctatcaaggctgtactggtttacactgtaaagccagaaagaaatagtgttccagaaaggagaggagaaaggcaggaaccagtggggcctgggctggagagcagaggtttggagtttgcctctatttcctttgttctccaggtggct

SEQ ID NO: 294636 - DNA, 209 bp, Homo sapiens
tgtgtttgacaacatcaagcaagtgcctgacacacagtatagtgttcaataactgtgaatttcctcctatttctaaattgaacattatatatagtcayaaattgatgctcagaaacctgactctgaactctgcaaatccttatgcattaaataaagattcaaacttaattccttgttgaggcagaaaagtatgctgttgcttttgggtt

SEQ ID NO: 294637 - DNA, 527 bp, Homo sapiens
acctccaccgtctgtggaaatattgtcttctgtgaaactgggtcctggtgctgaaaaggttggggattgttgctaatggattcccagtgcccaccatcataggaagagtgtgtttggcgagggtgctgatggcctcttggcaagctctcagggatggggaagtggatggcagatgcacagccccaagggcttggtgtttcctgagcctgttggtagggtccaccatctggcacacagggctgagagttcccaatctctgctttgaacaccttttgaatttgagtgggtctagggatactgtgcataaaatctctgggctaacgagttggttcccatttatcactgcccttggcttttaacatgatttctgtgccacacaaagcaataccttttatccaaggttgacttacaggacatctctcttaggcaaggtctccctaagtacaatgagggcactaataaagccaactgaatcagatgyctaatgattttttgaagatgcagaatagctcctttcatgggaagtg

SEQ ID NO: 294638 - DNA, 623 bp, Homo sapiens
taggttaggcgctgtgatcccaattctcaggggaggcccagacttgagtacagtaaatattttataataattccctggctaaacaaaacagatgcagagccctgagactcaaggtctggattgtagctccctcagtgaatcaagccactcgcctctggctcggtcattctggcttgggtgctacggatctgaacttctaaaggctgcaggacagaaggctctgcaaacccccaaattcaacatatcccaaatcaaacaaaggatctattccgtagatgtgacacaaccagctttctagtttctaaaattcaagatttcagtgtcacractgacacaagcttctcacttattaaggcccatcaggactggactgtgtctagccaggcagatcacctagtcagcatttgccatttgtcatgtccttccatttttgcacccactgtcccatgtcaagccctcattattctcaggtgaaccatggacattttgcttgcttttaaaaatctcatctggatctcattgttctagctaactttagtgtatcctttgtacaaacactctccactcatgtgccatgctgggtttctaaagcacaggtatgagcatcccattaccctgctcat

SEQ ID NO: 294639 - DNA, 1472 bp, Homo sapiens
ttatttaataaatcaataaatgaaatggctcttggttctttgaaaacactttgacccatcaatggattattggtgacaacttttaaaacagtggctagcttttccaggtgttgagccagcctcccctttcctttagtccgtgtgtgtccatggcatgtaaaaggatggagccattgtgaaagacagcacggtggttcttcaaaaagctgaacatagaattaccatatgatacagcaattgtacttctagtatgtaccccaaagaattgaaagcagagatttggacagatctctgcattcgcatgttcatagyggcattatgcacaatagccaaaaggwttgagaaacgtagcatactttgtcccaccctcacctcactacctgagagggatgtacaatacactttcatccaagaaccttcatttgacaaacatttgttcaggctaatatatacacagtaaaggccctaaaaagtcttacaataaagagcatgtttaattgtttaattttattgaacctagaatttcacaaatatattgataacagtaacttttttcttcataaaactaacattctgtggaacccaagttttcaaaagatactttagggtatgcttccctgggttatatatatgtatatatatatatatwtttttttttggggggggggagttttcaaaagatactttaggatatgcttccctggggatttttgtttgtttgtttgtttgttttttgggtttttttttttttttttttgagacagggtcttgctctgccacccaggctagagtgcagtggcacaatcctaattcactgtagcctcaacctcctgggctcaagcaatcctcccaccttagcctcccaagtagctaggactwcaaatgtgttaatacttgtttggtagcctaatatgtgatctatactggagaatgtccatgtgaacttgagaagcatgtgaattctgctgctattgggtggaatgttctttatctgtctattggatctatctgatttatagggttgttcaagtttactcttttcttattgattttcggtctggatgttctagccataattgaaagtgaggtattcaaatcttctactatgattgcattgctgtctgwttctccttcagttctattaatatttgcttcatgtttttgggtgctctgatgttgggtgcatatacatttatagttgatttatctttctggtgaattggcccctttttataattatatgatgtcctcttttgtctactgtgtcagtttttgacttaaagcttattttttctgttataaatatagctacctctgctatattttggttaccattttcatggaatatatttcttctatccttttctttcagcctgcatatgtctttaaatctaaagtgagtttcccataggcagcatatagtgagatcttgatttttaaaaatccattcagccacttgatgtcttatgatc

SEQ ID NO: 294640 - DNA, 1151 bp, Homo sapiens
gtcagggtatttagagtatctattgcctggagtattgatcatttctatgtattgggaatatttcaggtcctctcttctagctatttggaaatatgcatacatagttgttaattatagtcaccttactctgctatagaacattaraatttactccttctaactgtatatttgtacccattaaccaacctctcttcatgtctccctcaccaacccacacatcattccaagcttctagtattatatctatcattctactctctaccttcataaatcaacttttttagctcctacatatgagtaagaacatgcaatatttatctttctgtgcctggcttatttcaactaacataatgaccttctgttccatccttgttgctacaaatgacataaattcattttttatggccaaataatattccattttgtatatataccacattttctttatccatttgtctgttgatggacagttggttgattctgtacctcttctgttgtgagtagtactacaataaacatggggatgcagwaaatttataaagattttatgtatttttattaaaattatattcaatttataaattaatgcaagggaaaattatatctttatttggttgagtcttcctatccaacaacgctgtatatgctttctatttgttcagctcttcttttgtgcaatttcacaaatatgctgtgtatgtgttaaacacgtatagatatgcacacatacattcatgtaggtgtcaatgacaaagatgtgttctgagatgcatccttaggcaatttcatcattgtgagaacatcatagagtgtacttacacaaacttagtgtagcctactacacacctatagctattgttcataagctacatcctggtgtggcatattactgtgtgaaatactataggcaattgtggcacaatggtgagtatttgtatatctaaacatatctaggctggacatggtggcacacagctataatcccagcacttttggaggctgaagcaggtggattactttagtctaggagttcaagaccagcatgggcaacatggcaagacactatctctacaaaaataaaaattaaaaaattaaaaattttwaaaatcccatatctaagcatagaaagggtacagctaaaatatcatatt

SEQ ID NO: 294641 - DNA, 512 bp, Homo sapiens
ttgacaaagcacaagagtttctgatatttcctggacaccaatccatattgctttaacagaayttttttgcattgaagctgatgttccccccaaaatcattaatccagtctcagctacttctgttggttggaattgacttggcagctgtacttagagaggttcagagaaaggaaaatattctcctgtgttaattaaacaatgttgactagaaataaagacctagttagggaatcaggagttaggaaacgggagttcttttcctagagttgccagtttccattttgtgactttgatgttccctctctatgaaatggggaaaatatgctttatgagattctcgtggagatataaccatatatatatattctcgtgaggactgaataatatccacccataaagtttcactgctgttattgttatttctttctcaacattcttaatataaagtcagaagcaaggatggccagagatgctgggaaaggcatatatacggacggcaaagaagagaagct

SEQ ID NO: 294642 - DNA, 512 bp, Homo sapiens
ttgacaaagcacaagagtttctgatatttcctggacaccaatccatattgctttaacagaactttkttgcattgaagctgatgttccccccaaaatcattaatccagtctcagctacttctgttggttggaattgacttggcagctgtacttagagaggttcagagaaaggaaaatattctcctgtgttaattaaacaatgttgactagaaataaagacctagttagggaatcaggagttaggaaacgggagttcttttcctagagttgccagtttccattttgtgactttgatgttccctctctatgaaatggggaaaatatgctttatgagattctcgtggagatataaccatatatatatattctcgtgaggactgaataatatccacccataaagtttcactgctgttattgttatttctttctcaacattcttaatataaagtcagaagcaaggatggccagagatgctgggaaaggcatatatacggacggcaaagaagagaagct

SEQ ID NO: 294643 - DNA, 512 bp, Homo sapiens
ttgacaaagcacaagagtttctgatatttcctggacaccaatccatattgctttaacagaacttttttgcattgaagctgatrttccccccaaaatcattaatccagtctcagctacttctgttggttggaattgacttggcagctgtacttagagaggttcagagaaaggaaaatattctcctgtgttaattaaacaatgttgactagaaataaagacctagttagggaatcaggagttaggaaacgggagttcttttcctagagttgccagtttccattttgtgactttgatgttccctctctatgaaatggggaaaatatgctttatgagattctcgtggagatataaccatatatatatattctcgtgaggactgaataatatccacccataaagtttcactgctgttattgttatttctttctcaacattcttaatataaagtcagaagcaaggatggccagagatgctgggaaaggcatatatacggacggcaaagaagagaagct

SEQ ID NO: 294644 - DNA, 579 bp, Homo sapiens
ggacccaggggaggcagaggtgtctagactgtccagcagttggtaggaagcactgcattaygagaagggaagctccatgataaaactggtgttgcagtatgatcaaggaacaagtccagtgcaccaggattggcatcgggagaatgtgggagcaggaaactgattggatgttgccagacctgcccaggtctgatgcaatagttgtgtgcagaacacaagtaagaagggccctgaagaggaagacacgggtggtagtgacagcttgagtgtccaggaaggagggacgctgcaatattctgaacctgcagcactgggagaatgtgaactgcctctgccaacagggagagccattagagctgtagtatttacacttcaagaaatttcccataaggaaatgctctcaatactgatctctgtggaggcaatgactgaataattcagatggaccaattgttgatgagattgtccagacacagctatggagaacccttaggttcccaagtaacccctgatgtggatagacaaggctgctcagcctcttgatgcctctcactgcacaggaaatcacagtcatttgct

SEQ ID NO: 294645 - DNA, 579 bp, Homo sapiens
ggacccaggggaggcagaggtgtctagactgtccagcagttggtaggaagcactgcattatgagaagggaagctccatgataaaactggtgttgcagtatgatcaaggaacaagtccagtgcaccaggaytggcatcgggagaatgtgggagcaggaaactgattggatgttgccagacctgcccaggtctgatgcaatagttgtgtgcagaacacaagtaagaagggccctgaagaggaagacacgggtggtagtgacagcttgagtgtccaggaaggagggacgctgcaatattctgaacctgcagcactgggagaatgtgaactgcctctgccaacagggagagccattagagctgtagtatttacacttcaagaaatttcccataaggaaatgctctcaatactgatctctgtggaggcaatgactgaataattcagatggaccaattgttgatgagattgtccagacacagctatggagaacccttaggttcccaagtaacccctgatgtggatagacaaggctgctcagcctcttgatgcctctcactgcacaggaaatcacagtcatttgct

SEQ ID NO: 294646 - DNA, 579 bp, Homo sapiens
ggacccaggggaggcagaggtgtctagactgtccagcagttggtaggaagcactgcattatgagaagggaagctccatgataaaactggtgttgcagtatgatcaaggaacaagtccagtgcaccaggattggcatcgggagaatgtgggagcaggaaactgattggatgttgccagacctgcccaggtctgatgcaatagttgtgtgcagaacacaagtaagaagggccctgaagaggaagacacgggtggtagtgacagcttgagtgtccaggaaggagggacgctgcaatattctgaacctgcagcaytgggagaatgtgaactgcctctgccaacagggagagccattagagctgtagtatttacacttcaagaaatttcccataaggaaatgctctcaatactgatctctgtggaggcaatgactgaataattcagatggaccaattgttgatgagattgtccagacacagctatggagaacccttaggttcccaagtaacccctgatgtggatagacaaggctgctcagcctcttgatgcctctcactgcacaggaaatcacagtcatttgct

SEQ ID NO: 294647 - DNA, 609 bp, Homo sapiens
gaaatattatgcagccacaaaaacagctgtttttttctgggaacatggatggagctggaagctattatccttagcaaactaatgcaggaacagaaaagcaaatatcacaagtyctcacttataagtgggagctaaataataagaacttatgaacacaaagaaggaagcaacagacactgggatctacttgagtggggagggtgggaggagggagcggggcagaaaagatgactactgggtattgagcttaatacctgggtaatgaaataatctgtaaaacaaacccctgtgacacatgtttacctatgtaagaaaccttcacatgtacccccaaacctaaaataaaagtttcataaaaccatgaaaggagagagagcctaggtggaaaggaaacctggcctcagggtagccaagcagaagtttgcatgccagccaccagacgatgactcgactttggtctaaacgtaagagaaaaacacacctcccctcctggatttatactcagaatagtttagacagctcatttttttcctaagcaacttccaaagtttagccaatgattctcaaactttaatgtgcataagcctctggagagcttatgaaaatgca

SEQ ID NO: 294648 - DNA, 609 bp, Homo sapiens
gaaatattatgcagccacaaaaacagctgtttttttctgggaacatggatggagctggaagctattatccttagcaaactaatgcaggaacagaaaagcaaatatcacaagttctcacttataagtgggagctaaataataagaacttatgaacacaaagaaggaagcaacagacactgggatctacttgagtggggagggtgggaggagggagcggggcagaaaagatgactactgggtaytgagcttaatacctgggtaatgaaataatctgtaaaacaaacccctgtgacacatgtttacctatgtaagaaaccttcacatgtacccccaaacctaaaataaaagtttcataaaaccatgaaaggagagagagcctaggtggaaaggaaacctggcctcagggtagccaagcagaagtttgcatgccagccaccagacgatgactcgactttggtctaaacgtaagagaaaaacacacctcccctcctggatttatactcagaatagtttagacagctcatttttttcctaagcaacttccaaagtttagccaatgattctcaaactttaatgtgcataagcctctggagagcttatgaaaatgca

SEQ ID NO: 294649 - DNA, 543 bp, Homo sapiens
tctccgggaaaagcagcctgcatttcatcctgctccaagtcctccctttactggtctggcctgcattccctgctcctcagggtcagaatgagaagcaggcacattgacttgagtgaactcatttgctctcccggtgcctctgcacctgctccctcctgggctatgaatccagccgtttccacagcaaacagtcataaacagccggaaggggaccagggcttcaggtgcaggaggaggaatagggagtagctgcaaacactttggcaaggcccactttcacacagatgkttttagccataaaccggggggaactgcaaagcaaggagtcggccaggttactaacgacaaagcctgcaaagtgcattaggccgaggctcagacagtgactcagaacttcctcagagtgctgggctccacctcacacaagctggggtgggagaggggctggaggcttcagggacgttgggtgtgcagatcaggaagttcaggcggacaagaccctacttgtgcaaagacatggacaccccaaattcccaagtccat

SEQ ID NO: 294650 - DNA, 543 bp, Homo sapiens
tctccgggaaaagcagcctgcatttcatcctgctccaagtcctccctttactggtctggcctgcattccctgctcctcagggtcagaatgagaagcaggcacattgacttgagtgaactcatttgctctcccggtgcctctgcacctgctccctcctgggctatgaatccagccgtttccacagcaaacagtcataaacagccggaaggggaccagggcttcaggtgcaggaggaggaatagggagtagctgcaaacactttggcaaggcccactttcacacagatggttttagccataaaccggggggaactgcaaagcaaggagtcggccaggttactaacgacaaagcctgcaaagtgcattaggccgaggctcagacagtgactcagaacttcctcagagtgctgggctccacctcacacaagctggggtgggagaggggctggaggcttcagggacrttgggtgtgcagatcaggaagttcaggcggacaagaccctacttgtgcaaagacatggacaccccaaattcccaagtccat

SEQ ID NO: 294651 - DNA, 543 bp, Homo sapiens
tctccgggaaaagcagcctgcatttcatcctgctccaagtcctccctttactggtctggcctgcattccctgctcctcagggtcagaatgagaagcaggcacattgacttgagtgaactcatttgctctcccggtgcctctgcacctgctccctcctgggctatgaatccagccgtttccacagcaaacagtcataaacagccggaaggggaccagggcttcaggtgcaggaggaggaatagggagtagctgcaaacactttggcaaggcccactttcacacagatggttttagccataaaccggggggaactgcaaagcaaggagtcggccaggttactaacgacaaagcctgcaaagtgcattaggccgaggctcagacagtgactcagaacttcctcagagtgctgggctccacctcacacaagctggggtgggagaggggctggaggcttcagggacgttgggtgtgcagatcaggaagttcakgcggacaagaccctacttgtgcaaagacatggacaccccaaattcccaagtccat

SEQ ID NO: 294652 - DNA, 643 bp, Homo sapiens
tgtcatgccactcctggctgggagagtatttattcctatcctgaacattcatagacagaaccgtggaggcagggtgaagggagacttccaaaggccacccaggacactgagagcaaatgctcacagagaacttctaatcagcaccttataaactagagaagttagggatttagtgatggaaaagataggggcaaggggtaagttggatcagtgggcatgaactcactccacagtagagcctgaaaaggaaagagggagggaaaataaaaggctactttccatgatcaataataaaattgtagaagccattctgccatatgrtcaatgaagctcaaactctgaatgcccctggaaagcaggtgttggctctttcagaaaggaatggttcatttcatttgaggtccttacgtcatttaacagtcaccccttggtatcattccagagaaatgtattgtcctggttcaactaaatttccttcctagacactgaaaagtggcacctggcaaagaatatgcaaacagcaggaaggtggggagggatgtccctgactccctaggctcgtgaaatgaccatgggtggcatgctggtcctccctgaacctcagtcatacacaactctccatggggaacagactccatgtcac

SEQ ID NO: 294653 - DNA, 319 bp, Homo sapiens
tcacccttcaaaacaaaatataacaaaacagagacagctcaaagaatctaaccaagccaaactcctcattatatagccaaacccaactctcctattagcaggagaaaggaaggcagcttttttgtgttacaagagatgttggggccatgaggtcttatgggactctgaattgcccctgcttatctgaccctaccatcagccagcaatgtgacccaaggcagtcacagaatgatgtgcttcargatcttcacctgtgagataaaattcatgaatgacacaagggccaggttactgtctctttcttccctaggctgtcttc

SEQ ID NO: 294654 - DNA, 496 bp, Homo sapiens
ggtctggagcagatgtgcataataactagttagttgctcccagcaggatcagaaacagctttgggggagcagaggaatatgggttggtgtgtttcagaagaggcaccagttaatactcttccaataaaaatgatgtgtcaacagtgttcagcctcaaccagtgctttctcacagaatctgcttggtaagttcagttcacaatgtgtttacctttcatggcaatgcacgatgcaattaytgggtaggtcactgtcaagcaaaaacgagatataattacagagaaggcattaatgcccaaagagtacataaagcagtaagtagcttctgaggctggttcaatgcagaagtaaaactaacaggtttgctaacagctaaagacttttaattgcctcatattttctgcagctctgaccagcatccttcttacacgacaaaaaaaaaaagaaaaaaaaaaagaaaaaaaagtgtgcagctccaacagagtgaaaatgacaac

SEQ ID NO: 294655 - DNA, 496 bp, Homo sapiens
ggtctggagcagatgtgcataataactagttagttgctcccagcaggatcagaaacagctttgggggagcagaggaatatgggttggtgtgtttcagaagaggcaccagttaatactcttccaataaaaatgatgtgtcaacagtgttcagcctcaaccagtgctttctcacagaatctgcttggtaagttcagttcacaatgtgtttacctttcatggcaatgcacgatgcaattattgggtaggtcactgtcaagcaaaaacgagatataattacagagaaggcattaatgcccaaagagtacataaagcagtaagtagcttctgaggctggttcaatgcagaagtaaaactaacaggtttgctaacagctaaagacttttaattgcctcatattttctgcagctctgaccagcatccttcttacaygacaaaaaaaaaaagaaaaaaaaaaagaaaaaaaagtgtgcagctccaacagagtgaaaatgacaac

SEQ ID NO: 294656 - DNA, 450 bp, Homo sapiens
atgaaatgaggatatatcacccttgcctctgtggtgacatgcaccatggacagcctcagctccttctgttcaascagaagttctgactcccagtgtcctcctttctgagaacccaccagagatgttgctgtcctgttgctgatctcagacagctctgactgtctatctagactgggagattagccccaaaggaggtagaatgaactacccagttgactccagggaggaagttttgccctgaaaggggttttatttgttacatgcaagctaaattgttgtaacaaagacactccaaaatatagggtcttaagacaaggttcatttctctctcaggtaagcaggtgatgccaggactagtaggtggctctgccatcctcgacatggagcttccatccatgtgcccaagacagctgctctgatccctcatctcccagccaggggagagaaaga

SEQ ID NO: 294657 - DNA, 588 bp, Homo sapiens
ctatatattttggggagatactttaagactatgccaatatcctgtttctgcttacaaattttcccacaaattttgaaatccactgatggatcttgcctgcagcatatatcactgatttactagtgattttctttttttctcattccttctgccattattaatagaattctataaggaagagttgtcacttctccctcgtgtatttacttattcaattatttatttctatcagtttggacacatggatccttgttttattctgtgtgttataaccaatactgttattattctgttgctcacattgttccagctttggccattgggagctctttcatgttgtgtcctctgccctctcagtttactcttatcttttyttgagaccatcaagatgctccagttcatcgggtattttctctgccccagccctggaatcaaccatttctccaggaggatcatgaaatttggatcaagatctttatatttactttcatattgaagaaactgtgtaaaacagagccaaaccctgtgaataaaattggtgaacatccctagcacaactgctttgaacttaaatagattccaagcccc

SEQ ID NO: 294658 - DNA, 588 bp, Homo sapiens
ctatatattttggggagatactttaagactatgccaatatcctgtttctgcttacaaattttcccacaaattttgaaatccactgatggatcttgcctgcagcatatatcactgatttactagtgattttctttttttctcattccttctgccattattaatagaattctataaggaagagttgtcacttctccctcgtgtatttacttattcaattatttatttctatcagtttggacacatggatccttgttttattctgtgtgttataaccaatactgttattattctgttgctcacattgttccagctttggccattgggagctctttcatgttgtgtcctctgccctctcagtttactcttatctttttttgagaccatcaagatgctccagttcatcgkgtattttctctgccccagccctggaatcaaccatttctccaggaggatcatgaaatttggatcaagatctttatatttactttcatattgaagaaactgtgtaaaacagagccaaaccctgtgaataaaattggtgaacatccctagcacaactgctttgaacttaaatagattccaagcccc

SEQ ID NO: 294659 - DNA, 627 bp, Homo sapiens
atatttaaggtggtcaaatgtcagatggagaagagttggtccaggcagagggatagcagctagggaagcttgagttagggaagtgctaactgtgtttcaaaagtggaaataaagctgtatggcttgggcatgaaaaatgaggaagggtgtggcataaacggatttcagaggcctgagcacagtcacggcaatcctattgcatactgggatttggattttatcttaaaagtcatggaactcactggagagatttaaggagactagtgaaacattttggtttatatttttataaaatctttttgctgtatgttttatgctataaaaagaggccaaagagttaggggaaaggcagattattaaaaacctgtgacttattgtgattctccattttaccttccaaaaatgtggacatatctttgacttctctrttttctccacctactctaccattctgtgatcaagttttgaaaactttagattcttaacatctctcataggtatgatttcctcttctaccctacatttactaccttaaattagggcttcaaaatcttttatctgaactattacaatacagtacaaattgtattgtacaatagtctttctaacacatttctatgactccta

SEQ ID NO: 294660 - DNA, 627 bp, Homo sapiens
atatttaaggtggtcaaatgtcagatggagaagagttggtccaggcagagggatagcagctagggaagcttgagttagggaagtgctaactgtgtttcaaaagtggaaataaagctgtatggcttgggcatgaaaaatgaggaagggtgtggcataaacggatttcagaggcctgagcacagtcacggcaatcctattgcatactgggatttggattttatcttaaaagtcatggaactcactggagagatttaaggagactagtgaaacattttggtttatatttttataaaatctttttgctgtatgttttatgctataaaaagaggccaaagagttaggggaaaggcagattattaaaaacctgtgacttattgtgattctccattttaccttccaaaaatgtggacatatctttgacttctctgttttctccacctactctaccattctgtgatcaagttttgaaaactttagattcttaacatctctcataggtatgatttcytcttctaccctacatttactaccttaaattagggcttcaaaatcttttatctgaactattacaatacagtacaaattgtattgtacaatagtctttctaacacatttctatgactccta

SEQ ID NO: 294661 - DNA, 627 bp, Homo sapiens
atatttaaggtggtcaaatgtcagatggagaagagttggtccaggcagagggatagcagctagggaagcttgagttagggaagtgctaactgtgtttcaaaagtggaaataaagctgtatggcttgggcatgaaaaatgaggaagggtgtggcataaacggatttcagaggcctgagcacagtcacggcaatcctattgcatactgggatttggattttatcttaaaagtcatggaactcactggagagatttaaggagactagtgaaacattttggtttatatttttataaaatctttttgctgtatgttttatgctataaaaagaggccaaagagttaggggaaaggcagattattaaaaacctgtgacttattgtgattctccattttaccttccaaaaatgtggacatatctttgacttctctgttttctccacctactctaccattctgtgatcaagttttgaaaactttagattcttaacatctctcataggtatgatttcctcttctaccctacatttactaccttaaattagggcttcaaaatcttttatctgaactattacaatacartacaaattgtattgtacaatagtctttctaacacatttctatgactccta

SEQ ID NO: 294662 - DNA, 610 bp, Homo sapiens
ctcagccacaacttctctctgcaccagagtgggcaccaggagcagggagaggccagggagtgggaataggcacttttgaatctgcaggggcaggggactttctgggcccctgagagcacatggatgcctgggtccaaagccatggctggacagctgcatctgtgcctgagagcaccgagctcctgccccgccaactttgtagggaggagggctccctccrgttcctggttcccactggctccatggagtacacagtcttggctgcccctcccttgctgcagctggccatcccagtggtggctgctccagatggcccctgcctccatcacagttacaaagttctctggattttaggtactcattttgaggttcctattggttacctcttatgtggatgaaggatttggtctgtggctaactgaaggctgaggtgaattggtgccctgtacatatgaagatattgtccctgcttggccaagggccagtccaaggcactctccatttccatctgagatgtggaggaaggggacgtgctgtagggagagtagtctttgatcctttgttattcagtgtagggtttttttttttccttttggtttagctttaggaa

SEQ ID NO: 294663 - DNA, 1080 bp, Homo sapiens
ccataagagtttactctacatagtttaatttgtcccttgaatatttgatgtcagaacaaaatacgttttacagaaatatctgcccacacagatgattccggtgatttagacattgtctttaactttaacccctaactgtgaagtgctatagtcatatgtgctccaattatgcaaatattatgtctacaatttcgtggaattttttaaaayctgtatttgagtattttatatccagactttaatgaaaaaatagacaaattaaaaacacagattaaaaaacaaaagagtgagtgcttgaaaacaatgcaaaagaacacaaagaaaatcatcaaagaagtttagggaagtattaaaattagcagaaattaaaataacacacagattatcaaaattatcatctttttaaaatgacttgagagcctggacatgtgtttctggggaggtagatgaagctttctcttcaacagtgtcaaatgaagctttctcttcaatcgtcaaatgcagccacatgtggcccatgtgactgcwggatggtttctcatgaatggtttaggaccatccccttggtactgcccttgtgatagtgagttctcatgagatctggttgtttaaaactatgtagcacctccctcctttctctcttcctcctactctcatcatgtgacatgcctgcttccccttcaccttcttccatgattgtaagttccttgaggcctccccaagagccaagcagatgccaccatcatgcttcctgtatggcctgcagagtgtgagctaactaaacctcttttatttttaaattactcagtctcatgtattgctttatagcaacgtgagatcacactaatacaattctttttgtcttttgtgcctctgaaggaagaaatagatatccactgaaaaatgtaaaaaatgcattagtagttaaacacatctaaattatttatttgcattagtataagtggaataattaaaaaaawtatttatatatttgttacttttttattgccatgatgaagtaacagagaccagattatctttctactttaaacagttaaaacacaaaatatttgaaatgat

SEQ ID NO: 294664 - DNA, 535 bp, Homo sapiens
attgctgtatagcaggggcctgatccttgtgctaaacccatcctgatgtctgtttttgtgaaaaaggttttattggagcttggccacaccatgtttactattgtctatgattgctttcaccttgcaatgcagggttgaacagttgcaacagagaccctgtggctggcaaagyctaaaatatttactcgctgaccctttatagaaaagtggctgacatgtcgtagagtcaactgttaattcatatgactattttttaaattggatcattagcttttgtcatctcaatatatttaattgtgtgcatgttagcatagaaatggcaaaggtaaagaaggaaaagaagtaaaactttattgctttgggacattgctgctaatcactaatttcatgtttacaattacagatctctgctacattctcgcagacatggtctgcatttgaaataaggatgctgcagttagatctatttggaattacttttactaaaagtttgatatttggttctagaaatgggggtgaagagacaaagggctaa

SEQ ID NO: 294665 - DNA, 512 bp, Homo sapiens
aactagggttttctgtgtctcagtcacagtctgaaatgttttytctttttgtcattctgttcttcccacctccataccccaagcaggaatcaattacttctgactgttgtttgatatcagttgctatatcaacaatattttaggttcttactacaattcaccaaaagttaatattttaaatatgaagtcttttacatcatcttagcataaattgacacatttctgctattactcaatggcttctttctattaattatctttgaactaatctctgcaaattaaagattctaagagatgcaagtgaatggtgttttcaaatataagcatgccggacaaatttccttgtctgtaaagcctgtccattgcactagagcgtggcatgttacaaacctcactggcttgggcaagcagaccaatacattttgaaatgtgtgctgtctgcaacaccattattcacaagtttttttcccatgtacatctcccactagcaactacattaggctacagcctcc

SEQ ID NO: 294666 - DNA, 618 bp, Homo sapiens
ttaataattatttaataatgactccagaataagtgccaaatattattttgcattccaaaatatgctattttggaatagcaatgtttccaggagcgtcattttagatgtctctttcacattctaaagtcaaaattatggacaaatgtggttagaaactcaacagtcataatgtctgttgtagtttcaaatactctgggaaaaaaaaaaacaggcaattgatttggaataggcttgaaagctaagttagaggtttattttgaatttagatmttttgcttttagcttttccaataaaaaatattagatgacatttcagttactattgctgcaaaacaaaccacacaaaacttggagttgaaaacacaccattttcttatgctcagaattctgtaggtcaaaaattaggacagggcacaatggagctatcctatctgcttcacaatgtctgagactcacctgggagtattccagcggggaactacattcctctagagccttgttctcatggctttctgacaccagagatggggtgactgaaaggacaggctctgctaaggatgttaactggagcacctacatgaggctttttcatgtggtttgggattctcacaacgcaatg

SEQ ID NO: 294667 - DNA, 484 bp, Homo sapiens
ataaatgatactaattttttgtccatttgaaatatgtaagttgtgttgtaacaaattatcctgtcaagtgtaatcaaccatccatgtagttgagcttctgggatcaagaaagtatatttaaattgattcctatcattactagtggggcacrtctaattcaaatgtaaaaagacacatcacacaatcaacttgctgctgatgacaaggcctggggtcccggccttctccccctattcctctgcctgcttcccaccgtacctacagcagccctctagcctgggggcgcttgttagagtagatgggaaagtttcaagtttgcagcctgtgggattactgcttggtgtatggagcactttgtctgtacccttggtttctttctttaggtcttaaatgatggcagaaacatagattatacctcctctgctcccctcagagattggcttttggtgaggaattcagggctttccctacatcttttctcccc

SEQ ID NO: 294668 - DNA, 484 bp, Homo sapiens
ataaatgatactaattttttgtccatttgaaatatgtaagttgtgttgtaacaaattatcctgtcaagtgtaatcaaccatccatgtagttgagcttctgggatcaagaaagtatatttaaattgattcctatcattactagtggggcacgtctaattcaaatgtaaaaagacacatcacacaatcaacttgctgctgatgacaaggcctggggtcccggccttctccccctattcctctgcctgcttcccacygtacctacagcagccctctagcctgggggcgcttgttagagtagatgggaaagtttcaagtttgcagcctgtgggattactgcttggtgtatggagcactttgtctgtacccttggtttctttctttaggtcttaaatgatggcagaaacatagattatacctcctctgctcccctcagagattggcttttggtgaggaattcagggctttccctacatcttttctcccc

SEQ ID NO: 294669 - DNA, 555 bp, Homo sapiens
tgtcacatataaactcacacaaacacatctactcagtcgtgtcctggtccaactcttttggaaatggactcatcagacctgtcacaatatggaggaaatatttgaagtcgattttaatccattcccctggccacagtcatttttttaatcgtcgaatctgaaatgttgatctcaaaatactatcacttttttttacgcagacttcatcttcagagcaattttaaattgaaagagagagaaacacatatttttcattctctcctttatggcgatccagtctccagcctggagggagtggaaagtagcaataaggaagatcrgatggcgtgaacataaaacttgaggtggcttctaatgactttaccaaaaagcaaattcaagtatttccccacatttagccatctcagcaagaagggagggcaaaactcctagaagtagaaagcgagggatttagtgtgccttgaaaactaacaggtatttcaaggacactgaagcagcaagtgagaaggaagctgggagctctgatttggggtggttctgcagaacaatgccgct

SEQ ID NO: 294670 - DNA, 583 bp, Homo sapiens
taagtcttccaaaatattcaagtcattcttgataattccaatggatgctgaaaagacatttgataaaagtcaatacctrttcacattaaaaaaaaaaatacggccaggctcagtggctcacacctataatcctagtgctttgggaggctgagttggaagcctcactcgaggccagaagtttgagaccagcctggacaacatagagagacccatctctacaaaaaaaaattttttttaattagccaggtgtggtggcctggagtccctgctacttcggaggccgaggcaggaggatcccttgaccccaggagttaaggctgcaatgaacaccactgtgctccagcctgggcaacagagcaagaccttgtccctaaaaaatagatgaataaataaataaataaataaatacataaataaataaataaataaaataaaaattttttaagtttaggaaattgggaataggagatgacacccttaatcttataacctatattattaaacatgatacaaaatctattaaacatcataattaacagtataacttgagaatcattaacaatacagtaaaaaatgaaataaa

SEQ ID NO: 294671 - DNA, 583 bp, Homo sapiens
taagtcttccaaaatattcaagtcattcttgataattccaatggatgctgaaaagacatttgataaaagtcaatacctgttcacattaaaaaaaaaaatacggccaggctcagtggctcacacctataatcctagtgctttgggaggctgagttggaagcctcactcgaggccagaagtttgagaccagcctggacaacatagagagacccatctctacaaaaaaaaattttttttaattagccaggtgtggtggcctggagtccctgctacttcsgaggccgaggcaggaggatcccttgaccccaggagttaaggctgcaatgaacaccactgtgctccagcctgggcaacagagcaagaccttgtccctaaaaaatagatgaataaataaataaataaataaatacataaataaataaataaataaaataaaaattttttaagtttaggaaattgggaataggagatgacacccttaatcttataacctatattattaaacatgatacaaaatctattaaacatcataattaacagtataacttgagaatcattaacaatacagtaaaaaatgaaataaa

SEQ ID NO: 294672 - DNA, 576 bp, Homo sapiens
ttgggaggaactgacatcttgttagtattgagtcttccaatccatgaatgtgacatttatttagatcttcattgattttatcacagttttgtagttctacatacggatcctatatttattttattagatctatacataaacatgtttttttgtgtgccattgtaaatagtgttgtgttttcatttcaaatctcaattttttatttttgtatatagaaaagcaatagactttcatatattaaccttgtatcttgagataattttgtaattgctcacaagttccagaattttaaaaatgtattttatttgtttatttattttcttattttttagaggcaaggtctccctctgtcaaccaggctagagtatagtcatgcaattatagctygctgtaagcttgaacttctgctgggctcaagtggtcctcctaagtcagcctcctaggtagctgggattacagacatgtgtcatcatgcctggctatttttttaaaaaattttattatagagacagtcttactatattgcccaggctggtctcgaactcctggcctcaagccatcctcttaccttggcct

SEQ ID NO: 294673 - DNA, 999 bp, Homo sapiens
acgtcagcctagtgagatgctcagcgccagaggaaccagttgagtcatgccagatttttgacccacagaaactgacagataatacatgtgttaagacactaagccactaagtttcagggtaatttgttataaaccaatagataactaatatacctcccgacctttggcagttgacctcttccaaccccaacttcagatatccactagttaacagatccctctgtcattataaatttgttttcttttcaaaaatttcaaataatttagtatttttttctgaattgtccatcttgttgtatatattargcatttgttcatgtttattgctgagcaattttccattgtatatatatataccataatttatttttccgttaatccattgataaatatttgggttgtttacagtgttctggttattattaataaagcagctatgaacagccttgtataatctttatttctagaaatggaattctgggtcatatggtaagagtagwacgtcagcctagtgagatgctcagcgccagaggaaccagttgagtcatgccagatttttgacccacagaaactgacagataatacatgtgttaagacactaagccactaagtttcagggtaatttgttataaaccaatagataactaatatacctcccgacctttggcagttgacctcttccaaccccaacttcagatatccactagttaacagatccctctgtcattataaatttgttttcttttcaaaaatttcaaataatttagtatttttttctgaattgtccatcttgttgtatatattaggcatttgttcatgtttattgctgagcaatwttccattgtatatatatataccataatttatttttccgttaatccattgataaatatttgggttgtttacagtgttctggttattattaataaagcagctatgaacagccttgtataatctttatttctagaaatggaattctgggtcatatggtaagagtag

SEQ ID NO: 294674 - DNA, 566 bp, Homo sapiens
tctcttttgccctagcatgaaaaccaacgcacatgagtgaatgggttagcgaagtagccacaggaaaacactttagttgtgctgcttttaggctgtgtttggaggaggacagtgagaagggcaaaggatggagcactggagagaggggctgtgggtagacccaggaccaggacttgggtttcttgactccatcctctgggtgaccttaggcaggtgcatcagtctccttctggttggatgacacaatctctggtcacttctagtctttccttctgtggctcactagatctgcagctgagagcgccgagactgtctccctgggkgggatgctctggctgggccggacctggcttggcagcagtgcctgagcagcacagaggtgctctgcttagctcgggggctgcctggctctctatggagcctctggggcaggatcgttagcgaggagaggaaagaggaacaaaggggaaccttcccaattattaataaggcagcaaccccatccatcttaatgagacagggcggaaaaaaccagtggccaggcatcgcacacacaataggctacg

SEQ ID NO: 294675 - DNA, 604 bp, Homo sapiens
cacacattttttcttccacccaagagaatactgatgctgttctatgtatctatctctttttctttaaaattaataatctttatttctttgcaaaggtgatatatggtcattgtgaaaatttctgaaaatgaagaaaagcagaaagaagacagtgtaaagcacctataatctcaaaacccagaggtggctaacatttcagtgtacctatttccaggatttttagctttttttcttctttccttccttcccttcttccctcctttctctttcttatccttctgttctgtctgcaaaattggattcatactatatatttctatcccayattctccataaacattccctcctctctctctcccctcccctcccctccccctccctccctccctcccttccttccttccttccttccttccaaaagcctttattttttgaatgcttagcaatgtactatgagacacataggaagcatggtctgacttttctttttacataaaacatcaaagttacaaaggacatgagcctatctagcccaatcccttcacatgtttaggacctgtgactcagagaggagaagagattgtggaaggccactgaggctaga

SEQ ID NO: 294676 - DNA, 533 bp, Homo sapiens
tgccttttatttttagttctcttctttctaagaggtggtatacaagtcttcatttatttatataaaaattatatttataggcatgaatatatttataatataaattataaattaattaatgtagtaataaatgaacaaaaattgtcaagcccagtttgacagaacctcgcctggagagtgggcaggtgtgactgtctgagtggaggggcggggacrgtgaccttggcctcccagtttggggctccgctgagggtgtcttcctggctgcttacgataggaactgatcctaggatggcctagtaagaaattacagggagcagagtttcccttcaaggaaggaagaacattctagtggattgtctgaacttggtgactatatcccaaacaaataaaagggatgctccgttagcttctgtcaagaatggtgcagaggactgggtgcggtggctcacccctgtaatcccaacactctgggaggctgagacaggaggattgcttggggctaggagttcaaaaccagcctggataacata

SEQ ID NO: 294677 - DNA, 451 bp, Homo sapiens
taggactgtggttcttatttayaagtagttcagatttattagttccctttttacagtttctttctaattttattggctcatggctgcagaatgtagcctatcaaagctttattgtttttatcatgctcattttttataaagttttatgcatattttaaaaataatgtatgttctctatttaaaggatttaacattatgtattgattgtatcaaggctattgatattattatttagttcctctatgttctgactttgaaaatgtactacatagatttgaatttatgagagacaaatctggacatcctgcaggctcattgccttctccctcttagaagcctagtagagatttgactccaatggactgagccagcctggcaagagacaggcagttgtcatcattcccagcaagcaaagctgttcccagggccctccccatgcagactgctagca

SEQ ID NO: 294678 - DNA, 1102 bp, Homo sapiens
cccagcaagcaaagctgttcccagggccctccccatgcagactgctagcactgatcttggacctggaagatctcaagacacattttagttactcagaaaaaccaggttccctagcctctgttggacttaccccataaatatgtaatgtgatgggcagtggggcttgttctctgtggagygccctgggtggaacattagtcctctggccatgctgcacctaggatgtttagaaccagactattctgtgggataacaaccgtttcagggcagtgctctgctgctctctgcttataagttttctcccaacaaacccaatgtcaccgcagcacagggcattagtgatgtgtgctcacggccctggcatgacacaagtctacccctctttagagggataattaagcctcccactaaaattttgggttttttttaatcaagttctctttttattttgttttggatttattgccacagatggcatacagtttggtgcataaatgtttatgacttttttcatcaattgtgtagttaatcattatagagtgtctccctttattccactgagtgtttwcccttcatgcaggacagacagcaaggccagcaacatgacacagaagcacagggggctgggagagcgcagagcaggcacttctagcctggtcaggcaggagtttgggggttgggcttgagacaaagcatcctcagaggaagtagcattgaagctgacaatcgtaagctgaaaatgcagcagggaactaaaggaagwtagggaaaggagggccagcgagggtttcagacacgtgcaaaagcctacgatgagggaaatctgggggcatccaaggaaattcaagtaatttttacctactgatgaccatatagactgtcttctcttgaattattctactttttcttcctataatttatttatgtatttaatattttttagagacagggtcttgctatgttgcctcagctggactcacgggctgaagcgatcctcccaccataacctcttgagtagctgagattacaagtgcttgccaccacacctggctttacagaattttttcatgtgctatttattgggcttggctcaattatcctt

SEQ ID NO: 294679 - DNA, 558 bp, Homo sapiens
gcctcagctggactcacgggctgaagcgatcctcccaccataacctcttgagtagctgagattacaagtgcttgccaccacacctggctttacagaattttttcatgtgctatttattgggcttggctcaattatccttgtgcctccagtcacaactggactctaaatgctgttaatccagagacaaaatggattccaagtgaagggtctcttgcttcgcagccaggattcagtaccagccrtctccctccaaacggggctatattcatgagattttgctgggattccttattcctattttgtattaacacctcatgtgtttcccaggaatggaatcatgagtcagccttctgtgtcttctcccaagtccaatcacccttctccctgtggggtctttcagcttcaattcaaaaaactttttcaattttatggaatagtttattcgtgtgtgtgtgtgtgtgtgtgtgtgtgtgtgtgaataaggtgattgcttaacttggtaacacggctgttattcacattgcaacaccctggcctttgacttcagagcttgtgtgt

SEQ ID NO: 294680 - DNA, 558 bp, Homo sapiens
gcctcagctggactcacgggctgaagcgatcctcccaccataacctcttgagtagctgagattacaagtgcttgccaccacacctggctttacagaattttttcatgtgctatttattgggcttggctcaattatccttgtgcctccagtcacaactggactctaaatgctgttaatccagagacaaaatggattccaagtgaagggtctcttgcttcgcagccaggattcagtaccagccgtctccctccaaacggggctatattcatgagattttgctgggattccttattcctattttgtattaacacctcatgtgtttcccaggaatggaatcatgagtcagccttctgtgtcttctcccaagtccaatcacccttctccctgtggggtctttcagcttcaattcaaaaaactttttcaatkttatggaatagtttattcgtgtgtgtgtgtgtgtgtgtgtgtgtgtgtgtgaataaggtgattgcttaacttggtaacacggctgttattcacattgcaacaccctggcctttgacttcagagcttgtgtgt

SEQ ID NO: 294681 - DNA, 570 bp, Homo sapiens
taatattgtactatagttttgcaaaatgttaccattgttggaagctaggtaatgggatgatagtacggtagggtccttttgtattaattaaaaaaaaaaaaaaaaaaaaaaagacagggtctcactctgtcgcccaggctgagttccctgcagcctcaaattcctgggctttttaaagtgatcctcccacctccatctcagcctcttgagcagctaggactacagattatttctttcttttttttttttttttaacagagtctcrctctgtcacccaggctagagtgtagtggtgcgatctcagctcactgcaacctccacctcccgggttcaagtgattctcctgcctcagcctcctgagtagctgggattacaggcgtgcgccaccaccacacctggctaatttttgtatttttagtagagacgggtttgtttcactatgttagccaggctggtcatgaattcttgacctcaagtgatctgcccacctcagactcccaaagtgctggaattataggcgtgagtgtatctatcacttcttaaaacagcatatagctgtaaaatggtttc

SEQ ID NO: 294682 - DNA, 509 bp, Homo sapiens
ttccagtataattcagcttaattcagtggaagggcagcatggtatagctgagtggttttcacagtgacattcctggacaccagcattagcctccctttggaacttgctatatatgcaaactgttaggccctaccccagacctactaaatcagaaattctggagaccagcctatttcttaataagagattctattttaacaagtgaatctgaggcatatttgcgaaccaccataagcagtgggccagaagtccacaggcctatgtctttacaaccagttctgcatcttaatggcagtgtaattttgggcaagacatttaacctctcattgcttcagtttcttygactataattggaaacaaattatctgcactacatacctcactaggttgtaatgaaaattaaataagctaagaaaaggccatgctatagagaactatctgtgttatagagagaaaagcatgaagtgatcatgctggatattattaacatgatcagtgtgatagaggtg

SEQ ID NO: 294683 - DNA, 456 bp, Homo sapiens
ggtgagcctgtcaaatgtctttaactccgttatggtgtttattatttctagcattttctttttatttcctgttagagttttttcccctctgataacattacccatttgttcttgcatgttatctgctttttcctttagagcccttaacatattaataatcatagttattttgagttatctatttgataattacaacacctatatcataccagaccctgatgcttgttttgcctcttcaacctgtgtttcttcttgccttttaaagatttcttgcctgttttcttgtaacttcttgttgaaagtcagacatattgcctgatatggtttggctctgtccccacccaggagaaaytcaagctggctgcaaaaatttgcgtaagtaatgaggagacaaatgttaatccccaagacaatgggggaaatgtctccagggcatgtcagagacctttgtgggag

SEQ ID NO: 294684 - DNA, 459 bp, Homo sapiens
tgataaaatctgagttaactgcaaaaatgcagttggtgtgattgaaatcacaatttatcattgatactaaaaatacagaactgtgtttttccttttgtaaaacagaattatatataaaactaagcattgaatgaaaaggttcaatgtcctcataggatctggctaaacataaaatatttakaggtatgtatcttaaagaacattgctatagtaaaacctgaaatacaaatatgtatatctttataccacttattattctattgcccaaaattgtcattaaaataatttttgtttacttcttctctgtacatcctaagtgaataaaatgattaaaagtattttgtacaagtacaatccgcagtgtcttactgaagcatggccttttcaaaacatcacagcttgagtgtgtggcatattctaatgtactcataattagcttgttagtgtaacaaaaataat

SEQ ID NO: 294685 - DNA, 557 bp, Homo sapiens
caatgaacctgcaccaattgactcttctgaaatttaaatgactaattccgaaaggatcaaattaagttttactgaaatcatattttggaagctttctaaaccattctggccatgaagattgggagactaataaacaaattccaaacttcatctgaagttaatttatactttgtggagctcagattcctggcttcagttacacctaagcagcgtgggcaaataagcttgatagttctgctgtttcaactttcttctctttctatttttgcaatatgaaacttgcagttgattacaaatgactgtgaagtgtggtgtacatatgaggcttaagaaaatggcacagaaaaaaaaaagtcagaatttgaratcgatatgattaaaaaacaccaccacaatatcagtggcccttatgagaaccattcagtgtgattttagtgccacctagtgttctatggtgggataaggtcttggaagtgaaaactaatccgtcatgggcaagactcagaaattaggcagctggcataaggctgtgcacggactcaaagcaggcacagtca

SEQ ID NO: 294686 - DNA, 556 bp, Homo sapiens
attatatctgcaaagaccattttttctagacaaataacatattgacaggttctgaggattgcaaggtggacatctccagggggagcattattctgattaccagagtagaatttagaaacttgagaataaatttaatayggtttggagaagagaaagaaagatgaatgtaaagagagaaagacccttttggaaacaatttaaattcctttcttatcactgaaactacagtgagagaggttactgtaattcctgtgagatgttaagtgagaaataagttcagttaaggcagaagccagactttttctagacagtaactttctaatctgggccatgagatagttaaacaacttatatagacgtaaattttcttcccgttttttaataactaccttatgtgtccttctatggctatgtaaatggaagtaaaagaaagaatagttaaaaacttcacatttaatacattctgtaaagggtgtctctctatccagtttcatgattatattctattctaaatgcctttactccatatcatgtgtctagacactagtgtttttca

SEQ ID NO: 294687 - DNA, 556 bp, Homo sapiens
attatatctgcaaagaccattttttctagacaaataacatattgacaggttctgaggattgcaaggtggacatctccagggggagcattattctgattaccagagtagaatttagaaacttgagaataaatttaatacgrtttggagaagagaaagaaagatgaatgtaaagagagaaagacccttttggaaacaatttaaattcctttcttatcactgaaactacagtgagagaggttactgtaattcctgtgagatgttaagtgagaaataagttcagttaaggcagaagccagactttttctagacagtaactttctaatctgggccatgagatagttaaacaacttatatagacgtaaattttcttcccgttttttaataactaccttatgtgtccttctatggctatgtaaatggaagtaaaagaaagaatagttaaaaacttcacatttaatacattctgtaaagggtgtctctctatccagtttcatgattatattctattctaaatgcctttactccatatcatgtgtctagacactagtgtttttca

SEQ ID NO: 294688 - DNA, 556 bp, Homo sapiens
attatatctgcaaagaccattttttctagacaaataacatattgacaggttctgaggattgcaaggtggacatctccagggggagcattattctgattaccagagtagaatttagaaacttgagaataaatttaatacggtttggagaagagaaagaaagatgaatgtaaagagagaaagacccttttggaaacaatttaaattcctttcttatcactgaaactacagtgagagaggttactgtaattcctgtgagatgttaagtgagaaataagttcagttaaggcagaagccagactttttctagacagtaactttctaatctgggccatgagatagttaaacaacttatatagrcgtaaattttcttcccgttttttaataactaccttatgtgtccttctatggctatgtaaatggaagtaaaagaaagaatagttaaaaacttcacatttaatacattctgtaaagggtgtctctctatccagtttcatgattatattctattctaaatgcctttactccatatcatgtgtctagacactagtgtttttca

SEQ ID NO: 294689 - DNA, 592 bp, Homo sapiens
atgggttattcttcctaacacacattgtttatcggtcacttttttgcttcaactccttaaattgtaccacttractgactgactcattgggtaatcaattatttcatttaatagttcattctactggttttttattggcctggaaagggtttgtgataaacactgagcagagggagggaggcagtataatacacacacaaaaaaactgtaaatgcatgcatttccacagcctattccacgatcactcccaatgataagtgttttgttgctttagggaggtgacaatgtgttactaagtgatgaagatcattgacagtgaaccctgactttccaggctcagacagggtctcaaccatttatcatccttaagatcttgacaagttactaactcttttgggcttcacattttttcctcaataaaatgggaattgtcttagcattaacctaatgggttgttttgaagtttaaataagccaacgcatataaagtgtttaaaccagtgtctgacacataagaagccctcagtagatgttaaccattatttcttcccagctctcacttatttctataaagattatcttctaaccagaaa

SEQ ID NO: 294690 - DNA, 1154 bp, Homo sapiens
ctttttgtctttgccagagtttggtgtcagggtgatactggcttcatagaatgggttaagtggaatctttcctcctcaattttttggaatagcttcagtaggattggtaccagctcttctctttatgtctggtagaattcagctgtgaattcttctggtacaggactttttttggttggtaaattcttttttattactgattcaattttggaacttgttattggtttgttcaggttttcggtttctgcctggctaaatcttggaagattttgtgtttctagaaatttatccatttmctctagattttttaatttgtgcacctaggggtattcataatagtctccaaggatcttttgtatttttgtaggataagttgtaatgtcacttttgtcatttctgattgtgcttatttgaatcttctctctctttttctttgttaatctatctagtggtctatcaatctggtttattcttttgaagaaccaacttttgatttctgatcttttgtttgaattctttttatttcattcattwgagttctctgactcttttctctagtgaagcatatttcagtatagctttctatgctcccttcagtggaagctgaacaaactgctgcaccgtttgaaacttgcattacgactgaaattatgtaaacattagccagccagccagccacattgtagtaggtggaattacacagaaaacagaatatgagttagaaggttatgtgcctwttaatgattgcaattccatgggaacaggtctgaggaacgacaatcaccagaaaacacaagcaaataagtttatgcttccttcagcttctgatttctttttcatttttttaaagggagtgagggagaacagaattacaggagttcattaataagtggccacagctttgtagcaaggatgagtttttgcttttcaaatagtacgaaccaggaggatatatattgagagagaatttatttgggttacctctggtctcatacttctcattgatcaaaactttccccatgaaagatcaacttccttttacttccaggtgtctcacttgaccattttatctttggtaagtgaagccaaatccttccaactgctatgtggaactttctctggataggtagttttgggaagaccaagggttacaa

SEQ ID NO: 294691 - DNA, 620 bp, Homo sapiens
gagttctctgactcttttctctagtgaagcatatttcagtatagctttctatgctcccttcagtggaagctgaacaaactgctgcaccgtttgaaacttgcattacgactgaaattatgtaaacattagccagccagccagccacattgtagtaggtggaattacacagaaaacagaatatgagttagaaggttatgtgccttttaatgattgcaattccatgggaacaggtctgaggaacgacaatcaccagaaaacacaagcaaataagtttatgcttccttcagcttctgatttcttyttcatttttttaaagggagtgagggagaacagaattacaggagttcattaataagtggccacagctttgtagcaaggatgagtttttgcttttcaaatagtacgaaccaggaggatatatattgagagagaatttatttgggttacctctggtctcatacttctcattgatcaaaactttccccatgaaagatcaacttccttttacttccaggtgtctcacttgaccattttatctttggtaagtgaagccaaatccttccaactgctatgtggaactttctctggataggtagttttgggaagaccaagggttacaa

SEQ ID NO: 294692 - DNA, 499 bp, Homo sapiens
taattaaaggactctaaaataaaaaatatgtgtgtacatatttgggacaaatatgtatttgtttgggacaaaatgtgagagttcaaaaaagattaaagtttgttaagatccctttcttcagaaaagaaatgtatatgcagatttactttagaatgtattactrttactgtatattaattaaatttggctgtttattattggtaactattagaagaacagaaaaaaatctaacctatatctttgcatatgttagaaatatatcaatttttaaatattcttgtataaaatatgtattattcatgtatatgtttatgttaaaatacaaaatattatccagaaacatgcacaccaaactcaccataggttgtctctgaagtgggtgctatcagaaagggttggtgatagggcttgaagagaatgcttcctcttacacagtagggccttcagtcacctcgttattttagaatagggtaaagtaccatgaacacttctttccagc

SEQ ID NO: 294693 - DNA, 552 bp, Homo sapiens
aggtgtactaaagtttaagacaaaattgtatataatatcaattaattagcattgacacaygtccaattttaattttttgtcatgtaaactttacaaaatgcttgcaaaattaaaaactgaaggaaagctaaactaatatggtgccttataaggacatcggccactacctcagtggtacgcaagcattgtgtaccctctgcaaggtattttattcacattaaattcccatgttggtgacccaggcaaaagcattaaagtgggaagaaagagcctaaggccaaataccagaatggaatgaaagaacaaaaaggatgaatgtagaaacatcaactattaaagaccaggagtttgtttcactgcactgactactttaagattaatagatgaacttcagacaagttcacagatcttctgaaaccacgtacaaaactttctaggtttgggcatttgtttcttcttctgtagatacagtgcatagtgtatcatttgaaaataaagaaaaaaaggtgaaaactaattgagcaaggtccatgaggaagcaggtaagaaaag

SEQ ID NO: 294694 - DNA, 577 bp, Homo sapiens
ggagtttgtttcactgcactgactactttaagattaatagatgaacttcagacaagttcacagatcttctgaaaccacgtacaaaactttctaggtttgggcatttgtttcttcttctgtagatacagtgcatagtgtatcatttgaaaataaagaaaaaaaggtgaaaactaattgagcaaggtccatgaggaagcaggtaagaaaaggaatcaggaagaaagggagaagtaagtcttccttctcagagttacaaaagcctcagttttggtcatcgaagtgaagaaaggtggataggcagagaaacggtcttgaataatcagatcatggaggcctgaaaaattgtttacagaccttcacatttcttcttgatttctctgaagctttctccaaatattttttgctatatatgatygctacatagaaaactgtatttctaaaaccatataatacattgtatagaatatatctataaacaatgattataaactaatttatcaataaatactaagtaagcacttaagctgattgtgatcagtgctatgttttaatattctggtcttgtaccaagaccaga

SEQ ID NO: 294695 - DNA, 1161 bp, Homo sapiens
ggagtttgtttcactgcactgactactttaagattaatagatgaacttcagacaagttcacagatcttctgaaaccacgtacaaaactttctaggtttgggcatttgtttcttcttctgtagatacagtgcatagtgtatcatttgaaaataaagaaaaaaaggtgaaaactaattgagcaaggtccatgaggaagcaggtaagaaaaggaatcaggaagaaagggagaagtaagtcttccttctcagagttacaaaagcctcagttttggtcatcgaagtgaagaaaggtggataggcagagaaacggtcttgaataatcagatcatggaggcctgaaaaattgtttacagaccttcacatttcttcttgatttctctgaagctttctccaaatattttttgctatatatgatcgctacatagaaaactgtatytctaaaaccatataatacattgtatagaatatatctataaacaatgattataaactaatttatcaataaatactaagtaagcacttaagctgattgtgatcagtgctatgttttaatattctggtcttgtaccaagaccagawaggcatatcacagaggtaaagtgcgattttcatgatatcgtatatcaaaggtacatacaatcaatatgatttatgactgttgatgctgaccttgatcacctggcagaagtagggtttgtcacatttcttcactttaaagttaaatgtccgtctctttgtccttttttcccatacattcttgataatttccataattttattaccaaaccatttgataataataataagctctcatagattaaatttccaagagctctttcatatactgttcctttatgttttagctttattgaagtttaattgagaaataaaagttacatatattcaaggtgtacaatgagatcatttaacwtatgtatatattctataataattaccatggtcaaattaatcaacacattcatcattacacatgattactatttgtgtgggtgtgtgtttgtggtgaggacacttaagatatactctcttagcaaattctgacaaaaaaaataaagtattactgattgtagtcatcatgctgtacacaagatccctaaaatttattcatcttataactgaaagtttgtgtcttttaccaaca

SEQ ID NO: 294696 - DNA, 623 bp, Homo sapiens
aacaatacccacacacaaacacatgagcacatmattcccaaaatattatgtatgatcctatgattctattttacaaatgtgtgtgtatgtatcaaagtaagggaaagagaaaggagacggctcctatactcacagaagtacatgttgtaaactgttaatattatccctgggactggctaggtttgggcaagtttagagaggtgtaagaaatttcacttttaacttcactcatttaggttaagtttgaaaacttttataaaatacatgttatttatgatttaaaacacaaggaaattaattggtaaagaagatagcactagtcatgctattttttatatagaaaatccactaaactaaatataacattatggttttgtttttgttttgtttttttggggggagtgggagatcctatgtttcccaggctggtatcaaactcctaggcttaagtaatcttcctgccttagccttctgagtagctgggattataggtgcccaccaccatgcccagaaaaacattatgtattgtatgacttcatttctgaaaattatatttgcatatatcttactcatcttttactagattatcatacattaacacaatctctatgagtagcaataat

SEQ ID NO: 294697 - DNA, 624 bp, Homo sapiens
taaaagatgttctacataaatgtgttacttcaccaatatcgtgcagccttgatcactgtagcctatayaatatctttaaatttgttacagtaatttgtccccctttatttttctttttaaaatggttttgagttctcaggtatttctatgtaaaactaagaactaaattctatataaattttagaataatctcagtgtttccaaaaattgtgctacaatgttgacaaaaattgccttaagtctgtatatcactttggaaataattgttgtatttacaatgttgaatttttcaactcattaactatatgttccattcatttaactttagattttttcatcacttttttgtagttttcagcctaaaagttctctaatgtttagctagatttataccaaactatttctcttttcttgagcagatctaaagactattgtatgtttaattttgatatatatatgtggtcattgtaaagacagtttaaataaatatttatcttgtattctgtgatgtccctgaattcactttttaattttaggatttgtgggggggtacattccttcggagtttctacatagacaattatgtcatctgcaaataagaacatttttattttgttctagtct

SEQ ID NO: 294698 - DNA, 624 bp, Homo sapiens
taaaagatgttctacataaatgtgttacttcaccaatatcgtgcagccttgatcactgtagcctatataatatctttaaatttgttacagtaatttgtccccctttatttttctttttaaaatkgttttgagttctcaggtatttctatgtaaaactaagaactaaattctatataaattttagaataatctcagtgtttccaaaaattgtgctacaatgttgacaaaaattgccttaagtctgtatatcactttggaaataattgttgtatttacaatgttgaatttttcaactcattaactatatgttccattcatttaactttagattttttcatcacttttttgtagttttcagcctaaaagttctctaatgtttagctagatttataccaaactatttctcttttcttgagcagatctaaagactattgtatgtttaattttgatatatatatgtggtcattgtaaagacagtttaaataaatatttatcttgtattctgtgatgtccctgaattcactttttaattttaggatttgtgggggggtacattccttcggagtttctacatagacaattatgtcatctgcaaataagaacatttttattttgttctagtct

SEQ ID NO: 294699 - DNA, 624 bp, Homo sapiens
taaaagatgttctacataaatgtgttacttcaccaatatcgtgcagccttgatcactgtagcctatataatatctttaaatttgttacagtaatttgtccccctttatttttctttttaaaatggttttgagttctcakgtatttctatgtaaaactaagaactaaattctatataaattttagaataatctcagtgtttccaaaaattgtgctacaatgttgacaaaaattgccttaagtctgtatatcactttggaaataattgttgtatttacaatgttgaatttttcaactcattaactatatgttccattcatttaactttagattttttcatcacttttttgtagttttcagcctaaaagttctctaatgtttagctagatttataccaaactatttctcttttcttgagcagatctaaagactattgtatgtttaattttgatatatatatgtggtcattgtaaagacagtttaaataaatatttatcttgtattctgtgatgtccctgaattcactttttaattttaggatttgtgggggggtacattccttcggagtttctacatagacaattatgtcatctgcaaataagaacatttttattttgttctagtct

SEQ ID NO: 294700 - DNA, 620 bp, Homo sapiens
tagtccccaaagtcttagctcattccagcattaactcaaaagtccaagtccaaaatctcatctgagacaaggccagtcccttttgcctataagttgataaaatgaaatataagttaattccttccaagttacaatgggggtagaggcattgggtaaatacacctgatacaagtaggagaaattggccaaaacaaaagcactataggccccatgcaaggccaaaatccaatagggcagtcattaaaccttaaagttccaaaatgatctcctttgattccatgtctcacatccaggtcatgctgatgcatgaggtaggctcccatggccttaagcaataagcaaatgggattcatccagggatgcaaggatggtccaatgtatgcaaatctatcaatgtgcyacatcataacaactgtattagtttgttctcacactgctataaagaacaaacagagactgggtaacttagaaaaaaaagaggtttaataaactcagttccacaggctgtacagaaagcatggctgagaggcctcaggaaacttacaatcatggcagaagggtgaagggagagcaagcatgtcttcacatgggggcaagagaaagagtgaagggggaagtgg

SEQ ID NO: 294701 - DNA, 234 bp, Homo sapiens
tgaaggactctgaaatgccttgggggcattttccccattatcttggctattaacattcaattctcctttacttatgcaaatttctgcacccttgaaatccttcctagaaaattragttttcttttctaccacatggtcacgctacacattttccaaagttttatgctctggtttccttttaaatataagttatctttgcttatgcaaatgacagtaggctttgagaagcagcca

SEQ ID NO: 294702 - DNA, 554 bp, Homo sapiens
tccacagatccctagggaaggggcacaatgctgccagtttcttttctaaagcatagcaacactgatctttgctccagttcccagtaagttcctcatctccgtctgagatcacctcatcctggayttcattgtccatatcgctatcagtgttttggacaaaattattaaacaagtctctaggaagttccaaaattttcctcattgtcttatcttcttgtgagccctccaaactgttttaacttctgcatattacccagttccaaagtcactttcatatttttcagtatccttatagcaatatccaactcctgttaccaattttccatattagtctgttctcacactgctataaagaaatacctaggactgggtgacttataaagaaaaaaaaagaggtttaattgattcaaagtttcacaggctattcaggagtcatggctggtgaggcctcagaaaacttacaatcatggcagaaaggcaaagagaaagcaagcacatcttcacatggtggcaggagaacgagtgaaggagaaagtagtgcagacctttaaacg

SEQ ID NO: 294703 - DNA, 554 bp, Homo sapiens
tccacagatccctagggaaggggcacaatgctgccagtttcttttctaaagcatagcaacactgatctttgctccagttcccagtaagttcctcatctccgtctgagatcacctcatcctggatttcattgtccatatcgctatcagtgttttggmcaaaattattaaacaagtctctaggaagttccaaaattttcctcattgtcttatcttcttgtgagccctccaaactgttttaacttctgcatattacccagttccaaagtcactttcatatttttcagtatccttatagcaatatccaactcctgttaccaattttccatattagtctgttctcacactgctataaagaaatacctaggactgggtgacttataaagaaaaaaaaagaggtttaattgattcaaagtttcacaggctattcaggagtcatggctggtgaggcctcagaaaacttacaatcatggcagaaaggcaaagagaaagcaagcacatcttcacatggtggcaggagaacgagtgaaggagaaagtagtgcagacctttaaacg

SEQ ID NO: 294704 - DNA, 554 bp, Homo sapiens
tccacagatccctagggaaggggcacaatgctgccagtttcttttctaaagcatagcaacactgatctttgctccagttcccagtaagttcctcatctccgtctgagatcacctcatcctggatttcattgtccatatcgctatcagtgttttggacaaaattattaaacaagtctctaggaagttccaaaattttcctcattgtcttatcttcttgtgagycctccaaactgttttaacttctgcatattacccagttccaaagtcactttcatatttttcagtatccttatagcaatatccaactcctgttaccaattttccatattagtctgttctcacactgctataaagaaatacctaggactgggtgacttataaagaaaaaaaaagaggtttaattgattcaaagtttcacaggctattcaggagtcatggctggtgaggcctcagaaaacttacaatcatggcagaaaggcaaagagaaagcaagcacatcttcacatggtggcaggagaacgagtgaaggagaaagtagtgcagacctttaaacg

SEQ ID NO: 294705 - DNA, 554 bp, Homo sapiens
tccacagatccctagggaaggggcacaatgctgccagtttcttttctaaagcatagcaacactgatctttgctccagttcccagtaagttcctcatctccgtctgagatcacctcatcctggatttcattgtccatatcgctatcagtgttttggacaaaattattaaacaagtctctaggaagttccaaaattttcctcattgtcttatcttcttgtgagccctccaaactgttttaacttctgcatattacccagttccaaagtcactttcatatttttcagtatccttatagcaatatccaactcctgttaccaattttccatattagtctgttctcacactgctataaagaaatacctaggactgggtgacttataaagaaaaaaaaagaggtttaattgattcaaagtttcacaggctattcaggagtcatggctggkgaggcctcagaaaacttacaatcatggcagaaaggcaaagagaaagcaagcacatcttcacatggtggcaggagaacgagtgaaggagaaagtagtgcagacctttaaacg

SEQ ID NO: 294706 - DNA, 578 bp, Homo sapiens
actaatgttgacggcagaaaaagacagatgcccagctcaaggagaaagagagagagttaattcaccatttctctgccttttttttctatctgggcccaaaacagattgtataatgccactcacattggtgagtgggtagcttctttactcagtcttctggttcaaatactgatctcttacagacacacacagaaatcattcyttaccagctatcaaggcttcccttaacccattgaagttgacacataaaattaaccatcataaatttaccccttgtcaatttgacaccttatgcatcgccttgaaccttaattaatccccaaataaaaaataatgaatgattacatctaacatgatacaactgtcctgcctacaaccagaaatacactaattccttctccagaataggaggtaaagttcttcagtgatctttactctttccatgatatgccataacaaatacaatgtaaaattgacagtagttaatattgatctaaagataatacatcttatgttacataagggaatgagagaaaataaaagtatttgctcaatatatgtatatgcacacatacttg

SEQ ID NO: 294707 - DNA, 578 bp, Homo sapiens
actaatgttgacggcagaaaaagacagatgcccagctcaaggagaaagagagagagttaattcaccatttctctgccttttttttctatctgggcccaaaacagattgtataatgccactcacattggtgagtgggtagcttctttactcagtcttctggttcaaatactgatctcttacagacacacacagaaatcattccttaccagctatcaaggcttcccttaacccattgaagttgacacataaaattaaccatcataaatttaccccttgtcaatttgacaccttatgcatcgccttgaaccttaattaatycccaaataaaaaataatgaatgattacatctaacatgatacaactgtcctgcctacaaccagaaatacactaattccttctccagaataggaggtaaagttcttcagtgatctttactctttccatgatatgccataacaaatacaatgtaaaattgacagtagttaatattgatctaaagataatacatcttatgttacataagggaatgagagaaaataaaagtatttgctcaatatatgtatatgcacacatacttg

SEQ ID NO: 294708 - DNA, 599 bp, Homo sapiens
tttctgcagggctgcaggtattgtgacctagctgacactggaattgaatatccaaaaggccatttcttcattccatcaggacagctgcttcaggrtgagaaacatggtaactagggaatttcatgagcatagactaattactgcttttctttggctgcaaagtgagttccttggtcagaagcgacgttatgtagaataccacgatgatggataaggtattctgtaagtcctccaatggtagttttggtagaagcaccgggtggaggaaagataaatccatatccagagtgtccatggcagtaaagacaaaacgttgcctcttccatgatggaagtagtccagtgtaatcaacctgacatgagatagctagctgatcaccttagagaatggtgccatattggaggcgctgatcaccttagagaatggtgccatattggaggcaccatgttggtatctgctgctggcagattgggcactctttggtggtggtagctaggttatttccttcgtgagtgaaagtccatgttgctgagcttatgtataacctccatgcctgccaccatttccactttgctcatgagcatattgggcattactca

SEQ ID NO: 294709 - DNA, 599 bp, Homo sapiens
tttctgcagggctgcaggtattgtgacctagctgacactggaattgaatatccaaaaggccatttcttcattccatcaggacagctgcttcagggtgagaaacatggtaactagggaatttcatgagcatagactaattactgcttttctttggctgcaaagtgagttccttggtcagaagcgacgttatgtagaataccacgatgatggataaggtattctgtaagtmctccaatggtagttttggtagaagcaccgggtggaggaaagataaatccatatccagagtgtccatggcagtaaagacaaaacgttgcctcttccatgatggaagtagtccagtgtaatcaacctgacatgagatagctagctgatcaccttagagaatggtgccatattggaggcgctgatcaccttagagaatggtgccatattggaggcaccatgttggtatctgctgctggcagattgggcactctttggtggtggtagctaggttatttccttcgtgagtgaaagtccatgttgctgagcttatgtataacctccatgcctgccaccatttccactttgctcatgagcatattgggcattactca

SEQ ID NO: 294710 - DNA, 642 bp, Homo sapiens
tcttcactaatctactatcttttttgttggcaaggactttgtcttattctcatttcttcatacacttccctatgtaacaaatctcttattcaccagtacagaggagactactttgtattttagtatttcaataagcakatattttacttttaaattcacggtcaagtttctgtggtgcacagattgatgtattatgaagacaataaaggactgtctcataatgaacaatatatcaatagcctgtgacatctagatcagtaattcaaattaatgccaaaatagaccatgatatattggttttccaacagtactttatcttattaataggaatttaactgtgcagtgtagataatggttagaaccctttgagctctcaaattcaagtgacttgtatacataaaatccatggcaacacctgggattgaaaaacaaaattatgttacctttttttttttttttttgcgacaaaaggatctgtttaggaaacagcaacataagtagtaaaaagctattagaaattttctttagttgaagtgataacatttctcctttcaagttttgagatataaaagtgcaaagttcaatttctagcagaaattaatttttcacatgctggcatcaagaatacacgtcgtcttgata

SEQ ID NO: 294711 - DNA, 642 bp, Homo sapiens
tcttcactaatctactatcttttttgttggcaaggactttgtcttattctcatttcttcatacacttccctatgtaacaaatctcttattcaccagtacagaggagactactttgtattttagtatttcaataagcagatattttacttttaaattcacggtcaagtttctgtggtgcacagattgatgtattatgaagacaataaaggactgtctcataatgaacaatatatcaatagcctgtgacatctagatcagtaattcaaattaatgccaaaatagaccatgatatattggttttccaacagtactttatcttattaataggaatttaactgtgcagtgtagataatggttagaaccctttgagctctcaaattcaagtgacttgtatacataaaatccatgrcaacacctgggattgaaaaacaaaattatgttacctttttttttttttttttgcgacaaaaggatctgtttaggaaacagcaacataagtagtaaaaagctattagaaattttctttagttgaagtgataacatttctcctttcaagttttgagatataaaagtgcaaagttcaatttctagcagaaattaatttttcacatgctggcatcaagaatacacgtcgtcttgata

SEQ ID NO: 294712 - DNA, 642 bp, Homo sapiens
tcttcactaatctactatcttttttgttggcaaggactttgtcttattctcatttcttcatacacttccctatgtaacaaatctcttattcaccagtacagaggagactactttgtattttagtatttcaataagcagatattttacttttaaattcacggtcaagtttctgtggtgcacagattgatgtattatgaagacaataaaggactgtctcataatgaacaatatatcaatagcctgtgacatctagatcagtaattcaaattaatgccaaaatagaccatgatatattggttttccaacagtactttatcttattaataggaatttaactgtgcagtgtagataatggttagaaccctttgagctctcaaattcaagtgacttgtatacataaaatccatggcaacacctgggattgaaaaacaaaattatgttacctttttttttttttttttgcgacaaaaggatctgtttaggaaacagcaacataagtagtaaaaagctattagaaattttctttagttgaagtgataacatttctcctttcaagttttgagatataaaagtgcaaagttcaatttctakcagaaattaatttttcacatgctggcatcaagaatacacgtcgtcttgata

SEQ ID NO: 294713 - DNA, 602 bp, Homo sapiens
aagtcattactgatatgcgttttaaagtttaatacagtgataggggatggaagtcagtttttaatgggttgtaaaaatagtgaaagataaagacctgacatctgcatctagctataaatggaggaaagaaatggtgtaacagcttgggtgaaagacgtatatcaatttcaaatgctaatgaaagagataaattcctgaggataatgaagggagaggcaaaaaagrttcatttgctcaaaaatatttagtgagatccaattctgccccaatatttggtatatataagtgaaacaaagaaacaaaacaaaaaagtaaaaagaagaaaatctcctttccatcatgtaacttacagtgtaaaaactgacagattgctcttggagataagaaaaccactctctattataattgtagaaaagaaaaaaagaagtttggaggaagagagttaaggacacctggagccatgtatcagtcaggatagactgttaatgtcgcattagcaaaaaaacacctaaatctcagaggttgaacgttatgaaggtttatttttcaggcatgcaaaagtgaatagatggttaacatattgtgagctaatttggaattct

SEQ ID NO: 294714 - DNA, 602 bp, Homo sapiens
aagtcattactgatatgcgttttaaagtttaatacagtgataggggatggaagtcagtttttaatgggttgtaaaaatagtgaaagataaagacctgacatctgcatctagctataaatggaggaaagaaatggtgtaacagcttgggtgaaagacgtatatcaatttcaaatgctaatgaaagagataaattcctgaggataatgaagggagaggcaaaaaagattcatttgctcaaaaatatttagtgagatccaattctgccccaatatttggtatatataagtgaaacaaagaaacaaaacaaaaaagtaaaaagaagaaaatctcctttccatcatgtaacytacagtgtaaaaactgacagattgctcttggagataagaaaaccactctctattataattgtagaaaagaaaaaaagaagtttggaggaagagagttaaggacacctggagccatgtatcagtcaggatagactgttaatgtcgcattagcaaaaaaacacctaaatctcagaggttgaacgttatgaaggtttatttttcaggcatgcaaaagtgaatagatggttaacatattgtgagctaatttggaattct

SEQ ID NO: 294715 - DNA, 622 bp, Homo sapiens
agcattcctctttcaccacatcgaggccaacatctgttgtttttgactttttaaaataatggccatttttgcaggagtaagatgttatctcattgtgttttaaatttgcatttcactgttgattattgatgttgagcattttttatgtttgttggccatttgtgtatcttcttctgagaaaagtatattcatatcatttgcccaatttttgatgagattatttgttttttcttgctgatatgtttgagatcctygtagattccagatactagtcctttattgaattcacagtttgcaaatattttctcccattctgtgggttgtctgtccactcttgaagattatttcttttgcatgcagaagctttttagtttaatcaggtcttgaatatttatttttgtttttgctgcattagattttggggttttagtcatattttttttttgcctaggccatcatctaaaagaatttttcaaaggttattttctagaattgttatggtttcaagtcttagatttaactctgatccatcttgagtttatttttctgtagggtgagagatcgggatccagttgcgttcttctgcatgttggctagccagcattcccagtaacatttatta

SEQ ID NO: 294716 - DNA, 517 bp, Homo sapiens
atggcagttctgcttttagctctttgagaaatcactatactgtcttccataatagttgaactaatttacactcccaccaacagtgtatgaatgttcccttttctccacaaccttgccaacatttattaattgacttttttttttttttttgaracagggtctggctctgttgcccaggctggagtacagcagtgtaatattggctcattgcagcctcaacctcccagacctaagtaatcctcccatctcagcctttcaagtagctgggtctaccagcgtatgccaccacacctggctaattttgtattttttttgaagagattgggtttccctatgtttcctaggctggtcttgaactcctcagctcaatagatgtgcctgtcttggcctcccaaggtgctggattacaggcatcagccactgtgtatggtcttgcctttttaataatacctattctcaccagtgtgagatggtacctcattgtgattttgatttgcatttttctaatgattaatga

SEQ ID NO: 294717 - DNA, 604 bp, Homo sapiens
atatatatatatatttttttttttttttttgtcccatgatttaccaagctagtgctgaatggtccgggctgggaataaaatactgctttctgtcctccacataaaggtggaaatttattcaaaatctttcttcaagatgtgttttatcacctctactaaactgtaaactaggtacagkgtatcctggtatcttactgtttcttcttgggagctagtgagagcaactatgcctatttattaaacatttaaaaaacagccaacataagattaatggagatatcattaaatattaatctctttaaccctttagctaatacttcacataaaaaaattgtattatatattccgtatattcaggtttcatggtatttaaattcatgatcacactgtctcatgttaggatttcccctgttgtttcaagttctggaccttccaaaatacatgagtttatcaagatcatgttaatttagatgttatggccaaattttgggtggtttggggttgcccaactgtgcaaatgtcagaatagggatagtctcttatctttgttctgcctaatgcctacaataaggtattacctcatttagtttttctttacctactg

SEQ ID NO: 294718 - DNA, 591 bp, Homo sapiens
gccttccttcttccacacttaccctcctggtaggctacatctaagaaaagcaggttcaggtggttcattttgcattgtcatattttgcagcatgtgttactgtttccaaatcagctattttgacagttgggccaggaattagatatttctgtcttttttttttttttttttgagacagagtgtctctcattcagccacctaggctggagagcagtgacacaatcttggctcactgcaacctccaccctccatgttcaagagattcttctgccccagcctcctgagtagctgggactacaggcacacaccaacacgcccagctaatttttctatttttagtagagatggggtttcacsatgttggccaggatggtctcgatctcatgaccttgtgatctgcccgcctcggcctcccagagtgctggcattacaggcctgagccaccacgcctgaccaagagatttcttaaacaaagtttctgctcaataaaagtactctgtatttgataatgacacattacactaaaacaattagaacttgcttagggagttttactgtgaaagggagtcaggaatattgacaacagaatcc

SEQ ID NO: 294719 - DNA, 636 bp, Homo sapiens
aatagtagaaccctgcatcctaagatatatattatgataaatgtccatttactgaggtaaagtgtttctatttcttgcaacttgaaacatcctgactcacacaaaaagtagatatgtgcaaattatgaagatattgtatccccccaaaagtcagatgttaaagcctcacccccaacgtggctatttggagatagggctttttaggaagccagttaggttaaatgaagtcatacaggtgggttsctaatcctctaggactggtgcctttatacatagaggaaactacactagatatttgtcttttctttctttctttttgagacagagtttccctttgtcatgcaggctggagtgcagcggcacgatctcagctcactgcaacctccacctcccagtctcaagtgattcttgttgctcagcctcctgagtagctagaattacaggcacatgccaccatgtccaactaatttttgaatttttagtagagacggggtttcaccatgatggccaggctggtctcaaactcctggcctcaagtgattcacccacctcggcctcccagagtgctgggattacaggcatgagctattgcacccggcctgcactagatatttttctttctctgtgcacacaaag

SEQ ID NO: 294720 - DNA, 613 bp, Homo sapiens
aagtactgcttttgtagtatcccataagttgtggtatgttgtgtttccatgttttgtttcaataactttttaaatttccctcttaatttcttcattgctccactggtcattcagaagcgtatcatttaatttccaggtaattgcatagttttcaaattcctcttgttatttatttctagtcttattccactgtggtcagaaaaagatacttgatattattttattttttgaatttttaaagacatgttttgtggccaaatgtatggtctatccttgagaatgattcatgttctgaagagaagtatgtattctacagccattggatgaagtattctgtatatatcaattaggttcgcttggtctatactcagataaatatcaatatttctttgttgattttctgtctggataatctgtctaatgctaaaactggggtgttgaagtctttattgttgtactggggtctatcgctttatctctaataatatttgttttatgtatctgggtgctccattgttgggtacacatgtrttttcaattgttatatcctgttgctaaattgacccctttattattatataatgaccttctttgtccttgtatggtttttgtc

SEQ ID NO: 294721 - DNA, 511 bp, Homo sapiens
gatcgtggaggcacatacctcatggcttggtgctgttttcacaatagtgagtgagttctcataagatctggtcatttaaaagtgtttgtgtggcatatccctaccacttgctctctcttgcttctgctttctctatatgaagtgcctgctcatgctttgccttccatcatgagtaaaagctccctaaagccactgcagaagaagaggctgccatgcttcctgtatagcctatagatctgtgagccaattaaatctcttttcttataaattactcattctcagctatttctttatagtaattccagagtgccctaatacactactrctgctctttttggtattcatttgaatgtaataatttttccatcctttttttcattctatgtgtgtctttataggtgaagtgtttcttgtgagcaacaggtctttgggtctttttttttttaaatctattcagctactttttgtcttttgattggagggtgtaattaatttacattcaatattatta

SEQ ID NO: 294722 - DNA, 1042 bp, Homo sapiens
ataaggcagggatagggcagttttgaaagaggaactaggttggacttatgggaagagatgtctaagatgtttaatatccaattcatttctattggaagagatgtctagatgtcttgatcataggcaaacatgggagaggacaaacttaatgtagagaactaaggaattaagagacagactttcyagagaggcctccaaatatgcaggatatcagtgagaaaaaaatgctaatgatttttgttgtttagttaagataacttaggtgctgtagccaacaaatcctgaaagaatatttaaaggctcaaacgtgacaattcatttattgtatacattaagtccaaaatgtttgctcttcattgacaggcagctttcctttaattaataatttagggacgtttacctcgagcttcaccaactttggaagcacgatttcaaaggttaccaaactcaattgcaacaagtgggtgcaaagggaaaggtgttggagacatataaatgcaaaggagtctaagaaatgggcttagtwaagatgttttcttgttgctcagctttcatcaaaatcaaaacaaaaattgcatttctgcttgttggtctagaaagaattgatattcgagaaatgagggctgtcagaaccagattggagtctcctgctttgttgatttgcacagagttattatatatggaactgagaccacatagctccattaaatgtgtatagaaaaagagtcttgacacccctgatcttctcctgtccctggctatgctaaatttatcagtgattaaatttatttgatggttttcttagttaaaacacaaaaattattaaatctacttctatctgaatccaaaatattatggggattatgtggaattatttcatttacttcacagctgggggacttagacgggctataggctcagtcatgtwttctaactgcattggtctttaaagactaaataatctggaaaatgtgattcttaaagtacagagggagataaccaaactggctttccactaagtttttaaaaaatattctgagtt

SEQ ID NO: 294723 - DNA, 561 bp, Homo sapiens
aagctggtacgttcttaaggcatgacattgttttagaaaaacttcctgcaagccctgcttgtaagtctcttgtaagactgcatagctcagaagcctgtcccatagacatcaatgcctcagatgggactggtaaatgttgcttctaaactgggcacattgtcagtctcaacaatatctaggtaatgtcattaagaaaggagtgaagaatgaatattttattagttttagagatgagatcttgttatgttgccctgagtagagtgcagtggctattcataggcagaatcacagaccactacagccttgaactcccgggcccaagtgatcctcctgcctttgcttamtaagtagctggactacagggacgtgccaccacgcccagcttggagaataaatattagtaagcggccagtagtctttgtcatgggtttactgggaaatttctgctcatctagctttccccacttccacccgctttcaatcctttttccagagagggaggactggccaaggtgattggtcagaggttacaattaatccattttactaggaggcagaatt

SEQ ID NO: 294724 - DNA, 561 bp, Homo sapiens
aagctggtacgttcttaaggcatgacattgttttagaaaaacttcctgcaagccctgcttgtaagtctcttgtaagactgcatagctcagaagcctgtcccatagacatcaatgcctcagatgggactggtaaatgttgcttctaaactgggcacattgtcagtctcaacaatatctaggtaatgtcattaagaaaggagtgaagaatgaatattttattagttttagagatgagatcttgttatgttgccctgagtagagtgcagtggctattcataggcagaatcacagaccactacagccttgaactcccgggcccaagtgatcctcctgcctttgcttactaagtagctggactacagggacgtgccaccacgcccagcttggagaataaatattagtaagcggccagtagtctttgtcatgggtttactgggaaatttctgctcatctagctttccccacttccacccgctttcaatcctttttccagagagggaggactggccaaggtgattggtcagagrttacaattaatccattttactaggaggcagaatt

SEQ ID NO: 294725 - DNA, 529 bp, Homo sapiens
tagaaacaaatgagtaatctttggttcttcccttttccttacatccccaaatctaatcagtcatctagacctttccattttacaccccaaatatttcttaaatctacttccaattctcctgtgtgcttctctcccagctaaaaggccaaaaaaggccatttaccctgcattgggaggaaccaggtcctggtactgcatcttagccaggccgaccttaacctgaccaaattgtagaatcatgtttctaaacctctattagcaaaactctgccctatgtttgtaacctcagttcacgatggatataattgttttatacaaatggtgcaaaaaagagaaatagatctaaaaatgccaaacttccaatcattctgtgtcattyaatagcctgtcacttatggaaagtttgcctctactgatattagcatgatatttaccgggagaaaatttgttgcagacactgaaagggctcctctaaactctaacattggtgccgatggattgttaaaactatgtgcaaccaaggataact

SEQ ID NO: 294726 - DNA, 594 bp, Homo sapiens
tcattttagttttaatgttttatagcaaaacaagaatttgctacagttttatttttctgattttgatagaagcaaattcattgatatctttaaaaatactttggggaaaarctaatcatttaaacaatacacagaaaagcatgtatataggtgcacatatttttttcttttgccttctgctccaatgtgactttcacgtggaactgaggacaaaagtgtggttgagtgaacctgttctacatggttgtgatataagttgaaatctaacagagaactttggctatatgaattcattcaatggaacaacaaaaatctagagaggtttgccttttaaactcttagactaattattccaggaattgcctcagtgcttatgttagcttggtgtcagatatctgtactcgtaagaacaaagtcaaaaaagaagtcatgaaatttagaatggcttcttcctgtcaaatacatttagaacatatttttggaataatttcaagtccattgggaacacaattactaggaatttgggacagaggtgacaatgagaatctgctttgagaaagtagatcataatattacagagctatgccttcatca

SEQ ID NO: 294727 - DNA, 594 bp, Homo sapiens
tcattttagttttaatgttttatagcaaaacaagaatttgctacagttttatttttctgattttgatagaagcaaattcattgatatctttaaaaatactttggggaaaaactaatcatttaaacaatacacagaaaagcatgtatataggtgcacatatttttttcttttgccttctgctccaatgtgactttcacgtggaactgaggacaaaagtgtggttgagtgaacctgttctacatggttgtgatataagttgaaatctaacagagaactttggctatatgaattcattcaatggaacaacaaaaatctagagaggtttgccttttaaactcttagactaattattccaggaattgcctcagtgcttatgttagcttggtgtcagatatctgtactcgtaagaacaaagtcaaaaragaagtcatgaaatttagaatggcttcttcctgtcaaatacatttagaacatatttttggaataatttcaagtccattgggaacacaattactaggaatttgggacagaggtgacaatgagaatctgctttgagaaagtagatcataatattacagagctatgccttcatca

SEQ ID NO: 294728 - DNA, 586 bp, Homo sapiens
ggtttgccttttaaactcttagactaattattccaggaattgcctcagtgcttatgttagcttggtgtcagatatctgtactcgtaagaacaaagtcaaaaaagaagtcatgaaatttagaatggcttcttcctgtcaaatacatttagaacatatttttggaataatttcaagtccattgggaacacaattactaggaatttgggacagaggtgacaatgagaatctgctttgagaaagtagatcataatattacagagctatgccttcatcagtttaaaattggaagtggtttctctgttattttctaccctggagtgttcttaaaattatttttatctcctttaagaaatttgcagcgcttctaaaaatgaaactgaaagtgccacaaatatgcttgtgctccaaatcagttttaagttaacatgcaaagagaattttggctactttttgtttggagtcaaatataaaactaaacaacatgtgcccagatttcctaccatggatttgcaaaagmtattttgaaacctttcttggcaaaaatcatattctgttatgattcagtgttgcactgtaaacagagtgt

SEQ ID NO: 294729 - DNA, 586 bp, Homo sapiens
ggtttgccttttaaactcttagactaattattccaggaattgcctcagtgcttatgttagcttggtgtcagatatctgtactcgtaagaacaaagtcaaaaaagaagtcatgaaatttagaatggcttcttcctgtcaaatacatttagaacatatttttggaataatttcaagtccattgggaacacaattactaggaatttgggacagaggtgacaatgagaatctgctttgagaaagtagatcataatattacagagctatgccttcatcagtttaaaattggaagtggtttctctgttattttctaccctggagtgttcttaaaattatttttatctcctttaagaaatttgcagcgcttctaaaaatgaaactgaaagtgccacaaatatgcttgtgctccaaatcagttttaagttaacatgcaaagagaattttggctactttttgtttggagtcaaatataaaactaaacaacatgtgcccagatttcctaccatggatttgcaaaagatattttgaaacctttcttggcaraaatcatattctgttatgattcagtgttgcactgtaaacagagtgt

SEQ ID NO: 294730 - DNA, 639 bp, Homo sapiens
aattttgttcaaaggagtatactccattgttaaaaagctgtaaatagcttaaaagtttcttgattttgaaaaacaaattatcagcaacattttaagcaaaaagttaaaaaagattacttcaaacttctattagtttagtccatgcagttaattcttgttctgcttgatattcatgaacatttcagctctccatgagtcctcgaagttttttctctattttgatgtcacagtctccagagctatcagaaacatgcattcaagaacacctgttaagagttttatagctgattataaaactacctctgaaaaggaccaaaaaaagatgacaattgtctgtgaataatgaaaagttttagggcagccatagtcagacattctgttacctctgtagcacacaataatttaacataaaaattataattattactgataacatacagtgtgtcatatcagaataataggagtttcccataattttggaatacatacyaataacatatttatacaaatacagcccaaagaaaaccaaacaccatttcatattggacaatgcttcctgtataattttcataccaaaaaagccaaatatgtcacttttggactttagggaacccattaataccatcttaaaggactaat

SEQ ID NO: 294731 - DNA, 547 bp, Homo sapiens
ctgatagaaaagtacatcttatagatttatagaaacctttttttccccttagactttcagattcctgataaactgtttcacaaccctaggcagttgtcagctaaatagccttaaatttgcatactaaaggaaacaactcgggtgaaaatgatatagcaaaagttacatcataaggtacagagaggaaaaagtctggtggtgttagagggagattaaaaatggatgccaaattaaacataaaattatagaagtctagcatagrattctataaggagactaattttatttaggtagggaatgactacctatcttttaactggatctctgagctctgggcagagcccatactgaatcctgggtctccaaaaagggagaattaatatgagattaggctacgtggtgcttttacagtgcactcagaaaaaaaaaaaaattaaagacatttctaagtgtctaagccacattcttccttaaaaacccaagagtaacctctgttgcaataactattttagtcaaaaaaaaaaaaagtaacacaatacaaaagtaa

SEQ ID NO: 294732 - DNA, 550 bp, Homo sapiens
gagaaacatgagtgtggtcaaggcctgacccttgccagataacaggtragccaggacagaaagctgataggaagctgggctgctctgtaaattgacgctggatctctctgcaagcaggggccatctgcagagtgggtagccttgtgcagatggaggactgtgggagaggtgcccacatattcttcctatcccgggcccctctgtctccctgagatcttgccttcaggttctcatctgaagacagtggtatttagaagaaaatctaagactgtttctatgaatcagagtgccttccagagctgcacgtgcagtgaggaatagccagctgggttcttacctccttgtgtagaattgtcaacccaggatggtggcagacaggagagccctccttcgaagtcccacagccccaaccacagtccagggcatcgtctgtgggattcagactgctgcttgaccaggtccccttgcccagtcacaattaagaatgccatcacactgagtcaggagaatggccggcgaagcagaacaagacaattaagtcacattgaca

SEQ ID NO: 294733 - DNA, 1074 bp, Homo sapiens
gcttttaacacataaggaagagttgccaacatataactaggcatctaggcataaagaacactgtgtgatagacttctactttttttttttttttagatggagtttcgctcatcgcccaggctggagtacaatggcacaatctccgctcactgcaatctccgcctcttgggttcaagcgattctccagtctcagcctcttgagtagttgggattacaggtgcccaccaccacgcctggctaatttttgtatttttagtagagatggggttttaccatgttggccaggctgctcttcaactcctcacctcaggtgatctgcccaactcggcctcccaaagtgttggaattacaggcgtgagccaccgcgcccggcctgtgtgatggacttctaatgagaacaacacctagcacataaaccagggcttggctactggtggtccacagttgtcacacgttgcctcagaacattggtattacatatttaaaattcaaagaataaactgccaacatttaaayttgagagctttcacatagaaattagwagaaaccttataaaccaagagagattgggggcctgtgttcagtagtctgaaagaaaagaaattccaaccaagaatttcatatctcatcaaactaagcttcataagaaaagggaaatataatcttttccagacaagcaagtgctaagggawttttttttcccactagaacagcttacaagaaatccttaagggacttctaaacatggaaacaaaagagcaatacctgctaccacaaaaacagagttaagtacgtaaccaacagactcgataaagcaattgcacaatagaagctacaaagcaaccaggtatcaacttcacagtagggtcaaaacctcacatatcaatattaaccttgaatgtaaatggcctaaacaccccacttaaaaggcacagagcggcaaattggatacaaaaaaaaaaaaaccctatctgtctgctgtcttcaagggacccatttcacacatcgtgacacccctatgggtgcaaagtaaagggttggagaaagatctacacaaatggaaaactataaaaa

SEQ ID NO: 294734 - DNA, 532 bp, Homo sapiens
agaaaccttataaaccaagagagattgggggcctgtgttcagtagtctgaaagaaaagaaattccaaccaagaatttcatatctcatcaaactaagcttcataagaaaagggaaatataatcttttccagacaagcaagtgctaagggaattttttttcccactagaacagcttacaagaaatccttaagggrcttctaaacatggaaacaaaagagcaatacctgctaccacaaaaacagagttaagtacgtaaccaacagactcgataaagcaattgcacaatagaagctacaaagcaaccaggtatcaacttcacagtagggtcaaaacctcacatatcaatattaaccttgaatgtaaatggcctaaacaccccacttaaaaggcacagagcggcaaattggatacaaaaaaaaaaaaaccctatctgtctgctgtcttcaagggacccatttcacacatcgtgacacccctatgggtgcaaagtaaagggttggagaaagatctacacaaatggaaaactataaaaa

SEQ ID NO: 294735 - DNA, 532 bp, Homo sapiens
agaaaccttataaaccaagagagattgggggcctgtgttcagtagtctgaaagaaaagaaattccaaccaagaatttcatatctcatcaaactaagcttcataagaaaagggaaatataatcttttccagacaagcaagtgctaagggaattttttttcccactagaacagcttacaagaaatccttaagggacttctaaacatggaaacaaaagagcaatacctgctaccacaaaaacagagttaagtacgtaaccaacagactcgataaagcaattgcacaatagaagctacaaagcaaccaggtatcaacttcacagtagggtcaaaacctcacatatcaatattaaccttgaatgtaaatggcctaaacaccccacttraaaggcacagagcggcaaattggatacaaaaaaaaaaaaaccctatctgtctgctgtcttcaagggacccatttcacacatcgtgacacccctatgggtgcaaagtaaagggttggagaaagatctacacaaatggaaaactataaaaa

SEQ ID NO: 294736 - DNA, 626 bp, Homo sapiens
ttttttaaataaagaaatctgtcgcaaaccagaaacaccaaattttttaaaactaaaaacatctactttaacataagtgaatcatgctgatatttctgaatttcattatatccagaattatttcatgttctccaagttatgaggcaaaaagcatattccacgcttcaatttatgaaggattattttatgactcctttctcattgataagtagccaacaacctttcaattaattctgatggaacattccaactgcagctatttggcatgccaggccatgaaagggaaaattggcagaaccatgcggtcatagatgacagggagacaacagttttccagttagaggaggttgtgaaaaattgataggctttaaagatgagaatcatggcttataggatttgttgatcttggttgtgttgagaagaaaaatggctgaataatggtgggtagaacaggtaggtctctgttcttggctggaacctagaaactagaaaagacagtttcttcagataaatagctacgaagagaatccaactataatttactgaactcagagaagtggatgggagaatacagagcataagttaacacagaaatgcagtytcaacgtgcaaatgcttggtgagct

SEQ ID NO: 294737 - DNA, 551 bp, Homo sapiens
atgagttcatcatatgtgccttctttaatatgtatagcattaccatccattctttgrcactgacaaatttttgctcccactgactggtttatgagcgtgccttttctccccataccttaccagctcagaacattcttagtctttcagactgttctcatttgaggcaaaaattgcatctcattgtttttacttgcatttttctgtcaaatatgatgctaatatttcactaaatatagtttggcaaaatgtgtttgctaaattgttttggtgttagaagtttttcattttacatttgtatctattcagattttccactgggattatttccattgctattaaatttaaaagtcctctcatatttgatattctattttatacattttcatggcttggtcgttttgtgtccttaatcaactagaatacttagagaactaattgccgcagcaccatgttagatggtccacatatttatgataccttctttagaataaacagttaacataattaggatccactttttggctgacctaatgtcaataatcagtgatttg

SEQ ID NO: 294738 - DNA, 551 bp, Homo sapiens
atgagttcatcatatgtgccttctttaatatgtatagcattaccatccattctttgacactgacaaatttttgctcccactgactggtttatgagcgtgccttttctccccataccttaccagctcagaacattcttagtctttcagactgttctcatttgaggcaaaaattgcatctcattgtttttacttgcatttttctgtcaaatatgatgctaatatttcactaaatatagtttggcaaaatgtgtttgctaaattgttttggtgttagaagtttttcattttacatttgtatctattcagattttccactgggattatttccattgctattaaatttaaaagtcctctcatatttgatattctattttatacattttcatggcttggtcgttttgtgtccttaatcaactagaatacttagagaactaattgccrcagcaccatgttagatggtccacatatttatgataccttctttagaataaacagttaacataattaggatccactttttggctgacctaatgtcaataatcagtgatttg

SEQ ID NO: 294739 - DNA, 573 bp, Homo sapiens
tttcaccactgtgcaatctttggttgtaacaaaattacacttgtaccccataaaattatacaaatagaaaagcatttctacactttacaccattgggagtgaggaaggagctattgtaaggaagataggggaggatgaataaccgtctcacttcccaccctaaggcagaacacattttctataaagggccagagtgtaaatattttaggctttgcaagccatacagtgagagttgcaaccactcaaccrtgctgttgtaacccaaaggcagccatagatggtcctgaataagactgactgtgttccaatcaaattttatttatggataatgacatgtgaatatcatataattttcatgtattacaaaatatcattgtccttttgattttctttacaaccatttaaaaaggtaaaaaccatctcctcagctgtgggcaagcttcaaaagaaaaaagaagccactcttagcttgcaaggttgtacataaacaagtagcagcaggttggattcggcccacacatggtttgccaagccctgatttatagtatcctaacactaaacacccaacgtagt

SEQ ID NO: 294740 - DNA, 573 bp, Homo sapiens
tttcaccactgtgcaatctttggttgtaacaaaattacacttgtaccccataaaattatacaaatagaaaagcatttctacactttacaccattgggagtgaggaaggagctattgtaaggaagataggggaggatgaataaccgtctcacttcccaccctaaggcagaacacattttctataaagggccagagtgtaaatattttaggctttgcaagccatacagtgagagttgcaaccactcaaccatgctgttgtaacccaaaggcagccatagatggtcctgaataagactgactgtgttccaatcaaattttatttatggataatgacatgtgaatatcatataattttcatgtattacaaaatatcattgtccttttgattttctttacaaccatttaaaaaggtaaaaaccatctcctcagctgtgggcaagcttcaaaagaaraaagaagccactcttagcttgcaaggttgtacataaacaagtagcagcaggttggattcggcccacacatggtttgccaagccctgatttatagtatcctaacactaaacacccaacgtagt

SEQ ID NO: 294741 - DNA, 592 bp, Homo sapiens
agcatgttctcatcatccgctgcctccttggtcctgttcacagactgtcaacagccatgtcttgtamactgggacttttcccctacccctcatggctgactgctttaaacctcaaccttttctccttgaaattctcccctccataatttctcaattcttcctggcttcagatgcttggctatggtatggggtttaaagatgttggctggaaccccatgactggagtcggtagcctggccccaccactgacaggctggcaaatcacttcatccttccctaagcctgagtgtccatgtctgtagagcagaagaataggctggctctcaaggggttctaataatatggtgcttggaaaatgtcagctgtccattagtcatactattatctgtttgtgaaaacaacaaaaaagagatcatggaatagtccagcaaaattgtgcctgctgggcaccaaatcacacaagcatgactaaggatcattgggggatgatacagaaaagcatgaatacactattttgctcctgttaaagagggatggaggctgaaactaccatgtaaatcgggggaagcctgtgggtatgaattgtgagtgg

SEQ ID NO: 294742 - DNA, 592 bp, Homo sapiens
agcatgttctcatcatccgctgcctccttggtcctgttcacagactgtcaacagccatgtcttgtacactgggacttttcccctacccctcatggctgactgctttaaacctcaaccttttctccttgaaattctcccctccataatttctcaattcttcctggcttcagatgcttggctatggtatggggtttaaagatgttggctggaacccyatgactggagtcggtagcctggccccaccactgacaggctggcaaatcacttcatccttccctaagcctgagtgtccatgtctgtagagcagaagaataggctggctctcaaggggttctaataatatggtgcttggaaaatgtcagctgtccattagtcatactattatctgtttgtgaaaacaacaaaaaagagatcatggaatagtccagcaaaattgtgcctgctgggcaccaaatcacacaagcatgactaaggatcattgggggatgatacagaaaagcatgaatacactattttgctcctgttaaagagggatggaggctgaaactaccatgtaaatcgggggaagcctgtgggtatgaattgtgagtgg

SEQ ID NO: 294743 - DNA, 663 bp, Homo sapiens
ggcacaatctcagctcattgcaacttccacctcctgggttcaagcttattctcctgcctcagcctcccgagtagctgggattacaggagcatgccaccacacctggctgatttttgtatttttagtagagacggggtttcaccatgttggccaggctggtctcgaactcctgacctcaggtggtccatccaccttggcttcccaaagtgctgggattacaggtatgagtcaccgtgcccggcctacatatgtcatcttatatgtgttggcaccataatcactgtcattggttctacatcgttttcactgacacctttgctgcttttatggttttaagcactatatgcattggcaggattctactttggaacccctgagcatattgccactacttgcccctttttgttcactcttagttgtggcttccgatatgcagctttcttcttagagtggggaggtgtgaacaaagaaggtgggtcggacttggaaaagagaggtttcakgaacctggctggggattgttggggaaggccacttgtaccacatggcagcattccttttgtcagatatgtactaggtgtcaggtgggcctagtgactgggtcttctgcagcaggacttcattttttccttggaagatggaataggaaatgaaacaaaacag

SEQ ID NO: 294744 - DNA, 539 bp, Homo sapiens
ggcctcctgagggtcccacatccagatgttgaagcaaaaaggaattcaaaaatgcagtaattttctttattgagaagttaggttagaaacccaattttcaagtatgcaaattaactagaatgtctccagtctgtgttagatagaacctgaaaacggaaattttgaactagcacaccagtcaccatttccagtctgctctctcagcaggccccatggcccctgtaatttagctagttaaggcttttcctctggccaaacagctaaacttgagccaggtggacttaaacacatgaaccaattcagtttactgtctaaaaatgaaagagaaaagtctgccaggatcttctcctcgtccccacaaagttcccaagascagaattcagccctcctcccctcccactacaaacacaggagagaggccagcccaatataacttaaaacagagcgaccctgcagccctctcagacaaattacatcaaaacaagtcaaagcaaatgcaactgtccttaccagttttgtaaaggaattgcctgggaacc

SEQ ID NO: 294745 - DNA, 1059 bp, Homo sapiens
aaacccaggcgtatgtctaactctacagataagggagcagaagtggatcccatggaaaaaaacaaagggcatttaggcagaagkcacatcatatagaagagccaggtgagttgaaagtattttacagactctagaaataaaggaagtttcatgtgaaagagaataaaaggtgggtggtaggtggtgaggctggaaagggaggcagggacatctcgagatgtggggacagttgtgcggtagcaactgacacggccaggtctgtgtgtagcaggaacactggcagatcgtagaggctggcttggagtggggagaggctggagaccaggagatttatcatcatcactcaattgagtcattaatactaaaaacaactatcttttattgagctcctgtaacctgccagacagggcacttagacagttttcatgtttcatctctggccccacaacaactctgtgaggcaaacacaattatccccaatttacagttaaggaaaccaaaatgttgagcagttaaggaatttgtccaawaaacccaggcgtatgtctaactctacagataagggagcagaagtggatcccatggaaaaaaacaaagggcatttaggcagaaggcacatcatatagaagagccaggtgagttgaaagtattttacagactctagaaataaaggaagtttcatgtgaaagagaawaaaaggtgggtggtaggtggtgaggctggaaagggaggcagggacatctcgagatgtggggacagttgtgcggtagcaactgacacggccaggtctgtgtgtagcaggaacactggcagatcgtagaggctggcttggagtggggagaggctggagaccaggagatttatcatcatcactcaattgagtcattaatactaaaaacaactatcttttattgagctcctgtaacctgccagacagggcacttagacagttttcatgtttcatctctggccccacaacaactctgtgaggcaaacacaattatccccaatttacagttaaggaaaccaaaatgttgagcagttaaggaatttgtccaa

SEQ ID NO: 294746 - DNA, 534 bp, Homo sapiens
acataaaactgtgtaaagcagttgttattttctttcatacatcaggatttttgctaatagtgttggttaggagaaagacgagccaaaatgcctaggttccattcccagttttgccacttaatgactgtgtgatcttgagcaagttgcttaacttctctgtgcctgagtttctgtacatgtaaaaatgagatgatgatactttatggggttactgtgaggactaaatgagttaatagatgagaagtacttggaacagtgcctagtacataggaagtattatgaaattgtgaggtcttactctgaacctagaggtttagattatttctgttttgttttgttttttgagacagagtctcacccactctgctgcccagactggagtgcagtggcacaatcttggctcactgcaacctctacctcccaggttccagcgattctccygcctcagccccccaagtagctgggattacaggcatgtgccaccacagtcggctaattttgtatttttagtagaaatggggtttcaccttgttg

SEQ ID NO: 294747 - DNA, 582 bp, Homo sapiens
tgttactagcctttatggggagaaaattaaagaggatcatattgtcagacatatttgggaagtgttacattagatgaaattgaatagctctcttctttataataccacccagagcatttaataaatttatggtgaatgtgaatctctttggagggtttcccacctaaacactggcactgaggcctttccttcctcactgtctttgacctgctggctacaaaactctctttctggagacggaggacttacaggcatccttggtctttgaatggtgaagggcattcacaaggggacgtttcactggggcctrgccatgtcatagggtcccggctggctttctgctgtgagtgatccacaggccaaatacagacagcatagatagaaggcctgtacctctcagagacaagatcgaaagccaatatcctcttttcctggtgagtgtggtgctccctacaattgtaacgaagaactgcatgtcacagggtgaccatgcgctctgtggcttccctgaatagacatcaatgatacttgctgccctctcctccaccgagatgtctcctgtggggagacagaaggggcact

SEQ ID NO: 294748 - DNA, 582 bp, Homo sapiens
tgttactagcctttatggggagaaaattaaagaggatcatattgtcagacatatttgggaagtgttacattagatgaaattgaatagctctcttctttataataccacccagagcatttaataaatttatggtgaatgtgaatctctttggagggtttcccacctaaacactggcactgaggcctttccttcctcactgtctttgacctgctggctacaaaactctctttctggagacggaggacttacaggcatccttggtctttgaatggtgaagggcattcacaaggggacgtttcactggggcctggccatgtcatagggtcccggctggctttctgctgtgagtgatccacaggccaaatacagacagcatagatagaaggcctgyacctctcagagacaagatcgaaagccaatatcctcttttcctggtgagtgtggtgctccctacaattgtaacgaagaactgcatgtcacagggtgaccatgcgctctgtggcttccctgaatagacatcaatgatacttgctgccctctcctccaccgagatgtctcctgtggggagacagaaggggcact

SEQ ID NO: 294749 - DNA, 582 bp, Homo sapiens
tgttactagcctttatggggagaaaattaaagaggatcatattgtcagacatatttgggaagtgttacattagatgaaattgaatagctctcttctttataataccacccagagcatttaataaatttatggtgaatgtgaatctctttggagggtttcccacctaaacactggcactgaggcctttccttcctcactgtctttgacctgctggctacaaaactctctttctggagacggaggacttacaggcatccttggtctttgaatggtgaagggcattcacaaggggacgtttcactggggcctggccatgtcatagggtcccggctggctttctgctgtgagtgatccacaggccaaatacagacagcatagatagaaggcctgtacctctcagagacaagatcgaaagccaatatcctcttttcctggtgagtgtggtgctccctacaattgtaaygaagaactgcatgtcacagggtgaccatgcgctctgtggcttccctgaatagacatcaatgatacttgctgccctctcctccaccgagatgtctcctgtggggagacagaaggggcact

SEQ ID NO: 294750 - DNA, 525 bp, Homo sapiens
tcaaggctcttactgacagcctaagaaataccccagaaagtctgcttcctacactggtcattatgtcatttaatattcttttaaaaaagtaaaacaastctcatttggcaaatgccttttagagttaacagatacagtagaaaggccataggttttgtgactagggacctggattggaatcctggctctccatacactagtgacactctgtcaagtggaggaatcttatttcttaatggagatagtaacaccttcttggaagggtgttataggaattgcagaattcactggatgtttacaatgtgcaatgcaccctgctagagctttataagcacctcactaaattcttacaacaaacttatgagccagggattattagccccaccccatctgctttccaagtgcacagataagggatcacctgtattgcattaggtaaattacctggaatctccctgctagttagagagggaggggcaaaggtagtgtaggtgaaagctcctaggagttactgaatgggcgcca

SEQ ID NO: 294751 - DNA, 525 bp, Homo sapiens
tcaaggctcttactgacagcctaagaaataccccagaaagtctgcttcctacactggtcattatgtcatttaatattcttttaaaaaagtaaaacaactctcatttggcaaatgccttttagagttaacagatacagtagaaaggccataggttttgtgactagggacctggattggaatcctggctctccatacactagtgacactctgtcaagtggaggaatcttatttcttaatggagatagtaacaccttcttkgaagggtgttataggaattgcagaattcactggatgtttacaatgtgcaatgcaccctgctagagctttataagcacctcactaaattcttacaacaaacttatgagccagggattattagccccaccccatctgctttccaagtgcacagataagggatcacctgtattgcattaggtaaattacctggaatctccctgctagttagagagggaggggcaaaggtagtgtaggtgaaagctcctaggagttactgaatgggcgcca

SEQ ID NO: 294752 - DNA, 499 bp, Homo sapiens
ccaggctaccttcttcactgttttggtgtgaaggctgcccatcttggcaggtccttggtaaaagaggccaaactctttatacttaaaaatttactttgctcatcttacagccttttacatctaaatatagtttcatcaagtaacattcttacaattatattcattttttattaaccctmattttgaacagcaaattcactttactagcatactgaggcaatcaatgacataatttggattttgcagtgattaaatagaggattggaagaacattaagaggggaaagagcaaatcagtaaattttaaccttaggaggtagaatgctcagcaagaggcctgggatatgtagctttcagggttcagttatgaattcaattatgcaccccataattcttcatctaaatcattagcttacagtctcaattgtcatcagacacagcaggcatttggaacttaggtgctttggggagaagagcagacatggtctttccatttggcc

SEQ ID NO: 294753 - DNA, 616 bp, Homo sapiens
gagaagtatcatgatcaggtttatgttgttaaaacctgactatgattgctatgtagagactggaatgcaggcatgttcagtacgtgaagggtaaaaagagaaggtgggtggtgaccatcaaattcagggatccaggggcttgttatcaagtcccagctctcctactaaataatgataatggctatcatttattgagaagtcactgagtgccaggcactgctgcaattattttacctataataacttattttctccttcagaaactctacaagtcaggaatcattactatctccatttaaaaaaaaataaaaagaaaactgaggcacagagaggttatgtactttgctccaaatcacttgggtagtcagttacagagctgggattttaaaccaggcagcctcgtttcagactatctgctaaaccacagtaytacactgcctctcatgctctactgcataccccagagaagtcataaaacacagtgtttcccctgccaggtggagaaaacaagggggttgagctgaatcaacacttatttcagaccttctgattccactactatgattttgcctggaaaaccaagattctgaagaagtttttaaaaatttttttagag

SEQ ID NO: 294754 - DNA, 602 bp, Homo sapiens
aggaaagttcataatatgaaagtgactctagtgggtttttattgattttggagagctattatttccccttcctaaaagatgcctaatttcttttatgactctttcacaatataaatagtctgatgggacccactgaggggatccacttgcccttttccctggagagccatgtgacccaagctcatccaaccacatgcttctgtcttcaaccttgaatcttgagcagaaaaacagagaccacaaacagctgtctctgcagtcatcagcaggtcaggggcttcaccrtaaccctctgtcatgagaatgttttgtggcctcctccatccaacctcaactcagccagcccccagggtgacttggttcttatcctttgtcctagaaggaaatgtctgtctccaactcctgtgctttctgtaagaagcagttttcctaaactctcctagccttgtgtcccacctttcctttcctgtcaccatagaggtgaattaactggttggtcgtacatttctgatgcagtggggctaaagtacagtcatcagcatgaagagtatagtctctttattcttccttctccatccagactgggaaaaaagtgataaccc

SEQ ID NO: 294755 - DNA, 624 bp, Homo sapiens
gccaggttgtaaaatcttaaaagtgagatagccctgaggtgatgcctccctagaggctaacagatccttatagctaaacttaataccagaaaatcttatgttacactctggggttactgagtcagggrttcaccaataagcagaacagtctcaatctgaaattgaggggtggatctggggttcaataaaaaaagaaactgcttttcttataattaagggacatgattaattctaatagggcttaatatttttgcatatttattcagtattaagcatggttctaagagttttatatctattcatttaacctttacaaaattattatatgggtacgctaattaacctctttttacagatgagaaaactgaaggctaaagtcatatagcactatgcggcagagccaggattagaacccagcactctggccccagaacctgttcttttaagcatcttggactagaggtgcaggcaagaatgagactgagaagggtttggaccagcggagcctaagaagtagggaggctttgttattgctcactattacccactgcacgcatgtacacacactcacatgcatgtgcacacactcacataggtacacacactcatacacacgtacataca

SEQ ID NO: 294756 - DNA, 553 bp, Homo sapiens
atttcccagttctccctttctgtcttcccatggtaagccatttctggagttagcaagtcttgtcataagcaaggtgctttcttaaacattctctaattagcactctttctttataatcttttatttataatctttagaaaggccaatcctgttatttggctgcctctctaagtcttcttacagtctaaagtctctctaatttagacttcttgccagaatttgggagtcggccttgttattcatcagcgttctctttgacccagaagattcttaagcctcattctcccaaaagaggtgggcttgtgctgcagttcaatggaacatttctcaaaaagtgttctatagaacacaggttaccagggatataaagtaagtgctccaagaaagggctctgaaatcaaacacrttttggaaattctgggctgaacagagttgaataagcatcttatcctaggaagttggggtctctcttccttgcctgttagaactgggactgcggaattagaaaactggggcagaattgtcctatcctggcagttacctgaaccttcca

SEQ ID NO: 294757 - DNA, 632 bp, Homo sapiens
tgtgggactccagaggtgggaaggacaattgcctaaaaataataatacttagaatttattgagtgtctactatgtgccaagaatttatctgcctaaggagtcaggaacaccttcacaaaaatgtttcagttggggagcccttcaagaataagaacattgtcaagtagagaggggcacttcagacaaaactgcatcttcaaaggctgtagcaaattatatgcttaccaacagtgtatgagggttccctttcctgcacatatgcacccattttttaaatcagattacagtagacctccccaacttatataaggaggatatgttccaagaccgctagtgaatgcatgaaaccatggatgttatcagtaccaaaccttatatgtactgtagtatgttttttctgtacaacaaacttatgataaagttataatttataaattaagtacaataagagttcaacaataataactaataataaaatagaacaattataacagtatacagtaataaaggttatgtaaatgtggtcttctttctctctcaaaacttcttattgtaccataytcacctattttcagaccacagttgaccacaagcaactgaaacctcaaaccctggaaagaaaaaccgcagga

SEQ ID NO: 294758 - DNA, 555 bp, Homo sapiens
ctacatttcccccaccccagtcccctagtaaccatcatttcattctttgattctatgagtttgacttttttagattacacttataagtagatcatatagtatttgcctttctgtgtctggcttattttacttattttcctttgggttcatccataaatagtagtcttttcataaatagtagtctttccttctttttatggttgtatagtatgccattgtatacatgagtatatgtatatatacacaatggaatattayatgtagaatatatattatttatatgttttcataatggctgtatcaatttacatttccaccaagagtatataagggttgacttttctccacaccctcaccaacacttggtatctcctgtcttttttatgatagccatcctaacatgtgtgaggtgatatttcactgtggttttgactagcatttctctgatgattcatgatttcttctaggagttttgcagtttcagatcttacagttaagtctttaatgcattttgagttagtttttgtatgtggtgtagagcaagagtccaatttc

SEQ ID NO: 294759 - DNA, 586 bp, Homo sapiens
aatgtacagatttgagaagctgagcaaactccaaacagggtaaacctaaataaatcaatgcctagacacatcataattaaacttttgaaaactaaaaaagaagtctcaaaaacagccaatgaaaaaacaaaaaccttacctacacaggaaaaataattcaaatgtcagtggatttctcattagaaaccatggagaccagaagtaaatggcaccatatttttcaagtggtgaaggaaaaaaaaagcaattgtgaaacctctactkagtctcacactttacaaaaaacattactcaaaatggatcccaaacttaaattcaaaatgtaaaactataaagcttttagaaaaggcaggataaaatcttgaaggtttaaggctaggcaaagatttcctagatttgactccaaaagcatgacccataaaggaaaaatacataagttagagttcatcaaaagtaaaatatttgctccgcaaaagaacctgttaagagtatgtaaagacaatatagaatgggagaaaacatttgcaaaccgcatatctaacaaaggacttgtatctaggatatataaataattctcaaaactaaa

SEQ ID NO: 294760 - DNA, 286 bp, Homo sapiens
tggtgactagacaggtgtttgatgatccagttattgcccctccacagaagtttcctgaatggaaaataaaacttgtgggcaacaktcataaaatttgtttttatagcattataaaagtacatgttcatgtaacaaataataaaacatatataaaataaactttttaaagccactcctcaactcccttccttcccccacctcctcatacccaattcaaatggctacaaagattgctattatcaagagattgatattatcctttcacacatttttctatgcacacgtg

SEQ ID NO: 294761 - DNA, 286 bp, Homo sapiens
tggtgactagacaggtgtttgatgatccagttattgcccctccacagaagtttcctgaatggaaaataaaacttgtgggcaacattcataaaatttgtttttatagcattataaaagtacatgttcatgtaacaaataataaaacatatataaaataaamtttttaaagccactcctcaactcccttccttcccccacctcctcatacccaattcaaatggctacaaagattgctattatcaagagattgatattatcctttcacacatttttctatgcacacgtg

SEQ ID NO: 294762 - DNA, 506 bp, Homo sapiens
atacagtattccattcttccaacgttaggaaaaacatacaaaaatctttattctacgcttattgttttttctttatgtttatatttctggaatgtatgacttagaaacaaacaatatgagtctgagttgggtatggtcctaagttaaatgtggctattctgctttaaagacagaagaagtattattgccaaacttttgcttcaaattcttttcattaaaattaattaggggaaagttctgaactggaattgaagagtagggaacaaaattttaattcttagtatcattctccctcaatctgacataagcctttatagaatttaatcacaggtatttttttcctgtgcttcattattattgattccttgtmgataaacatcaaaatattttaaaaatcaaatccttttttataaggggaggaggagagaaataggaataatttcagattaaatactaaaatatgatctaaattataacctagttgatacttttatgtaaaggagtgg

SEQ ID NO: 294763 - DNA, 489 bp, Homo sapiens
atcccatttgcaatagctaccacataataaaatacttaagaagaaatttaacaagggagatgaaaaatctgcacactgaaaactatacaacaatgataaaagagaagatgacacaaacaaatagaaagataaccagataaccagattcacgagttggaagaattaatattgttaaaatgttcatatgactcaaaacaatctaaaaattcattacaatctctatcaaatttccaatgacatacattatagaartggaaaaaaaaactatcttaaaatttgtataacaccacaaaaggccccaattagctaaagcaatctttggcaaaaagaacaaagctgtagacatcacaatacctgatttaaaatctactacaaaactatagtaatcaatgcagcatggcactgacataaaaacagacatataggccaatggaacagaatagagatctcaaaaatatatccatgcatttatggtcaatttatctttca

SEQ ID NO: 294764 - DNA, 590 bp, Homo sapiens
gatgtgctaggcattgataaaattggaggcaactgaataaaaaatcagggtctcagcctgttcacaatatgctggagacaactgtaaaagtagactctgagtcataatataatgttttaagttctctccttggagcatgaacaaagtcttttggatgaattgattcattgattcaacagatatttatccattccataacacacgccttgtacttggccagatgctacagttaatyctgtgaaatgaaagtagcttctcatggaagatgatgttatgcaaaagaagatgattagaatttcattaggtaggaaactgggattgacatatgctcagcagaaggaaaggcaggagagaatggatgtggaggttggtgagaaggcttaggagtatggcaatctggcaattggagatccttagggaaaacatgctgtctgatgtgatttccacaggcagttgcaggagggaagtcttggaattaggcctcaaatattaaaactttccagtttagcttctacatgcctgaaactcactggaatagtttactataaaagagttactacagtaatctcatatattctgaaggctcttgc

SEQ ID NO: 294765 - DNA, 591 bp, Homo sapiens
gttgctgaggccaaggtttcacctgggcagcaaggcttggagccagggagagctttgagacctggagctggtctggtctgtgtggcattgctgggttccgcagcctgctccctcagtcagttggggaggaatgccgcaccagctccaaggaatgggaaagaggtggaccccactcccctggagatctaaccttcaaagcagaccacctctaaggaaggagggagcacagcccacccaaagcyccctccggatcaaaggaaatgtgaatatggtgccagctgctgaaggggacatcaacaaagcctgggaacatacttggaaagtgtcagcttctgagcccaagctaagccatcataacccctgtgacctgcacatatacatccagatggcctgaagcaactgaagaaccaaaaaagaagtgaaatagtcagttcctgccttaactgatggcattccactattgtgatttgttcctgccccaccctaactgatcaattgaccttgtgacattccttctcttggacaatgagtctcaggagctccccatcgagcaccttgtggcccctgcccctgcctgcaagagaaaaaacc

SEQ ID NO: 294766 - DNA, 547 bp, Homo sapiens
agacagtatttcacaacaattaattacctagttattatcctttacattctcaaccccgacactgttattcattcacttagttgctgaaatccaaactccatgaggccagatacttttttctgttttgtttacttatgaattcctatagtaaaagcaccataataatgtgtccagaatttattccttccagtgggttcttggtctcactgactttaagaatgaagccgcagacgcttgctgtgagtgtcacagctcttaaagatggtgtgtccggagtttgttccttcagttgttcagatgtgtctggagtttattccttccggcgggttcgtggtcttgctgacttcaggaatgaagccacagaccctcgtggtgagtgtgacaactcataaaggtagtgcagacccaaagagtgagcagcagcaagatttattgtgaagagcgaaagaacaaagctaccccagtttggaagggaaccagagcaggttgctgcccctagctsatgtggcccgcttttattcccttatttggccccacccacatcctg

SEQ ID NO: 294767 - DNA, 552 bp, Homo sapiens
agagttttataaattcaggaatttatcaatctcctctaggttttctagtttgtgcacctaaaggtgttcatagtagtcttgaatgatcttttatatttctgtggtatcatttgttatatctcccatttcatttctaattgagttatttggatcttctctcttctctttttggttaatattgctaatggtctattgattttgtttatgatttcaaagaaccagcttttgtttcagttatcttttgtattgtttttgttatttccatttcatttatttctgctctgatctttgttatttattttcttctgctgggtttggatttgttttgttcttgtttctgtttccttgaagtgtgagcttagattatctatttgagttctttcagactttttgatgtaggcatttaatgttattaacttttcttttagtaccgcttttgctgtatcccagacrgtttgataggttatgtcactttatctttcagttcaaataatttttgaatttccatcttgacttcactgttgacccaaaggagcagattatttaatttac

SEQ ID NO: 294768 - DNA, 634 bp, Homo sapiens
ttgggcttttattttgtttgtttgtttagaagtctatcttttccactaaaataggagttccttataaaataggctgttacttaaatcaccttcgtgtccacatcactctaattttgcaaagtgccttacatataaaacctgcaaatgaatgattgctgaataaacatagaataaaaatgcagaatattagagagtttcatcagagatgaggaaaaagtaaaatcttctactgcttcatagacactgcaacaatattttgttatttgcatatctctcttttatagaatcagactcttagttcaatttaaaatttgagatatgagacttctactcttttcatacaaactgatttcttacgatcgattgatgaggaagcatgtgttcctaacscagaacaaacttgttaataggatcttttagcatctaagataggaaagggaaggacataaataaacatatttaccaccttaaggcgtatttacaaaagcagtctctaaggataactaacttcttatgattttcttacacaaaggattttgatatttaagtaaatatggatactgttaatatacccaaggatttggaattctctggaagacataccaggaaatgctactttccagttactaaagat

SEQ ID NO: 294769 - DNA, 663 bp, Homo sapiens
cccaccccttgacaggttacatgtggtgttgggctttcagttgcacagaagtcaataattgaggtttgggaacctctgcctcaatttcagagggtgtatggaaatgcctggatgttcaggcacaagtttgctgcaggggtgccctcctcatggagaacctctgggatagcagagaagaaggaaaatgtgtggttggagaccccatacagagtccccactggggcactgcctagtggagctgtgagaaaaaggtcacttggacttttgaattaatgttgaaatgagttaagactttgggaaactgttggaaaggcatgactatcttttgaaatgtgaggatgtaagatttagaaagtgccaggggtgraattatatggttaggctttgtgtcccccacccaaatctcatattgagttgtaatccctataatccccatgtgtctagggagaaactaggtaaaggtaattgaatactgggggtgggttcccccatgctgtttttgtgacagtgagttttcacaagatctgatggctttataaggggctcttcctccttcactcgccactttctcccgcctgtcatcatgtaagacctgcctcttccccttctgccatgattgttaagttttctgatgcttcctcagtcctgcagaactgtgagtca

SEQ ID NO: 294770 - DNA, 599 bp, Homo sapiens
acctataaggggacataataaatttctcaccagaaataagacccaaatatatgctgcattcaataaagtcactttcgatttaatcatattgattggttgaaagtaaaagggtagaaaaaggttgactattcaaacattaatcaaaagaaagcaacagtagtagttatattaatatcattaaaagtagacttaagagcaaagaaagtaactagagaccgagagacattattgcataaggataaagggaacagcaagacataatgatcttaaatatttacaccttgatcaacaaagtcccaaggcaaataaaacaaaacctaatagaactgaaaggagaaatagcaattataattggggatttcaatgtcttccttccagcaactcaaacaggaacacctmtttttattgtgttttgctttattgagctttgcagatacttatggtttatttatttatttttaacaaattgaaggtttgtggcaatgttgtgttgagcaaatctattggcaccacttttccaatagcatgtgctcactttgtgtctgtgtcacatattttggtaagtctctgactgttgcaaatgttttcattagtattat

SEQ ID NO: 294771 - DNA, 634 bp, Homo sapiens
tgtttcttgttttccattagatggaaacattagaatatagtgaacattcccctaaattttaactagaaaaaaatattttaaatgtgatttttctctatttcattctccctgtttctctttctctctttgactctgctctgtaatgttatgtaagaatttagactactatttatagtagagagaagaaggataattcttgtatctcaggacaactcagcttttacaaggggccttagtgacacaccaaggtgtaaagggagtggccgaggaattgatgaaacatgttaaagcttaccygctaaagtaaaaaaaaaaaaaaaaatacattttagaaggctttaatagtaggttttcttttaaaaattttaaatgtttaactccattcacagctaaagggttcactgctatttttacacaggatataaagatggaaaaggagcacatgtttttaaagatgaggaaagtgaagccaggaggttatgcaacttgcccaagcaagttactggagccagatctcaaacttaggttctgttttcttaacaactcaatgctgtaattaataatgataatgtgaacagaaataatactgtaaaatatatattgagtgctcacatggaagtcagactttgtagcc

SEQ ID NO: 294772 - DNA, 197 bp, Homo sapiens
ttcatattctcctagataggcatctagattacttatagttcgtttcagaatataacatcatttacctcagggagaaaccttttgagttaatacaaaatgtaatattatttttctttaaagtaaatttcragcttcatggaattgtcagagagataacagaggacacaaataattcaagaaaatataatgatgtgatc

SEQ ID NO: 294773 - DNA, 472 bp, Homo sapiens
taaataaaactaattatgttctcatttatctatatgaataatttatgttctgacagcaattctagatgtaaagtctgtaagaactagaactttaaaatgtgtatttaaatttaattgatattgctaagtataatgatgatagagttttttatgaagacaaacattaggttcaaattatagtttcytgaatagttaagtcctctacgaggatcatagaacacagttcttggtttaatatattaaggctatgaagaaaactgaaaatacaaggtagataatttatgacaaaaaaatacaaattttttaaaatatggcagtctctaccaacaccaaacattatataacagcaggtgaattactcatttacttgccatttactttatttccatatcattattacagataatcttactgttacagaattttttgcaaatgctgatttctgtccacaggattggttatttgaagtatg

SEQ ID NO: 294774 - DNA, 1207 bp, Homo sapiens
cctgtgccactttcaggctcaaacagtcaggcaaggcccatctcctccacacagtggtttccaaactgcaagctggattcctatgtgcagggacaaaatgtgttgaggatggcagagctttgtcatcctcagtcattggatgacatcatatagcagagtcaccaaaaactgtgttgaactgtatcatgagtgagaaataaccttttgttatattaaactcttgagattcagggattcagattaactcttataacagttaatttactcagattaattctatccatttatattcaacctctggttgtatctcccttaaatttagtgttataatggatttttaataacaaattttaagaaaattgaaagacatgaaacaaaaatcacctatatgtcacaaaatatctttgaacacacatgaaaataaatatacaatatgcaggaacattgtaaacatggtaataaaacaacaagtcaaattagtgaaatactactaatttgtttctgtcaaatcgattcattaaaatggttatagtacatgtkggtgaatgcatggcaaaataaggacatttatattcagtaagaagtataattgwtgaaatttggttgtcttggagaatggtgaggccaaataaccaaatagagagtggacatggaggaaggtcagttctactacgcatgtcttgcaactgaagtaatcgtgggaccactaggaggaaattgtccawcaagagctgaatgagagaatgtgaagctcagaagataagtttgacctaatgatttagaagtcatacgatatggtttggctgtgtccccacccaaatctcatcttgaattctagctcccataattcccacgtgtcatgggaggaacccagtaggacgtaattgaatcatggggttgggtctttcccatgctgttctcatgatagtaaataaatctcatgagatctgatggttttataaatgggagttctcctgcataagccctcttgcctgccgccatttaagatgtgacttgctccctcttgccttccgccatgattgtgaggcctccccagccatgtagaactgtgagtcagttaaacctctttcttttataattacccagtcttgggtatgtctttattagcagtgtgagaacagactaatacatcatagtatagatatgatagatggagccatttttctgattttcttctctttacaga

SEQ ID NO: 294775 - DNA, 614 bp, Homo sapiens
tgaaatttggttgtcttggagaatggtgaggccaaataaccaaatagagagtggacatggaggaaggtcagttctactacgcatgtcttgcaactgaagtaatcgtgggaccactaggaggaaattgtccaacaagagctgaatgagagaatgtgaagctcagaagataagtttgacctaatgatttagaagtcatacgatatggtttggctgtgtccccacccaaatctcatcttgaattctagctcccataattcccacgtgtcatgggaggaacccagtaggacgtaattgaatcatggggttgggtctttcccatgctgttctcatgatagtaaataaatctcatgagatctgatggttttataaatgggagttctcctgcataagccctcttgcctgccgccatttaagatgtgacttgctcccycttgccttccgccatgattgtgaggcctccccagccatgtagaactgtgagtcagttaaacctctttcttttataattacccagtcttgggtatgtctttattagcagtgtgagaacagactaatacatcatagtatagatatgatagatggagccatttttctgattttcttctctttacaga

SEQ ID NO: 294776 - DNA, 584 bp, Homo sapiens
aagtttggtgtcatagaaagaggatccaagtacatttggccttggatccttcctctaccrcttaacgctgttgtggcctcaggagtgtcacttgattccttttgttcataaataaagtagtgataaaagtgtttacctttacatgttaattgtaaggctaggagatttgctatggaaaatactttgcccagtctttagcatgtagtaggtgcttactaaatgctagttcattaatatcattgctattatcattaccgtctctgaatggtgccaaaggactagttagaaaagttaagataaaaacagctcttgaatttattcacttgggccttgatatagactgggccttttatgttgccaaaatagccagggaaatataagtgtaaagtcacattaaaatgtttcatgcagggaaaaataagtggtctcctaacttgattttgctcatttatttttccagcaagcattaaaccataatcaggcccttacaactggaaacatcacatagcaattagagtttcacatgtcacaactgaggtctttggggaaagagatgctactgacataccagcccattctgtcct

SEQ ID NO: 294777 - DNA, 596 bp, Homo sapiens
aaattaccatcgctgcttcctctttcttgaaagaatgaacttcagaactctgtggtacagaatgggctagattaggagtaagtttctgagataactgggtactttccaatgacagaatcattctatgaatctgtgacatgttggttaacctggtggacagggggagatkcacacctgacttgaagagtattgaaaaatccttaaaatatatctttgcttatttatgaatgtcagaatagaacaattaagagagagagagaggaagagacagagagataacaaaatactaacaattggttagtactttggtgaatctaggtgaggggtatgtgaataatcattgtattgttttacaacttttctgtagttttaaaataattcaaaataaaaaatggggagggaataatttgtttatttactaattataatttctgggaactagctgacctttgtttttgtaattttcattttaatgagtcattttattttcactcttggaaaggtctctatatgggttaaatgataaagtgaataccatatgcccaaatcaaggggtcaggattttaaacattacctaatgtcagcggcctttttcc

SEQ ID NO: 294778 - DNA, 329 bp, Homo sapiens
tcatttaattctcaaactatccctggaggcaaatattatcattgtcattattttatagatgagaaaactgattcttagatatgcactatccaaaaagtaaccattagccacatgtattagtctgttcttacactgctataaagaaattttggagattgggtaatttgtaaaggaaagaggtttaattgactcacagttccacaaggctgsagagacctcaggaaacttacaatcatggtgggaggggaagcaaacatgtccttcttcacatgatggcaggaaggagaagtgccaagtgaagggaggaaaagtcccttataaaaccatca

SEQ ID NO: 294779 - DNA, 615 bp, Homo sapiens
ttgtgtgcaagtagttcatttgggatgtgatccagggagcaggacaaagggaaaggaaccaggaagaaggaaaagccagtacatggatgcattataaagctgcccacttctgaaggtgacagagcttcatcccttcttaggaggcttgtgatatgtggcacayaactgtgcacctgggttagaaaagggagaagcattgatctttagtcttctacctctgactggtcaaggtggccccacagctgcttactcccttgcacgttgagatttgcatgtacaaatgccaaaagtgttcccatgggcaccccatgtctaaaccctagggtaggaagctagaaatatgagtggagtcaggcagacactgacctatttgatctgtgcaaagctggttgaagcctgtgcagaaatggccaggacggcagtggctgtagcaaaaggtggggctaggaagacatacagtgatacacagaattggctaatgcccgaggtcatatgactattcaatacttcaaatcaagcctgcctaactgcaaggcctagatgccttccataattcacattggtttccaagaaggtgtctggctttgtggaacttaaggatgagtttattgtcct

SEQ ID NO: 294780 - DNA, 615 bp, Homo sapiens
ttgtgtgcaagtagttcatttgggatgtgatccagggagcaggacaaagggaaaggaaccaggaagaaggaaaagccagtacatggatgcattataaagctgcccacttctgaaggtgacagagcttcatcccttcttaggaggcttgtgatatgtggcacataactgtgcacctgggttagaaaagggagaagcattgatctttagtcttctacctctgactggtcaaggtggccccacagctgcttactcccttgcacgttgagatttgcatgtacaaatgccaaaagtgttcccatgggcaccccatgtctaaaccctagggtaggaagctagaaatatgagtggagtcaggcagrcactgacctatttgatctgtgcaaagctggttgaagcctgtgcagaaatggccaggacggcagtggctgtagcaaaaggtggggctaggaagacatacagtgatacacagaattggctaatgcccgaggtcatatgactattcaatacttcaaatcaagcctgcctaactgcaaggcctagatgccttccataattcacattggtttccaagaaggtgtctggctttgtggaacttaaggatgagtttattgtcct

SEQ ID NO: 294781 - DNA, 615 bp, Homo sapiens
ttgtgtgcaagtagttcatttgggatgtgatccagggagcaggacaaagggaaaggaaccaggaagaaggaaaagccagtacatggatgcattataaagctgcccacttctgaaggtgacagagcttcatcccttcttaggaggcttgtgatatgtggcacataactgtgcacctgggttagaaaagggagaagcattgatctttagtcttctacctctgactggtcaaggtggccccacagctgcttactcccttgcacgttgagatttgcatgtacaaatgccaaaagtgttcccatgggcaccccatgtctaaaccctagggtaggaagctagaaatatgagtggagtcaggcagacactgacctatttgatctgtgcaaagctggttgaagcctgtgcagaaatggccaggacggcagtggctgtagcaaaaggtggggctaggaagacatacagtgatacacagaattggctaatgcccgaggtcatatgactattcaatacttcaaatcaagcctgcctaactgcaaggcctagatgccttccataattcacatkggtttccaagaaggtgtctggctttgtggaacttaaggatgagtttattgtcct

SEQ ID NO: 294782 - DNA, 523 bp, Homo sapiens
aagccacactgccaaatcctatgttcttgaggaggaatcatattccccctataaggagagacccaaaatatttagaaaattaatctaccaaagacccttctgtacttcacaaattttctatgagtatatacaatatttattaacagaaaaatatctgagctgttgatttttaaggaattttacttttctttaagtagaaattcatttagctgcaaataatagaaaatttgactttcaaccgtttttaaaaataaagcctgatcttctcacatatttataaatatgagggtaagtggcttcaagtcttggttaacaactcagtcatgtttgagccaacctctcatcarttgtcttgacttttccctcgtgtttacagcccattgtcacagacagccactgctgtatggagttaccatctccaatgaaggaaagaggaaagggaggtgtgagaagcactgcagccacgccagtttctttaacaggaaagcaaaggtttccaggtagattgccccagcgccctgcc

SEQ ID NO: 294783 - DNA, 573 bp, Homo sapiens
  misc_feature (1)...(573): n = A,T,C or G
nnnnnnnnnnnnnnnnnnnnnnnnnnnnnnnnnnnnacattttcatagcatagagaccattagagtgagtttctacaatatttacttcttttcaatctttctcaaatgtagagtttaatgattccagacagtaaacaatactcacaatggtactgatgaattgtaaatttttgtactgaggtattctgagagttaaattttagtctgccatctgtcagctatgtattattgagcaagatacttaacctctckgagcctcagtttcttcatctggaaaatgactacactaatactatctattttggggcatattgtaaagattaaatgaaaacgtgtatgtgcaatgtcaggatatcatgagttgaaggtcccccaaaaaatccaactctaacaaaaacgcaaaggaaatgtattaattcatgcaacaggaaattgaaagtgaaaggctggctttacgtatggttggataaagatgttcaataaatgtattcaaaatttgtcttttctccaactcttggctgagctgttctttggataggctttaatttcaagtagtttctcttcatgtgttgg

SEQ ID NO: 294784 - DNA, 560 bp, Homo sapiens
acattttgaagcaagcacagtggacaaattagctcatcatggacagatgatagttgttattttcaattacttcatgagtatttttctcaataatgttgtacagttgcaactgtctcattttatttggcgtccagtaagacgtggcctctagggcaggaaaaaaatctctgtgatgcttttttagtcacagaaaacttattaatatgaaaggtgtcatacctttaaaaactmaaatatgaggttaaaaaacagaaccgaaattttaaaacattttttaaataaaaaaatgtgaaatgatcacagctgaacaaaaggcaagagttttccaaactctgagcctagcttccttctgtaggaatgacattcctgcacaggtgtctgccgactcagttttggctgtatacttggaaaccttgcagaggtaaataaattcctagctcatggctgtcaaacatattaaattattttttaaaaaggaaatctttatggaatttcaatgtaggaaattgagaaaagtggagcaactccagtcaaaacacagagagagttaaagcaaagag

SEQ ID NO: 294785 - DNA, 566 bp, Homo sapiens
tggcaacacatttctccttcagccagaatatactttttatctttttgatgtctctgagaagtgaaattagtcaagaagaggtcatgtgattggtataaattaatgggaaaggacattagaaagtctttgggatattttaacctgtctatgaaaaactagtaaatgagtaactacttgagagttagatggagttcttaacctagtatccacagacactgaraagtcatctatggggcttctggtggatctaactagcaatatagattgtctgcagacctgtgtatgcttgtaaatatgcaaagtttctggctactgtggtcacatatggagctaggagtgcatataacccaaaggaaataacagagatgagagcaaacattttgctccctggaatcagcatccttaggtctgctcatcttggcttagggaaggaagatttacttcagcaaccggatgctgcccacctcatgatgctgcccaccttccccagccctgcctacttaactccctggacttcattcattgctcatccagatctgtggcaccaattacatttcacaggaaca

SEQ ID NO: 294786 - DNA, 478 bp, Homo sapiens
taattggctttcttaatattcaaacacatcaatcttttaaaatgttaattgacatctactttcctggataagtgttttcttttataaaagtgtaattttaaaaaycctaaatttaaaagttggcattggtaggtataaatttttcttattgacaacagaaaagacaactttttctactcaaattcctactagccacagaaaataccaacaaaacgtgattaataaaacaaccttaagtcttttcactgacattcccaaaaaccaaaactaaccgttgagtttaggatgctcaattgcttctttgttcttccaaacttcatattcttgatgaggtgtagattgatatgactcaagggaagccaaagcaaagatatttgttttatgtatctgaactctagtgaaagccaaataggtaggcttttaaggtagactgagaggccagattttcagacatcactcaagcagaactcgtgctggg

SEQ ID NO: 294787 - DNA, 537 bp, Homo sapiens
tggggtaagcggttggttttgggatgaaactgtcccagctcagatcatcagtcattagattcccataaggagcgcacaacctagatccctcacatgtgcagttcacaatagggttcgtgctgctatgaraagctaatgccacccctaatctgacaggacatggagctcaggtggtaatgctccctcacctcctgctgtgcagctcagttcctaacaggccatggacagggtaccgatcaaaggcccaggggttggggagccctggactacagagaacactgtagtgttgtactggaatctgatgtatcagcataaagtcatggctagatagatagatagagatgtagatgtagatagatagatatagatatgattgatagatatatagagaactacagatatggtatgtatatggcttaaagtacacaaatatattttctaacatatagatagatatagacagatagatacatacatacacacatatgtacatagatacatagatagagaactacagatatggcatgtatgtgggtt

SEQ ID NO: 294788 - DNA, 537 bp, Homo sapiens
tggggtaagcggttggttttgggatgaaactgtcccagctcagatcatcagtcattagattcccataaggagcgcacaacctagatccctcacatgtgcagttcacaatagggttcgtgctgctatgaaaagctaatgccacccctaatctgacaggacatggagctcaggtggtaatgctccctcacctcctgctgtgcagctcagttcctaacaggccatggacagggtaccgatcaaaggcccaggggttggggagccctggactacagagaacactgtagtgttgtactggaatctgatgtatcagcataaagtcatggctagatagatagatagagatgtagatgtagatagatagatatagatatgattgatagatatatagagaactacagatatggtatgtatatggcttaaagtacacaaatatattttctaacatatagatagatatagacagatagatacatacatacayacatatgtacatagatacatagatagagaactacagatatggcatgtatgtgggtt

SEQ ID NO: 294789 - DNA, 557 bp, Homo sapiens
cccaatagatgattcaattacctttcaccaggtcccttccaagacacatggggactatgggaactacaattyaagatgagatttgggtggggacacagccaaaccatatcattgttaatttcctggttctgatcattgtactgtggatatggataggagaagctggattgtgggctatacggaaagtctctccgcaattgttgaaacttttctgtaagtctgaaatgtgttcaaaataaaaagttaaaaaacatgaaatacaaggtgatgtgtaaaaattgttttaaagacaacttttagatctttttaaaggtttttgaaggaatgatatagttcagactctttaccctgaactgcaaagatttgcaccaggagctcattcttaccactcctatgtcatttccaaccctctgccacccatgctggcttttttcttttccttgagcatgtcagatgaattctcaactacacacacatacaaacacacacacacacgcacacacacatgtgtcttcccctgatcttctcaaaattggctccttctcattgttcagcag

SEQ ID NO: 294790 - DNA, 557 bp, Homo sapiens
cccaatagatgattcaattacctttcaccaggtcccttccaagacacatggggactatgggaactacaatttaagatgagatttgggtggggacacagccaaaccatatcattgttaatttcctggttctgatcattgtactgtggatatggayaggagaagctggattgtgggctatacggaaagtctctccgcaattgttgaaacttttctgtaagtctgaaatgtgttcaaaataaaaagttaaaaaacatgaaatacaaggtgatgtgtaaaaattgttttaaagacaacttttagatctttttaaaggtttttgaaggaatgatatagttcagactctttaccctgaactgcaaagatttgcaccaggagctcattcttaccactcctatgtcatttccaaccctctgccacccatgctggcttttttcttttccttgagcatgtcagatgaattctcaactacacacacatacaaacacacacacacacgcacacacacatgtgtcttcccctgatcttctcaaaattggctccttctcattgttcagcag

SEQ ID NO: 294791 - DNA, 557 bp, Homo sapiens
cccaatagatgattcaattacctttcaccaggtcccttccaagacacatggggactatgggaactacaatttaagatgagatttgggtggggacacagccaaaccatatcattgttaatttcctggttctgatcattgtactgtggatatggataggagaagctggattgtgggctatacggaaagtctctccrcaattgttgaaacttttctgtaagtctgaaatgtgttcaaaataaaaagttaaaaaacatgaaatacaaggtgatgtgtaaaaattgttttaaagacaacttttagatctttttaaaggtttttgaaggaatgatatagttcagactctttaccctgaactgcaaagatttgcaccaggagctcattcttaccactcctatgtcatttccaaccctctgccacccatgctggcttttttcttttccttgagcatgtcagatgaattctcaactacacacacatacaaacacacacacacacgcacacacacatgtgtcttcccctgatcttctcaaaattggctccttctcattgttcagcag

SEQ ID NO: 294792 - DNA, 510 bp, Homo sapiens
cacctataaatgaataaagcatttgaggattcagtctggcaaatgcagagcaggtctgcagaacagacatattaacaaattgttttggaagtggagcagcagcaggatgggagattgaraggggttgggatataggtgacgaacagcacagacacactggtgttgcaagtgctttttccttcttttgactggtaagagcttctattgatagctcattttaataaatggtacttccttgcaaaattctctatctttctttttcataagagctaggaaagttccgtatcaattccttgtttggacttccacttcctcccccaaagggcaaaattatgatctaatttatttaaatgagcattacccaataaggttggctctgtttagcatgactgcctgcagtctcaaagtattcacagacctgctcagttttagccttagggatagatggagtcagggctatgactgcagaaatcacggtagatgttgccttccctgatcatagatttccac

SEQ ID NO: 294793 - DNA, 528 bp, Homo sapiens
taggtgacgaacagcacagacacactggtgttgcaagtgctttttccttcttttgactggtaagagcttctattgatagctcattttaataaatggtacttccttgcaaaattctctatctttctttttcataagagctaggaaagttccgtatcaattccttgtttggacttccacttcctcccccaaagggcaaaattatgatctaatttatttaaatgagcattacccaataaggttggctctgtttagcatgactgcctgcagtctcaaagtattcacagacctgctcagttttagccttagggatagatggagtcagggctatgactgcagaaatcacggtagatgttgccttccctgatcatagatttccactattaatagttcattactgtagctttaaactasataacccacaatttaaaggttgcttttcctcttaaatttaaaaaaaaaattaagatgaaaaatagtgtgattcttttctttacaatttttaaattaggtcccaagaaaaatgtgcta

SEQ ID NO: 294794 - DNA, 593 bp, Homo sapiens
ccttacaaatggacagccttgatttcaacctttatgttttgtgagcatgagtattatttttgcaagaataagatgttcaaaacaccattaaaacaatttctgtattgtcgctgatgaaacagtttaaccactagggtttctcmccagggaacagttaactttcctctaatcttggttgttttctttgttctaaaacaccatattctttaatatgcctgcctttatttgttttgttgaaacataaacagatgctctaagcgaaacatcattttaaaaaagtagtccctgctactagtccattaatcagaatgagataccagactgggaaagaaattggtgggagaagatgttaataataatgaaaaatgctttggacactggttggctggattaaaaaaatcacaagtccaaatctttacacatgactctgaaaatgatgtttaattcattccatattgtgtttttggaacatcaaaggcttcatcaacttccttaataaagataaaatagatatgtagaaagaagcaaaatactcatgaatctggcagcatattttagatcattagaaccaaggttcattgctagtaccaaaa

SEQ ID NO: 294795 - DNA, 593 bp, Homo sapiens
ccttacaaatggacagccttgatttcaacctttatgttttgtgagcatgagtattatttttgcaagaataagatgttcaaaacaccattaaaacaatttctgtattgtcgctgatgaaacagtttaaccactagggtttctcaccrgggaacagttaactttcctctaatcttggttgttttctttgttctaaaacaccatattctttaatatgcctgcctttatttgttttgttgaaacataaacagatgctctaagcgaaacatcattttaaaaaagtagtccctgctactagtccattaatcagaatgagataccagactgggaaagaaattggtgggagaagatgttaataataatgaaaaatgctttggacactggttggctggattaaaaaaatcacaagtccaaatctttacacatgactctgaaaatgatgtttaattcattccatattgtgtttttggaacatcaaaggcttcatcaacttccttaataaagataaaatagatatgtagaaagaagcaaaatactcatgaatctggcagcatattttagatcattagaaccaaggttcattgctagtaccaaaa

SEQ ID NO: 294796 - DNA, 593 bp, Homo sapiens
ccttacaaatggacagccttgatttcaacctttatgttttgtgagcatgagtattatttttgcaagaataagatgttcaaaacaccattaaaacaatttctgtattgtcgctgatgaaacagtttaaccactagggtttctcaccagggaacagttaactttcctctaatcttggttgttttctttgttctaaaacaccatattctttaatatgcctgcctttatttgttttgttgaaacataaacagatgctctaagcgaaacatcattttaaaaaagtagtccctgctactagtccattaatcagaatgagrtaccagactgggaaagaaattggtgggagaagatgttaataataatgaaaaatgctttggacactggttggctggattaaaaaaatcacaagtccaaatctttacacatgactctgaaaatgatgtttaattcattccatattgtgtttttggaacatcaaaggcttcatcaacttccttaataaagataaaatagatatgtagaaagaagcaaaatactcatgaatctggcagcatattttagatcattagaaccaaggttcattgctagtaccaaaa

SEQ ID NO: 294797 - DNA, 458 bp, Homo sapiens
atagtggattagtggctacagtaatttatattcccactaacagtgtatgagggttcccctttctccacatccatgccagcattcattattgtctgtcttttggataaaagccattttaactggagtaagatgatacctttttgtagtttttatttacatttcttcatcagtcaaattttttaataaaatgatactagtctttgccataaatattagaggaaccaaaaaaaaaaaaaaaacaaagtcctgaaatctagtatttaaattttaattttgtgacaagatgggctaratgcttaccaaacccatttcctcttcctgggtgtaggaataagataaaggaaaactcttccttactgtagaaatatagttaataaaggtacaagagaaaggaaatagacaattacaattaagcaaacaccatagtaataattgtgtgtcataaaaacaagatccat

SEQ ID NO: 294798 - DNA, 491 bp, Homo sapiens
tcctcatcgatcaagtaagaacacaaatatttcagatggtttttgggatgattgattggaaagtgacttactcagtgctgagtgcaaagtagccctttggtaggtgtgcattctttgttctgcaaagaagtggcaaaatccttagagagaatgttgggaaatacttaaactaaaggaggagaaaaagaaaaagtagttaacaaaacccaagacaatcaagaagagacagggcccaggagagacaaggccgtggaagtcaaaggaagttaatgtccatgaaaattttatgacacagtgtctgagaacaaacagagtytaggacaagagaaactaaaatgttctttcctaacagtgtttttaaaatagtgtgtccctgtgctctgtcaccattcaggaccagcatgttaataccagggccaggccttttaaataattcagtctcctgacaaggagcaaaatatggaagatgagagagacctggcttaatagaa

SEQ ID NO: 294799 - DNA, 420 bp, Homo sapiens
aaggaaatagacaattacaattaagcaaacaccatagtaataattgtgtgtcataaaaacaagatccatcaatgaatgccaaaatcagtaggtggaagtttgaagagaaacactttctatagcctcaaaatgtgtcctctaagatctttagtaactacaaagagaaagatagtaagtttacagtggtgaaatgcagcagacaccaacttaaccaagcaatcaaagtcaacatcactggtaataaagacattaatattatgaacccagatataatgccctgagaaagacacaacatcatttctccctcttgggtaaggtcatgtgatgaattatcaccagcaggagatgagtgaaggtcctgtgycactttcaggctcaaacagtcaggcaaggcccatctcctccacacagtggtttcca

SEQ ID NO: 294800 - DNA, 572 bp, Homo sapiens
tttttcctctccttttttcttttggtaataacactgtcttaattctggtgacatgttccatgcaaccgcagtactaatacgggaaggggcagggaagtgcggggtagagaagggcgggggtccgtggtgagggctccaccctcgggcctgtgcccgcggacmtaagtgaaaacgggcactcctgtttttaccccgaatgttgcattttccaagaccgctctgacccgccacgcctcccatcctgtgctcatataaacccaagaccttagcaggcacacacataagtggtggaacgtcaagaggagcagaggaagagagtggcagaggatggtggagaggagcagagagcagcagggtggcagagagtggcgggcagaggcagggcggaacagcagagaaggagagaagaagcctccgaacgtggagaaagatggaactccaggggaagattatctcccccactcctccaccttcggctccccatcatctcgctgagagccacctccaccactcgcagtcatccttccaccccacgtgtgatctgattcttctggaacaccggccaagagctt

SEQ ID NO: 294801 - DNA, 1139 bp, Homo sapiens
cagagcattttttccctcaagagactctctaaggggagttggggatggggaaagttgctgcaggttaattgtgaagcggttccaaaaattagaattggcatgcaggcagagggtgttaaaggagacaaagtgtagatggggagttgcctgggctagggaaggggaaaggaggagaggagagtataaaagccaggatattgcaaagggtttgcttagctgccaggagctctgaaagtgagaaaacggtgcattaccaaggtagaaaatcacttagctccttagagcaaagaaagcatgcaactcaaaaccaaaaggagttttgctgatggaggtatgaagccaactctggtaccctgtcaaagcgtcattgtgcgtggtgaataaacatgaagtctttttgtgtgaattgctgactttatcattgcttttaggcaaatccatctttgtgtttaagcccttcactttatgtttaagcctcttttactaatacctgatgttcagtagactagcctgtcaaataatatrtgcagagattatctattctttggaatggtccacaactattttagatttctaagaactgtcttttagatgatattttgagtgtttcwgtttccctgctgaaaatagctatcactctcatttccttcctcttttgcaatgcagaagagtatggaatwcaagcaagatagaaataaatttataataataatgttttaaaaaggcataaacatatggttggctctgtgatgattttcacacaactaaacctcttcttctattcccatttatgttggcaaagtcacagtaagttaaactggcagaaaattcagcagcgtaacattttggaacaccaacataataaatatgagttggctgagtgttcgagcggtccaattaaatctattctgttttgattatagctgaaccacttgagctatatttcacaacatatgttatatttacatatacaaccagccctctgtatccaaagattctgcatccatggattcaaccaactactgattgaaaatattaaaaaaaaactgtactgaacatatacagacttttttcttgccattatttccttaacaatacagtgtaactactatttacatagcatttatactgcattacat

SEQ ID NO: 294802 - DNA, 589 bp, Homo sapiens
tttataggcatctattttcactgttcacatcacacaaccttacaaagtagccaaatatagaaataaagatgcagtctagatatccatcaggatttggtcagaaaaccagctaccatgctgggtattttaagcaggaaagggtgtaacacagaaaagcagtcttagacaattattgcaaggtcaggaaagctgaaaagcataccaaaaaataagaaagtaggaggatcctgataagcctccaccaatgatttatgctgcctacagccttgcaagaggacacctgaaagccacaggyggaacccccccgtcagccatctgcagatgcccagctgctcctggagaataatggcctctctatatcttccacttccaagcctcacacaaatgccttttactggcagaatttaaaccagattccctactggctagtaaatctgcttaatgtagcttccaaactgtcaagccccatgtaacaagacagagtttaaaagagcagggatcatattacatatcaagacacaatatctagtttagctctccatacacatatatttaaatttccaaacaacaataatattacacttttaac

SEQ ID NO: 294803 - DNA, 373 bp, Homo sapiens
ccaattgaaatataaagtcacatggtagcacattgcattaggagatactcgttcatggcaaaactcctcctcctttcacctgagaattctagtgcttaaagtagaaactgatagtaaaagttgctacattcacaaaaaaagaggacatttcaactagtctataccactttcaaagatgccacagatgaagtactcytttggaaggtatgttagctttggcgggcttaacatttccatttcaaatttaatggcaatcttattaggcaatcttactcatatgttgaaatgttttctaaccatgaagtgtgattatattgacttgacattttttgagcaatatgtttaacacatatacaagtgagagaatattttt

SEQ ID NO: 294804 - DNA, 593 bp, Homo sapiens
atcgataaaagtaatataaaaactgttcaaagatacttaaatcagcatagtggattcccctttttttttttcctaaatatgaaacatatcacagcagcttttgactttttgaaagctgtagaaactaagaatcagaatttaatatttgacactctgttccaacacaatattctctagatccctcaagaagttagctcttgaagagttttagtgacgtcagagcatgttgaacrggggaaagaaagagcatgggttttaaaatagtcagatgtgtgtataacttacatatttgcacttgccagagataaaatctcaggacaggcacttacctgcgtagttttttcatctttaatatggtgctaatccaattcacctcttcaattcttgtgaagattaattggaacaaggcacacacagcacccagcccagtgtctggcaaataggtgcaacttaaataataggagctattgttcttatggactagtcaagaaactgccaggtccagataatgtaatacgaatgccctgaatagtcagtcactctcctagtctacccaggtgaccttctccagtgtggccatgattagattaaac

SEQ ID NO: 294805 - DNA, 1199 bp, Homo sapiens
agaaattttcctaccttgtaagcatgtctttatttgcatagtgtgctaacagcttggaggatacttgagatacttgtgacttgtgagggaagaatgaaagtaatcagaattttttttttttcctttggagacagagtcttgctctgtcacccaggctggattgcagtggtgcaatctctgctcactacaacctccaccttacaggttcaagtgattctcctgcctcagcctcccaaacagctgagattacaggtgtgcaccaccatgccctgctaaattttttttttgtatttttagtagagacggagtctcatcatgttgcccagagtggtctcaaactcctgagctcaagcaatctacctaccttggcctcccaaagtgcraggattacgggcatgagccaccacacctggccaagaagtttttatattaagtggtacttaaaatgcttgccttttgtcttatgtcatttttacataaccaaatagccacagcatttagcctagggcggttagaaaagaaatacattgtgatcatgagggtcacatacacatacacatatggggcagtattgctttttgaagtagtagaaagagcatcaaacagwttaatgagtaacaaggtgggaagggcccaacaaatatcacttgtcaaatggaaatggaatgttcaagaacatagttggcctgccccagtgacatctgacttcgagtagggaagaatctcaaaactttcagttttgagcttcttgagcttcaggggctcagaactttctattatcttggggtagaggactaaaaagaatatgtattgtcctgtattttagttataaagctcttttcttgttttactagagaaaatagccttcagtgctcatgtgaagaagctattgcacttgtcctggcaagagataatatttcattagactagggtagaaagaagtgagggacaatcaagttttgaatatgttttagatatagagcaatataattcatagaaacataagttgtgggatgtttcagaaagagaagaaccaatggtgatatggtgattcctagatgtaggcctataataaccgggttgatggtggtgctatttactaatatgagcaaagattaggacccaggagaatttgagtgagagtggagwtaatggcttttttttaacacattaagtttatcttttaaatatccaagtgg

SEQ ID NO: 294806 - DNA, 575 bp, Homo sapiens
ctgttgctgcatgtttggaggctgagctcaaggagtagaattaaaacaaccctcttgaatagtgatttcagttttgcctgctctctaaatggcagagcaggaggtgacatttatcataacaatgtggcagcaagtcctgagaccccagacaaacggcaatgtractatagctactgaatcaaggagtccccaaagcagaaataaatgatgtcagcaacgagaatgaagagctttgggtggatcaaaaacatcatctgagccataaacagcctctacaagacggaaagtcaatgtgcctgctgtagtggcatggagctgcttcctgcctctctacctccaatccctccctctccttctacccaatttcaaatgctttaagagaaagatgattagggtgtggctgaagattgtttcccaacggcactaaagctagatgcaaacagctgaacatacatgaaaattctgtgaaaagatggaatgctgtggttgggacctcttgggctaatttaatatactcttgctgttgtttctacatctgaatatataagagcaattgctgtgttgatgggactgta

SEQ ID NO: 294807 - DNA, 560 bp, Homo sapiens
gatatcactctggcatctactgagtgcaccattttccaaccacagatatgacactaagctattggtggcactactcccacagggtcatcagttagacatcctaatggcaggttgattctattggattgcttccatcattaaaaggacagaacttggttctcactagaatagagatttttatcttcyctgcctgcaaagcttttgtccaaaccattatccataagctcatagaagccttattcatcatcataatattctacaacattgaatatgatcaagaaactcatttcacaacaaatcaaaggtggcaataagctcatgcacatgaaatttctaccatgatgcacacattttcatttgtccattggctgttcatatatatgctcttgtaaagtgttttttgaagtattttgctcactttttaatagtgttaatcatttttattattgatttataggaattttcatatagtatgaatgcattttaaaataattactataatagcatatgcaacgataattgatactgcttccaaaagagattagaaatttacttatttg

SEQ ID NO: 294808 - DNA, 583 bp, Homo sapiens
tggctgaaagtcttccaatttgatttaaaatatcaatccacaatccaaaaggctctgcaaaccctaagaagaataaaaggaaagaaaaccacatcttgatatatcatagggaaactgataaaagataaagaaaaattcaggaataaaaaaacacactacctacagaagaacaactgtttgaataatggctgacttttcagaaaaaaacaaagtcaaggagataatggaatgatattgctaaaataaataaataaataaaaaagtcaactgagaattctatgtctggtgaaaatattcttcaaaaatgacagtgaaataaagatgtttaattaaataaaggctgaaaatatttgttcctagcaggcctgtactatctgaaagcacaacagaaattattcaggctgaagacaaatratatatgataaaactttgaatccataggaagtaattaagagcactggaaacgttatatacatgggtaaatacaaaacatttttcttttcttaaagaaaaacctggtacttaaagaaaaaataataacacataccatgagttttatattacatgtagaaataaagatata

SEQ ID NO: 294809 - DNA, 549 bp, Homo sapiens
tgaaatggggatatagcagatgctgtcagtgcttcatgtccatgttcatggttgctttcattcctactatggttttagtgtgtgccctcaaaaattcaggtgttgtttgagaccatcctagccaacatagtgaaacgctgtctctactaaaaatacaaaaattagccaggtgtggtcgtgtgtgcctgtagtcccagctactcaggagactgaggcaggagaatcacttgaaccagggagacagaggttgcagtgagccaagatgatgccactgcattccagcctggagacagagcaagactctgtctcaaaaaaaaaaaaaaaaaaaaaattcaggtgttgttaatgatagtattaagtggagcctttaagagatgattaggccacsaggtctcctccatcacaaataggattaaggcccttataaaagaggtttcacacagtggtcagctagcttgaacttctgccttctgctatttgaggacctagcattccacccctctggaggatgcagcatcaaagtgccatcttggatgaagagagcagtcc

SEQ ID NO: 294810 - DNA, 599 bp, Homo sapiens
gtaagcaaaccaaatcttaaatgacatgcttttatgttctgaagctaattgctgactagggctacaaaagttgctatttttttgcagatgccattattttcttaaagttttcataatttttctttcctccacgttgcatttgtttcagtatgcagtcattgtataatccttacacgtggacatccaggacacaagtatagtagctccccatttttgcatggtttcattctccatggtttcagttacccacagtcaaccatggtccaaaaacattaaatgaaaaatttcagaagtaaatgattcataggttttaaattgcccaccgttcggaaaagcatgatgaaatctcatgcctgccccrtccatcccacctgggacgtgaattatccctttgtccaccgtatctatgccatctgtgctatctgctcattagtcacttaggagcagtcttggttagcagatcaactgtcagagtttttcaatccttatttccaagtagcccttacttaataacggccccaaagcacaagagaagtgaagttggcaatttggatatgccaaaaagaagccaaatatatgccaaagagaaattgttaatc

SEQ ID NO: 294811 - DNA, 535 bp, Homo sapiens
atattaaggattctgataaattgtgcagtaaggagacatgtttaactttatttaaggttaatgtcacaaacatttcaccatgggatgctgtaatggttacttcccccatggaactggtgytctagaaaacacacattggaagcatggctccggatagttctaaggaagcaccctgtaacatgcaggtgcattctctactatgttcaaaacaaacaccaacagggccattagtgaaaatggccgagtaaggaactctgaaattccatagtttcataaaagcaataaaaaagcattgataaaattgttagaagtaacttttttggaactctggagattaaccaaaggcttagacaacccaagaggcacttattcaagaacagcagctgaactttgttgagaacagtaagctttgtggtattttaacttaccctagtctcattccccatttactatctcagcgatagccttgaaaataacaacccatgtgccttgtaccagagagagcagaagagacctttttcatacagaattataa

SEQ ID NO: 294812 - DNA, 1168 bp, Homo sapiens
atattaaggattctgataaattgtgcagtaaggagacatgtttaactttatttaaggttaatgtcacaaacatttcaccatgggatgctgtaatggttacttcccccatggaactggtgttctagaaaacacacattggaagcatggctccggatagttctaaggaagcaccctgtaacatgcaggtgcattctctactatgttcaaaacaaacaccaacagggccattagtgaaaatggccgagtaaggaactctgaaattccatagtttcataaaagcaataaaaaagcattgataaaattgttagaagtaacttttttggaactctggagattaaccaaaggcttagacaacccaagaggcacttattcaagaacagcagctgaactttgttgagaacagtaagctttgtggtattttaacttaccctagtctcattccccatttactakctcagcgatagccttgaaaataacaacccatgtgccttgtaccagagagagcagaagagacctttttcatacagaattataawtgagtgcagtcaaaataatttaaccatacattttaaaataactaaaatagtataattggattgtttgtaacacaaaggataactgtttgagagatggatacttcagtttccatgatgtgattattatgcattgcagcctgtatcaagacatctcatggatcccataaacacatacacctactatgtacccataaaaattaaaagttawaaaaaacctttatggtatgcagtgaaagcagtgctcagagggaaatttatagttgaatgtttacattaaaaagacaaggaagatctcaaatcaataacctaatctttcactttaagaatctagacaaagaagaacaaactaaatccaacacaagcagaagaaaggaaatgctacgaattagaatggaaataaaggaactagagaaggttaaaacattgagacaatcaaaaaagccaaaaatttgctcttggaagaggtctacaaaattgtcaagccttttacctagactgattgagaaagaaagatgactgaaagtactaaaattaggaataaaagtggggacatttctactaaccttacagaaataaaaaggattgtaagagaatattatgaataattgtatgccaataaattagataaccaa

SEQ ID NO: 294813 - DNA, 461 bp, Homo sapiens
atagcatacagggctctgctgagatgtccactctgtggygccttcccagaatgcccaccctcttcgtctccacctcaaccttccatatttccttgcccttctcttccccttttctttatagcacctataaactacctgtgattctattatgtgtttattcagatgtcttcttggttatgggtctcatgcaccagaacataagctctttgagggcagcaatgtttcctcttgttcgctgttttatccctagctcctgctaagcagtatacatgcacacacacactcacatgcacatatatgtacatatacctacctatcatgcagtttatagagacacacatatgtatatgcatatacattaggcatacccaccgatatggtttggctctgtgtccccacccaaatctcatctcgaattgtaatccctacctgtcaagggaggggcctggtgggaggtgact

SEQ ID NO: 294814 - DNA, 518 bp, Homo sapiens
ttccccttttctttatagcacctataaactacctgtgattctattatgtgtttattcagatgtcttcttggttatgggtctcatgcaccagaacataagctctttgagggcagcaatgtttcctcttgttcgctgttttatccctagctcctgctaagcagtatacatgcacacacacactcacatgcacatatatgtacatatacctacctatcatgcagtttatagagacacacatatgtatatgcatatacattaggcatacccaccratatggtttggctctgtgtccccacccaaatctcatctcgaattgtaatccctacctgtcaagggaggggcctggtgggaggtgactggttcctgggggcggtttcccccatgctgttctcatgatagtgaattctcacgagagctgatggttttaaggtgtggcacttccttgctctctttctcctcctgccttgtgaagaaggtgcctgctttcccttcatctttcgccatgattgtaagtttcc

SEQ ID NO: 294815 - DNA, 615 bp, Homo sapiens
tccttttcagggcattgtctgcccaggttctttgtggttttttgtttggaatactgattaaatttttttctatcatgaaagtagtacatgttcgtagtaaaaaaaaaaaaattggaaaatgtccagaaatcacaaagttaaaaaactccactactctggtcttaactttgagtgagaaccaatgttaaattttgctttatttcccaggaagattttttttctctcctatgcatagatattttgaaaatgtgttcattgtgcaatacaattcactttccactttccaactttccattgattggtattttccacaaacaatagcaatttttacataatgttttggtgatttcaaaatattacaataaacgaacactttattttacctagtttttgttgttggctttgttatttccattttatttgccactgtaagtagtgtgatgaacattctagtgcatatcactgtctctgtctttcagataattttctttaacttgattttctaaagtagaaaatgattacgagcagttttaaggctctaacttttttttcaactttaagacttygtttggatagaccttgggatgactaaaatttagctttagttaatagttc

SEQ ID NO: 294816 - DNA, 600 bp, Homo sapiens
aagggagacaaaggagaaatgtcaccccgcactgcatttttacttctggattcacgtccctgttcttgaaatctgctaggggagcagctctgctaagttaggcacaacctctctgcatctgcagaatggaggagttggaccagattcatccatttattaaacattgacatgagcaytggccatgtactaagtgttgaaagaggagatgcaaacacagaagatggaagaagcaggcctgccctcaaggggctcacagcccacgaggaaaatagataaatgcaaaaagcaccagtgactataaccctgagatgtgtggcgtgcacgagtgtcgcagactccgtctgtgcccacctgaatctcctcacctttcccacttctgcacctacctgcctgacttccatccaccagtcctgcatttctctccctgaggactctcttttgccagtagggcccactttgctgcccatgtagcagaccagccaagccagggaattaatgtcctcagagcaacattcgatccacgactgttagaaacgggagtatcagtacccccactcccttgcccgtcacctgggatgaggctgatgccagtgtttacac

SEQ ID NO: 294817 - DNA, 547 bp, Homo sapiens
ctctacttgacattataattccttggtccaaaatctctattcttatttttatcctcattttgttttctatatttacagtgtaagccacctaaagtcatttgctgaactggccgagatatactgaaataagtgactctatttttaaaatggtgttgaaagtccccaatgttgtttgccagggagtcgtggctcccagttsctcccacatgctccccttctcctccaggtccaggacagtagagcaggcccacagggatcgtgcggcagatgggagggagagcacggctttattagtatattggcaaaactctcatgcctcattgcactgttctgccaaaagcaggtttgaaaaactaggcttaggctcaaggccaaaatggaaacttcttcctccagcttaaatctagttgcagggatccagggacccagatgtagctatagagacaggaaaagtcatggcaagtggccactgaatgtactcacccaaacagatttcaccaagcatcacatcaatggggaagccttacagactccaggtcatgggtcc

SEQ ID NO: 294818 - DNA, 493 bp, Homo sapiens
tggcttggtgggttctagaaggatctgggtatccacatggaggaacatgccagggagaagacctgggactgaggcccttcctgtgtctggtgctcctagtgtcatcctcaccatctctctcacacagcagygccaggcatggcttctgggctgctgatctgccttctccatgtgactgagattcccaaggggctgggacctggtcatgcccatccgcacttagcttggtgcccaacatgtggtaaaggctcagtaagtgctggcttagtgagtgctcgggtgagagagggaagaggacagcaactcttggtctagacagcagccagggatgtgcgcaaatcatgaattagcttgcttggttgctgcctccctcccactcgggatatgtgccagtccctccatgccacgccacaaggtcatgcagtctggcctgtgcctgtttttctgactctgctttctatcctctctgtcttcctgctcattctgttccatc

SEQ ID NO: 294819 - DNA, 540 bp, Homo sapiens
ttgatactccaatatcccttgggaaaattcttcacatagatccttattccaaatgcctcaagtggagctgactctaccccctgaatccaaaagtgggcatgtgacacagtccagccaattagagcctcaaatctccctgctcacagtaattgattcaagaatacccaagactcagttagagcccatcaaagtaaccgtgggacattttctgcaactactatgagaaagatactcctctcttttccatactcagagttctggagctatcaacatggagggggcgggagccccatgaagagagagcccgcctgagaataaagcacagaatccaggaatgaagattcttgatattatggggagcctgcttccagccatggctgatgagattgacaccttcattcattcactcattcatttattcaccaaaaaattaccaggcatctattatgttacaggtgttattttaggccttarggatacagaagtgaataaactatgcaaaactcctaccttaaggagcttgcaattccttaggaagag

SEQ ID NO: 294820 - DNA, 581 bp, Homo sapiens
aatgagcttggactgcagcttgttatgtaaccagcagcatgctaggaaatgcacatgtcctgtcgagaaactcccgaggtccccacggggcaggtaccactgtcgggtcctcaaatcagcaatgaacatcacgggttccctgaatagcaccatatcttcatgctgctgtttcccttgcctgcaagaccatttctccaacacaccttattttgggaaaaacttttcattggcctttgacacgcagctcatgcacttgctctcttgggaagcttttccccaacccccaactaaccatttttttccttagagttaactctgaaccttctgtagacatctaacagtttgggaggacattccctggagccagtctgctcaggtccacaatacagctctattcagtcagtctgtcattagcggcatcatttagcctctgtgtgcctcagttatctcatttgtaaaatagggaaaatggggcctacmttccataaagagctcagaatcatgcctggcacactacaacctttcaaaaagtgctagctctgtgttgggggtgaggagcaattcccctccctcttttctgg

SEQ ID NO: 294821 - DNA, 597 bp, Homo sapiens
tcaccagtagggatcccatcttcataggttctcttttccaaatgtcttgaatctgataaccccaatctcttatatttgtaaggttaataactgcttcctgcagtaacttcactttttttttttttaccttttcattcctcttgtatttagccagttccctattaaattttccattaagacaactagtgtggtttttattttctacacgagagcatgatggatttggtgatgctatgacaattgattcacatttacttccacaaacatgtgttctgtctttgctatgctaagatgccatgctaagtggtaaggacacaaagatgaaaaagaaagaaagtctgacctcaaggatgctcctgagctagaaagacacataccatgctcactctgtacaaaaccaatcaggccatactccaagktaaaatgcaaatactgccaacaaagtgcagtggccacacacagcgggcagtgactgattctaactgaaagagtcttactggctgacaacagggctgctccatgaagaatgaaattttatagagaaaacagaagaggagtgggtggacgcacaggaaacagcaagagcccagaagagta

SEQ ID NO: 294822 - DNA, 609 bp, Homo sapiens
tcttttaaatatagtaaggaagagtttctctggccttctttttttcctcaaattttattttagattcaggaggtacatgtgaaggtttgtaacttgggtatattgcatgatgctgagrtttggggtgcagctaattccaccatccaggtactgagcatagtactcaatagtttttcaactctttcccctctagctccctccatcccccatctagtagtccccagtttctattgctgccatctttatgtccataagtatctggtctccttttaaatttgctttcttctttgctcattatctagaatttccataatagaggagaacctgaaaccacacccaataagaaagaattttatctaaagttttactacctttgcattccagtctttctctacccattctcctaatcttgtctcgtgaaatcatggctgctgagaatgagatttcttttggaggacaatgaaaaggatgggaggacagaagctacacagaagggagaaaggaaaacagagcaactgaagacaaaaattactttagaaggtgtaagcacatacaaacagggctgaggttatatgtttcactttgaatgaatctcatttaccgagatac

SEQ ID NO: 294823 - DNA, 609 bp, Homo sapiens
tcttttaaatatagtaaggaagagtttctctggccttctttttttcctcaaattttattttagattcaggaggtacatgtgaaggtttgtaacttgggtatattgcatgatgctgagatttggggtgcagctaattccaccatccaggtactgagcatagtactcaatagtttttcaactctttcccctctagctccctccatcccccatctagtagtccccagtttctattgctgccatctttatgtccataagtatctggtctccttttaaatttgctttcttctttgctcattatctagaatttccataatagaggagaacctgaaaccacacccaataagaaagaattttatctaaagttttactacctttgcattccagtctttctctacccattctcctaatcttgtctcgtgaaatcatggctgctgagaatragatttcttttggaggacaatgaaaaggatgggaggacagaagctacacagaagggagaaaggaaaacagagcaactgaagacaaaaattactttagaaggtgtaagcacatacaaacagggctgaggttatatgtttcactttgaatgaatctcatttaccgagatac

SEQ ID NO: 294824 - DNA, 586 bp, Homo sapiens
gaggctcttaattccagctccattgcccattggttgtagtcatagaacagggaaaatttaattcaaaactctcaatccaccctggagaaggaaattaaagcctagaagaataatatgccttgaccaaggtcacagagtatgttaacaataaagccacaaccagaagtcaaagcttcctgtactcagcccaatttctactagtaaatatttcctgaatgcatattaatgtttcagggcctgtggatacagaaatgaataaagcacagtccccacacaaaaatattgccaattgtattgaacccaacagatgaccaattgcaatgcttcctaacyttgtttgtgtctgtgtctgagacacatgatactttcctaacatgggcccttggagagttgattcccagccactcagtatttacaaactggaaattcactaacctgtaacctgtaccagttcccagtagaaacttgcacattcagaaatattttgaataatcctcacatggaagatgaggatgcttctgaggaggaaaatgccaaaagtaagataaatcagaccaatgacttaaagctgctggaaagacatata

SEQ ID NO: 294825 - DNA, 609 bp, Homo sapiens
gaaaggatagtggtcattgctaattttgagcatttgcataaacaggaggaaacaataaggaaattgtttaagaaggaaaaaaaaaatcctatagccctcccctccatttctccctcccttccttcctttsctgcaaatgactgcttgtttaataccaaactaaccattgtgcttttgagaatccatgattactgcttgggctggaaggtagtaagattttgaggctagaggggaggtcagaagtcatctaatttagtcctcttactttgaaataagaaacttacagcccagtgaagtgaaatgatgatcccaaggtcacccaattggttagtagcagaatcaggcctaggtcagtattccctgcctccatctgttgtaaatcctcttggacaggctttgtggcatgctaccagcaaagcttattggaaagcatttaagaacgttagagcgtctgcagatgtgattttacaggttatttatttgttttactgcagatcatgacttcccctccatccctcttcttgtttcagggccagattctgccctttgatgttctttgtggcattcttgttgtctttggcccgaatctgaagcagggcttgacccaaa

SEQ ID NO: 294826 - DNA, 614 bp, Homo sapiens
gttgcctaaacctttggatggatagatggatggatggatagagaaagagacaaagcaggaaagagaaaagagaaaggcatatatatatttttttcttcattctgggggcccaccctgaaactactgaatcacagtctctagaggttctcaggcaactagcccagctgtttttgccaactggaatttatgagccaccgcaagagaccacatgcagcttcatgtaaaacaaattatttttaagcacgcagactgagcagtgatatgaggagtgcacaggagtgcctacgcctactcctggtctccatgagtctcctttgcaaagtcaagtattacaagattctagaacacatattgcctgccactgataatttagttgttcagcaaacattcatttgttgagttgcacgccagacactatactagatgatgggacaactaaagggtaatgaacagttctgtctctatgtaaaaataataatgatgatgatgatgagatgggacttcaattgaggaagtgccattggggaggtatgtaaaamgtgctatggaaaaaaagcaacaggaaccccttgatagaaaaaaaaatgctggtgggggtagggatttctgcctgt

SEQ ID NO: 294827 - DNA, 621 bp, Homo sapiens
cttgcaatagtttgctgagaatgatgatttccagcttcatccatgtccctacaaaggaaatgaactcatcattttttatggctgcatggtattccatggtgtatatgtgccatattttcttaatccagtctatcattgatggacatttgggttggttccaagtctttgctattgtgaatagtgccgcaataaacatacgtgtgcatgtgtctttatagcagcatgatttataatcctttgggtatatacccagtaatgggattgctgggtcaaatggtatttctagttctagatcatttactattcttaaattcttagggccctttagaatcatgctaaatctactctgtatgtgttctgtaaatagaacaacaaagcctaggtgacagcacatctgattacagaatggtttgctgaatattttaagccygtgcttgagacctgctgctgaaaatcaaagattcctttcaataatatagctacccaagagtcttgataatgcttttagttatccaagagttttgatgaagatgtgcaaggagattaatgttattttgtgcctgtgaacacagcattcctgccatagcccatggattgagaaataatttgactttcaaacct

SEQ ID NO: 294828 - DNA, 596 bp, Homo sapiens
aaactctaattcccagaaagattttcacataagaccttcacacaaagacaaaattagaatgtgtgttctctcaccatctccttatccagagagtccttagatgtggcagaaggacccacaagagttgtcagaggcagttgtgaggggttgccagtcatgttagtattaatagatatcatgagaagttagacacgtttttgaataaattagaatgaattaaatattaacccaaaatgtcattatgctcactccctaccctcccactatgctttcctgacagagaaagaaagggtggcactgtggctggaatacagagcccacaggacttcagcatgtcctacacataaacctcctcctttttgtgacccttggtggaaaaagtatgagagccacgtatcttagaaataactgcctttcctccctagatgcctgccacaaaaacagacatgttctagaactttcttctcccyagttccaagaacactgaactcatggtaatggccaaacaatgatctttttctaaggacaatgtcagaatgctttactgtgccattttcataatcagacacaagaaagttaccatctgtagttcagcc

SEQ ID NO: 294829 - DNA, 577 bp, Homo sapiens
gaggcaggaggagcacgtgagcccgggagttccaggctgcagtgcactgtaatcatgcctgtgaatagccactgcactccagcctggacaacataatgagactttatttctaaattattttttaatttaagaaaagatatataaaacttgcatcatctcgaaatttccttcaaatagtcaatactcacttcctgccccagggaatccgctggtatagttatttccytatggttttgcattttctaggtcactatataaatgaaatcatacagtacacaaacttttgtgtatgccttttttcacctagcatgatgcatatgagatttatccatgttgttattgggtaatattctactgtatggatgcaacaaaatttgtttatctattaacgattcattttattttgatataattattgattgtcagtgcataattattagttatctaaattatagatttgaaagatagtactgagaggtcttgtatacccttcaccaaggttccttctatggttccaccttatacaactatcatacgatatcaaaatcaggaattgacagaggtacagtgtgtgggg

SEQ ID NO: 294830 - DNA, 556 bp, Homo sapiens
tttctttttttttttttttttttttgagacagagtcttacactgttgcctggcctggagtgcaatggcacaatctcagctgggctcactaaaacccccgcctcctggttcatgcgattctcctgcctcagcctgctgagtagctgggattacaggcacacactgccatgcccggctaatgtttttttttttttgcatttttagtagagacaggggtttcactatgttggccaggctggtctccaactcttgaccttgtgatctgcctccctcagcctcccaaagtgctaggattacaggtgtgagctaccgtgcctggccatggaattcatttaatcaaatgaaaaacaattactattaactgactcctggtgtatgtcagccactctgtttaractgtttggaaatggtgttttatttacttctcaaaaaacaagtgaccaagtacaagcatgcagaaccttatatgtatcattgttcatatttcactgccaaggaaaaattaagtagaatattcagtctcacagccaaacaactcagaattagatactagaata

SEQ ID NO: 294831 - DNA, 432 bp, Homo sapiens
cagcagctaccaaactgtttcctcacgtatatccagataggtctcaaagaatgctcttctttgagactcagccaggggaaggcagctggggtgagtgggggagattttgagacagagttctcttactgagtagtagtaataatcctccccagtagcctgtcttaacttaaaccacaggttactgaagttggcacctgtagtataagaagattacttctgttttcttcatttgactccttgagctgtgtctcttcacagcttgttaactccactttttcttcttcagaatatctgtcactataagatgttttattcccttataggggaaaygtctagctgggctcattgaagtttaggcattggtcctaaagaaatatgtgggcatcatgattccaggcagttgaatgctcttgggattttattcagccttta

SEQ ID NO: 294832 - DNA, 520 bp, Homo sapiens
tccttaaacttcttatcttttcacatctgccatcttttagacacattcctgccattctggaccttaaatatggctaggaaaatatggtgcatggccattaagcattaagaccgggcrtggtggctcatgcctgtaattccagcacttcaggaggccaaggtgggcagatcacctgaggtcacgagttcgagaccagcctggccaccaaggtgaaacctcgtctctactaaaaatacaaaaaaattagccgggcatggtggtggacgcctgtaaccccagctagtcagcaggctgaggcaggagaatcgcttgaacccaggaagcagaggttgcagtgagccgagaccgtgccattgtactccagcctgggccacaagagtgaaactccgtctcaaaaaaaaaaaaaaaaagagagaaaaaagaaagcagttacagggcaatataagacaatcagtcattaaacgaaagatacagacgttaagtgctttggaagtcaagaaaaggtgatagatgtatacag

SEQ ID NO: 294833 - DNA, 601 bp, Homo sapiens
tcctcttccctattacccatctccatttaaagagagtcagaagagccattgaatttgagcattatggacataacagctgtgtcatttccctcttattctagccaaactagaaggagttaagagaactcccttgagactgggaggatctacatgagaggagacaggaaaccccttgcctggctggaccctgcagttgccaccatgagccaggaaatagatttggtgagtgatttgtgcccccaagtgcagaggctggtgcttgtttttgacctggtgagctcagaaggcctgagattggctgaagctacctatgcatgaaagcaagggctgccacaaggagaatcttgcacttgtgccagctggcttggtggagtgtgcctgtcacgtgggctcaggtgcttgtgattggaccgtgtacaaaagtgaagccagtagggattaacagatatcaacaagaggttaaaaaattagggrtgccaaaactcagccagagaacacatcacccatatcagggcataatgtggtaaggagattcctatgtgttttaagagtatctgagatttgttttaatcagacatggtaagacaaaaagacatgtaaa

SEQ ID NO: 294834 - DNA, 524 bp, Homo sapiens
tcaataggccagtactggaagtggcagagatcagcaaggataatggtaaatcgagtttagcagtaaacacagaaggaaaaggaagcgggtttggagaatacacagcattgtttctgccagagtataaagtttctgatgatctgtcagtgaattttttcctataatgaggcctaaatcmgccaagcacaaactaaaaagcaatgttgtatggtggggagctataattattattttatattatatgaattatattctaattattgtacatatttgatagcactattttctgtcaaatccctgataattatagccccagccatctccatttccaaatctttcttctgaactttagcattaattcaccctagtacccattcaaaaatcaggctgttgcattttaaatggttattttacaagagtgatcctcttttttcatgctagtaaagatgacctttataaattctaagacctaatcattttagttaattcaaaacaggtggaaaatacctcataggaagtcattt

SEQ ID NO: 294835 - DNA, 589 bp, Homo sapiens
aagaattaagtgacttgtctacagtttcacagatagaaaatagcaaaaccagggtttggctctaggcaatccaaccttgctcttcacctgctcactatcctcccagaagccagggaggacatcttaaaattaatatgtgttcgaactgaaagcccaaccctactttggctaaggtatttttaacttttacaaaatgaaagaaaatatttgatacctttaataagagtgagtttgctaaaatttagcagatgtataatgctggaaaccacccccaaaatactatagatcaggatatctacttcatttattcccactgcagatgttctagaaaaggaattgtatttaggactgtatcttgcacataaaggcttccggttcctctctaagtaataaactaatgcataaaagaatgaatgaatgaaaaaagagaaaaatcaaagagaaggaagttgggagaaaagatctaagatatgttgtattttagccagattttatagtattttcatgcaaacaattcaaacattgggaatccatttcatcactctagascctatctgtgaaaggaaggatttggcctacgtaattactc

SEQ ID NO: 294836 - DNA, 602 bp, Homo sapiens
ttgatctacgcagaattttcccacacattaggggcagactcagagtacagccatgttctaacacccggcttggtgaagattctgaactcatatacaatgacctatggcagattgaactctcaactcttttgtaatcttcatgaactataaatgttgcacatgcctgcagaatgaattttagtttcattgtggggtagtatgcaagaagaamcctggagtggcatatgttgggagggatagattagaacatagcaagacttcttaattgaaaagatgaagtttctcaggccaaatagtaatatgataaaatcatagaatggtatatttgggaagtagcttcaaagtatgcctttcagtttctttcaaaataaaatgaagaaagagagagaaagtgcatggcctaatgtcacatggttaaaagaagatgagtgggccttaaatcaaaatctgcctttcagtcacggattttccccaatacattggactatctcatggaaaaaaaagaatatgggattaatcatgaattctttttttaaatttagatttttcagggttagagactaaagaatagaatttttgtttgtttgtttgtttgaaatacc

SEQ ID NO: 294837 - DNA, 575 bp, Homo sapiens
gtggctggcaagtccttcactacatgtttctacttagaccagttacagtgcctgagattccaccattagatggtgtttctgtggagtaccttgaggataaggattagttaacaactagtttagagggattagttaacaactagctgatggcaagaagggtagtctgagtttgagggtggctaggaagtcaaaagaaagtgaactgtactgaagtctaagttcacttcctccatgtggagacatgtgctgacctcgagcatagckctgtggtcatgtgtctgtttgcaacaaaccccaaaaaagcatgcatcctttgcagctatatgatgcctgtcaaagtcaaactcatgaaagggaaaagtaaatacacctgggctttactatatgttatttaggcaaagatgtttttaacaatatcctgcaaaataatacaaatgtggaaggagagatttatctctatgggcacagcagggctgaaagacacagtgcaattgtttttagagattagaaagacaaggcaggcttgagaggaggaacattcacgtcaggaatctgctctaatggtggggttactg

SEQ ID NO: 294838 - DNA, 521 bp, Homo sapiens
taactcacacttccctgtgtctgaagttttaaggtgggggaacatatacatttattctttttgttgtcatgaggattttagatctgaatttttagtcatcagtaatcattcctattaacaaatagaagaaaagaactgagggttgggtagtgaacagaatagtggagtatggattgaggttgtttcagtgaaatcttgagtgattcagagaaccaaggaaaggccaacaagacagtcctgcgttaatggatgaaggagcggtcaggtgggacaccatcaggaaacccaggccacattccagcctgggaacctggagggctctctgcggaccacccacctagttactccaaggaggttaygtacaggctctcagtctactccatgtctttatttctgggactacagtcatatttcaggaatggactttcataacttggagtgaaaacaaaacagagaggcattggatatttggaaagaggaaaaaaggaaaacaagacgtttattaggataaaatgcaacat

SEQ ID NO: 294839 - DNA, 439 bp, Homo sapiens
ccttttccatagcatctttgacacttttttagccatttctttgcctattcctggtcatcatcgataaggtaaaaaagcacaaggatctaagactgaaataattactcttattagaatccatcctaaaaccaaaccaaaacaaaacaaagaaagaaacagaaaggcagagcttgtctaaggcttttggtgcctgcaacctaattgttgatgacyattagagatgagactctcatctaattgagatggaatgttaatgaatcagagtttgtgacctaactaggtatctaaaatcctgtatcctaaaactcatgcctaacttgactgggctttgaaagcagggataaaataataataataaaattaacatagaaacaataacagcgaataatgatttattaggttgcaagcactgctctaagatcacggcttatgtaaatta

SEQ ID NO: 294840 - DNA, 597 bp, Homo sapiens
ttttggctttgcaggtcatatggtctctgtgatggctatttaaatctgcctttgtagcatgaaagcaaccacagacaaggtataagtgaatgagcatgggtgtattctaataaactctatttataaaaacagcgagctggatggcctacaggcagtagttggccaacctgtgacttagttggtggaagaattccatattcattctacctgccaccccaacacacatgaacgccccctcccacaacacacacacattctcatatcctttatttatctgtggttttgtgcaaaagctttaagagttttttctttttcctgtatgtattartgtagcagaataatctcacagggaaattagctctatgtaatattcagctgttggataagaataaaaataagagaagtggttttctccatctgagcacttcaatctgtcattgccaccatcccaaaacaactgagtcttcctatcttttcactttcaaattttaaaattttatctttagtcattttaattttacttttattttttatttaaaatttgttacactaaactttttattttcaaaaatttccaacctacagagaggcacagtg

SEQ ID NO: 294841 - DNA, 584 bp, Homo sapiens
cattttaattttacttttattttttatttaaaatttgttacactaaactttttattttcaaaaatttccaacctacagagaggcacagtgaatacccacacaatatcaacttgaatccaccagttattgacatyttgcaacatttactttatttctctcacatatatttactttgcctaattatttgaaagtaagttgcagatatacaagtattttgacaacacttgacccctttatatttcagcatatgtccccttagaacaaggacattttcttgcataaacacagcattgccacactctcaaactgacaatgacagagtactatcatctgatagacagtagtccccaaacatctctcagctgtccctttcctgcctacagccctgaattagaatccaattaagaatcacatttggcatctatttgccatctaactttggtttcctttaatctagtacagccccttgcctttttgtttgttttacatgatgctgacatttttgaagaatccagaaatccagatgaattgacgcataggatgccttcaattctggattagcccaatagactcattattatatt

SEQ ID NO: 294842 - DNA, 584 bp, Homo sapiens
cattttaattttacttttattttttatttaaaatttgttacactaaactttttattttcaaaaatttccaacctacagagaggcacagtgaatacccacacaatatcaacttgaatccaccagttattgacattttgcaacatttactttatttctctcacatatatttactttgcctaattatttgaaagtaagttgcagatatacaagtattttgacaacacttgacccctttatatttcagcatatgtccccttagaacaaggacattttcttgcataaacacagcattgccacactctcaaactgacaatgacagagtactatcatctgatagacagtagtccccaaacatctctcagctgtccctttcctgcctacagccctgaattagaatccaattaagaatcacatttggcatctatttgccatctaactttggtytcctttaatctagtacagccccttgcctttttgtttgttttacatgatgctgacatttttgaagaatccagaaatccagatgaattgacgcataggatgccttcaattctggattagcccaatagactcattattatatt

SEQ ID NO: 294843 - DNA, 1121 bp, Homo sapiens
attaaaaattaggtttatttgtttctgtttgtattcaattatatggttaggttttcacatcttttcagatttgattcttttaatttaaaaatatttatatgtttcaaatgttaaactatatttaaaaatatattagagacatttcattcttatctctatcccttctaccacattctttacccctataggtaacagttattgttgttgcatagtctaaactatctagtttaggcattcattttttttttttttggtgaaattagcagcatctaccaactcacactatatattcatggtttttaatctttctgtataygcgcatgtgcatcttactttgttcacctgacagtctatccttgaaatcacttcctatcacttcatagagatcaactcatgcttttgcatagcagtatattattccattgtactgattttccatagtttatttaatcagtcttctactaggcatttaagttatttataatattttgctagaataaatacttctgcaatgaataattttgttcataactgtatgtgcatttgtatttaagaagggawatttgtagaatcggcctaacagtctctaaagtaaaactctgagacatccaatttgcatatattcttgaaaaaaaaaaaggtttgttaactcatcgaaaaaggcttttgtctaatgaggctgggggtggtggggaaatatgaataawaaatagtccatatgcttaatttatgttttcaaatatatcgcatatccaaaatagcaggtagaattgacaatagtaatgattgaaaagtgctgtataatagaaagattacaaaaactcaagttagaaaatttgagttttggttctaattctgtcactagttaactaagtgactgtgggtaagtcactttcagcgtaattatctgacaaaaagtttgtgtgtgtgttagcgaggagtggttgttagactatgtgattgtcaaagtcctaatgaattttctgcttctcctgacaacaagctttgcacaaaagtaacatgtgtttaagttaatgtaatgtgatttagcactccaaaaatttctctagagttacatgagcttttttcaaaaatgtatttattgatggcatattctggca

SEQ ID NO: 294844 - DNA, 571 bp, Homo sapiens
gcaatatttgtctttttgtgtctggtttatttcatttaagataatgatctccagttccatccatgttgatgccaattacacaattttgttcttttttacagttgaatggtatttcattgtgtgtatataacacattttctttatccgctcaccatggatggacacttaggttgattccacatctttgttattatggcatatctgactgaaaccttcttctttaggcttgatccctgagggcagccatgttgttccctttctctttctcctcttaaacaaggttcagtaataacatgtatttcaatgaccccttcagtttgaggtgaaacctaaatctgttcagcagtattttgctgtaaattgttcaaagcctgacttgtgtttctgattctttaagctgtgctccactataccttgccagagggcagattgaagaagtcagttcagtgtgaatatcaacggaaaacatttgtctmctctgtggccatgtgcagttataagtttcacacatgaatcctacaaactccccacagcactgtagaccagcaattctcaacctttttggcaccag

SEQ ID NO: 294845 - DNA, 556 bp, Homo sapiens
gctacctcgttgttcattctttgacctctttctcccttgctttgctttatgaaatcttcatgtatttatgtatcaaaaataaaatactacttaaatttgtctattatttagtcttataaaaacaagatcttatatatatagtcattcttctgtaacactattttttgagatacattcattttatttatttatttatggatcatactatatactatatgctcatcactatataatgctgtattgtaagaatatttcaatttatttatacatgcttagtggacaactgagctggttctcaacttttagcaatgaatacataatgctgttatgaacattcttgaacatgtttcaatgtgcatttgtaagaatttctctggaagttaattctgcckgagtgaattgctgggctttaggagatgtgcatgataatatttactgaaaatgtcaaatgctttaatgtggcttttaccaatatgcatttcctccagctgtgtttcagatgtaccattaatctgcattgttggcaacatgtggtactgcctgccttaatcctgcc

SEQ ID NO: 294846 - DNA, 601 bp, Homo sapiens
tttaatatttcccatttctttcttttgctaggttatagcccgggtaatgsctgggttaatattccactttacaaataatctcttctgtccactcttcttttcaaactgttcattgaattttaaatccttgctttcgtgtgttcaatttataacattctatttggatactttttcaaatttgtatggtcttttgaaaaatagtgttctcatatgttcctatttgtgatttctctttcatatttttaaatattaaggacaggaaagagtagctgtctgaagacactctctcatgggacttcatttccttgggtggtttcatcactcttaactataagctcatgttccttagaacttatcatctgtggaaacactttcattctggattgaagttgtgttgccctagaaaaggactactcaggtattgtgaattttgattgtaaagatacatccaacttgtgtttacaaatactcagggactatatttatatttttcatcacccagtgtcaaggcctacacaggcaaatttctactgtttcttctgtgcaattagcttatgttttttagaattctggcttcatttcctatcaaaccgcctacctt

SEQ ID NO: 294847 - DNA, 601 bp, Homo sapiens
tttaatatttcccatttctttcttttgctaggttatagcccgggtaatgcctgggttaatattccactttacaaataatctcttctgtccactcttcttttcaaactgttcattgaattttaaatccttgctttcgtgtgttcaatttataacattctatttggatactttttcaaatttgtatggtcttttgaaaaatagtgttctcatatgttcctatttgtgatttctctttcatatttttaaatattaaggacaggaaagagtagctgtctgaagacactctctcatgggacttcatttccttgggtggtttcatcactcttaactataagctcatgttccttagaacttatcatctgtggaaacactttcattctggattgaagttgtgttgccctagaaaaggactactcaggtattgtgaattttgattgtaaagatacatccaacttgtgtttacaaatactcagggactatatttatatttttcatcacccagtgtcaaggcctacacaggcaaatttctactgtttcttctgtgcaattagcttatgttttttrgaattctggcttcatttcctatcaaaccgcctacctt

SEQ ID NO: 294848 - DNA, 564 bp, Homo sapiens
atgtaacatggaggcatggacattatttaacaaatatttatgatcttcctactgtgtgccaggcactctgctagcatcttgaatcagaatggaggtattcagaaggaacaatttcaaaccaaagaggaggaccaattgcaagatgattttaattttcctcacaaatgttataaagartatgtcttttttagtaaccttccacacaaatgggtgtgttgatgaacaaatgcagataagatgtgcatggctttcactgagttgcatttatatgcctcattatttctacataaatatgcccagcctggcttttgttcactgccatttagagtgatggtgattaaagtaaatacaaaagtacaaataagaatgctttaaaacaatggtgtaatcattactaattcattttatatttattgtagtattagctctaatgaaccttcttgatattaatgtgggtgttataagtactctaaattttttactgtgtcagtattaattaaatgaatggttattattacctgtgtaatgggcctaggagggatattattttggtgtttataaaaa

SEQ ID NO: 294849 - DNA, 573 bp, Homo sapiens
ctttagcaattatgatgccagaaatgtattgaaggacagatttattttcacagacatgcacaaaaagtatatttgtatggctttttctgtgtggttgttattttatgattgtttggtattgaagaagatttgaagaagaatctaacatcaactgacacttttaaatttgtgtgatctgagatctcaatccccctacaaattcagggccagaatccaactaatgaaaaagtatgacattaattattatgataaggtgtatcctactgcaaatttacaggtttcaaaatctggtcattgaatagctgagttaagaactaaagaagccactgacagcttggagcttagctttcaaagttggaaccaacagcgtatcttatgcattgactgaaataatgcaatgaaattcttttctctcttaacaagctttctccagtcatgaaattccctttgctatgccrcaaccccaatgtgaaaaaggagaacatgttccgatattgaaaaactatatgccattgcctattttatcattcatatcaaagacactcaacagatagcacatgtacaattgatgga

SEQ ID NO: 294850 - DNA, 410 bp, Homo sapiens
aagaaatagatttttatggctgctagacaacacaatgattcttcaaatgctacaaaaaaaaaaaacaaaaaaaacccaacaacttgataaatgttatttgttttcacggttcttggtctatttggaaatgcagctatctgaatcccaggctccaaaaggggccaggctgagcttgaggcagtatcagaaaagargccattgatggaagcctggggaaggaggtactgagtggtagtcagtgctcaggagatttggaggccttgcagggtgctagagcaaggaggtgacaaagcagcactcagtgatagaataggcaataggcaggagggaccacagggaatggagctctgggtgggcagcattctgtggactgggaggtggccaccccagggattgtagagtggggttgt

SEQ ID NO: 294851 - DNA, 361 bp, Homo sapiens
ctttgtttacttctatagagcagactttattttcatgcccaataagtttgacaaagcagtaaaatcagtccggttaaatgggtcaccaatacaggtggggagcccattctggtcttgcaaagtacaaaagtgctgctcccatgaatacggatgctyggagagctcaagcttccgttttccttgggcaattatgttcacagagtgcacattttgggctgtggggagaggcgggtttagaaggaggatcagctttgacttagtcttatacgatcttaacagcttggatgagggaaactgagaactgcctctaataaaatacacatgtcacatacatactcataaggccgttaaatgcttgtag

SEQ ID NO: 294852 - DNA, 581 bp, Homo sapiens
agttggaatgggtaaaagaaccaggagcatctagagatttccatcatgaaaatgtccaaggcaattgtaagcataaataacagcgttttgggttctattcttccattgctaatacagataacaggaataccagatgtttcacaaaccactggaaggttagctaggtgactgagaygcatgaaggtaagcaggaattcctaaacctccaagaaggttcaggcccctgaaagcaatacatttgctagctgtcagagggggccccatacacactctctgactgacactctagaagaatgggtgaactttccaatagactttttgattaatgtcaattaatgtaactgctctgaaatggtggggtctcattagtatcaagaagttctgttagctgggaccaacatggcatcaggcattcagctaaatttctgctttccccaggggcaaccagcccagttcaatttgcctgggggcttttgactctacaatctcttccaacattaaacaagtgaatcctgcgcaccctggtgagttcgcaaaccctgacagatgtttctttccaaaaacatgcaggcccaacatcc

SEQ ID NO: 294853 - DNA, 601 bp, Homo sapiens
tcacagaattgttgtgagcatttaactaggtaacaaacgtaaaaaacttagtgtgatctgacacttgtgcaaaggttagccattattacacatgctaaacacaaactgctaacctttgtgagatattcaagtattatagatgtgtcagttcataaaagcttaattgtcctttccgaatactttaatcttcagaaaattgctttctttgaatatatgtattgcaatagcacttatagatcaagactgaatttccctacttcygaaaaaaaactagaaaatcctgaaggctatacggactatgtgtacttgctatttacctaaggctgagagggatgtttagaaagcactctggaagaggaaagtccagaaagggagtgcaaggcaagtgctgctgagtctaaaaaccaagcaaactgaccacaatcagcttgaatctgtcaacagaaaaaggaaacaaagtcaaatggttagaagcagacagcaggaaaagaattagagaataaaggagcaatgaaagcaaagttagaggtcctaaattcatctgaaaatccacagctgactggtttgctgattgattgattgactgattgatggtgggccc

SEQ ID NO: 294854 - DNA, 1102 bp, Homo sapiens
cttcatttacaacattcctttgctccaaagtttagtctgtgaaaacaagctgcaaggaagctccattttacagaaaaagtgaaaaaaagagaaactgagtacagaaacttcagaaagttgtctaaattcttactgtttgtaagaaacaaatmagatctgggactcaaaaagcaaataccatttttaaagtattaatatgatgaacagttaaaaacatgaactctgaagccaaaattgatggcctccaatcttagttgtctgaccttaggcaagttacttaacacctctgtgcttcagtttctttttctataaagtgaagatactaatggtacctgtagctatgttgtaaggagaattacacagggaagtttaaaaggctccaagtaacctgggtggaacacaattgggtctgctacccagagactgccccagccgtggctccaacaggaagctggtgatgggctcctggcttgattgctagggaggcgcaagtacaaagagagggaaggcccagccgggaaggccagtgctgagagtattcacttgcwctaacaataaataccttttagggtagttatgagaaataaatgagatgatataaaagaaggcactttataaactgtcaacagctacatggttgtatagttttaggatcataatagccagagtcataaccaaggtcaaagtgataatggaaatggaagwcatctattcctcaaattaacttatattctacaggtggtggctctgctgttggtgggtatattcattctaaggagagacagaactgcatatctctaaaatttcacaatgaaaaaatctttaaaattatctgttatttgaggcattttccactctctcatgccttgttatttccaaagtactgtaatatttatcttggtaatgacagcaccagcacgtacttttttcataaccaggaaaacacattaaagaggagttgtaatttcagtatacttttagctagtttttcttgatgtatgtaaacactcccatttgccatatctgatccagagagcagaaaatgttggccatcatctcccaatattttggtgctgtggggggtcttagaaattgacttcat

SEQ ID NO: 294855 - DNA, 606 bp, Homo sapiens
ctagtgttcaaatataatatatattttcagcttttgatattaggattgtgaacttcatatttattttctcataatggtacttataaattatgttaatatgatatttaaatgcttatattaaaaataaatcatgctatacacattattttatttaggtttcttaccacttgaataaagtaatgtatgttgaactagctaaactgtaactcagttactgcatgaccccaccaccacaaccaaattcagataaagtaaattatcctgctttaggcatacatgatttcaaaatctggggcaacagatgctctcagggtgtctttacaaatgtccatccctttactcttcacttgactccatattattaggyctccactaataccaataaatttttagaaattctatttatcccctttattttatttggaggccaatgaagataagttagcttaaaaatcacaaattgagccatctctgagactttcaaaactaacataggcatgtggctttctccattcatctaattatgggagagtgaactcaaatagtcattatatgcacttatatgtgttatatttgaaccagaatgaaataacttgaatagatctt

SEQ ID NO: 294856 - DNA, 604 bp, Homo sapiens
cctcactcctgtctgcccttgtacttacattctcagtcatcctcaaatgctttctctcttttctgtttccttcttttttttgctttgttttgttttgttattttgacagggtctccctctgtcacccaggctggagtacagtggtgctaccatagttcactgcagccttgaactcctgggctcaagtgatcttcctgcctcagcctcctgagaagctgggactatagctgggaataygggcacagaccatcatgcctggctaattttttttttaacatttttttaccttttttttttttttttactttttgtagagacagagtctcattatgttgcccaggctggtcttgaactcctggactcacgcaatcttcctgcctcggcctcccaaagtgctgggattacaaaagtaagccactgtgcctggcctcttttctatttcttaaacagtttcttatgtattgcttatttccttcagcctataaatgggcttggcttgctccaattaaaatatatatagatgtaatttatattaatacatatgtaattttattacatatagagcatatgtatatgggcatgtgtgtgtgtgcgtgcgtgtgtt

SEQ ID NO: 294857 - DNA, 536 bp, Homo sapiens
ggtaatatttaagaaaaatatggccatcatctacttcttctcttgaatagagggcttaaatataaaaatgatttggaccaggcacagtggctcacacttgtaatcccagcaatttgggaggctgaggtgggcagatcacctgaggtcagaagatcgagaccagcctggccaacatggcgaaaccccgtctctgctaaaaacacaaaaattagccagccrtggtggtaggcgcctgtagtcccagctactcgggaggctgaggtaggagaatcactcgaacccgggaggtggaggttgcagtgagccaagatcacgccactgcactccagcttgggcaacagagtgagattcggtctcaaaataaataataaataaataaataagtaaataaataaataatttgaattgatctgatcataacctctacccaatcctctgtctaaatatgccatcgataactcaccagcaaaatggtttgtgtttgtgtgctaaggagttgagatgctgaatccttggaaataacagtaggtggcaac

SEQ ID NO: 294858 - DNA, 575 bp, Homo sapiens
acgttaacatctgctcccaatcagacctttcctgttaacaatggttaacattcattagtgcttatcatgagctgatctctagtttaagccttttaartgtactaatccatttgccttttcaaaaaccccagaaaatacatgttctaattatcattcccattttacagatgaggctagtgggacacagagagggaaagaaagttaaggaggcagaaccagaactagaaacatgtagtcctgccccactcttcaccactatactgcaatcccttatttgtaatgatattggtgactagaaaaagtaggtggaaatttggaagtctgaactaaaacctctgtgcttatgcttcagatgattctaacacagatggtatgagaaccacatgttgaaaaacagatgtaggtagtagtagtagcaatgttaagaactggtgtttgtttatcattacacttcaccaaacatttccatatacatgatctcatttcactcttataacaaccctgcaaggtaagtatgattgtcttccatgtttctgaatgagaaaagcaaggctcattcataaagcttgcctaaa

SEQ ID NO: 294859 - DNA, 513 bp, Homo sapiens
ctaagggccaaggggagatatctacacagaagccatattcccacccatgtcagatcatcccccaaatgcaggccaagggattacccacccaaacggttgaggagcctcttccatggcctgggtggacctttgtccttgggtcagttcttctgaagtctgaattcaccattgatgtgaatgcatcaatgcctgaggggtgacaaagggacagctacttgcacaggatttagacagaacttggatatgtgagcagggtatttatttatgtgtatgcaaagatcctcayagggcaggacagaaccaaaagtgggaaaaaggggtggcatgctgtgggaggggaatatgaggaacttgagaggaccccctacattggggcatgaacactgaggagtctaggaattctaagttcaaacctggtcatcatgagaatatacttattcaggtagcaggataagacgtattttattgaactttttggtaactgatggataacttacatttaaacagatgata

SEQ ID NO: 294860 - DNA, 603 bp, Homo sapiens
aatttatttaattaaaagagcaaataacattcaaacgagacaatcatcrtcatcatcatcaaagattccatcttgaacatttgtcattcatttaattaacaaatattgcataggtccccaatacgtgccagaaactgttctagatcctcaagatacagttgtgaaaaaggtaaggtgtgttcaagaacagctgataccttgtacacataaacgcatctcccagttaacattagaaattcagatcttgtccatgatatggctaaacagaagcctatttctcattattttaagtgagaaaaatgcctttcagtttggccaaacccctaaaccagtttcccatattaactaaaaataataaaatacctataaaggaataaaagctatcatattggaatgcaaagtactgaaaacattacttcatcatcaagtaattagcatggttgctaatgaacaatttctttataagcagtaatagcctttattcacacaccaactggggaaacacacaacacacaaccctttggttgacgtggtgcacatttcaaaagccaacaaatgattgtgcttccagctagcatcaaactactttttcaccataaagaa

SEQ ID NO: 294861 - DNA, 640 bp, Homo sapiens
tgtatatgatttgtactttttttttaaacttactttatatttggggatacatgcgaaggtttgttatataggtaaactcctgtcatgggggtttgttgtatggataattttatcacccaggttaagcctagtrcccaatagttattattattattattattattattattattattattattattatttgagacagagtctcactctgttgtcaggctggagtgtagtggcgcgatcttggctcactgcagcctccaccacttgggttcaagcgattctcgtgcctcagcctcccgagtagctgggattacaggcatacgtccagctaagttttatatttttagtagagatggggtttcaccacgttggccagtcttgtctcaatctcctgacctcatgatccacctgcctcggcctcccaaagtgctgggattacaggtgtgagccacagcgccggcccccagtagttattttttctgctcctctccttcttgccacccaataccctcaagaagacctcagtgtcagttgtttccttctttgtgttcatgagttctcataatttagttcccacttataagtgagaacatgtgatatttggttttctgttcctgcattagtttgttaaggataatagact

SEQ ID NO: 294862 - DNA, 640 bp, Homo sapiens
tgtatatgatttgtactttttttttaaacttactttatatttggggatacatgcgaaggtttgttatataggtaaactcctgtcatgggggtttgttgtatggataattttatcacccaggttaagcctagtgcccaatagttattattattattattattattattattattattattattattatttgagacagagtctcactctgttgtcaggctggagtgtagtggcgcgatcttggctcactgcagcctccaccacttgggttcaagcgattctcgtgcctcagcctcccgagtagctgggattacaggcatrcgtccagctaagttttatatttttagtagagatggggtttcaccacgttggccagtcttgtctcaatctcctgacctcatgatccacctgcctcggcctcccaaagtgctgggattacaggtgtgagccacagcgccggcccccagtagttattttttctgctcctctccttcttgccacccaataccctcaagaagacctcagtgtcagttgtttccttctttgtgttcatgagttctcataatttagttcccacttataagtgagaacatgtgatatttggttttctgttcctgcattagtttgttaaggataatagact

SEQ ID NO: 294863 - DNA, 584 bp, Homo sapiens
  misc_feature (1)...(584): n = A,T,C or G
ccataccatggcgaaaccccatctctactmaaaatacaaaaaattagctgggtgtggtggcaggcacctgtaatcccagctactcaggaggctgaggcatgagaatcatttgaacccaagaagccaaggttgcagtgacccgagattgtgccattgcactccagcttgggtgatagaatgagactctgtctcaaanaaaaaaaaaaaaaaaaaaaaaaaaaaaaagagcanaaagaaaaggccagggactggctggcttccttanccagagaatagaaagaagagagccaaacaggtaaatacttagagtatactaagaaaggaatggatgcatgatcaacagagggtcaaaaaaagttttcagaaggataccagaaagaaatagcagctttcaaattcaacctggagaaagttattggtgattctagggagcacacttgtgtttcttagtcaagagacctagggcattgcaggtaatatggaggaaatagaggcagctggtagagctgtagcaagtaatcagttatctgcatttggaggtgtctattaagaaggaagttcccaggggaacatggtaggacata

SEQ ID NO: 294864 - DNA, 563 bp, Homo sapiens
caaacaggtaaatacttagagtatactaagaaaggaatggatgcatgatcaacagagggtcaaaaaaagttttcagaaggataccagaaagaaatagcagctttcaaattcaacctggagaaagttattggtgattctagggagcacacttgtgtttcttagtcaagagacctagggcattgcaggtaatatggaggaaatagaggcagctggtagagctgtagcaagtaatcagttatctgcatttggaggtgtctattaagaaggaagttcccaggggaacatggtaggacataaaccattctgtcctcatgtgcttccagggatatggccaatgtcccttcttcctctgagctcctgtagtttatccatctgtgacactcatttggcacttargacctgctggcttgtattgttctttatttctttaggagctggtctatttccaaaacagcctgtgagctttttaacaattgctttatattgtctgccacaatgccttgcacataatgttagtgacagcaatagttgtagaggtagcagtagtaaaagtagtaatagaa

SEQ ID NO: 294865 - DNA, 639 bp, Homo sapiens
gtcaattaaatctcttttctttgtaaattacccactctcaaatatttcttcatagcagtgtgagaacagactaatacaggaacattgcaatttcattccaagagtcatagggacaagttcttctcataatgggaaagacattctagaccaaatgcttctatcayagaaatgtttagaggcacaaggaagtagacactggtaatcaatatttctttaattcaccagaaagtgtcttcctttccttccacatttcttaaaatttaagagtaaattattcacttaatacctgaaaggtgactaactacttggtgctagcattaccgagggcatggtttcattacaaagttctccattttgtcaatctatattgctcgtgatgagttattttcctaatcataatgtgagccctctgaacttctttatctgttatcagtccacaccaataccactgagaataaagtgattctgatctgatgaaaccaggttctagaaggaacactctaagacagcagccaaatctctttgggaatggatggctctactatagctacagtatcaccagaagatgtgaaatacattgtcatttctattggctatttattttaaaggaaaaaaagtaagaaataacaaaacagaagt

SEQ ID NO: 294866 - DNA, 639 bp, Homo sapiens
gtcaattaaatctcttttctttgtaaattacccactctcaaatatttcttcatagcagtgtgagaacagactaatacaggaacattgcaatttcattccaagagtcatagggacaagttcttctcataatgggaaagacattctagaccaaatgcttctatcacagaaatgtttagaggcacaaggaagtagacactggtaatcaatatttctttaattcaccagaaagtgtcttcctttccttccacatttctkaaaatttaagagtaaattattcacttaatacctgaaaggtgactaactacttggtgctagcattaccgagggcatggtttcattacaaagttctccattttgtcaatctatattgctcgtgatgagttattttcctaatcataatgtgagccctctgaacttctttatctgttatcagtccacaccaataccactgagaataaagtgattctgatctgatgaaaccaggttctagaaggaacactctaagacagcagccaaatctctttgggaatggatggctctactatagctacagtatcaccagaagatgtgaaatacattgtcatttctattggctatttattttaaaggaaaaaaagtaagaaataacaaaacagaagt

SEQ ID NO: 294867 - DNA, 584 bp, Homo sapiens
acatgaattagtcaaggcagattgtttacaacataaaatggttacattataaaatggaagaaaattaatatttctagtaattggttaggaagatttgcaactgtgatccatacctttaaaaaagagctagtgaaattcagaatataatattggtgttatctgtgcaatttaaaataatgatgagccagtaatgtttaggtaacttttaaaaacaattactgttctaactaaaggaattattttctttgaggataattcacctcccaccagttccacattttgacaactttatcattttggaccaatgtgaayttgacctttcccccctccattcttcatcttgtaagtgctgtgcccttccaggctgatactttgaagacaaattctttgtccttgtttggattattgaacagtaaatgtcaaggttttttttccccatttacaaacgttttatcaattgctgacctaaaaaagattagatgtaatcttagatattaaaactaccattcagcatggaagatctttaaaaaagaaaaattcacatgaattacaattaactttaaagactttttaatgaggaaatg

SEQ ID NO: 294868 - DNA, 580 bp, Homo sapiens
acatgaattagtcaaggcagattgtttacaacataaaatggttacattataaaatggaagaaaattaatatttctagtaattggttaggaagatttgcaactgtgatccatacctttaaaaaagagctagtgaaattcagaatataatattggtgttatctgtgcaatttaaaataatgatgagccagtaatgtttaggtaacttttaaaaacaattactgttctaactaaaggaattattttctttgaggataattcacctcccaccagttccacattttgacaactttatcattttggaccaatgtgaatttgacctttcccccckccattcttcatcttgtaagtgctgtgcccttccaggctgatactttgaagacaaattctttgtccttgtttggattattgaacagtaaatgtcaaggttttttttccccatttacaaacgttttatcaattgctgacctaaaaaagattagatgtaatcttagatattaaaactaccattcagcatggaagatctttaaaaaagaaaaattcacatgaattacaattaactttaaagactttttaatgagga

SEQ ID NO: 294869 - DNA, 585 bp, Homo sapiens
atgttcaattaaatatatattataaarcattattttatataagataaatgtatgccatgttctctttgctcaatgaatgtgtcatattatccataattctatatttttttgtaagtacatcatatatactgtacttcttgttggtgtattagctattatttctttcattttatgctattttcatagtgtggagaggttcaaattgtgttcagaattgctcaaattaaagtagccattctgactacagagctttgcctgctaagtttctagatttagttatgggttgtttatttctcttgctagaagcaaaattttatgcaacccctaagagaaaagatcagaaactatttcagagttattattacacaatgcagaggctgtacagagagtcatctctcagccttgtttagatgattgagagtgaggatcaaaaagatgggccaatgggtcttgcagtgtctagcatgccttgtgatgaacgagcattagactctgcaggagtctagtttagggtctgtctccacagaaccttggttttctgtgatagagaaaatcttttcatttcccattattttttaaaatacc

SEQ ID NO: 294870 - DNA, 585 bp, Homo sapiens
atgttcaattaaatatatattataaagcattattttatataagataaatgtatgccatgttctctttgctcaatgaatgtgtcatattatccataattctatatttttttgtaagtacatcatatatactgtacttcttgttggtgtattagctattatttctttcattttatgctattttcatagtgtggagaggttcaaattgtgttcagaattgctcaaattraagtagccattctgactacagagctttgcctgctaagtttctagatttagttatgggttgtttatttctcttgctagaagcaaaattttatgcaacccctaagagaaaagatcagaaactatttcagagttattattacacaatgcagaggctgtacagagagtcatctctcagccttgtttagatgattgagagtgaggatcaaaaagatgggccaatgggtcttgcagtgtctagcatgccttgtgatgaacgagcattagactctgcaggagtctagtttagggtctgtctccacagaaccttggttttctgtgatagagaaaatcttttcatttcccattattttttaaaatacc

SEQ ID NO: 294871 - DNA, 460 bp, Homo sapiens
gggactcaagtctttgattgyaactccctgcagagactgcagtgcactggctgtgcacccagtctattgtggggagggcagctctttcctctgaagcttaccaggtggtctgtaattgcctgtgatgatgtctgaaaaatcatacatagggttttggtctcaagccagattccccattgattatcatcttacatgcctacttcttcttgagtttaaattagggagtaaaatccaataaaatgggtcatttatttagaacgtggggtcacatagccttctcaggcaatttaaatttagagagattcttgccctgtgccttgtttgcagtgttattgatactaaaatgaaccccaccctcaagcaacttagtgtctattggaagtccagggggaaaatattcaaaacaataacattaatattgtaaagtggtttatataatgcgggcttgctcaaaacagtt

SEQ ID NO: 294872 - DNA, 628 bp, Homo sapiens
gtttttaatatgtgcaagtatatgtagatgttttatgcataataaatataatataaacatacatatataaagatgaagcctatattctttagagcaagatttcctgataattcaaattccaggtctactacttgctggttgtgggaatttcatgtcatttaacttctttgttcctcatgtcctcaaaggtattacaaagaatgatataacagaatctttctcatggggctcttgtaaggaataaaagagcatatatggtttctataaagtacttggtaagcctggtgcgtgataaattctcaaactgttttagggtatatgtaatttcaatagagagaaataggatagctgtgtatttcatcgrgtgctacaggaattgggttgggaaatgttcacttagactcttttctaaatctcatttcaacttaggacagaatgaggacaaaccttcatgtttcttcaaagttcctagacatctttggtgacagttctcaagttggatttttactaaaaaaaaaaaaaaaaaattaaaaagaaaaataacctctggtgaaaatttcatacgtatttgaatatttaaaacataatcccttaaatatgcattgtaatattaatcatccattctttt

SEQ ID NO: 294873 - DNA, 492 bp, Homo sapiens
agcaaggtgggttggcttaggcttttacygtgcttaggaggcaaggctggagcacaggttcaagtccatgagctaggatctgcatggtttgaaattttttcagcaccaagagatggagagcaacccagctgtgggacaaggaggaaggggaggagtggggactgaacactgtcagtggccaaacacatgaaaaatggaatcttcctctttttacacataatttcgcttaagtcacaaaagactacaataaaataaagtcacatactaaatgtgttacacacaaaagaatattccattagcttactagaatttctgttttaaaatttttatactcacaggcagcaggatcccaggaaatgtaattacacatttcccatagaaaagaagatcaatgtattgttgtgagacctggataaaaggcaaatgatctaaaacatattttctaagtctgtcaggaattaacaaactgcacagtaatagagaatgtttgtc

SEQ ID NO: 294874 - DNA, 584 bp, Homo sapiens
atgccatagaatatcgttagctataacatgcttgtgtgtaatagcatcctagaaattattcctcctaaattactgtgactgtgtacrcattaaccagtctctccttatacctcccttccttcccttccccagtctctaattaccatttttctgctctccacatctatgagatcagcttttttggattccgcatataagcagtggcgtgtgctatttgtctttctgtgcctggctcatttcacttaacgtaatatcctccaggttcatctatgtgtctgctaatgacatgctttaattcgatttttggtgactaaatagtattctattgtaaaaatttaccacattttctttattcattcatctgttgatggacacttgggttgatttcatatcttagttcctgtgaacagtgctgccataaacatggggctgtagatcgatatctcttctaaatactgatttcatttcttttgggtatatacccagttgtgtgactgctggatcatatggtagttctatttttaattttttgagaaacctctgtaatttttttgtctgtgctaatttgcattctcaccaactgt

SEQ ID NO: 294875 - DNA, 584 bp, Homo sapiens
atgccatagaatatcgttagctataacatgcttgtgtgtaatagcatcctagaaattattcctcctaaattactgtgactgtgtacacattaaccagtctctccttatacctcccttccttcccttccccagtctctaattaccatttttctgctctccacatctatgagatcagcttttttggattccgcatataagcagtggcgtgtgctatttgtctttctgtgcctggctcatttcacttaacgtaatatcctccaggttcatctatgtgtctgctaatgacatgctttaattcgatttttggtgactaaatagtattctattgtaaaaatttaccacattttctttattcattcatctgttgatggacacttgggttgatttcatatcttagttcctgtgaamagtgctgccataaacatggggctgtagatcgatatctcttctaaatactgatttcatttcttttgggtatatacccagttgtgtgactgctggatcatatggtagttctatttttaattttttgagaaacctctgtaatttttttgtctgtgctaatttgcattctcaccaactgt

SEQ ID NO: 294876 - DNA, 634 bp, Homo sapiens
ttcatccaattaggagaatgacattctctttgcctagagattatgttggcaatgcatctgtaatagatatatgtcactgagtgcatagatttccccttgcctcaatgaggtgactgatgcaagaatagataaattcaagggagataaggcattctgtttgacattatgaaagtgactatctctccctctcctgcatgtcaaggaagaactatattgctggcagtcattttttccttacaggaagacacctgaagaggaagccacacttggagaagcacagaacccaaaatacyagaaagaaacacaggaggaggcttcatttatctccctacctcagacagttttgattacatgagccaatgaatcccctttcctgtctatgacactttcagatgtttttttgtgttaccacccaaagcatgctgagtgatacagtgtgccctgcattccagttttataggaaatatctccttggggcattctttcttcctttcctcacctgtgtcatctactttaatttagccctggcccttctcctttgccttctgaattccaattatttataaaatcagcctcctatgcaagttgtcatggtgatgaggaataaagctgtagatcctgaggatggaaaaag

SEQ ID NO: 294877 - DNA, 472 bp, Homo sapiens
ttaataactcatcaatgtcacacagtacaatgtagaagagctaatatttaaggagaattggaaaaatatttttctaaaatggaattacacraaaaaagtggaatgagacagacatttctgactaaatagttcatcttctactaaaaacctctccaccccaccccctacgaaaaagcaaaaaataaaaaaaaaaaaaattaaaaaaaaaaggttgatggcccctggatctgaggtggtcctgctttatttgacatctgtagttccactgacagcctgtgttgaccaaggtcacctggatggctgcacgggtatgccctttctctctgagagctccagcaatgtcctcccaaaagctatctaagaatgatgacttcctggagaaaagaatttgttattcccccttttcaggcgccactgacatgctttcatttatcttttaagtctgttttaaatgtaattcatagacttgcca

SEQ ID NO: 294878 - DNA, 488 bp, Homo sapiens
aagaacccacaatggggcctcagcaggagtccacggaggaggacgcccactgcctgcacctcaaccagagacttttcaaggtgcaaaaaaatttgaaacgtgtgtgttacacccgcaactactacaagaaaatggckcagaaccactacaagaagacctggcccaggaattgaaggaagacgcttccaattttcatagggagatcttcttccatgagaaaatggcccaggaaggctggatggccacaatgtccaccaagagagtgctccaggtgctccagaaagaaaatgaccacaacacgcagaagccagatgactgagttccaagttctagcctttcctgagtggccctttggattctggggtttgacccacagcccacaggggcccagaaccccacagggggttcatgggccgctagggccaccaggagggaagctggtcacggtgtgggtatgagggcttctctccagaccacctgccggtttg

SEQ ID NO: 294879 - DNA, 488 bp, Homo sapiens
aagaacccacaatggggcctcagcaggagtccacggaggaggacgcccactgcctgcacctcaaccagagacttttcaaggtgcaaaaaaatttgaaacgtgtgtgttacacccgcaactactacaagaaaatggcgcagaaccactacaagaagacctggcccaggaattgaaggaagacgcttccaattttcatagggagatcttcttccrtgagaaaatggcccaggaaggctggatggccacaatgtccaccaagagagtgctccaggtgctccagaaagaaaatgaccacaacacgcagaagccagatgactgagttccaagttctagcctttcctgagtggccctttggattctggggtttgacccacagcccacaggggcccagaaccccacagggggttcatgggccgctagggccaccaggagggaagctggtcacggtgtgggtatgagggcttctctccagaccacctgccggtttg

SEQ ID NO: 294880 - DNA, 488 bp, Homo sapiens
aagaacccacaatggggcctcagcaggagtccacggaggaggacgcccactgcctgcacctcaaccagagacttttcaaggtgcaaaaaaatttgaaacgtgtgtgttacacccgcaactactacaagaaaatggcgcagaaccactacaagaagacctggcccaggaattgaaggaagacgcttccaattttcatagggagatcttcttccatgagaaaatggcccaggaaggctggatggccacaaygtccaccaagagagtgctccaggtgctccagaaagaaaatgaccacaacacgcagaagccagatgactgagttccaagttctagcctttcctgagtggccctttggattctggggtttgacccacagcccacaggggcccagaaccccacagggggttcatgggccgctagggccaccaggagggaagctggtcacggtgtgggtatgagggcttctctccagaccacctgccggtttg

SEQ ID NO: 294881 - DNA, 488 bp, Homo sapiens
aagaacccacaatggggcctcagcaggagtccacggaggaggacgcccactgcctgcacctcaaccagagacttttcaaggtgcaaaaaaatttgaaacgtgtgtgttacacccgcaactactacaagaaaatggcgcagaaccactacaagaagacctggcccaggaattgaaggaagacgcttccaattttcatagggagatcttcttccatgagaaaatggcccaggaaggctggatggccacaatgtccaccaagagagtgctccaggtgctccagaaagaaaatgaccacaacacgcagaagccagatgactgagttccaagttctagcctttcctgagtggccctttggattctggggtttgacccacagcccacaggggcycagaaccccacagggggttcatgggccgctagggccaccaggagggaagctggtcacggtgtgggtatgagggcttctctccagaccacctgccggtttg

SEQ ID NO: 294882 - DNA, 458 bp, Homo sapiens
cttagtatttttgtaagcagaggcaaagaagctggtgatgacagattgcatatgtgaacaaaagcagtaatgactgatgcacttctgtgcctcatattagttggcattgttctaagaaagtgctttaaggagtgacaaaaatatttaactgttgtctattatgagaactatagttagaggggctatttgtgtgatacatcaacctgcatttctggaatcatcaacagggagatgaataaaactcaagcacatagtatgatgaatgtagcaatacttcttaaaaccaagaaggtgtaccagaaatacaatgttatgtaagaaataccatcaactrtataactacaggataaaggaatgttaatacatttgaagatatcaggtaaaatagttacagtatgaagaagctatttactctcatcaaaactaaatagtccataggtgtgaaaatggatctgagt

SEQ ID NO: 294883 - DNA, 565 bp, Homo sapiens
ataataaatttaattccattgaattattttaaaatatgttctccattctcaacataaataaatattatataaatattatttcattaaataagtagataaaaaactaaattgctctttctaaagcacagcttactctatataacttaaaggtgcatcttaattaaatcagraagtaaatatgtctattggtgacacatggtttttagcatactttttatgttttccaacaatcagtatttaatttgtggtttgtcatttctctgataatgtattttaataattgataactagtctcttttacgctgaggaatctttcaaataaatgagttctccgaatccttccaattagatgtcataatgctagataacagatatactatatatatatatatatatatatatctccatgtatttatactaatacacaaatattttgtaaatataaagacattttcatatgaatgctaagtaatgacataaaaatgacatttgcataagaatatatgaaacactgcttattgattcccttaatttgaatacacacttaaaatttgattaagaagtt

SEQ ID NO: 294884 - DNA, 235 bp, Homo sapiens
tatggatgcatttggctttaatcatattagctgtcttcttgttatgaaatgatactttatagaaacattttaaataatccccccctttgtcactctttttctaatttatgaccacttgtctccatggtcccttagtgtagtagttacacaatgaattcyacatagctatccaagttcagaatgcaaaaccaggtctcatatcagcagtttggtgtccctgcattagctaacactg

SEQ ID NO: 294885 - DNA, 235 bp, Homo sapiens
tatggatgcatttggctttaatcatattagctgtcttcttgttatgaaatgatactttatagaaacattttaaataatccccccctttgtcactctttttctaatttatgaccacttgtctccatggtcccttagtgtagtagttacacaatgaattccacatagctatccaagttcagaatgcaaaaccaggtctcatatcagcagtttsgtgtccctgcattagctaacactg

SEQ ID NO: 294886 - DNA, 537 bp, Homo sapiens
acattctgctccctcaatattttttgtttcctgtctcatcttttccagattcaaatgccttttccttcttgaaagataacatcagataaatctaatcctttctatatgactgggaattaatatttttttcttttgcactacgacagcactttatctgtagtattgccttgaactgtgattaggggtgtaaatgtttttcagactgcaaattatttaagcacaataaatctcacattcacatgtgttccctctgtcacctaccacagtgaagttttccagtgagggagtcgtgtgtatgtgtgcctgtgtatgtgagagcacaaacacatacacaggaatagatacctatgtaaaagttagctcttatgcatataaatacatatatattgatttcattatatacactaatcaaaaccacagccaaatgtatctgatttagatactgatgtgcagattggactagatgaatcttagatccctatcagctccaaatttccaygattattaagaaaaactgcatatatccatagtttctca

SEQ ID NO: 294887 - DNA, 1001 bp, Homo sapiens
cttaaacctataaatatttatcttcttctaaataacaaaattaaatcctaaaaactacatcaacaacttattcttagtttttattatttttattttatgctttattttatttttaatagacaactattaaaaatcagtctactatataattgctgaattatttttaaaaagrtaatgtgaataaatctttccgcttaatgaatgatggattgagctataagatgaaaaaatattaagtattgatgtaatccattaatacactgatatttgtgactgtgattagttctcattaaaagtgaccaggtttaaaaaatgttaaaataaagtttatttagaaaactggtggtataaactggagggaagacattcatggaaaggtgtctcctcacttttctccctctgtcatatagttgaagctgacatatggacactttctgttctcacatgcccatggcactaatttagtaaattctatagacccagagcagagattgttttatwcttaaacctataaatatttatcttcttctaaataacaaaattaaatcctaaaaactacatcaacaacttattcttagtttttattatttttattttatgctttattttatttttaatagacaactattaaaaatcagtctactatataattgctgaattatttttaaaaaggtaatgtgaataaatctttccgcttaatgaatgatggattgagctataagatgaaaaaatattaagtattgatgtaatccattaatacactgatatttgtgactgtgattagttctcattaaaagtgwccaggtttaaaaaatgttaaaataaagtttatttagaaaactggtggtataaactggagggaagacattcatggaaaggtgtctcctcacttttctccctctgtcatatagttgaagctgacatatggacactttctgttctcacatgcccatggcactaatttagtaaattctatagacccagagcagagattgttttat

SEQ ID NO: 294888 - DNA, 581 bp, Homo sapiens
acttggcaaaaccaaacgttctacaagtttatatttgtgtgtgtacgtgtgtgtgtgtgtggagagagagagagatgtaatctgtagacataggcatggtgaggtaaataaattgactatagcacatagaatagttatcacatgatgggtatttgatgaattggctcatctgttctataaaacaggggtcctcaactcccaggctgtggacctgtaccagtccttggcctgttaggaaccaggctgcacagcaggaggtgagcgagcattactgcctgagctctgccttctgtcagatcagcatcagcattaggttctcataggagcacgaacactattgtgaactgtgcatgtgagggatctaggttgagtgttcctatgagactctaatgcctgaagatatgaggtggaacagtttcatctcaaaatcattgcccgmaccaccaccaccacccaccccatctgtggaaaaattgttttccatgaaatcagtctctggtgccaaaaagattggggaccaaagctataaaatatgaattccactcattcttataatttctaaattgaactttccagaatgc

SEQ ID NO: 294889 - DNA, 376 bp, Homo sapiens
ctggagccttgagtttgagcaggaatgaatatttytagtcaacttcattcaactccctagtccctcaattgcttaatttttttttttttttttttttttgtctatcatgcccaccggaacccttcacacccttcacagtgtggggtccatatttgatcgtcacaactacattttgaccacaatctatgatgccatcaacatggcattggtaacaacatctacttttcacattcttacacccagacacaggaatccatctggagaaaatcatgcagttatgcacttgggaaccattacaccttcattgtctctagtttcagccagacatttgtcaatgctccccaagcttctcattgtcatttgtcagctcatgcac

SEQ ID NO: 294890 - DNA, 399 bp, Homo sapiens
tggcatatagcaattaatgtgttttttccaaagggtttaacattcctcctgttatatactgcaagcaacttatttgtttattatattattaaagcagcctttaggccgaagcgtggtaaatgatcacaaatctcaaatttaatgaagtcraaattggtgacattttatttcatttttctcagatcatcatatgataaaaatcacactgcattttacaatatctggaggacatgataaactagagtagctattcaaataaaatccgtactctgtggctaaagctggaaggctgagagttatagtaaagatcacaaattcattaatgagggctctctttataattgaattatctagtctgccatttgttttttgcaatacattactcaatcagtgaccatt

SEQ ID NO: 294891 - DNA, 589 bp, Homo sapiens
ttacaggagccaccttaaaacttttcaacatattacctttcagttttaatcacagaaaatcagtgttccttgttgtgactaagaaaccatggtgataaacctgtggtattacttcatcattgatgagaagctgcatgttcttttcatggaaatagtaatatcagaggaaatatgaatccaacaaaactraaggatagccatgcattataaaaatgcattaccccatagaaatgaaaactgttcacacaaaaacccatacatgaatattcagagcagctttatttgtaataaccccaaattgaaaatgtccaagaaagccttcagcagatgaagggttaaataaactggtacctttatattctggaatcttttatattacagaataataaactactgaaaaacacaacagctttatttaatctccagggcattgcacctggatgaaaaaaaaagtccccaaaatgtacatactctgtgattccattgtataatattctcgaaatgacaaaattatggaaatagagaacacattaatggtcttcaggaatcaggaacgggaggtgaggcagagaaggagtttaacaacaaa

SEQ ID NO: 294892 - DNA, 589 bp, Homo sapiens
ttacaggagccaccttaaaacttttcaacatattacctttcagttttaatcacagaaaatcagtgttccttgttgtgactaagaaaccatggtgataaacctgtggtattacttcatcattgatgagaagctgcatgttcttttcatggaaatagtaatatcagaggaaatatgaatccaacaaaactaaaggatagccatgcattataaaaatgcattaccccatagaaatgaaaactgttcacacaaaaacccatacatgaatattcagagcagctttatttgtaataaccccaaattgaaaatgtccaagaaagccttcagcagatgaagggttaaataaactggtacmtttatattctggaatcttttatattacagaataataaactactgaaaaacacaacagctttatttaatctccagggcattgcacctggatgaaaaaaaaagtccccaaaatgtacatactctgtgattccattgtataatattctcgaaatgacaaaattatggaaatagagaacacattaatggtcttcaggaatcaggaacgggaggtgaggcagagaaggagtttaacaacaaa

SEQ ID NO: 294893 - DNA, 543 bp, Homo sapiens
tgtcagtagaaacaaaattgccactcttgctttgatcttaccaacagatgcaacgctagcagaatggaatgaattcaaatagtcttaattaagcctttcttgtaggtttaattaggtatgtaccagcttaaaatacatctggcctataaaaaagacataatgagtatttgatgtaacaatttgatcttgttgttgtggttttcaaattcttttgtgtgcgtctgtacacatctgtgagtttgtgtaaagataayagctattactttcaattgtttcttctggttatacttcatggtgacactttgggcctctctgtgactgtgtgtgtgtgtggggtgggggtggggtgctgcaaccagtaactttggaagttttgtcaacaagttcacagaaataaaaactcaatgccaacctgttttgagaatccagttctaaatacaatttttgaaatttttgtcattatacaaatagcaatcaaatattataggaagtaacaaaaatgacagaaaaaaattcccacgttctccatcttagtgacttaac

SEQ ID NO: 294894 - DNA, 519 bp, Homo sapiens
gcaatcaaatattataggaagtaacaaaaatgacagaaaaaaattcccacgttctccatcttagtgacttaactttcttatttccatttcctttttattccttgttttatttatatgtatttttaatgtgtttttaattataatgtcaatacaattttattcaacttaatatttaataaattagagtttgtgcatgattatttttatagcagttacattttgtttaggtgattttaaataattttctaccastacactaattaaaggtatttagatttatttttatggtatgccataacacggaaatggaacttttttaaaaattaattttcctccttaaaaactattgtaaaattacatacctcatagtttaactgtttacatttatgtgtaacgaggacattttgcattcatgaatgaaaaataaaatgatgaaatagcagttatcaaaagaaacaaacaaaaatacatcagatatccacattttaaaaaatagagcattatattatataatattca

SEQ ID NO: 294895 - DNA, 532 bp, Homo sapiens
gaaaatataatttctttccttctctttccccagagatacccatctttgatacccacagcctctaatctttactatcttttagaactctactggatcatctgatatttcmaacttttgttgtaagagcacaacttcttatcttttctgtaccaccatatctgatgaagtattatatagccaggcatggtggcacatgcctgtaatcccagctacttgggaggccaaggcaggagaatcacttgaacccaggaggtggaggttgcaaagcaatgagccaagatcacaccattgcactccagcctggcaacagagagagactccatctaaaaaaaaaagaaagaaagatgaaagaaagaaagaaaaagaaagaaagaaagatagatagattatatatagaatagagccctggatggaacaataaaacaccaggaccctggtcccatgtgtgacatgagccacacacttgagggatccagaatgagcagagctaacagtagccacaacattgtgtcttagtccattttcttctact

SEQ ID NO: 294896 - DNA, 532 bp, Homo sapiens
gaaaatataatttctttccttctctttccccagagatacccatctttgatacccacagcctctaatctttactatcttttagaactctactggatcatctgatatttccaacttttgttgtaagagcacaacttcttatcttttctgtaccaccatatctgatgaagtattatatagccaggcatggtggcacrtgcctgtaatcccagctacttgggaggccaaggcaggagaatcacttgaacccaggaggtggaggttgcaaagcaatgagccaagatcacaccattgcactccagcctggcaacagagagagactccatctaaaaaaaaaagaaagaaagatgaaagaaagaaagaaaaagaaagaaagaaagatagatagattatatatagaatagagccctggatggaacaataaaacaccaggaccctggtcccatgtgtgacatgagccacacacttgagggatccagaatgagcagagctaacagtagccacaacattgtgtcttagtccattttcttctact

SEQ ID NO: 294897 - DNA, 1073 bp, Homo sapiens
atagaaaagaaaggcttccaaagcaaaaaaatamatactaaatactaaaacaggccatccccaaaggcagaggaattagtctggcaaaagactttctatgagcagcacttcaattagcaatattaactcctaagagtatccaggaagacaatgcaatgatgtcttcaaacccccgagaaagagccttcaacctggaattccaaatccagcccaaattgagtaggagcagaacaaatacattttcagatatgtaaagactcaggaagttcacctcccatgctctctttcttaagcaattatttaagtaaattcttaagtcacttctttgaatacttattcatgaggaataaagcaagaaaagtaaaccaagttcatgagagagtagaccaagaaagcagaataaatgagccacagaaatactgaatccgtgtaagaatagaactaaaggaaaatgtcagagctatagctacgcagcaggcccagagacaaccagttcttggaataaacagatagaacactgtwatggtctgcaaatgtacttaccaatgacacttgaatggccccaaatctcagagagatatcaatccaaaatgtaattactatgagaataacttgactttttaaattattgtgttaatttagaatgtcacaaaaaaggtccaaagggcatgaagctaaaaaaaaatgattagagcttgaaaattttttggtattttccccaggaaagataatactctaatctaaatggacttttagttttagctttgacaggtgaagagtwagaggtcatcatccccacccttacaataggaaaaagctgaacaagctcaaaatcaatgacttttcttggaccatcagagaactgagtttgcagggaaacctgctcctctgaaatctggagagacaagtgcatccagaaagtcacagctgacatctgcttacctggagcagaagccaccggaaccatgagctggtaggaacacttacacagtaattttgaggaaccgttggaggctaagtgtggactaatttgaaagtgagaagctcctgggggtcagtcttaggtgggcacc

SEQ ID NO: 294898 - DNA, 628 bp, Homo sapiens
attcttttatttccaagaggaaaaggaatttgaccacaaagatgacagagttacaattctttacttttaaggggcaacctttggaggatgactctcattctaaaaatgcaggcattgcttttttcttttgtaccctattaagaattgtgcatgagaccactcagagtagatggggactctgggtcaacagaacagtgagaaaggtgacaaatggcaattcatttcagtgtttgttttcttgatgatggctgcctctttttcctggtgttctcatgtttctggggtgctacacaatgagttctatgtccttttaaatgggggcagagctgccacagtgtaaactaataaatagcacaattgaagccttcttggtcatgaaatacagctgattcctctcagttactttattcatcctctcaattctcttttttgagggaaaaaagttattttttgactttattctgacatatgtggattaatttttttaaactagtgctgctttcctgtacctttaatgtggtacaaatttagacgaaacrtctattatgcttgctaaattagattaaaacctcttatcctaagaaaatttctacagttttttatttggtaattgggctatttatgatgt

SEQ ID NO: 294899 - DNA, 605 bp, Homo sapiens
ctctgactttttaaatgtaagcctcaaggtaagagagattctcaaccaacaataacaaaacagaatgagtttttataaagagccatcacttaaaggcatcctaaatatttgaggttgaaaatgacccttgggctcctgactttttaaatgcaagctgcaaggtaagagtggttctcaaccaacactaagacatatccccaaagaactgtggattgrgcagctgtttatcagagagtaatatcagctgtttaaggatactcccaaagcccagggtagagtttcctcataactctgcccagcattactatagaccagtgataacaatgtgttttccactcctcactttccaaatgagaatgtgtattgcagttatcatgtcctcttctcaacaatgcatttgctatctgaagagactggataatctcactttggagacataaatctctggagtcaaaagatccacatctgagtttgatgtagaaatcatcataagatcctggatttgaacctgttgctatgattggataaaactgttgtgtttttttttcccccttcaagttgggtaagtaaagagcttttattgaaagagacgattggttttaaac

SEQ ID NO: 294900 - DNA, 1161 bp, Homo sapiens
atttgcaccaaactaaggtcattattcrcttttcttccccctctattctgttcttctgcagttctctttccctgatgaatcttatctgcctaggatagagagtaactcagcagctgcctgccactacatttctggcagagtcatcctctctgaatgctctgacaaacatattctgcatgtaccccttcttggtgaagtctcagtgaatatatcatcgatttcagcactttgtatagtcctcagattgcttcacatctatgcgtctttaaaatctcacaatgattttcttaagcaggaactatgtaatatctttcttttaaatctctcatagcagttaatataatgttacatgcataacaaacatcctgtaaagagatattgaattggatcagttaaagataattgtcatttatgaccctggaattgcctgttttattgacaagaagacattagtatgaatgaagcctgatatttgttgaaaggttgctgaatgccattttgtctaactttccatttattcaagatggctcccagcattctttcgtgttcagtggataactaacgtgggactacaacagagwatttgcaccaaactaaggtcattattcacttttcttccccctctattctgttcttctgcagttctctttccctgatgaatcttatctgcctaggatagagagtaactcagcagctgcctgccactacatttctggcagagtcatcctctctgaatgctctgacaaacatattctgcatgtaccccttcttggtgaagtctcagtgaatatatcatcgatttcagcactttgtatagtcctcagattgcttcacatctatgcgtctttaaaatctcacawtgattttcttaagcaggaactatgtaatatctttcttttaaatctctcatagcagttaatataatgttacatgcataacaaacatcctgtaaagagatattgaattggatcagttaaagataattgtcatttatgaccctggaattgcctgttttattgacaagaagacattagtatgaatgaagcctgatatttgttgaaaggttgctgaatgccattttgtctaactttccatttattcaagatggctcccagcattctttcgtgttcagtggataactaacgtgggactacaacagag

SEQ ID NO: 294901 - DNA, 1157 bp, Homo sapiens
aactttgcatataatagctgtgaaaaagttaatgacaatttttgtttttgttttctgcatgagccatagttatcaaaacattaaacccttcttaattcaaagtttcataaaaaacaacctaggaggttttcttcagagatggcttgaaggtgttggaaaatgaacttcagaaaacttttaatcagctcttattctgggamtagtcctttgactttaattgagtcacttcagttcttttggagttcagtttcctcacctataagataaaaactgggtcctggaagtgtttcaagggtcaaaggaaaccacctgtgacaaattctggaaaaaatatgacattgggtaacagctcttgtcatttccatggcattgcaatatttagtaatattttcatgttttgagctgaactgttgacgtgctccaattatagaactataataaaagtatttatgtatttattcagtaatataatttatagggatgggggcagagaaattctaggcagaaaagagcaggtttctgatgaaacccaaccctcaagctgaaaagcgtgaaaccacagcccgaagtaagaacttwaactttgcatataatagctgtgaaaaagttaatgacaatttttgtttttgttttctgcatgagccatagttatcaaaacattaaacccttcttaattcaaagtttcataaaaaacaacctaggaggttttcttcagagatggcttgaaggtgttggaaaatgaacttcagaaaacttttaatcagctcttattctgggactagtcctttgactttaattgagtcacttcagttcttttggagttcagtttcctcacctataagataaaaactgggtcctggaagtgtttcaagggtcaaaggaaaccacctgtgacaaattctggaaaaaatatgacattgggtaacagctcttgtcatttccatggcattgcaatatttagtaatattttcatgttttgagctgaactgttgacgtgctccaattatagaactataataaaagtatttatgtatttattcagtaatataatttatagggatgggggcagagaaattcwaggcagaaaagagcaggtttctgatgaaacccaaccctcaagctgaaaagcgtgaaaccacagcccgaagtaagaactt

SEQ ID NO: 294902 - DNA, 622 bp, Homo sapiens
atatgaaagtcaaatatacttgggattctccccttctctaagagtccctctttaaattaagactttgccaggtgattaacaagaacgccagctcttcaaagggaagcaaagccttgttctttgctgctccacaggcgaccagctctctttccctttggtccagatggaggctttgttctcccgaagttggtcaggtgctgtgcctgtccaaaaaagggaagcaagcgcagcgttaggagcccgcacctgtttaaaamgcaatgtcgttccctgagctccaaagcctgaacatcaaatgcctccctttgccaggcagcttggctattccccaggcgttttcaatctagttgggtaaaacaaaaattgcataatttgtcattattttcaaggaatgagatgtgccttctacaatccctttcgagttaaatacaatgacgctgagcttcctctgaatgccaatgccttctttctcagaaagaatagaaataaagaatgagaaaagaaacacccaattgattgcctgtaatttgctcgggtatttgttattgatgtattctttgtatgcattttagggataggtagcagaaaaactctttcccgaggtcttcagtaaagagaagtc

SEQ ID NO: 294903 - DNA, 581 bp, Homo sapiens
gaaccattacggaggtgaaatttcattacacagatggtgacatcccgatgtctatcatcaaaacacagcaggtagaaaccatcagccagggccattcccttctataaaattacacttatattaatgtcactccggatttcattatgcggaaaatgatattgcacaggtctccagcactakgggggcggcggagggtgggggtgctagggtggtgagggaagcataaggggctggggtgggagagtgggaaaaacaactgtctgtggagagaccacggaagctaattcagaggaagtctgcctaggaatggcagatcgaaaaaaaagagtatatgcatgtatatataaatgtatattttaaaattcctcgtagattctactgccagttcatgctgcttcttgattgactcgccgccagacgtcctccacaggcccctgatggaatgtttaaaaggccctcctgtgggaagcagggagatttacagttaatttttattaatgaaggatgacaggcatctccatttagccaacaagatattacactggtccaagaaaacgcccctgtatttggaacaagcatcc

SEQ ID NO: 294904 - DNA, 1070 bp, Homo sapiens
ctcttgttcatctgtttgggtagcactttacagcttcctattatggaacttcttaacttctggctattttcagatgttattttgaactcatttgtcttttcagagtatatatagcttccctractattaagatctgaatggtgacaagaagcaccccattttttccctatcacctgaggagaaatattaagtattattcagtgcttgggagaatgtatttgtcttggaattgtatcaccttgcttggggttgtgtaatatgagagaagtgggttgtgaagacaagaagaaggacattcaaggggtagttggaggaaagcaatcaagatttctttgcatctaagtcttaattttttttctttttaagtttgagatagtttggttcataaaatactgtatctgatagactcaaaaataatatcttattctgctaaaaagttagtttgccagttagatatgtacaacagwcataagaaatgtgaattgtgtttattcatattttgactgatatcgtttggttgtgaccccatccaaatctcaccttaaaaagtaataattcccacctgtcaagggcaggaccaggtggggataattgaatcatgggggtggtttcccccatactgttctcatagtagtgaataagtttcatgagagctgatgattttataaaggggagttcccctacacaagctctgtcttgtctgccaccatgtaagccatgattttgctcctcctttgccttctgcagtgattgtgaggcctcccaaccatgtggaactgtgagtccawcaaacctctttttctttatgaattacccagtcttgggtatgtctttattagtagcatgagaacagactaacacactgaccttctgtagaggctctgatacatataaggtgctcaatgtttttgtttttattttcattgaatatataactcatggttggaactgaaacaacaaactttgtctttggtagtattgtcagaggcatgtgaaccagagcaactccatcttgaataggagctggataaaatcaggctgaaactcactcggctgcattcccagatggt

SEQ ID NO: 294905 - DNA, 597 bp, Homo sapiens
ctcttggggaattgctgtggaactaaaaagaggtaatgttttatgtaatacaagcctggcatatggtaagccctcaatatgtgccatctcacattatgtatacagtaaacattcaatcataattttattataataatcatttgaattaatatctgattttagaataatcttgaatttgataagacacacttttaggtgtttttgcaccttctaggtaacattctgtatctaaccactaaagaaaatttcaccccaaaagtctactctgattttccaatggtcctggaaccatccattacctcagagttctatccaacctccagcttgttggcagaggactttcagggacttggcttttggtgaactatttgaattctgtttctgtgtactattctcttacaaatggtggaggtggcccccttcttgtattaaaccacagcagttacagcaacctcaacccattagtgtggtgtttcctgttgcacaatgcctttaccatgattagaagtccaacacaaactcatcctcctacccacacacacaaygttagcagcctattcatatatttatgtacaaaacactttattttataggatc

SEQ ID NO: 294906 - DNA, 556 bp, Homo sapiens
agaaaagcccacagcagtatcaccccctaaaacattgaaaacaaaaagcattacacatgcagagaaaaaagggagaaatctttcaaaccatcaattaaccaaagagtgaagaaaaaatgtagatggcagaagctctaataattcttccaatataggttccaatgtaagccaattgcaggtagaaaaacaactatggatattaatttttgttaggatgtaatttacacacagtgaatgtcagatttcaagcataatgtctaacaaatacgtgtaagggcatatcacattttttgaacccaagaatccttctaagtcaamctcctcaccctagaaacagccgctgacctgatttctatcacctagattagttttgttattctacaatctcactcaaatggaattgtacaatattgactcttttgtgtccagtttctcaacataacacgtttgtgtgcctgttgttgaatatatcagtagtctttccttttttgctattgagtagtatgccattatatcaatataccaggaatttttcatccattcttctatcgacaga

SEQ ID NO: 294907 - DNA, 660 bp, Homo sapiens
gacaacaccaaaattgggagatatgaacctggttaagtaaataaaagaggacagctcagatactgtcagaaagtcatcagagataaaaaaaatctgaattcagatcttcagattccaaattcagtgatctcttcacctctcacatctgagtttgccagattctatttggctcttaacaaatgagcttaccccctacatttcaacgaagccattagaaagaaatgacattttcccctctatttttcaatttccactyagccccatgcattcatctagtcactgctcaggtgaaaatggaaggtattttggtcctctttctattattttagcctcattggtccccttgggctgtgcatccattgtcttttgccttcttagctaaaatcactctctgtgccatctgtctagcctgcaacccctgattctctacaagacctactgtcttagtttatttgtatggctataagaaaatactatccataggtggctattatttctcatagttctggagcttgggaggtccaaaatcaaggcatcagtaatgttggtgtctggtataggctcattttctagttcacagttggtgacttctcactgtgtcctcacatgatggaaggagcaagacagttctcttgaacctcttttataagggcattaatc

SEQ ID NO: 294908 - DNA, 1096 bp, Homo sapiens
caaacaggaatataggatttgccatattggatcagtccattggtccaccaatgttgtattctcactgcctctggcaccagatgatacatgaagcactggaagagagcgaactccccccatccccagaaggcagcaagtcaattgtgcagygcaatatatggggtgaaagtctccactggtcggggtgggactacataaatggaatctggatttgaagatgtttaaatagggcagatgctgcatccattgaacacggacttaggcagttcttacctttagaaattgtgtctagtgtctctgtgctcacttgtgtcagagcttctctgctcattttcaattagaagaactattatttatcttacagtaataaatggaaacagtggaatcaaacagccccattcctgagagatgaagacaacactctatgataactgacatgttgctgctttctttctggtgaaagaataaatgcagtcaaaaccagaactcagtgtaatatctcaggacggcatgcccctcttcccacagtaattattacagaaatcwctagcttcatctgccgtcaatctcctaaggagcttgacctagacttcaaataaatacattgcatctatgtgcacctatagtattattctcatctggcatattctacatcagaaaatacacataccaatgcccccttctttaatctagtcttcaataaaagactgaaattccgaggctgcttcatgaaaaacctgaagaaggagagaaggggttcttgcctgatatcctggaaatagagcatataacacgaaacgttattctttttccctaaggacaaaaggaaggaatatcttttgcaagttctgccaatcaacagtcaactagataaaggaagcagtgatggtgcaacactagaggtgggcagctaacgaaagccaagccttctctgctgattgcagagacttcagtggtatggacttaaatgctaccagtctcagggacacctgtatccagagagwggctgtggttgtggagaacagagtttcatgaagtgtggtgatcaggcttaacttgacaatagttttttttctagtcaataaaatccaccagt

SEQ ID NO: 294909 - DNA, 610 bp, Homo sapiens
taggggaagggctaggcacatgtcaatgtgaagatgaataaatcttgatgttcactataaacatactgatagttttttgggggctaaatgaaggaacatacaatttcaatattatatggcaaatactatgacacattgtgggttaaaaaaatggctttctcacaccaggcatggtggctcatgcctgtaatctcagcactttgggaggctgaggcaggcagttcatttgaggtcaggagttcaagaccagcctggccaacatggtgagaccccatctctactaaaaatacaacaatcaactaggtgtggtggcatgtgcctgtaattccagctactcaggaggtctgagcctgggagacagaggctgcagtgagctgagatcgcatcactgcactccagcctgagccacagagggagattctgtcaaaaaaaaaaaraaagaaagaaagaaagaaagaaagaaagaaagctttctctctaacagttttgaatcatggattccaaaaggaatccacgattgttaatgaagttctagagtggaaatacagaatgttgtaagaatggagaaaatttctagtcaccaattttaaaaaaagaattgaatgagtta

SEQ ID NO: 294910 - DNA, 615 bp, Homo sapiens
tttgaatcaatgtgactatctcttcaagatttcaagttcctaaaagaaggaattaggtaatttgtatttatcattgttttgtgcccagcaaagcaccgtatmaactttaaatcttcctataggctttccaattgagaagacacaggaagtcatagaagccattcatcttatggaggaaactcctgctggcaaaacacttttctggatactatttgagagaatccaaagaaatgaaaaagagttcccagtcttttgtaactctaactgaatgcactaagatatagcactaggcctaaaaatgacatggcactcccactaaaataaatatatatgaagaaacacatataatcattaaatataagaagagatgctcaaagtctttagtgatattgaattaagtgaataaaacccaaagtaaggttatatttaatgcaatgtgattggcaaaaattaacaagtctataataccaaatgttgaaatacaaataggctcttttaaactctggtgttgagtgtaaactggtacaaccactttggaaagcagtttgatatgatcatctaagagtgaatattcatataacctattatcacaatgatttgactccttggtaaata

SEQ ID NO: 294911 - DNA, 557 bp, Homo sapiens
tactttcctcaacacaatcctgaagtttctcctgagaggaataaaagctgtttttctggcgataaaaacccaccaaaaagtttataaagaaaacaaactcccctcrggcagtaatcagtggtcagacggtatctgacaagcacagcagaattttagctattgctctagggctgttcttagttctggtcaattcctttgctaactgggatatgaaaggaacccaagtgaaaatagtccagaggggggaaaaataagaaagataatgtaaaacaaactcattatatctggaatattaagatttttttcttagaagattttctcctttttgccctagagcacttgaaagttctgaagatacattttatgtaaaatctaaataatattttacataacacttactttaagtttaaaggcttgctacaatgaaactggtactaagtggacttaaggcagcaaaataaactgaagaggcctcataaaaatatataggcagtagttaactgatgcaaggaaataagcttcatggcatgagacctcggatttgcgttaacacctaa

SEQ ID NO: 294912 - DNA, 557 bp, Homo sapiens
tactttcctcaacacaatcctgaagtttctcctgagaggaataaaagctgtttttctggcgataaaaacccaccaaaaagtttataaagaaaacaaactcccctcaggcagtaatcrgtggtcagacggtatctgacaagcacagcagaattttagctattgctctagggctgttcttagttctggtcaattcctttgctaactgggatatgaaaggaacccaagtgaaaatagtccagaggggggaaaaataagaaagataatgtaaaacaaactcattatatctggaatattaagatttttttcttagaagattttctcctttttgccctagagcacttgaaagttctgaagatacattttatgtaaaatctaaataatattttacataacacttactttaagtttaaaggcttgctacaatgaaactggtactaagtggacttaaggcagcaaaataaactgaagaggcctcataaaaatatataggcagtagttaactgatgcaaggaaataagcttcatggcatgagacctcggatttgcgttaacacctaa

SEQ ID NO: 294913 - DNA, 557 bp, Homo sapiens
tactttcctcaacacaatcctgaagtttctcctgagaggaataaaagctgtttttctggcgataaaaacccaccaaaaagtttataaagaaaacaaactcccctcaggcagtaatcagtggtcagacggtatctgacaagcacagcagaattttagctattgctctagggctgttcttagttctggtcaattcctttgctaactgggatatgaaaggaacccaagtgaaaatagtccagaggggggaaaaataagaaagataatgtaaaacaaactcattatatctggaatattaagatttttttcttagaagattttctcctttttgccctagagcacttgaaagttctgaagatacattttatgtaaaatctaaataatattttacataacacttactttaagtttaaaggcttgctacaatgaaactggtactaagtggasttaaggcagcaaaataaactgaagaggcctcataaaaatatataggcagtagttaactgatgcaaggaaataagcttcatggcatgagacctcggatttgcgttaacacctaa

SEQ ID NO: 294914 - DNA, 562 bp, Homo sapiens
ctcataatcaaatgaccctaaatccctcactaacctaccccctcctcactaaacttaataataaatgctggcatatccagtgcatcgttggcaccgtgggaccagaaggcagtgaccccccctggacccagctttcactatcttgtgtgtgtctattatttctcaacctgctgatctgcctgggaacaaagagagagccccattgcattgcgggctgctggccagatcccgcaatagctaaagaggaacacaagtatttgcctaaagttttttctctatgtgcagagtatctgcattttttgagatgcatggaagttataataattaagagcagtgatttcaaaacccagatttctataaaaagtctgtggcaatttaggctttctctaaccctctcttcaaaacccttccaggttccatccactgcctacactcctacatttctagatatcacttctaggtaccaaaatctgtattaggtacctattgctgcctaasactgtcatcataaaattagcatctgaaaagaagaaacacttactatctcacagtttctgtgggg

SEQ ID NO: 294915 - DNA, 562 bp, Homo sapiens
ctcataatcaaatgaccctaaatccctcactaacctaccccctcctcactaaacttaataataaatgctggcatatccagtgcatcgttggcaccgtgggaccagaaggcagtgaccccccctggacccagctttcactatcttgtgtgtgtctattatttctcaacctgctgatctgcctgggaacaaagagagagccccattgcattgcgggctgctggccagatcccgcaatagctaaagaggaacacaagtatttgcctaaagttttttctctatgtgcagagtatctgcattttttgagatgcatggaagttataataattaagagcagtgatttcaaaacccagatttctataaaaagtctgtggcaatttaggctttctctaaccctctcttcaaaacccttccaggttccatccactgcctacactcctacatttctagatatcacttctaggtaccaaaatctgtattaggtacctattgctgcctaagactgtcatcataaaattagcatctgaaaagaasaaacacttactatctcacagtttctgtgggg

SEQ ID NO: 294916 - DNA, 563 bp, Homo sapiens
ctgtcttcagtttcctgggcccatagctgttacctggtttgccagggttcggcactgacaatccactaattggaattttttcttggatccataggtttttggtgataaaccaggagctgagagaatcaaaaagaatggtaaagcccaggcccaggacatcaagcaatgtacatatttggaatgacctcatgctgtgggccctgattgtaaataaaaatgcttttgcggaaacagcaaaatttggggaascctgtcttccacctccttgactgaaaagtctggtcagaggtgccacctggctacttcctcctcatccttctaggaccttcctctggacccctcagttctgagccctccatgaaaccctcagccatcaaggggactcgaatcgggtccagatttctgcctgggttgacatctggggtgaaccaacacctggactcacacatcagccacactggatcaagcccaaagacaacgcagacacacacactatttgtgccgtcctctatcatctttttaccatccactcatttcttcccagtcccctttgtccacttctg

SEQ ID NO: 294917 - DNA, 563 bp, Homo sapiens
ctgtcttcagtttcctgggcccatagctgttacctggtttgccagggttcggcactgacaatccactaattggaattttttcttggatccataggtttttggtgataaaccaggagctgagagaatcaaaaagaatggtaaagcccaggcccaggacatcaagcaatgtacatatttggaatgacctcatgctgtgggccctgattgtaaataaaaatgcttttgcggaaacagcaaaatttggggaagcctgtcttccacctccttgactgaaaagtctggtcrgaggtgccacctggctacttcctcctcatccttctaggaccttcctctggacccctcagttctgagccctccatgaaaccctcagccatcaaggggactcgaatcgggtccagatttctgcctgggttgacatctggggtgaaccaacacctggactcacacatcagccacactggatcaagcccaaagacaacgcagacacacacactatttgtgccgtcctctatcatctttttaccatccactcatttcttcccagtcccctttgtccacttctg

SEQ ID NO: 294918 - DNA, 595 bp, Homo sapiens
caattaacctcttatcagatatgtggtttaaaaatattaatattttctcccatcccgtaggttgccttttccctctgatgagttttttcctttgctgtgcatttccttcrctgggtgtatttaaatttgatgtaatccttcttctctatttttgcttttgttttctgtgctttctgatgtcatatccaagaaatgattgctaagatcaatgtcatgaagctttctccccaagttttcttctaagagttttacagtgtcaagtcttatgtttaagtccttaacccattttgagttggttttctatatggtgtaaaatgggctccaattttatcttttttgcatatgcctacttggttttcccaaaaccactgaagacattgtcctttccccattatgtattcttggcactcttatcaaattagaaataaactaatagaaggaaattgcttcaacttaataaagcccatatatgaaaagctcacatctaacagcatcacactcaatggtgaaaaactgaaagctttttctctaagattaggaccaagacaatggtgaccactctggccacttctacccaagataatactggaagtcc

SEQ ID NO: 294919 - DNA, 570 bp, Homo sapiens
atatacagtcaatggatctttgacaagggtatcaagaatacacaatggaaatggaacttttagtgaccgcgtattacatgagaaattagaatctaaacaaacctcagccatagggtgagttagtgcttacctgccagtcccttcctgtgggcacttactaatgcatgagtgtagtacaccaaaggctgagactaagataagacagctgagagaggacccctgaggcatagccttcccataaccagatgatgactgagggaaragtaatagaacactaggataagtcctaccatggcactccttcatggaaagttctgcagctacactccaagaaatgggacagggcagcagaaaagagagagattactgaagcatggaaagcaacagtggcactgcgaaaaaaagagaacttgacagctacccagaacctggcagctgagctatgaagcagatacagatttctcatggttgagaaagctggtggctaggatataaagtataaagcaatctccagtctcatcaatgttctctcatcaagagaaagttatgttcccaccttcaatatgtttg

SEQ ID NO: 294920 - DNA, 570 bp, Homo sapiens
atatacagtcaatggatctttgacaagggtatcaagaatacacaatggaaatggaacttttagtgaccgcgtattacatgagaaattagaatctaaacaaacctcagccatagggtgagttagtgcttacctgccagtcccttcctgtgggcacttactaatgcatgagtgtagtacaccaaaggctgagactaagataagacagctgagagaggacccctgaggcatagccttcccataaccagatgatgactgagggaagagtaatagaacactaggataagtcctaccatggmactccttcatggaaagttctgcagctacactccaagaaatgggacagggcagcagaaaagagagagattactgaagcatggaaagcaacagtggcactgcgaaaaaaagagaacttgacagctacccagaacctggcagctgagctatgaagcagatacagatttctcatggttgagaaagctggtggctaggatataaagtataaagcaatctccagtctcatcaatgttctctcatcaagagaaagttatgttcccaccttcaatatgtttg

SEQ ID NO: 294921 - DNA, 453 bp, Homo sapiens
gaactaatttacacaaagtgatgaaattactgcatggtacacatgacttttgtgtccttggtagggataaaatctttccatttggggaaagtttggattctggttgtctcctgggagggaagtgatggaggtggatatgtggagggccttttctctgattcctctactaaccaggtgtcacctatccaatttggaaaatagaatgtttacagttaaagaattatttgacttagtttgcyccagtttcaagtgtgggaacatgcagggacaggcaattttcccagaatctgctgcctgaataaggagatactcagtttgcagacctgcagaaataagaaatcaagtcctaagtaggaaggagatgtttccttgcaacaaatacttatgaagcatctttcatgtggcagtcttggagcacaaaaacagaccataatatctgccctccctgagtaa

SEQ ID NO: 294922 - DNA, 557 bp, Homo sapiens
tgttgggaagatgaccagtgtggtgagggccagcccaggcaccccaggggtaggaaggccacagagcctttgttgggacagagtgaggggaaggcagtggatcacattctcagaaggacagagcggcaggtgaaaagtggagattctctgtgactgtgagagacataggcatgatgtcacacacttgacacatatcattatctaaaatgtgaaagtaaagagatcatgggcaatctcaataatatctgtartaaaaccaatatctaggctgggcatggtggctcatgcctataatcctagcactttgggaggctgaggcaggaggatcgcttgaggccaggaatttgaggccagcctgggcaacatagtgagaccctgtctctacaaaataaataagtaaataatgtgtaatgtctatcatatatatatatatatttgttttttaaaaaatcaatatttactattactttggtgcaggaattggcaaactatggcctgaaggccaaaatctggctctcctctagcttttgtacagcccatgtgcaaagaatggtttt

SEQ ID NO: 294923 - DNA, 584 bp, Homo sapiens
tctccccacagccccctaataggccccagtgtgtgttgtttccctccatgtgtccatgtgttctcatctttcagctcccacttacaagcaagaacatgtggtgtttggttttctgttcctgcattagtttgctgaagataatggcttccaactccatccatgtccctgcaaagaacatgaccacgttcgtttttatagctgcatagtattctgtgttgtatatctatcacattttctcttatccagtctatcactgatgggcatttaggttgattccatgtctttgctattgtgaatggaatatcaaaaaacaactgctagacctagtaagtgaatttagtgaggtcacagagtacagggtaaatttacaaaaatctatagtgtttctatatactcacratgattaattgaaaataaaatttaccaacaataccatctgcagtacaataaaacaagcaaatacagaattaatcgaatgagagatgtataaaatctctacccttaacactataaaacactgctgagagaaattaaggaagacctgaataaaagaaaaaatacaccatattcatggattagaacaa

SEQ ID NO: 294924 - DNA, 619 bp, Homo sapiens
tgaaatcccacaacaagctctctctaagctgaggcgcaaggaagccagtccaagtcccaaaacctcaaaagtaggaaagccaacagtgcagccttcagtctgtggccaaaggcctgaaagcccctgggaaatcattggtataaatccaagagtccaaaagctgaagaacttggaatctgatgttctagggcagaaagcatccagcacaggagaaagatgaaggctggaagactcagcaagctagttcattctactctttcttctgcctgctttattctggccctgaaggcagctgattagatggtgtccacccagactgagggtgagtctgtctctcccagtccactgactcaaatgttaatctcctttggcaacaccctcacagacayacccaggaacaatactttgcatccatcaatgcaaccaagttgacactcaatgctaaccatcacatgaacatagtactcaataggtagttttttaatccttgcccccatccctcccctcttttggaatccctagtgtctattgttcccatctttatgtccatatacatacaaaactttagcaacgcaagtaacaattgtaacctgctggatatgaatacagtgctctaact

SEQ ID NO: 294925 - DNA, 595 bp, Homo sapiens
taacattaaatatcctcctgactggtgaaactgaaacatcttacactaccatatggtggccaagatagggattgtaagttggtaccaccactttgaaaaacaactgggcattattcagcaaatttgaaaatacatatatcctaagactcaatgttccattcctaggaatattctgtagcaaaacaggtgcacatgtataccaggatatatgcatgtgcagagtatacaagaatacacactgtgtgatttctttatatcaaattgaaaaccaggcaaaacaaaatgatatgatttaggttgtatacagtggtcagaaatagaaatgaaaagcaagaaaatgatgatcacaaaattcaggatagcggttaactatttggggtaaagaggtttgtgatggggaaggggcacaagggggcttctgaggtgctggcaatattctttcttgactagagtaggagttacatgggtatttgctttatarttattctctaaatcatccatgtagactttatgaaccatgttgtatgtcatatttcatagatgaaaaagcagtagagtatgcaatgttttaaatttaaggaagactcttgccaca

SEQ ID NO: 294926 - DNA, 560 bp, Homo sapiens
ctcttcttggccctcttcactggtcatggctcaaacacaccagtggctacagacatcccttaaaaagttactgctcttccctgaatggtggctcaatccctccaagctcatcttccctccatctgctgagctgtcatcacacatcacttctccagaatccctgatctgcttgctttgtaagtcatcttttctggtttgatttatatcttagactgttatcttcgctctgtcccagaaccccacagaaggctgcatctggtgaccatcccccaactccatgmcccattgccacaggcaagttggactcaaacctgggtcatggcaggtttagttagcagcctcctccaggccttcaccacttggggagtgagaaagggcaaacctcagtggatctgtcaacttgcagggccatctttcacactagcccattccacagccagcacagctcaaaggtcttctcacacaccccaagagaccctcaagagtagagctggtgggctctctgaattttccttgtgaaataatctacacaaatgcacagtgatttaatgctggcatga

SEQ ID NO: 294927 - DNA, 567 bp, Homo sapiens
cctcctgcctcccccagtctctggtaaccaccattccatcctctgctccartgagatcagttttctgaggttctccgtaaacgtgagatgatgatgtgcttgtctttctgtgactggctcactttacttaacaaagtgtccttcaggctcatccgtgttgctgcaaatgacaggatttctttcttttttatgaccaaatagtattccacatttttaccattattcatccattgattgacacctcggttctttccatatcttggctattgtgaatgattctgcagtgaacaggggagtgcagctatctcttccatgtactgatttcatttctgttgggtatatgcccactagtaggatgactggatcatatgatagttcttttttacttttataagaaagctgcatactgttttccatggtggctgtactaagttccaccctcactaacggtgaactcttacacacagtttttctaaatgtttgctgacatttggtatggtcagtcttttaagggttgctatgaaagtcttttttttccccatcatttttatttgaataccttctttg

SEQ ID NO: 294928 - DNA, 465 bp, Homo sapiens
tacacctatattgatgaagaaggttctttttacttcatccttattaaatattttcatcatttgactgtgaaaatsttcattttaaaggtttcaaaaatatatatataggaattgtggaatcattacatattgttaaatttttatgattagttattattaaataggagacagggaccatctttttatgagaagttttgacttgaagaaaaatcagtactgattcatttccaggacttcagtttgcacttctgattttatttgtgtcattttgtggtttgcgatgaagtaggctggccttgaaaatctcaaagcaaaataaaatctgaccagttcttgttatgcttattcagtgatatagtttggctgagtctgcacccaaaatctcatcttgatttttagtccctatgatccccataatcttcttgtgtcaaaggagaggccaagtagagtgatcgaatcatgggg

SEQ ID NO: 294929 - DNA, 510 bp, Homo sapiens
atatagtgcatgaaacttcagagaataattattttcaggcattgacaaatattagracagttttcctttcttttcatctgtatttctgtagctgtagatgactttgctttttctacttccatttgagggaatgtgttccaaaggctaagtgaaggcagaagaaactaatttcatttgtttatccaagtcatttaaataaatgtcttcttcttatttctctttctggaaaatcaggaaatgataaaaagtcatttcataaatttctatttagcttgtcatcctcactaatattataataataatattttattattataaaatatggaatacacattatattatactataatataataatttaatatgtaagtaatcctgacaactatttttataatcttaaaagaatgactaccctatgttttggtattcttttcatttatcctgtgtttaaaagtagagggcaggcttcgtaaggcattcttccatcacctggagtacccctcagagagt

SEQ ID NO: 294930 - DNA, 510 bp, Homo sapiens
atatagtgcatgaaacttcagagaataattattttcaggcattgacaaatattagaacagttttcctttcttttcatctgtatttctgtagctgtagatgactttgctttttctacttccatttgagggaatgtgttccaaaggctaagtgaaggcagmagaaactaatttcatttgtttatccaagtcatttaaataaatgtcttcttcttatttctctttctggaaaatcaggaaatgataaaaagtcatttcataaatttctatttagcttgtcatcctcactaatattataataataatattttattattataaaatatggaatacacattatattatactataatataataatttaatatgtaagtaatcctgacaactatttttataatcttaaaagaatgactaccctatgttttggtattcttttcatttatcctgtgtttaaaagtagagggcaggcttcgtaaggcattcttccatcacctggagtacccctcagagagt

SEQ ID NO: 294931 - DNA, 510 bp, Homo sapiens
atatagtgcatgaaacttcagagaataattattttcaggcattgacaaatattagaacagttttcctttcttttcatctgtatttctgtagctgtagatgactttgctttttctacttccatttgagggaatgtgttccaaaggctaagtgaaggcagaagaaactaatttcatttgtttatccaagtcatttaaataaatgtcttcttcttatttctctttctggaaaatcaggaaatgataaaaagtcatttcataaatttctatttagcttgtcatcctcactaatattataataataatattttattmttataaaatatggaatacacattatattatactataatataataatttaatatgtaagtaatcctgacaactatttttataatcttaaaagaatgactaccctatgttttggtattcttttcatttatcctgtgtttaaaagtagagggcaggcttcgtaaggcattcttccatcacctggagtacccctcagagagt

SEQ ID NO: 294932 - DNA, 593 bp, Homo sapiens
ttgcaccttttgaatttaaattccttcttaagcgtttccctacaaagtcaatcactgcaggagagaagtacttcagagattttagaactgaaaatttattttaaagcaaaatatgccactagcagcattatacaaaaactcragagagaacatgacatcatttgaatttctttaaatatgtacagtacaatatattttaaagcacatttgaagctcatttcacctaatttaactagatatattacctacatttactattaaaaaaatcaagaagatattttaaaaggatgaacaaaaccaataatgtatctataaaataatggaaattaataattaatcagcagtctcactggaagagtgatcctttgtaatttagaggtccatttattaatttattgaatgagttcacttgtattgtttcaaacaccttttctcaaacttctagcagtagtgagatactcttagagttggtagctaggcagacattagcagggcaggacagggccctcccctgaggaatgtcaggcgaccatcaggtgatgatcaggcagttgttaaactgtctctctaaaataataattggtcacagctgg

SEQ ID NO: 294933 - DNA, 622 bp, Homo sapiens
aaaaccttggaccctaaacaatctaaaataaattaatatatcatgctttcggtagaagggaaaataataaagtgatacacttctgctcatgtccctggagctgcttgattataacaacctcttttctttttcacttgacaaatgacttgggaattatctgtatattgtctgatacagagctaaacttttttcaggacattttctaatgagtcatggtggaggctaatagtaacctcttctactacttcctcctccctccagaaaaaacacacacacacacacacacacacacacacacctagtgtttgcagcaaatcttgacagttttgaatagataagaagaagctacctgcttcataaaaatttagttatcacataccgcccaacctgactacaattggagaagcgtgtgtatagggtttcaatgtaacttataaamatatattttaaaagtatacagtgctgttatgtctggtagtttctatgatcagtaacacttatctataaaatcaaggttttgttggtaaatttcataatattcaaatctaattcatgctttatttgaagttacaaatgtaatgtttttctcttccaatatcattccatatttatatgtgcaatg

SEQ ID NO: 294934 - DNA, 627 bp, Homo sapiens
atcaaaaagaataaacagcaatgcaaaaatcccagcaaaaatgtgttaaatacaaaaaaaaattctttgtagtaaagtttctgtgtgatgtgagatgaatttggagaatctccttttatttttgaagagtttgaaaaaaatcataaaatataatcaaagttactttaagtcaagctttgtcatattttcattttaaattttgggggtatgtttccaatcaatatagcatataattttaayatgcacattgtatgaaaagcattgaaaatcttatacttcaaaatagatcataagtcttaaaatgcttgattacaaggcaatatggttttctcaacagaacaaaaaaaagattatttgcttctcttttgctcttttgtgttataagtgcagcgtgatgtattagtttaattaaagtctaccaaattatcataaggattttatgtgctacaaataattggctttttgttctctgctcactttttgttaatggaagcagaattttttttaatgatacttagtatataagacaacagaacactacagggaagaaaggcaaatgaggtgtctaatgaagtgacctttggcatcttggactggaaataaaatgaagactgcactaatgcaatg

SEQ ID NO: 294935 - DNA, 553 bp, Homo sapiens
tcatatgacatagttgtaagagaggaaagaattatgactagtgccagatataactacatcttatttcctttaagttgtcccagagaacacccatcaggctgtccattcagtggcatcattgtcaggccactccttagagagtaaagacattatcttctgttgagttcctgtacatcccaagacgggtgcatcatkatcaaatttaaccctcacaacacccctgaatggccaatatcacataggatgtcaattaatgatattgctattcccagtgttcagatggtactgctatggtttgaatgtgtcgccccaaaattcgtatatcaaaaacttaattgccattgtaatagtattaggtagtagggccttttagaagtgattaggtgataaggatattcatctcacaaagagattaatgctgtgtttcaagtggattagttatctcaggagtgagaccctgataaaaagaatgaggctggccccatttgttctctgtctaatgtgctcactcacgatgtgttgccttccaacatgagaggactctctctaaatg

SEQ ID NO: 294936 - DNA, 627 bp, Homo sapiens
atcaaaaagaataaacagcaatgcaaaaatcccagcaaaaatgtgttaaatacaaaaaaaaattctttgtagtaaagtttctgtgtgatgtgagatgaatttggagaatctccttttatttttgaagagtttgaaaaaaatcataaaatataatcaaagttactttaagtcaagctttgtcatattttcattttaaattttgggggtatgtttccaatcaatatagcatataattttaatatgcacattgtatgaaaagcattgaaaatcttatacttcaaaatagatcataagtcttaaaatgcttgattacaaggcaatatggttttctcaacagaacaaaaaaaagattatttgcttctcttttgctcttttgtrttataagtgcagcgtgatgtattagtttaattaaagtctaccaaattatcataaggattttatgtgctacaaataattggctttttgttctctgctcactttttgttaatggaagcagaattttttttaatgatacttagtatataagacaacagaacactacagggaagaaaggcaaatgaggtgtctaatgaagtgacctttggcatcttggactggaaataaaatgaagactgcactaatgcaatg

SEQ ID NO: 294937 - DNA, 1061 bp, Homo sapiens
tcaaacctctgaagggtggctctcattattcccattctacagatgggaaaatttaaggtacaaagaagttaaatactttgcagtgtgtttgctaagtaatggagcaccaggtctctctctgccttcaaaatcatgacctctctctctccagggagggtctaaaaaggagagtttcctaaggggataaaagaattcagtgaactctctgattgtcaaaaaagacaccactgaattrgaaaaagtcactttgtactgctctgaggaagtagagcagagaggacattggcaagtgtaaatgaataattaagtcttttttttttggtttctttgttttagcatcagccatattttcaaattggaaagctttaggatttcttaattatggattgtctattcattttacttttcaacttgtgcatcatgtcttacatatttcggcagcctatatgaacaaggacatacctttctgaggttctgcttatctgcccaggatcttctcttcccacatgattaccctcttgccaatcttgccccaagawtattttgatagaaaattaccaaaaaggattttcttaaatgttacatctgatttatttgtattatagttactgtcatttttatcacagtctcttcaaattgcaatattttagaattaatcactgtattttttcaagttgcaaacagattcataaaatgtaccatccatcaaaaaattttaaaagwtgggcttacagttgtgaaagatatgtataatatcaaaattattactcatctcaaatatttgttgaaagagtttgacccgttggtataaacctatatctgatacttttttttttcttaatgtcacatcaagttcttaaatcactagtgggctgtaaataacagccattacaaattctcatagtaataacctgtggccactgaagtcttagtatcttttctctgaatagctaaactcagcgtggttgcacatttaatgattcaatagcagggtatggatttgtgaaaaggaaatataaaatgtatttcctgaatatggagtctttgttcagtatgttgtc

SEQ ID NO: 294938 - DNA, 1154 bp, Homo sapiens
ctcccacctcagcctcccaggtagctggaacttcttgaacatgccaccatgcccagctaatttttaatttcttgtagaaatgaggtcttgtcatgttgcccaggctggtctccaacttctggcctcaagcaatccttctgtctcggccttccaaaatgctgagattatagtcatgagccactgcccctggctgcatcctgtctgttaaaagcctgatttctacacatagaactggaggctaaacatacctggacatatgcatagcaaatattttgaacaacaataaaatgtaactgcatatttaccttagaaacaatagttctcaacaggcaattctttttagttgatatttgacaatgtctggaaatacttttgatcctcacaacttgggtggcactattggaacctaataagtagacaccaaggatgctgttaaacactttatcctgcacaggacagctacccacaagtaataattgtcttagtccattttgtgttactataacataataccacagacsgggcagtttatttaaaaaaaaaaaaaaactcacagttctggagtctggawcactggaaattataaggagacaaagataagtcagggttagataaccctgaccttgcccagcatagtacttgtttatatccttatattctagggtatatgtgttattttacattttcacatatacaggggggtaactccaaacccacatttacagggcaaacattcaagctaccacctatttccatctatttgtgcttaatgcttaaggctgaaaatgtttcaaagagatcacaaaatcacatcacgtcagaaaaacaagtttcttagaatgtctggagggtaatgctttagatagattaaactaaaacatcatatcaaagaagttgctggactgcaaaacataatgttctttttaactgaaaagatagagcacagaactacagaacaagaatggcagagatatttaattttttaatgtctaaacaatttagttccttgaactcattatatcaagatgaaatttgagaaatcwtttcccctataaaaacctccggaaaaatatattactaggaagcaaattgtgaagtcttaaggtaaaataagtgactttttttcattgtctttctttgtgactgtcttaatc

SEQ ID NO: 294939 - DNA, 503 bp, Homo sapiens
  misc_feature (1)...(503): n = A,T,C or G
ttcaaacacaataatgttatatatatatatataaaatatacataataaatatatatttttaaaataattgattatatatataaaatcaattatttttataaatgtactctgtttagtgtcttatattaaagtttcatttataaaaacattaataatagaaagaaagttaatttgtaaaataaangtttccatctggcaaaactgttgccttcaacttacaaaacattgacttttcagagaattcatgaaactttgtcggtacgtaaaggaaaaatttatcaaacctttgcgtttattaactcaaaaacaaatgaaacagacmatgcccatcctccctcaaacactctacatactcccctctattctcgtttttttttctctattttctattttgtttttaatttccttccttatttgtaacataaccaacctcttaggtgtcacagtatgccattttttttttttaatgacacaacactctcctagataaagtggtaggcaat

SEQ ID NO: 294940 - DNA, 497 bp, Homo sapiens
atttctgcacaggtctaatccagtgctttggtgcatatttgctcctgaaatctttgttacactacttatcatacaatcrttgattcaatgtaaaaaaaaaattaaaaagacacaagatgcagttcttacactcttaaccactctagacttcgtgtatctgtcatgtggtactctcttttcaaaaatactgacaaccaaaagctggtttctcaatgttccatgttttatatgtgtctcaaggaggagcctcaactgtcctactgtgctggccagtacggtttaaagtgagtcggtgataatgaactctaaggcactcggcttggctgttgaaataaaacaatgagttactctgacagtcattccaggtcacaagaatgtaaatgggtgtattcgtggtgggattttcatctcttgtgttggaaatctgcagatattataatcctattttggaatgatctgaaccagctagagtgagattttttttttcattatgataa

SEQ ID NO: 294941 - DNA, 533 bp, Homo sapiens
aattattacgaattttccctcatactgcctagcatatggcacacagcaaaccccagaagatgtgcattaaatttgtttaaggtgtaacaaccgacaaattcagctacctctcccatccttctggtttattattatatatggctctcctattctcactttattgcatacacatgtatttacatttatagcaattttattgatgaatatatatgtgtgtgtgtgtatatatatatacatatatatatatataacaccaatgtttataaagttcaaatttcttcaagataaattaggacagtggaaaaatattgctttgtgtcattttatcagatctctccagaaaattytgctgtataaatctaatacataataaataacataccttgaacaagggaacatcctcagacatatgactatgcaaagggaaaaagctgatttttgcttgtttacacaaatgtcttggaagagactcaggttttttttttttttactttcatctctattagttgaaaactgaaatgaacatttttacc

SEQ ID NO: 294942 - DNA, 365 bp, Homo sapiens
ccagccactgctgactttgaagatggaaggggactgtaagccaaggaatacagccartgtctagaagctgaaagaggcaagaaaacatatcctcccctagagcctccaggaatcctgctgatatctggattttagcccactgagacccatttcctgcttctggcctccaaaattgtaagataaatttgagatgttttaagacactcaatttgttagaacagcaataggatgctactataatgtctacagacatagcatgtgtacccacatgcatgcacacacacaaaaacacattccaaataagccctccagcattgaatattcccatccttaatgtccagtaaatactgtcacaaagcaggctc

SEQ ID NO: 294943 - DNA, 606 bp, Homo sapiens
gcttgtgaaatctgttgaatacccatgttcaagactttatctgagaatttgtgcctaagactttacaaatgttatctaatacagtttaaaactgatattaccctatgtatagttgttatactcattttattgatggaagttttgtcccatagctagtaaaggccaagactatgaattgaacccaattctttgagttaatcaagtccatatcccaggctccttttctggagtgggtctcaagacggtggcacaaaacagaaatatatttcatctgaaccaattctagttatgatgcttcttaattgtccaggcataaatagaygaagcgtatgagggacaaattctgtccagttggagaggatgtggaagcatcataacccccacagaaaacaagatggagatgctgcagagatagcagtgcctgggagggtaaagaaatgcctaagaatgaattaaaatacacctgtgggaaaccgttaactagtgggatgtcggcacacccatactttcagaaaattatttttgatgaaatgcttttactctattaaaagtgactagagttatatcaaatagagagaagtccaacatttagtgaagagaaagatg

SEQ ID NO: 294944 - DNA, 612 bp, Homo sapiens
agcatcatatttgaatttgcagggactttattgtaatctcagcagtatctggctgtcagcaaggaggtggcataatggactataatcattttgcacagagtaaggacaggtctagcagaaaatgtttaattctaggtgatggctcttgcagagtcagtaaagggcacgtactaataaggaactgcaaaaagtaccggtgacgacatgcttgccttgaagagcaagctcagcagatttkccacagctaatagaaccattaccgctacatgtcaagctatgagaaataccaaaggacataggcatcggagtgaaagagataagaagaaagcaacaacaacaaaaggagataaatcagaagacccaaatcatgcctccatatttttaccagctgaaagttgttaagccaaccatgttatcaaccctgcgaagcaaaagggtgccaaaaagcttgcacaggacaatctccatgttttaatgtgttataaatatcacatacagtaaccaaactgttcactagatgaatatccgtgcaaagctcatttctggtgatgcctgtattgtcaactgcctctgcatctgggctctaaggcttttatctttgttatttaatgc

SEQ ID NO: 294945 - DNA, 576 bp, Homo sapiens
tgtttcaaatcatggaagcatgttatytataaggaatgtataaaatatctttactatgcaatctttcttgatattttaaaaatgtcaataaatatcacttgtatcacttcaatatcaaactaagatctgaagttgaaaaaagttactaactttaacaatttttttcaacacagttcttagtacttttacatttgctcataatttttaacaaatagaatttcttaaaactatctactcacctttcatttcagtcgatatattcataaatattaatttgctttatttctgtattacacaggttatgtctaaattaattatacagatattcattaacagaattttttggtcatgtttccatggtaaatggaaattcaaaattaaaatactgtctcctagtccaggaagaaaaaaaaaacagcaaatgaaacatatgactcaacttgattcaactatgagattatttgatgttcttggtaagagttttagagaaactttttttagtagtggtgttctgcctttttaatcaaagtcaatactttatcttagagatggaattctgtctaacaattcttattc

SEQ ID NO: 294946 - DNA, 586 bp, Homo sapiens
cccaaatgtccatcaacagatgaatgaatttaaaaaaaaaaaaaaaaaagtgctacaggccaggcacagtggctcatgcctgtaatcccagcactttgggaggccaaggcgggtggatcacttgagcccaggaaatcaagactagccaggtcaacatggcaaaaccctgtctctactaaaaaatacaaaacttagtcaggcacggtgggcatgtgcccatagtcccagctacttcagaggctgaagtgggaggatggcttaatcctggaaggtcaaggttgcagtgagccataattgtgccacagcactccagcctgggtgaaagcgcacacacacacacacacacacacayacacacacacactgcaatactattcatccttaaaaacgaagaaaatgctgacacatgccacaacacagatgaatgttgaagagattaggctaagtgaaataagccagtcacaaaaggacaaatatttaatgattccacttatatcagaaacctagactactcaaaatcacggaaacagaaagtagaatagaggttacaacccaaagttgatgagaggggaaaatgaggagagtt

SEQ ID NO: 294947 - DNA, 621 bp, Homo sapiens
tttttgatttaaaaaaacacacaaacaaagaaaaaagcagataacttaaggaaggggaamtcttataaagtagaaactttacctgtgatgtagtggtgttgcaaagaccactaatggtgtctcctactatctgatctggaaacaaagacattgtcctgttgtattttatttacagaaaaatagggttacatggaatcacgttacttgtataagaaaggcagtcatcacctttcttttattgaatacataatttttcaggatttggggatgatttttctaaagcagaatcctttttcttttggaatatttcagataatttcaatagaatctcagctggagctcaagacttggttattttctttttcttttatttcttttttcttctttctttttattttttattttttaaatgaatccagcattcctttggagaacagaaggtggcactcttccttttatcttgtgaaattttccacttgaatgtttaattcttcctgttaagattcggagcagcaccctgttggcaagttgattgtttctttgtggttaatgactactttttcacttatcaaaagacagggacacattccatgaagtgtaatattgaatgtgaggcaccaa

SEQ ID NO: 294948 - DNA, 621 bp, Homo sapiens
tttttgatttaaaaaaacacacaaacaaagaaaaaagcagataacttaaggaaggggaactcttataaagtagaaactttacctgtgatgtagtggtgttgcaaagaccactaatggtgtctcctactatctgatctggaaacaaagacattgtcctgttgtattttatttacagaaaaatagggttacatggaatcaygttacttgtataagaaaggcagtcatcacctttcttttattgaatacataatttttcaggatttggggatgatttttctaaagcagaatcctttttcttttggaatatttcagataatttcaatagaatctcagctggagctcaagacttggttattttctttttcttttatttcttttttcttctttctttttattttttattttttaaatgaatccagcattcctttggagaacagaaggtggcactcttccttttatcttgtgaaattttccacttgaatgtttaattcttcctgttaagattcggagcagcaccctgttggcaagttgattgtttctttgtggttaatgactactttttcacttatcaaaagacagggacacattccatgaagtgtaatattgaatgtgaggcaccaa

SEQ ID NO: 294949 - DNA, 621 bp, Homo sapiens
tttttgatttaaaaaaacacacaaacaaagaaaaaagcagataacttaaggaaggggaactcttataaagtagaaactttacctgtgatgtagtggtgttgcaaagaccactaatggtgtctcctactatctgatctggaaacaaagacattgtcctgttgtattttatttacagaaaaatagggttacatggaatcacgttacttgtataagaaaggcagtcatcacctttcttttattgaatacataatttttcaggatttggggatgatttttctaaagcagaatcctttttcttttggaatatttcagataatttcaatagaatctcagctggagctcaagacttggttattttctttttcttttatttcttttttcttctttctttttattttttattttttaaatgaatccagcattcctttggagaacagaaggtggcactcttccttttatcttgtgaaattttccacttgaatgtttaattcttcctgttaagattcrgagcagcaccctgttggcaagttgattgtttctttgtggttaatgactactttttcacttatcaaaagacagggacacattccatgaagtgtaatattgaatgtgaggcaccaa

SEQ ID NO: 294950 - DNA, 582 bp, Homo sapiens
ggggcattatgagtaactcataacctaggaactaaacaggagtaaattgaggacaaaatgactgaaatacatgaaaacmaatggccgtagtccatggatatatttttaaggactaaaagaaaataacgcttctaatcccatctctcagtattcttacaactaatactcagttattgagcatgtcttgcaacatttagatgtgtaaggaaggagatacaagtggctcctgtcacactctggccaatgtttagtgtgttttcaatggcagtctttagggacactggtcagctccctctggcatctcttttacattaatgaaaaatagtagatgccatgttagattagaaacccctctaattaagaaatacagaagaaaagaaggagcatccatgactcttgagcaatgaatgcctcagattttatctataactgggtagtctgaactatattacttaagtttacttagcaagtaaaggatgaaatttgtttaatccatatttttgcttaaagagagggcaatgaggacagtaaaatccaaccccttcaactttaccaagccacagaaaaacaccaaaccagact

SEQ ID NO: 294951 - DNA, 582 bp, Homo sapiens
ggggcattatgagtaactcataacctaggaactaaacaggagtaaattgaggacaaaatgactgaaatacatgaaaacaaatggccgtagtccatggatatatttttaaggactaaaagaaaataacgcttctaatcccatctctcagtattcttacaactaatactcagttattgagcatgtcttgcaacatttagatgtgtaaggaaggagatacaagtggctcctgtcacactctggccaatgtttagtgtgttttcaatggcagtctttagggacactggtcagctccctctggcatctctttyacattaatgaaaaatagtagatgccatgttagattagaaacccctctaattaagaaatacagaagaaaagaaggagcatccatgactcttgagcaatgaatgcctcagattttatctataactgggtagtctgaactatattacttaagtttacttagcaagtaaaggatgaaatttgtttaatccatatttttgcttaaagagagggcaatgaggacagtaaaatccaaccccttcaactttaccaagccacagaaaaacaccaaaccagact

SEQ ID NO: 294952 - DNA, 615 bp, Homo sapiens
ctgatcacctttcactccacttcaccactactactcgcctgtgcgttaattctattatttataaactcatagattgttatgactgaaagaggccttataagtcacataatctaacccttttattttacaagtaaaatatctgagacttatggaggtgaacagcagcctctgcctgttcttgccaagtcagggtgaaatgaataaataactcccaaaaaattctcatgttccagagggatattgcctcaatcaggagaaaggaacagcagatttgaagccctgggctacaataacctagtcttgttatgaatacaggaagacctaatccaagcctgattccaagaattcaagctggtaggaagaagtttggagccagggtccagaagcaatgataattgtaactgacattattgagcactaaacatatgccagacaggcacagttctaagcacttgatattggatagctcatgtaacaatcgcagcaatcctgtgaaatgggtatggttgctagtacaattgrggaaactgaggcacaaaggttgaatatttgaatccccctttatagaccttaagggaccatagaacactagatttttaaattctgacttagtct

SEQ ID NO: 294953 - DNA, 556 bp, Homo sapiens
tttttcaatgaaatacatgtttgaatatttcattgattttctacatagatttttttttttaccttccatcatgctggaacacttgtatctctttaggatataaataatttattcctatggcttcaaaggtcttaataatgaattcattagcaaacagtgcgtctctgacttatgacgtcattataagaaagaccrtatgcaagctaaaactataagataccatatttaaaagataccttatagtctagtattcattgtcgatttttgtctagattaaccatttaattgtggctgcaaaataataaattttttcttactaaaatttgttgtaaacaaatcttaaacttgtagaaaagttggaagtacagtccagtacagaaaactgttgtttttcctgtacttttgaaagtttgctaatgatgtgatgcccaacccttccctaatatgttagtgtgcatttcctacaaacaaggttattctcctattcaacaagaactcagacattcaaattagcaaattaatataaacatattgctatgatgtagtctcagattcc

SEQ ID NO: 294954 - DNA, 579 bp, Homo sapiens
tgtcgatttttgtctagattaaccatttaattgtggctgcaaaataataaattttttcttactaaaatttgttgtaaacaaatcttaaacttgtagaaaagttggaagtacagtccagtacagaaaactgttgtttttcctgtacttttgaaagtttgctaatgatgtgatgcccaacccttccctaatatgttagtgtgcatttcctacaaacaaggttattctcctattcaacaagaactcagacattcaaattagcaaattaatataaacatattgctatgatstagtctcagattccactcgagttttgccaaatatctcaatgttatccttcatatcaaaaagatccagttgaaaattatgcatcatctttagttgatatgcttctttagtctcttttgatctggaacagttcctcagtccttcattgcctctaatgcctttggctcttttgaagattatgggccacttattttgtagtatgtctttcaattagtattcggctgtatttcctgatgattagatttaggttatgcatctttggcagaaatatcacaaaagtgatgctgttcgctt

SEQ ID NO: 294955 - DNA, 567 bp, Homo sapiens
ttattcccaatatcacagggattgtacacccctctgtgatactgttcataataaccagtgagagagatgatcatattactcacaatatcgcagggtgtgtacacttctgtgatattgttcataatatctaggcgccaagaggatgatattactcccaatatcgcaggggttgtacacacccctgtgatgttgtttgtaatatccagggaaggagatgatgatattatgcccaatatcgcaggtgtacaccctctgtaatatttcataatatccagggtgggagggatgatattactyccaatatcacagggggtatacaccccctgtgatattgttcataatatcagaaaaataggggatgatatttctcccagtatcgcaggggtgtatactcccctgtgatatttttcataaaatctataataggaggagatgatattactcttaatatcgtagggggtgtacatcttcctgtaatattgttcataatatacacagggggagggaatattacctccaatatcacaaaaggtgtacaccatctgttacatttttcataatatccag

SEQ ID NO: 294956 - DNA, 447 bp, Homo sapiens
tgaagctgtccctacaatgtttatgctccagctccccatgctaggtcatcccatggtgtgatgtcctcttcattatgttgctctgacatccccctttgtgaaggtgcatttctcacactgctcagggtctgactccttgcaacagatgactcacttgcatggagcctggattctgacagatcttatttggattctgacaccccataattggcagccttactgtatgaatrtatttcttatggtagtgggcagacttttaaggaagtcctcatgatccatgcctcctggtgatcatttccttgtgtgataccctccctttgagtgtacatgggaactgcgacttgcttcaaactaatttgatatggcaaagttgacaggatgtatgtgattacatgaatataattgcataattatgtggtatatactatataacattgtagggcatcc

SEQ ID NO: 294957 - DNA, 616 bp, Homo sapiens
actgttatgtgtgtaacagtgatccctttttcagaggcagggttaagcagtctctctaagcccagtcactgtacagttctttgcaaactctcgtctcattgtctaaacaggagtaatgcttggaggggctacaaatgcctgggccccaaatagcaacctccctgtaaatatcatacaatttttctcctattggtaattggtagtggtactggtgggttggagttaaagggggatattgacttgtgttagtggcacaagtttgcgaggccaaacaacttaagcttgaaggtttgttagtttttagattaaaaagaaaacttctttttaatttaaatttttaagttttgtaggtacatagtaggtgtatatatttaaagaaaacttttgatgtcaacagtsaattgcactttttagcccagtactctacaaacccagacaattttgtcaagctttattgacttcccttaacaagttctctcatttttctggttgtataattttgttagagtttataacacttaattatatttcatagccctgaaagttgtaattttgaaaattcatctaacaatttccaatggtccttcagactttatatttttttggcacaaaagtg

SEQ ID NO: 294958 - DNA, 617 bp, Homo sapiens
gccccattttctgaatctcctccaatatgccctctggaagttatattcagtgaaagaatcaaagcttgtccggggcagaaagagtggatatcagctaagactgattagagcaaagagcatcgctaacattaatcaggctgggaggtcagacaaggacacagacagctccaaagttaacaggaaatagtaattctgcagaggtcatgcagcaactgtaaaatgcctccaggatctctgctttgaatgatcactgctttttcacccgtgacattctagacctactttgctacagtcatctattactgaggatacccagttgctaagccacccatgcctcatgacagcactgattccctagttaattyttgcttttcgaaattctgccatagaaacagcaagcgaacccagaactgatccccacttcccttagactcttctcagaatccttcagcagaaacccaaacctcacaaaacatggttttctcttcccttttgttgaaagctgcattccacatttcctctggggtgcctttcctcattgcatcaaaccaataaatctgattttgtcagactataagctgtttcctcctggtctttggctgattaagctttaacac

SEQ ID NO: 294959 - DNA, 617 bp, Homo sapiens
gccccattttctgaatctcctccaatatgccctctggaagttatattcagtgaaagaatcaaagcttgtccggggcagaaagagtggatatcagctaagactgattagagcaaagagcatcgctaacattaatcaggctgggaggtcagacaaggacacagacagctccaaagttaacaggaaatagtaattctgcagaggtcatgcagcaactgtaaaatgcctccaggatctctgctttgaatgatcactgctttttcacccgtgacattctagacctactttgctacagtcatctattactgaggatacccagttgctaagccacccatgcctcatgacagcactgattccctagttaatttttgcttttcgaaattctgccatagaaacagcaagcgaacccagaactgatccccacttcccttagactcttctcagaatccttcagcagaaacccaaacctcacaaaacatggttttctcttcccttttgttgaaagctgcattccacatttcctctggggtgcctttcctcattgcatcaaaccaataaatctgattttgtcagactataagctstttcctcctggtctttggctgattaagctttaacac

SEQ ID NO: 294960 - DNA, 605 bp, Homo sapiens
gggctcactgcaacctccacctcctgggttcaagcgattctcctgcctcagcctcccgagtagctgggattacaggcacccaccaccacgcacagctaattttcgtatttttagtagatacaggrtttcaccatgttggccaggctggtctcgaactcctgaccttgtgatccgcccacctcggcctcccaaagtgctgggattacaggcatgagtcaccacacccagccaggctgaatatttgggaaacgaaactcaggaggatctcttggtatgtgctttcccttctgtcacatccttccctggaggcaaggctcacctgacaacattgctgctggaatgggagagagggagaaaggaaacaggaagagacgatataatgataagttaattgtttagaaatgctatgcagaaacagatatgtgcacaaataaccataatgcaaggcagcatgttcaaagtgttgtaagaaaataatataaaataaattacagaatttttaaggggacagctccctctgagtggagctgagagtaggtaaggaaagggtccagaggatgtagcatttaggcttccatgagggatattactggcagaggtggata

SEQ ID NO: 294961 - DNA, 605 bp, Homo sapiens
gggctcactgcaacctccacctcctgggttcaagcgattctcctgcctcagcctcccgagtagctgggattacaggcacccaccaccacgcacagctaattttcgtatttttagtagatacagggtttcaccatgttggccaggctggtctcgaactcctgaccttgtgatccgcccacctcggmctcccaaagtgctgggattacaggcatgagtcaccacacccagccaggctgaatatttgggaaacgaaactcaggaggatctcttggtatgtgctttcccttctgtcacatccttccctggaggcaaggctcacctgacaacattgctgctggaatgggagagagggagaaaggaaacaggaagagacgatataatgataagttaattgtttagaaatgctatgcagaaacagatatgtgcacaaataaccataatgcaaggcagcatgttcaaagtgttgtaagaaaataatataaaataaattacagaatttttaaggggacagctccctctgagtggagctgagagtaggtaaggaaagggtccagaggatgtagcatttaggcttccatgagggatattactggcagaggtggata

SEQ ID NO: 294962 - DNA, 607 bp, Homo sapiens
catgtgcaaacctaagattgtatcagagaaactagatatttctcaaatattcaaataaatggaactattagtcatttatcttaaaaaatataattgctgtgtgtctatgtttatctaaaatcaacacatgagctgacagtagtacaaactcagtaattatgaagtacagtacattatagtagaaaagcctgttaaaaatagaaaaagaggtctggcacagtggcttacgcctgtaatcccagcactttgggaggctgaggcaggtggatcacgaagtcaggagttcaagaccagtttggccaagatggtgaaaccccatctctactaaaaatacaaaaattagccaggcgtggtggtgggagcctgtaatcctagctacctgggaggcagagacagagaattgcttgaacccaggaggcrgaggttgcagtgagccaagatcatgccactgcactccagcctggatgacagagcaagactttgtctcaaaaaaaaaaaaaaaaagaaagaaaaagaaaaatttctcttgataaaaacacacaatagttgaagtctataatggtaaatctgaactacagttttgtcatcagaaaccagtaaaaggcac

SEQ ID NO: 294963 - DNA, 607 bp, Homo sapiens
catgtgcaaacctaagattgtatcagagaaactagatatttctcaaatattcaaataaatggaactattagtcatttatcttaaaaaatataattgctgtgtgtctatgtttatctaaaatcaacacatgagctgacagtagtacaaactcagtaattatgaagtacagtacattatagtagaaaagcctgttaaaaatagaaaaagaggtctggcacagtggcttacgcctgtaatcccagcactttgggaggctgaggcaggtggatcacgaagtcaggagttcaagaccagtttggccaagatggtgaaaccccatctctactaaaaatacaaaaattagccaggcgtggtggtgggagcctgtaatcctagctacctgggaggcagagacagagaattgcttgaacccaggaggcggaggttgcagtgagccaagatcrtgccactgcactccagcctggatgacagagcaagactttgtctcaaaaaaaaaaaaaaaaagaaagaaaaagaaaaatttctcttgataaaaacacacaatagttgaagtctataatggtaaatctgaactacagttttgtcatcagaaaccagtaaaaggcac

SEQ ID NO: 294964 - DNA, 295 bp, Homo sapiens
ctctcccttcctggatattagaaacaatatcacagggttggtgtacagagcttttgatattgggagtaatttcatcctctccacctcctgatattaggaacaatctcacagaatacgtgtacacttcctgcratattggggatattatcatttccttcttctctgaatattaggagcaatatcactggatggatgtacacccactgttatattgggagtaatgtcgtactctaccccctggatattaggagcaatatcacagggtgagtgtacacccatggtaatattgggagca

SEQ ID NO: 294965 - DNA, 622 bp, Homo sapiens
ggtgtacacacccctactatattgttttaatatcaatgtgaaagagaataatattactccctatatcgaagggtgtgtacaccacacctgtgatattgttcctaacatccagtggggggagataataaaattactccaaatatcacaggggctgtacccctctcttgtgatactgttcctaatatccagatggggacaaaataacattactcctaattacgcaggtggtgtacaccaccccagtggtattgtttctaatatccaaggggaaagaggatgatattactctcaatatcgcaagtgttgtacacaacccctgtgatattgttcctaatatccagggagggaaagaatgctgttacttccaatatcrcagagggcatacaaacaccttgtaatattgttcttaatacccgggggcgggggggagaaaatgatattactctcaatatcacaggtcgtgtacatcccccactgtgatatattcactaatatccgagggggagaggatgatattacccccaatatcgtaggggttgtacaccccacttgtgatattgttcctgttatccagggggacagacaagggtattacgatcaagatcctaaaaattgtacaccc

SEQ ID NO: 294966 - DNA, 550 bp, Homo sapiens
tatcaaatggcatttaaatgaccctgctccctaaaggagccaagtaatgtcagtggcatggacagaggaagggagagggttgacagtaagtcacacccacttcctagagtgaggcagccagtggggtgatcaaagccagcccccatatctstgcaggctcatcctatgcctggcagaactggcaggaaaggaatataggtaccctaaggcagccgttgctaccaagaaaggtgatctgtgtccatttgtcaagcatgattgggagaaagtgatcaaaagggctgcagtgaaaccaggaatggactgaagcagctctgagagtccatgtagctttggcactgaacttgaggctgactctcccaacagaagacacatttccccaggggttctaagacgagcagcatggaggagagcctggatattgctatggtttcttagaagaagctgtagcatggtgagagtgcctaactccttgtctgtgtctccatccaagctgactataatctccgtcttatgttctatccttagcatctagtacagtgcctagcat

SEQ ID NO: 294967 - DNA, 563 bp, Homo sapiens
tcatcataatgtaagtaatctagagatgacttaaagtatgttggaaaatacgtataggttacatgcgcataccaagccattttatatatggacttgaaaatcctcagaatcctcaggggttactaaggaccaaaccccatccacctgcagaatatcaagggacaactgtatgtgaattcaaactttaccatgcctgattgtttttcaacagtttttatcaatttacacacaggatagctgtgtatgagggtgctcagtgctcttcacttttgcaaacctttggtgaatatcagactttttagttttagccagttaggtgagggcattaagatttgttttacctgtgatttcrtccccacacaacagcctggggtgacacagtgagattttgtcacttaaaacttaaaaaaaaaaaattcatttccctaactgcaaatgagagtgagtaattttttcacgttcattggccatttgggtattcttactcataagctgcctattatgtattttgtccatttttctattgggttggcgttctctgcactagctctttatatataatg

SEQ ID NO: 294968 - DNA, 602 bp, Homo sapiens
tccagtggtgacaattccctatactattctttcagtttagacttatatctggacaatctaggcaaggaactatcatttattgatcccttaccatgtcaaaggtcttcacattctaactcatctcatctctataacaactctaggtattatgacttgtgttttatagtttaggaaactgaggttcggagtagttaagtaacttatccaaggtcaaacagcttctagatggcaaaacctggacaggagtttatgactgcccaaatccaaagctcttaactctctttattctcyatcacactattttctaactaaaatgttagttttttctctccagaatccaaactggctgactagacttgttattttatttttaatccagttctttggatggtttatggtttcactactaacataccattctgtatgtaaatgccagcttcagatttcttttagctccgttactggtgattcatggtgattgaatggagctttccttagggaattgagattttattctttgggcataaaatttctcttccttttaaactctcatctctgaaagtgaaaattttagaaagtaaatcctcttatttgccagtagc

SEQ ID NO: 294969 - DNA, 577 bp, Homo sapiens
aaatccaaagctcttaactctctttattctctatcacactattttctaactaaaatgttagttttttctctccagaatccaaactggctgactagacttgttattttatttttaatccagttctttggatggtttatggtttcactactaacataccattctgtatgtaaatgccagcttcagatttyttttagctccgttactggtgattcatggtgattgaatggagctttccttagggaattgagattttattctttgggcataaaatttctcttccttttaaactctcatctctgaaagtgaaaattttagaaagtaaatcctcttatttgccagtagcatttgttttcagttatctggtctatcttctagaattactgttagtcaagaaagctttttttttttttttttttttttttttcaaatttcctccttcaagatgcatgttatatcttctgaatggtgacttaccctttcattttcatgaaacttaacatctgtcatagtaataattcatttcctgtcgatatatctatttggccactgaaaggaaggagaaatgaaaaagaaactg

SEQ ID NO: 294970 - DNA, 577 bp, Homo sapiens
aaatccaaagctcttaactctctttattctctatcacactattttctaactaaaatgttagttttttctctccagaatccaaactggctgactagacttgttattttatttttaatccagttctttggatggtttatggtttcactactaacataccattctgtatgtaaatgccagcttcagatttcttttagctccgttactggtgattcatggtgattgaatggagctttccttagggaattgagattttattctttgggcataaaatttytcttccttttaaactctcatctctgaaagtgaaaattttagaaagtaaatcctcttatttgccagtagcatttgttttcagttatctggtctatcttctagaattactgttagtcaagaaagctttttttttttttttttttttttttttcaaatttcctccttcaagatgcatgttatatcttctgaatggtgacttaccctttcattttcatgaaacttaacatctgtcatagtaataattcatttcctgtcgatatatctatttggccactgaaaggaaggagaaatgaaaaagaaactg

SEQ ID NO: 294971 - DNA, 577 bp, Homo sapiens
aaatccaaagctcttaactctctttattctctatcacactattttctaactaaaatgttagttttttctctccagaatccaaactggctgactagacttgttattttatttttaatccagttctttggatggtttatggtttcactactaacataccattctgtatgtaaatgccagcttcagatttcttttagctccgttactggtgattcatggtgattgaatggagctttccttagggaattgagattttattctttgggcataaaatttctyttccttttaaactctcatctctgaaagtgaaaattttagaaagtaaatcctcttatttgccagtagcatttgttttcagttatctggtctatcttctagaattactgttagtcaagaaagctttttttttttttttttttttttttttcaaatttcctccttcaagatgcatgttatatcttctgaatggtgacttaccctttcattttcatgaaacttaacatctgtcatagtaataattcatttcctgtcgatatatctatttggccactgaaaggaaggagaaatgaaaaagaaactg

SEQ ID NO: 294972 - DNA, 493 bp, Homo sapiens
atcggctgcctatctttggctctaacccacagatcgacatttccctgtgctcacacctgcttccccctcctccctttctcagatacggatccaaaggacactctttaagaaagatcttggtgctgacgtcttagagtatgctctatagtaaacctgacctgcaagtgtactttaggtttgtgtttaaatggcatatttccttgagagaataaagatcaatcaccaccctgctgaaattatattccttctttgcatggttattcagtgatgtgaggagattgaaatggccayttgggaatctcagcttcctatgtatggcattattgttgtgactccattgaaaacatgttcctttgaacaccagaagtcatgaggacaaaaagcaaacatcttacattggcatgatgaatgagtccctgttttatgcctggatttactggaaccatgcactctggctctgagaggaacagtctcatgtccagagcaatggttt

SEQ ID NO: 294973 - DNA, 519 bp, Homo sapiens
tatgggataaaatatttgcaaactacccatatgacaagggattaataaccagcatatataagaagttcaaacaactccataggaaaaaaatctaataatccaatttaaaaatgggcaatcagcctgggcgacatagtgaaaccccgtctctacaaaaaattagctaggcatggtggtgtgcacttgtagtcccagctactcaggaagctgaggtgagaagatcacttgagcccaggaggtagaggctgcagtgagccaagattgtgcctgggcatcagagtgagagcctgtctcaaaatcaatcaatcagttaattgatcaatcaatgaaacataaaaaatgagcaaaagatttgaatagacatttctcaaaagaagacatacgaatagcaaayaggtatatgaaaaagtgcccaacatcatcaaccatcagagaaatgcaaatcacaactacaatgagatatcatgtcaccctggttaaaatggcttatatccaaaagataggcaataacaaatgctg

SEQ ID NO: 294974 - DNA, 554 bp, Homo sapiens
tgcctgggcatcagagtgagagcctgtctcaaaatcaatcaatcagttaattgatcaatcaatgaaacataaaaaatgagcaaaagatttgaatagacatttctcaaaagaagacatacgaatagcaaacaggtatatgaaaaagtgcccaacatcatcaaccatcagagaaatgcaaatcacaactacaatgagatatcatgtcaccctggttaaaatggcttatatccaaaagataggcaataacaaatgctggtaaagatgcagaaaaaaagtaaccctcttacactgttggtgggaaagtaaattagtacaaccactatggagaacactttggttctccataactaaaactaaaatagacaaaaaactaaaaatagagtgacatatgacgcgcaattccactctgagtatataccccaaagaaagaaatcagtatatcgaagagatacctgcacttccgtgtttgttgcagyactgttcacaatagctaagattttgaaacaacctaagtgtccttcaacagatgaataaagaaaatgtggtacatacat

SEQ ID NO: 294975 - DNA, 607 bp, Homo sapiens
tgaggagggaggaggagctgtttgtgggaagtggccttcagggacataagcatgaagatttggagcctgccagtaccaacactgctcgctggcctcctccactccttttctgtccttctttggcccaagcactcttttctcaacttctctagggctagaatcatgtcatcttcacaagccgtttctctgaaatagctcagagacatgacagggacaagggagttcctttaactcccttcccagcatcaaccttgtgcaagtgttttgatgtgacagaggatcccacagggccagaagactaagaaagagatcaggtgtcccagctgagaccagtcaggggactacaccatgggacaatggagtgagagtagccctgagagcakaaaggaagtgacagaatgtcttagaatgtacaggaggataaggagtctctgcagagggctagaatgactgactgggaagaatggaaaaggggagagaggcttgtaatgtgttactaatgttggtcattggctttaaaaagcacacacacacacacacacacacacacatacatacacggacttgaaagtcagcaaaaaagagttgtcagagagaagggaaccca

SEQ ID NO: 294976 - DNA, 1201 bp, Homo sapiens
ttattaaccgttgttaactttaaataatcatagtattgatgttatggaacaccaaggagaagagtaaacaaacaacactccaggactttatctcctcttctggtgaagtggttcatgaattctgggttgtataaatggtagttgtatcttattaaatgaaattatgaccttggtatttttctcatttgatgattaaatataatttaaggagatgcgtataagtgacaacatgacaaggagtgaacttgtgatgattaattctatatttcaacctgactgggtcatggagtgcccagacatttggtcagtcattattctgggtgtttctgtgaaggtctttttggatgacattagcatttaaatcagtagaatgagtaaagcagaccaccctccctaatgtggatggatgggcctgcaccaatcagatgaaggtttaaatggaacaaaaaggctgactctcccctragttagagagaattcctcctgcctgactgcctccaaactggggcatctcatttttttctggcattgtactcaaattaaaawggtttctaaggtctaaaggtgagggaaggcaattgaatgcaaatggacgtaaaggaatttgggggggtggcagaaatattgaagtgtcagctacattattaaatatgtttgtaaaagctcattaaatcgtacaaataattatgatgaactttgccgtatgtaagttgtacttccaaaagctgattttaaaaaaactcttcacaggaaaataatggcaaaaacatgcaaaaatattactctgcttcaaccatcccaagcccaaatgtccttccttcttctttttctccatcctctcttttagtaacctcaaagtactcattttaacagttttatagatttccagaatatctgagactcactgctgagcaaaaccctaaagaaaatactcacaaacaagcaaacaacaagtaaaatcaacaataaaaagaataaaagcaaactcaagcaaaagaatccccaaaacatataaagaaaatttaaaaaatacgaaaacaaatgactcagagaatctctctctctctctctcwcacacacacacacacacacacacacacacacacagagtaaacccaaacaattataactacaacaagaaaaaaaatactgaaaattctaaacaatataaaaccctacatcagtgaaaacaaaatagcaa

SEQ ID NO: 294977 - DNA, 579 bp, Homo sapiens
ggctgtgctcccattttcaggaatgctgtgtatgtgtgtggtgtcctactcaggagagtggcaatcacatgtaattaggtgtgattgaaacctctaagagtggagtaacacatgacatgtactacatatgcaatgatattgcagatatttagttgcatgcagtggtatgcttttcttagcacatagatagtccatctggtaccstcctcaatactaaactagctggggagtttctagataaacttctgaagacaagacataggaaataaaggttttgggaaaaagtgtttcactgatttcttaggggcttcatatccttctttacaaacttgcaagactaaaatgggaaaaaagccttttagtatggtcatggtgttcctatctgcctgtgaattttttttttttttgataacccttacctgcggggtccatcccacagaccctggccaagcaacggatgaaaggagtactcagccacaggcatgcagtgtaagagcagctacaggaatgcccagcactaatggctgaagagtgagcagtctcgaacagctggagctgcttgcttttattcagtacaga

SEQ ID NO: 294978 - DNA, 579 bp, Homo sapiens
ggctgtgctcccattttcaggaatgctgtgtatgtgtgtggtgtcctactcaggagagtggcaatcacatgtaattaggtgtgattgaaacctctaagagtggagtaacacatgacatgtactacatatgcaatgatattgcagatatttagttgcatgcagtggtatgcttttcttagcacatagatagtccatctggtaccctcctcaatactaaactagctggggagtttctagataaacttctgaagacaagacataggaaataaaggttttgggaaaaagtgtttcactgatttcttaggggcttcatatccttctttacaaacttgcaagactaaaatgggaaaaaagccttttagtatggtcatggtgttcctatctgcctgtgaattttttttttttttgataacccttacctgcsgggtccatcccacagaccctggccaagcaacggatgaaaggagtactcagccacaggcatgcagtgtaagagcagctacaggaatgcccagcactaatggctgaagagtgagcagtctcgaacagctggagctgcttgcttttattcagtacaga

SEQ ID NO: 294979 - DNA, 579 bp, Homo sapiens
ggctgtgctcccattttcaggaatgctgtgtatgtgtgtggtgtcctactcaggagagtggcaatcacatgtaattaggtgtgattgaaacctctaagagtggagtaacacatgacatgtactacatatgcaatgatattgcagatatttagttgcatgcagtggtatgcttttcttagcacatagatagtccatctggtaccctcctcaatactaaactagctggggagtttctagataaacttctgaagacaagacataggaaataaaggttttgggaaaaagtgtttcactgatttcttaggggcttcatatccttctttacaaacttgcaagactaaaatgggaaaaaagccttttagtatggtcatggtgttcctatctgcctgtgaattttttttttttttgataacccttacctgcggggtccatcccacagaccctggccaagcaacggatgaaaggagtactcagmcacaggcatgcagtgtaagagcagctacaggaatgcccagcactaatggctgaagagtgagcagtctcgaacagctggagctgcttgcttttattcagtacaga

SEQ ID NO: 294980 - DNA, 557 bp, Homo sapiens
acttactgactgcacagtctcttcaccttcgttttcragggttctgtcgcagtccgttgcagcgttcctcacacagggcaccagctgccgggtccatcctgcagaccctggccaagcgacggatgaaaggagtactcagacacaggtatgcagtctaagagcagccagggactgccctaatggctgaagagtgagcagtctcgaacagttggagctgcttgcttttattcagtacagacaaaataatgaaagcctggagccaacacagtctgtgggtaattaacattgttcccagtttcagggagcagtctcctgccctgatgatcaaaggtcggttccagacaacataagtaaaccagcctgtttatgccaaattcccctacacttccttgtaccaactccttgccctcttgcctcagggtaagagaacagctgccttcagcttattcattcctgaagctatacagagccttctgatctttcagaaggcctgctcctttccctataccttctcccacaactctgactgatctcccaccactctgactgatctccca

SEQ ID NO: 294981 - DNA, 557 bp, Homo sapiens
acttactgactgcacagtctcttcaccttcgttttcgagggttctgtcgcagtccgttgcagcgttcctcacacagggcaccagctgccgggtccatcctgcagaccctggccaagcgacggatgaaaggagtactcagacacaggtatgcagtmtaagagcagccagggactgccctaatggctgaagagtgagcagtctcgaacagttggagctgcttgcttttattcagtacagacaaaataatgaaagcctggagccaacacagtctgtgggtaattaacattgttcccagtttcagggagcagtctcctgccctgatgatcaaaggtcggttccagacaacataagtaaaccagcctgtttatgccaaattcccctacacttccttgtaccaactccttgccctcttgcctcagggtaagagaacagctgccttcagcttattcattcctgaagctatacagagccttctgatctttcagaaggcctgctcctttccctataccttctcccacaactctgactgatctcccaccactctgactgatctccca

SEQ ID NO: 294982 - DNA, 1270 bp, Homo sapiens
aggtaactaggcaatttcagtgttggccatattagaaagccaattaagaaatagacttgagatacaataaaaggatattaatatatagttaacaattaaaaataaaacattcttaaatatcaaaaatatactaagaggcattttgtataaaatccatataataaaatatattaaattattggagctaaacatctcaaacatatatacatgttactattgagtgatcactagaatacataattttaaattaaaaaataaggtagataaaaatgtgtatatgccactgcagtgtatttagcacaagatttgtatttgtgaacgtgtatagggcagatagataatgagtagatatgcatatatgcatctattgatcagtctataaatctrtcatatatctatacacttatattaaaaataatagaagaataaagagaataatgtcaccatgatgtcaaaatagaagataaccctctcatatctccccacaacaagaatattgcatgcattcacagtcaaaaatgtttctatgggaggctcagaatttgaatagatgcttgtgaaaccctggtagagcccaagacctaggagcatctttttgagagtaaagactgacaaccaattggctgatcwtggtgcctgtgttgaaaaccaattggctgtatgtgtgtggatttatttctgggttctctattgtgttccattggtctatatgtctgttttaatgccagtgccatcctgttttggttactacagcttcatagtacaatttaaatccagttagtgtgatgtctccagacgtgttctttttgataaggattgctttagctattaagggtcttttttggttctatatgaattttaggattttaaaatttttttgaagaatgtcactggtattttaatagatattacatttaatctgtcaatcagtttgtgcagtataaatattttaacagtattcttccaatccwtgagtgtgggatattttttcattttttgtgtcttcttcaatttctttcttgagggttttaccatttttcctataaggatctctcatttctttggttaaatatatacttgggtattttattttttataaagtaagtggaattgcttttttgattccttcttggattggttgctgtaaacatgtagaaacactactgattttcatatgtttcttttgtatcctgcaactttagtgaattaatttatgagtttaaagagttttttggtggagactggggttttctaaataaaatattatatc

SEQ ID NO: 294983 - DNA, 558 bp, Homo sapiens
gaatactatgcagccataaaaaaacaaaatcatgttctttgcagggacatggatggagctggaggctgttattcttagcaaattaattcaggaacagaaaatcgaacgctgcatgttctcacttataatttggagctaaatgatgasaacatatggaaacagaagggagcaacacacactgggacctattggagagtggggtgaagggtgggaggtagaggattaggaaagataactagtgggtactaggcttaatacctgggtgatgaaataatctgtacaacaaagcctcatgacacaaatgtacctgtgtaacaaacctgcacatgtactcctgaacttaaaagttaaaaaaaaaaaaaaagaataagatctgcatccataatttgatgacttcatttttaaggaataaaaattgcttcacctgactatttttcctgaaacttttacattttacctaatcccttaatatttcctttgactcgataaataactaggttgttaaatagtaattagcccaaagagagtatataccaggatgtcagaagcataaagaat

SEQ ID NO: 294984 - DNA, 575 bp, Homo sapiens
ataggcatgagcacagtgccggagcagttctgtatcttgattgtgatggtagttgcacaaatctacacgtgacaaatttgcacagagatgcacacacacatgcacaaacacacacacacacaaacacacacacacatgcaagagtgcacataaaactgataaaatgtgaatgagctctgtggattgtaccaatgccaatttcctggtttgatattgcactgtaattacacaagacattaccactggggggcactagatgaagagtacatgggacctccctgtacattttccccaacttcctgtgagtctatcattatttcaaaataaaattttaagtaaataaatacatttttcaaattttaaaaatggatgcttacctgccagtttgtaaagatagcataacattgtttcgctggcactstttgatcatgtctggatctatgataggcgatgcaggctgtggaccaccatacaatctctgatggcaatccacagctattaagcctcatgagcctgattctccagctggagtcacgcccaagagtccagactttcatcctaaggttacatcatcc

SEQ ID NO: 294985 - DNA, 566 bp, Homo sapiens
ctccagcctgctggcctgtcctgcaaatttcagacttgccagcccccacaatcacatgagccaattccttaaaataaatctctctctctccctctctctctcaacacacatacgcatcatattgttggttctgtttctctggagaaccctgactaatacagttccaataatgagattttgccaaagtgcatccactcaatcacagagggtcaccaagagcctgtcatgacattattctcacagcttgctgtcttttatgcttctcctttcctctatgcctggacctcattttaggatctggcccttcctaaatctgccttcacrgagaggcctcagggaaatcagtgttcttatttatatagaataagaaccatgttcaaggattccactagcctcgtagaagtgtgagcaccttttggctgtagccaagtccccgtggtcaggttatcttgttgatttgagctatagggaaggatgattgatctgtacattccctgaatctcactgtgcagagagaccagtgactaaaatatccatttccaggccattcctccccttgtggaatc

SEQ ID NO: 294986 - DNA, 499 bp, Homo sapiens
ccccgtggtcaggttatcttgttgatttgagctatagggaaggatgattgatctgtacattccctgaatctcactgtgcagagagaccagtgactaaaatatccatttccaggccattcctccccttgtggaatctggccctccaacacrtgatgctcaacctgataagcacagtgccaggcatgctcatttctttcaaggtggtcagtcacaaagcagttagtttattgcctctgtagatcaactatctctgttggaaaacccattaaggctgttgctccaaatagcaggcctgcctgcaattcatctttgatgggtcatgtgtggactccaccaactgggggttctgaatccttgcagaccttcccactctagcggtactgagggatggaagactggaggaagaagagaggctaaggcaagagactgctagccactgatcaaccatgaagccaatagtcccacagtgttggctccatagaggcaaattaggaaagtg

SEQ ID NO: 294987 - DNA, 519 bp, Homo sapiens
ccctatcatctatctatctatctaatctatctatcatctgtctatcatttatcttatctatctatccatcatctgtctacctatttataatctatttatctatcaatcaataaatcacctatctaatgtatctatctatctatctatctatctatctatctatctatctatcatctctctatagctttactcttgcaaacrtggacttaaatataaacgtagattacaaataatttttatctctttgtaaacagagttcagtgaggcctctctgtcaatggttgatttctaaatgtatatcaggttaataaaactacattacttcccaaatgtctcaaaatgacacttcccactgctttaggacctgactttctttctaatcagtccagaggattgagtttctgctgcctggtccatggaatctgggactttatcttcaaatgaccttccagatctgggaggtgtcatgttgtgaggtgcaaatacggttggttttggtatttttgcaaaaactttctc

SEQ ID NO: 294988 - DNA, 634 bp, Homo sapiens
ataagaggaagttttgtctttgctgtcaagaagcagttaaacttataaaatctcatctttccttgtagtattgaagagtaatgtcttgtagatgtttcccactgtaaagcattatatgaagcagctggtgcaaccgtcccaatttaagtaaaagagtgagaattcaccagattgcaccctagagaaaaccatatgtcattggtggcgtttcaagactcctggctgggttgtagggtacacagaactgcttttatttctcctcgtaagcaagttccaagttcgtaaatttccctgaactgtcactggtatggtaatgagaactttcaggcccacatagctgatatctactcacacttcgaaaatccgatttgaaatatgacactgaaaatcttaagccttcgctcaagctctccttgatcatgaatatagatcaggctactcagtgtatgagatggaattgtctagagccttaaaaaaaagagaaaggaaacttgtgatgtttttcctcttaccataacccgtggmcctgtggtgcctatagcagagatataatgatcagtacatgattagatgtaaatattgattccttgagtaatccatgcaattggatgaaaaaacttattcacatattagt

SEQ ID NO: 294989 - DNA, 590 bp, Homo sapiens
tttcagttgccatggggcccaaggttgaaggtcacataacctgagcatgcccagatgaaccaagggtgcagccacaagggtaccctaagtggttggaaggagaagcgtggactggattaagaagcagaccccaaggccgggcacagtggttcacgcctgtaatcccagcactttgggaggccaaagcgggtggatcatgagttctggagatcgagactatcctggctaacatggtgaaaccccgtctctactaaaaatacaaaaaattagccaggtgtggtggcgggtgcctgtagtcccagctactagggaggctgaggcaggagaatggggtgaacctgggasgcggagcttgcagtgagctgagatcacgcctatgcactccagcctgggggacagagcgagactccaagactccgtcccaaaaaaaaaaaaaaaagaagcagacaccacatggcaggatcaaggatccaatgagattgagccctggcatcaccctctggcaggatccaatcagatcacacctcattgccctatgcttataaagcccaacccagcccccagctcagggagacagattggagcatttc

SEQ ID NO: 294990 - DNA, 574 bp, Homo sapiens
acttgctcagggtcccaggtagcatagtatctaggttcaaccagagtactcagtggttgtagtatctgagtccaacaggagtacccattggttgtggtatctgagtccaacaggaatactcagtggatgtagtatcggagtccaaccagagtamtcactggatgtagtatctaggtccaaccagagtacccattggttgtagtatctgcgtccaataggaatactcagtggaggtagtgtcggagtccagtgggaatactccgtggttgtagtatctgaatccagccagagtactcagcggttgtaatatctgagtccaacaggagtacccactggttgtagtatctgagttcaacgggaatactcagtggatgtagtagtatcagagtccaacgggaatactcagtggttgtagtatctgaatccagccagagtactcagcagttgtagtatttgagtccaacaggagtacccactggttgtagtatctgagtccagtcagagtactcagcaggtgtagtatctgagtccaacaggcgtacccattggttgtagtgtctgagtccaaccagag

SEQ ID NO: 294991 - DNA, 417 bp, Homo sapiens
tcagaataaagtctggggaaaggccccccaggaaagttgattctgcagtgtttctgtaaatattcactctcctrtccctttccgtctctcaagattcccagatcctctgccactaagttgaattatccttgcatgtagacctgaaatctggttgagaagcatctttactccctgtttgcctaactgagaggcttcacggaaactggatgctattttgatcaaagatcaaattcccccatccctttccaggatggttcacctgacagcaaccaagacccaggttctaagtttacgtgggaaaattgcctcattgactatatgaacccaatgactcacttcagagaacaaagaccttttaagtgtacctaaatcctcaaagcaaggcagaatgcaccacgtaatctttggtgtgtgaat

SEQ ID NO: 294992 - DNA, 417 bp, Homo sapiens
tcagaataaagtctggggaaaggccccccaggaaagttgattctgcagtgtttctgtaaatattcactctcctgtccctttccrtctctcaagattcccagatcctctgccactaagttgaattatccttgcatgtagacctgaaatctggttgagaagcatctttactccctgtttgcctaactgagaggcttcacggaaactggatgctattttgatcaaagatcaaattcccccatccctttccaggatggttcacctgacagcaaccaagacccaggttctaagtttacgtgggaaaattgcctcattgactatatgaacccaatgactcacttcagagaacaaagaccttttaagtgtacctaaatcctcaaagcaaggcagaatgcaccacgtaatctttggtgtgtgaat

SEQ ID NO: 294993 - DNA, 1494 bp, Homo sapiens
tcagaataaagtctggggaaaggccccccaggaaagttgattctgcagtgtttctgtaaatattcactctcctgtccctttccgtctctcaagattcccagatcctctgccactaagttgaattatccttgcatgtagacctgaaatctggttgagaagcatctttactccctgtttgcctaactgagaggcttcacggaaactggatgctattttgatcaaagatcaaattcccccatccctttccaggatggttcacctgacagcaaccaagacccaggttctaagtttacgtgggaaaattgcctcattgactatatgaacccaatgactcacttcagagaacaaagaccttttaagtgtacctaaatcctcaaagcaagrcagaatgcaccacgtaatctttggtgtgtgaatwctgattttcatactgtacagaacagcaatttagatccagtacttaaagctctctcagggataatgtctacaaaacaacccgcaaagtacagtattataaataaagtcgttaaaataaattaaagtctagagtttctgatttccatagtctcgacaattgcaggagttgcaaactcaaattcccagagagaccagggacacaaatataactatatgaacagagagatggttgagttttttaaattgaccatttaatgatctacctaaaaagcattcaaattaaacaacattaaagtagattatggtggtgataaacaaaaggcttatctgtgctgaatttggtcagttacagctagtttgcagccttaatttctcttaatatctgatagtcctgttatgatcattgggcatctacatttgtggatcagaaggaaatttcacatcccagagacaggtcctgggaatatccatagtatcawgacacttctcccttctctcctaatagtatttggctgttgcccaggttttctcatgtgtgttaagggagatawgtttacatcctagtggaggaaacaaataataagcaagataaataaataaggggcataaaatattctctcatgagaaatcaaaacaaggacctatgttgggaggaggcagtgcaattttagataaagcacctggggaggawctatttgaaaagcactggagtaaagatatttgagggaatcagccatgaagatattgggtgaggtgctttctctgctgagaaaacagtgagttcaaaggtattagagtgtgcttagcaatgtagggaagtgtgaaaagccagtgtagtcacgtgaggtatacacagggaaaggaaaaagatcacgcagggtcttgtggtttttgtaaggtggctgagtatctgaatgagaatggaatccattagcaggatcactttgcctgctgttttgagaatagaattaaggagacaaaggcaaaagcagaaaagtcacacattcctaagagttattgcaataatcagctgagaaattttattgcattagctgaaggtggtaccagatgtagtca

SEQ ID NO: 294994 - DNA, 526 bp, Homo sapiens
gtttacatcctagtggaggaaacaaataataagcaagataaataaataaggggcataaaatattctctcatgagaaatcaaaacaaggacctatgttgggaggaggcagtgcaattttagataaagcacctggggaggatctatttgaaaagcactggagtaaagatatttgagggaatcagccatgaagatattgggtgaggtgctttctctgctgagaaaacagtgagttcaaaggtattagagtgtgcttagcaatgtagggaagtgtgaaaagccagtgtagtcacgtgaggtatacacagggaaaggaaaaagatcaygcagggtcttgtggtttttgtaaggtggctgagtatctgaatgagaatggaatccattagcaggatcactttgcctgctgttttgagaatagaattaaggagacaaaggcaaaagcagaaaagtcacacattcctaagagttattgcaataatcagctgagaaattttattgcattagctgaaggtggtaccagatgtagtca

SEQ ID NO: 294995 - DNA, 471 bp, Homo sapiens
tttgaatacctcagtcaaaaaacatacaaaaaccttttggaagttcttattggaactacactctgtgaaaacttccttcttaatgaatttagcgtactttatgtgtgtttccatcttagtgacatttagtacaacccaaacaacttgtttcctactttatatgttattggtgttaggtatyagagttctattttactgtatatttagctttacaatatgtcattagtagctgtttatttagtaaatatttataggttttgctttctttgtccatcatttcttcttgcattttagtcttttcatctagaatcactttctttctacctgaaaaggcttcttagtggaagggtgttgttgcaaactctggccctttttattttctaaaacaactttagttcatattcatttttgaaagatatgtttagtgaatatacaactctaggttggctgttgtttcctttcagtaatttg

SEQ ID NO: 294996 - DNA, 497 bp, Homo sapiens
ctgagactggtattaccaactttgtcataggctttagagtcatatctaaagtttacctgagagttaaacttcagtatactttatttctttatcacattttgctattatatctcctcttttactccacacatccttctgcttctgaccacagtgggtgrtagactgccaatttaaggcataatatagtaaacaatttgggagatattatttataataatagtatcatgagtgaaggtatgtggctggcaaagaagcagttaagattataactgatctagatctagaccagcatttgggttgagttagtcaaggccaaccagaatatttttcaaggctgcccgttagcagaaaaagtcttcaagccaggataccagttcaaggtaggaagacgcagggtccagggtctctaatacttggtcagagagctttcaagtagagacttgctaataacttagagatgcatatcccaaacatttcttccatgaaaccacagcccc

SEQ ID NO: 294997 - DNA, 497 bp, Homo sapiens
ctgagactggtattaccaactttgtcataggctttagagtcatatctaaagtttacctgagagttaaacttcagtatactttatttctttatcacattttgctattatatctcctcttttactccacacatccttctgcttctgaccacagtgggtgatagactgccaatttaaggcataatatagtaaacaatttgggagatattatttataataatagtatcatgagtgaaggtatgtggctggcaaagaagcagttaagattataactgatctagatctagaccagcatttgggttgagttagtcaaggccaaccagaatatktttcaaggctgcccgttagcagaaaaagtcttcaagccaggataccagttcaaggtaggaagacgcagggtccagggtctctaatacttggtcagagagctttcaagtagagacttgctaataacttagagatgcatatcccaaacatttcttccatgaaaccacagcccc

SEQ ID NO: 294998 - DNA, 591 bp, Homo sapiens
agtagagtgcctgctgaattgattctrttactgttcttacagcggtgacttgacttcaattactgctattgttgttatgattattatatatttattctaatttttattacagtagttgtttcactgatgcttttgacaatgacatgaaactaactgaaggtacagaacttgaatatccttgaaaccagttttgtcttaaacagttgagaaagcactctgccatttttcttaattgtttttggcaaaaacagtataaaataagtaatacttttaatttagcaggtattttgatggaggaaagtttaagtttttcattgggtcatatttggcaaaacatttttggtaaaatgagccacacagcaaaaatatttatgaaatctggaacaatctgagctagtattcaaactgcctatttttgtgaataccaagaacaacaactactattattattgagcagatattaatatcacacattcactaggtactgttctaaattatatcatttaattatcacagcaaccttgtcaattgagtatcattagctactattgagattcagagaagttaagtcaggggccaaaagtcacacag

SEQ ID NO: 294999 - DNA, 581 bp, Homo sapiens
gtcccagaattctttctcagcccaggatttttcttgctggaactcacttcatttagtagaagtgccagaaactatgctacttcaccttcctgggagaaaatggaaaataaaaaagcaaaagtttggaattaatttttaaatgggagmtatatagactccagtacacagaggatccttaaggcatataataggataagcaatgcaaaaaaaagttctatgattttttaaacgttactacaagttcattaattattttgtaatggtagacaaaaagttgatggcaagttaaataaattgatttaaaatttacagaagtttgtgtgacggtttggtctttatctcctatgttttaaaatccctcacatgtttaagatgtacattatacttaaataattctggtgctttttttgatcattcgcttcaagtaccagagtgatattgacattattcactcaggtaaatatatttatcttgccttgagtggctgcttttgtgataacatctcttcacataggaaaataggaagaggaaaaggaagaggtggaagaggcatttataatttctcacaatttaagaaataa

SEQ ID NO: 295000 - DNA, 581 bp, Homo sapiens
gtcccagaattctttctcagcccaggatttttcttgctggaactcacttcatttagtagaagtgccagaaactatgctacttcaccttcctgggagaaaatggaaaataaaaaagcaaaagtttggaattaatttttaaatgggagatatatagactccagtacacagaggatccttaaggcatataataggataagcaatgcaaaaaaaagttctatgattttttaaaygttactacaagttcattaattattttgtaatggtagacaaaaagttgatggcaagttaaataaattgatttaaaatttacagaagtttgtgtgacggtttggtctttatctcctatgttttaaaatccctcacatgtttaagatgtacattatacttaaataattctggtgctttttttgatcattcgcttcaagtaccagagtgatattgacattattcactcaggtaaatatatttatcttgccttgagtggctgcttttgtgataacatctcttcacataggaaaataggaagaggaaaaggaagaggtggaagaggcatttataatttctcacaatttaagaaataa

SEQ ID NO: 295001 - DNA, 449 bp, Homo sapiens
aaaactctgaaaatttttttcttaaaatgtggcttcattcaatgatgataaactatcctgtgaattattttcaacttaatatgtgtgtgtgtgggtgggtgtgggtgtgtgtctgtgtgtgtaccaccaaatttaataggctttgtgaggggagatgtagtgtttcttttttyagcatataatgtgcatactagttgttgaatacatatttttgacaatcactcaaatatataccgcacatgaaaaccaagatgtgaaacaataaaagcagaatgtctctgggtggtagttaaaaagataggctaagccttgccttcagcctccctgaacttgggataactcaaagagattccccacatattcaatgagcagaatttaaaaaccactgatctacactcatttcttgcctcatacagaatttgctaattcaataccatgatatatggtca

SEQ ID NO: 295002 - DNA, 559 bp, Homo sapiens
atcaaaatatcatatatcagtcttatcacaacgttgtttaaacactctataagttttatcccaatagacaacaaattacctactataattaatctcagcattttcatcccaatactattcacaaaaattccctgtgtttataatcattttgatattattttcaatagttaattaccactgatttttttaaaagttaatttaatttctaatttgartattacagtacttatattctaaatcttcccaatttaaaactatcttttaacaaaaaaactcccttaacagattaaaggagtaattgtgtcttactccaatcattctccttcagtacaatattcacagtgatccaaatgataggtaataataatctccttcatgctttaattactaccttagttttctttgaaattaggtgattctcattggtctgttattcacaattgctttctcagaaacatggtggtttctttttactcacagcaggcctttgtatcatctgagttttctagaaaggaaacatactttccagtatctctccaactgtgagtgttttaaggat

SEQ ID NO: 295003 - DNA, 280 bp, Homo sapiens
gtcattttttgatacctcaaatatacaatattgaatgattttttttcaaagtaaaaggaggaacaataygccccaatattgcctattcccagaggaattttaaaatatcaatggttgaatatttgaaattttggaatacagagaaagctatactgagaaatctgtaacattttatgtgtatttttacaaataggtcatcaatgtagttgatgtctgaagctgtttggtatagtacatatatatcagtgaatgcctgtgtgggtggaagcagattatcatt

SEQ ID NO: 295004 - DNA, 673 bp, Homo sapiens
gaaaaagggatcggaagcagaggagtgggattggaaaaaaaacaaaaaaacaaacaaacaaaaaaacttctcctgagctgtctttaaaaaacccttcatgaatctgagtgaccaaccttttctctatttttatacactccaacagtccaaatatacatatttcagaagccgcaaaatggcatcagacaatgtcaacataggctacagtatccacttctaggagtgaatgtttaggagggaagcaaatgctgctgtgagataggagaacaatcgaaggagggatattgacttagcaagctctgaaaccagccttcactgaaaggttttactgtctacagctgttcattagttaatgaatatgaaatattgactcacgggtggcccacaggtagttaggaaagcaatctcttttcaarcctgtcaattgaacagagacagatgggagggtgggtgggtgggggagggagatggccctttatcccttcctttacttccaaccacagccttagactaaagtagatttttggatatagattcttccccctactaggtggggcaggtcctgaaataaagacaaggtggattggggggtgagggcatctgtttccctgctttctaaacacttcagaacaggaataaatttaatcccaaggtttgctaaccatggtagata

SEQ ID NO: 295005 - DNA, 673 bp, Homo sapiens
gaaaaagggatcggaagcagaggagtgggattggaaaaaaaacaaaaaaacaaacaaacaaaaaaacttctcctgagctgtctttaaaaaacccttcatgaatctgagtgaccaaccttttctctatttttatacactccaacagtccaaatatacatatttcagaagccgcaaaatggcatcagacaatgtcaacataggctacagtatccacttctaggagtgaatgtttaggagggaagcaaatgctgctgtgagataggagaacaatcgaaggagggatattgacttagcaagctctgaaaccagccttcactgaaaggttttactgtctacagctgttcattagttaatgaatatgaaatattgactcacgggtggcccacaggtagttaggaaagcaatctcttttcaaacctgtcaattgaacmgagacagatgggagggtgggtgggtgggggagggagatggccctttatcccttcctttacttccaaccacagccttagactaaagtagatttttggatatagattcttccccctactaggtggggcaggtcctgaaataaagacaaggtggattggggggtgagggcatctgtttccctgctttctaaacacttcagaacaggaataaatttaatcccaaggtttgctaaccatggtagata

SEQ ID NO: 295006 - DNA, 601 bp, Homo sapiens
gaactccaaagtgtaatgttaaattttttaaatagttgtctgataaaaaacttattttgacttacatacttgtttaaaaacttttttttttaggcaggctctaaaaacaaaacaaaayaaaacaaaacaaaacaaaacaaaaaaaaaacatttttttttaggcaggctctaaaattgttaccagtcacccatccttgtactcatgcctttgtataatcccttttccttggatataggttggactcaatgactcagatctaatgagatgtcgcttccatgattagattatcaaaagattctggtttgcttcttgcgcatgtgttcgttctctctctctctttctctctctctttctctctccctttctctctccctccctccctccctccctctttctccttctctctttttggttcttagagtccttgctcttaggaaagtaagttgccatgtccttgagcagccctgtggagaggttcacatggcaagaaactggtatctctggccaagagcccataggactgaagactatcaaagtgagtgagactgtggaaatggacccttccgcagtcaataaactgggaaaagtcaaacaaccaga

SEQ ID NO: 295007 - DNA, 519 bp, Homo sapiens
cctcagttgtagaatgagaccaatcagaacctgctctgaaaggtaatagaaagatatttgcatattttaagtttcacttgtcagtttgaatctttcaatttcagattagcattattattctgttatttttacattttaataatgaagttatttttaactctaatcactttttaatgaaccattcaattgaatcatgaactccaaagtgtaatgttaaattttttaaatagttgtctgataaaaaacttattttgacttacatacttgtttaaaaacttttttttttaggcaggctctaaaaacaaaacaaaataaaacaaaacaaaacaaaacaaaamaaaaacatttttttttaggcaggctctaaaattgttaccagtcacccatccttgtactcatgcctttgtataatcccttttccttggatataggttggactcaatgactcagatctaatgagatgtcgcttccatgattagattatcaaaagattctggtttgcttcttgcgcatgtgttc

SEQ ID NO: 295008 - DNA, 592 bp, Homo sapiens
ttaccaatgaagaaaacatttataacttaggacctcctctaacatctctgcacattgagtcaatctcttggtttctccatgattgtttctccatgattatcagttccttcagcttttcacaatacagagtccgtacaatatgaactgattgcaaatggaattgtcaacattgccaaagatgtgatattttatgaggttgataaaaagtggtgtagaagaagttattctagctttcaaaatatttttgtaagtgtcatcacttcatggtgatccattaaagtcaagyaagaagtgaaagaggtcatctcatgttactgcacagttgtatcaaaagtattttactcacatgggtgcatgcacacacacaaacacacacacacacacacaccccacccttgattcattgtttaagattaggttgatgcaaaagtaattgcatttttaccattacttttaatggcaaaacacagttacttttgccacagcctaataacatatagcgatgattataactgacaagtagtaaaatataatttaaacttatttttgtttttgttttattttgagataaattttcaattaaatctcattt

SEQ ID NO: 295009 - DNA, 592 bp, Homo sapiens
tggtccttgtttacatcttaaaatattctgtactactctattcctgctgatttgcatatcttcttttgtgactttccttatccttccaggtgcakctcaaataccacttcctgcgaaaattattctcaaccttctctagtgaaaaggaatatttttcctccaaagatgtggcagattttgtttgtagcaactatgaaacatttcagataagcagccttgaggaatagctgcttgagtacataggctagacagggaagattctatatagttctcattcattcattcagctaatatttgttgagattttttaggtatgaattaatgttctgggatcagtagggagacaatgttgccactataaaccatgtttatattgaattctatttattgaacaaagagcaaacaagaaaatgaagatttacatttcctttctatggactctccaaaagggaaagtaaaaatgacaaagttttatgttacttaaataaggggagatgtattactttccatgtggacctctgtgcaaaaggagtaagtttcacatgggagatgatggctgcccccttgcaggggactagcactctggatggct

SEQ ID NO: 295010 - DNA, 614 bp, Homo sapiens
ctttacctatctacagaatgtggtaaagatcaaattagagaaatcacgagtacttggctagcatttgcaagtaattactattattattaacttcaaataatgtttatgaatgtgtttcataaattctggaagacctatttaaatgtagagatgccactgctgctgatcatgatggttcccaaagggttttgttcactacaaaagattgagaaatgaattcatgctaaagtattcttaggtcttgggagcttaggataccatacctgtttttttatttgtataaatttaaggggtgcaagtgcagttttgttacatggatatattacatagttgtaagtctggccttttcgaatatccatcacctaaataatgtacattgtacccmttaattaatttttcatctctcacttacctcccgccctaccaccctttggagtctccaatgtctatcattccacactccatgtccatgtgtgcacattatttagctcccactttaagggagaacatgaggcacttcactttttgtttctgagttgtttcacttaagataatggccctccagttccatccatgttgctgcaaaagacataatttcattcttttttatggct

SEQ ID NO: 295011 - DNA, 592 bp, Homo sapiens
tctcactgcccagtacattcttgaccctgtcctctcccccttcttctagttaaattagctcatgtccctttctcagaaaagcccccttgacctttatgattcatcagagcttatgatttttttactgaaccctgaaaatctcctccccacaactctcaatgcaactatacattcattgacatgattacctgactgatgtttctcctccattagactgaatgcttcaataaacctatcaaaggaccaagagctttgtgatcatatgtgtttaatgcatgaatgaatgggaatattcttccaccttcagtgatrtcttctccagtctcatttaaaagacaaataattgaagccaaactcccctgcttttcttcctcttgaatatgctatatttttttctggaaaaggtggaatttgagaaagtaaagacaaatcatataaaactttctaaggcttcctgaaaaagaaataaacagtaaaagaaaagtgatacttttcttcctttgtatagaaaagttgagagaggaaaaatataaaacgattaaagagaagataagtaaatctaattacagtgacttccaagaagctggcaatt

SEQ ID NO: 295012 - DNA, 596 bp, Homo sapiens
tgagaagttacttaacacctctggaacctaccttcttcatccattaaatggggataatatcagtgcttatctcatggggttattatgatgtatcagtgagataatgcasgaacaccttggcacattgcctgacacatagtaggcacttaataagtattagttgtcatcattactattggtgatccatggttatctttcaatattttaatctaggagctttggtttgcagatgactgtatggatgtattgttttaataatgctgcaaagtctttcagaacaggatccatggcttatgccccagggaatataccagttaaattacctttccctgaatctggaatccttcacctctctcctttatttactctgaatgcctaagagaatcttctttttctggcttacttattgcatactaataggagaatataaacagagaaacctagattactctaagtggtgtgggtgattcatctgaagattcacatgcatgttcacatgggaatacttatggatagaacatattgtcattatctaatccagtaaaagattaaggacaatgcttcactcaaaataatcatgggatacagttggaaat

SEQ ID NO: 295013 - DNA, 596 bp, Homo sapiens
tgagaagttacttaacacctctggaacctaccttcttcatccattaaatggggataatatcagtgcttatctcatggggttattatgatgtatcagtgagataatgcaggaacaccttggcacattgcctgacacatagtaggcacttaataagtattagttgtcatcattactattggtgatccatggttatctttcaatattttaatctaggagctttggtttgcagatgactgtatggatgtattgttttaataatgctgcaaagtctttcagaacaggatccatggcttatgccccagggaatataccagttaaattacctttccctgaatctggaatccttcacctctctcctttatttactctgaatgcytaagagaatcttctttttctggcttacttattgcatactaataggagaatataaacagagaaacctagattactctaagtggtgtgggtgattcatctgaagattcacatgcatgttcacatgggaatacttatggatagaacatattgtcattatctaatccagtaaaagattaaggacaatgcttcactcaaaataatcatgggatacagttggaaat

SEQ ID NO: 295014 - DNA, 613 bp, Homo sapiens
gattctaataattagtcagggttgggaattgctagtttaaaacagttggcaaatggtgtcatcccacttccaacactatggattaagggtagcccccrgtgtgttggaatgagaagcattctatcaggtttctgggttcaatgagaaagtgtactgtaatctgttattaatgcttcatatggtctttgttaggaggatgatggtacctgtgtcctgtacttaccagtacagatctagttcaatacccacagtttcaagatgtaggaagagaatcagagggggaaaaacctgacttactctcttagttggctttagcaacttaacaaactattccaacattattgggttaaaacaaccaccttctatttacctataattttatgggttgtctgggtaaattttgtgacctcggttggcttgacttgggctgtgtcatctagaatagcttcattcacattcttggcagttggaagaatggatggtccattgggcatcattcactcagtctggctataggtttaaattcagcatcatccagcaggctagtctgaattgctcatacatggcagaatgggtctcagcagccagagggagcagagtccaatgggcaagc

SEQ ID NO: 295015 - DNA, 613 bp, Homo sapiens
gattctaataattagtcagggttgggaattgctagtttaaaacagttggcaaatggtgtcatcccacttccaacactatggattaagggtagcccccagtgtgttggaatgagaagcattctatcaggtttctgggttcaatgagaaagtgtactgtaatctgttattaatgyttcatatggtctttgttaggaggatgatggtacctgtgtcctgtacttaccagtacagatctagttcaatacccacagtttcaagatgtaggaagagaatcagagggggaaaaacctgacttactctcttagttggctttagcaacttaacaaactattccaacattattgggttaaaacaaccaccttctatttacctataattttatgggttgtctgggtaaattttgtgacctcggttggcttgacttgggctgtgtcatctagaatagcttcattcacattcttggcagttggaagaatggatggtccattgggcatcattcactcagtctggctataggtttaaattcagcatcatccagcaggctagtctgaattgctcatacatggcagaatgggtctcagcagccagagggagcagagtccaatgggcaagc

SEQ ID NO: 295016 - DNA, 541 bp, Homo sapiens
cttcacaaaaatccttatgacagcttgctattcactttatttgaattgtcttaattaagactctatttctcatatccaaaaatgcatagtcaaagccagcagcctggtagagtggagaagataaagaattcagagtcatgcctttgaatctaaagtgtcttcttttgacttacatgcagccaataagcatatgaataaaaaaaaagctcgcatcactgatcattagggaaatgcaaataaaaagcacaatgagatactatctcacacaagtcaaaatggctattattaaaaagtcaaaaaataagagatgcaggcgaggttgcaggcaaaaaggaacacttatacactgttagtgggagtgtaaattacttcaacccttgtggaaaacagtgtggtgatttctcaaagacytaaaaacagaaataccatttgactcagcaatcccattactgggtgtacacccaaaggaacataaatcattctatcaaaaatacacatgcatacatatgttcatgaccacactattcacaatagcaaagac

SEQ ID NO: 295017 - DNA, 570 bp, Homo sapiens
acttatgaaagtctaacattatagcatttattttgtactttattgtcggttccccacaagccaatagaacagacattcaagacagtgggaaacttgccattttttactgttgtatttccagtgcctggaactgcctctggcaccatagtacatgctcaataaatatttaccagatgctgaatacaaaatatgtaacatctgccaatttcaaataagctaatagaatctggtataaggaagtaactggcatttcacaggcgraaaaattttgaggccaataaaaaggtaatcaatctcaactggaatgaagaaaatgtctgtattactagtactatacaccctgtccctactctgctcatagatggggactatttctcaccacatctccccatctgaagatggagcttgttctaaaagagtgatcctcccatgtgagagttcttaagagaatctgactcaggaggcccaggaaagtatgttttaacaagcaccttagatgactctggctctggccattcaaggatctctctttgggaagcacagttaactgacatactgctcttaactata

SEQ ID NO: 295018 - DNA, 559 bp, Homo sapiens
ccaaaataaaaagatactcttcaagccatccagtgagatgaactttgggtgatttttttatcactctggaacaagtaaagaaaatttcaagtggcaaccagcactatctttcaaatgacttctcagaaatggaagaaattacaccatttccatttcaaatcattctctagtgaagtgaagccaattctaaaaataaaaccagggtcactaggagaaacattctaaaagccatatatatgacacttccatgatcatcctaaagataattgatccaattctcccacattcctccaaagctgcagagttttgataattcagtttctaaagtaaaattgcaatatggcttatcctaaacaatatttttggctgcacacaggttttatattttatataaatggaatcatacagatatatttctgctactagttttcttacccaaaattatrtttttgagattcaatcttgttgattcatataattgtagtttatatcactcgtgcctagttttcctttgtatgaattgactacaacttactagttattttcgttttggtggaca

SEQ ID NO: 295019 - DNA, 666 bp, Homo sapiens
acttactttgtcctcagtagaaatgtatgacaaacagatggctagaagcttcaatgtcagagccctttatttaaccataaatcatgatcaaaatgcttattttgaaaatcttgctgaatttctctaaaaaggcttaggtcacagtgtcaractccaaaagcaaggaggggtaagaaataaagttgtctacatcctctgttcattggcattagactagtactggggaccctgatgtgtctgatgattttgtttatatcttaaccaagtccttccggctctctgctcttttgtctcctctctacaaatcatgaaaccggatggaccaaacagagagtactcaacatatctgtaactccgtgtctttctttattaattcattcagcataaatagttttgagagcatagattgagcccagtcttttgctaggcactggagacccagcaatgacctggagaaaaaggtcttgccttcaagagattcaattagaattggagagaagaggatggttaggggattctttctggcataagagttgcctagatcagtgatttaatatgcatcataatcaattgcagggcttgttaaaacacagattgcaaaaccccactgtagattctgatagtcttgggtgagtctgagtttctgcatttttaacaagttctcag

SEQ ID NO: 295020 - DNA, 666 bp, Homo sapiens
acttactttgtcctcagtagaaatgtatgacaaacagatggctagaagcttcaatgtcagagccctttatttaaccataaatcatgatcaaaatgcttattttgaaaatcttgctgaatttctctaaaaaggcttaggtcacagtgtcaaactccaaaagcaaggaggggtaagaaataaagttgtctacatcctctgttcattggcattagactagtactggggaccctgatgtgtctgatgattttgtttatatcttaaccaagtccttccrgctctctgctcttttgtctcctctctacaaatcatgaaaccggatggaccaaacagagagtactcaacatatctgtaactccgtgtctttctttattaattcattcagcataaatagttttgagagcatagattgagcccagtcttttgctaggcactggagacccagcaatgacctggagaaaaaggtcttgccttcaagagattcaattagaattggagagaagaggatggttaggggattctttctggcataagagttgcctagatcagtgatttaatatgcatcataatcaattgcagggcttgttaaaacacagattgcaaaaccccactgtagattctgatagtcttgggtgagtctgagtttctgcatttttaacaagttctcag

SEQ ID NO: 295021 - DNA, 622 bp, Homo sapiens
tcaaacttttttcatcacatttattaatgttttgtacattattttttgtaaatcatatacctagagttggcatgtacccaccagttacctttagctgggtcagtaggaggaattttactgcttggatttttaattctgagccagagaatgtagtgactcatacgcagctaacttccctttgccacacagtataaagatttgcacatcatgccaaaattcattccctgttaaaggtaccaagaggagagctgtagaggaagacagttgtcttcttaaaaatcagctttaaaaattaagtgtaatacttccagttcctcccctccccaggctccaaatcttttttttttttttttttttttaaatctggaagtcttggctgggatatgaaagctgaatgaggaatgttttatatcagctcaggggtcaaacacatctggtttccagtcctgaagttaccattataagctgtgtgatcttaraaaaggcacttaaattttttatgtttctgtttaatcattcttataataattacttattaatggaattattgtgaagatgtaatcagtcaattcattttccagtatctgaaaaatgctaagtgctgcatgtcagccatgtgaac

SEQ ID NO: 295022 - DNA, 547 bp, Homo sapiens
gagaccaattccatccttaacaggcacatccaatgcaaaatgataaggacaaattttcctgactcacttaagtgattttggcctcaggcaccaggkcttcaatgaaacggaattggcaacattctccatattaaattcaccttgaaaatgctgaatcactcatggggaaccaaaataaatctgtcttcattccatgttcagtcatgtctttctttcaaccattctattacatatattaggagagttacctgctctacacctcaatgtgataactctgaaagaccttatatttctgcagggccacgaaccatactgctagtgttatatggtgctgacttgacctgaaagaggactccgtacctcacaactgaaagggaacgtatccaacagggaaacacaatatggcagagtaattaagaggtattgctctggagtctgattactacttaatctttatgtgaccttcaccatagtacctacagttttaatgcttcagtttcttccttttaaatgggataataatgaaacctgacacttaaggttgttg

SEQ ID NO: 295023 - DNA, 547 bp, Homo sapiens
gagaccaattccatccttaacaggcacatccaatgcaaaatgataaggacaaattttcctgactcacttaagtgattttggcctcaggcaccagggcttcratgaaacggaattggcaacattctccatattaaattcaccttgaaaatgctgaatcactcatggggaaccaaaataaatctgtcttcattccatgttcagtcatgtctttctttcaaccattctattacatatattaggagagttacctgctctacacctcaatgtgataactctgaaagaccttatatttctgcagggccacgaaccatactgctagtgttatatggtgctgacttgacctgaaagaggactccgtacctcacaactgaaagggaacgtatccaacagggaaacacaatatggcagagtaattaagaggtattgctctggagtctgattactacttaatctttatgtgaccttcaccatagtacctacagttttaatgcttcagtttcttccttttaaatgggataataatgaaacctgacacttaaggttgttg

SEQ ID NO: 295024 - DNA, 547 bp, Homo sapiens
gagaccaattccatccttaacaggcacatccaatgcaaaatgataaggacaaattttcctgactcacttaagtgattttggcctcaggcaccagggcttcaatgaaacggaattggcaacattctccatattaaattcaccttgaaaatgctgaatcactcatggggaaccaaaataaatctgtcttcattccatgttcagtcatgtctttctttcaaccattctattacatatattaggagagttacctgctctacacctcaatgtgataactctgaaagacctyatatttctgcagggccacgaaccatactgctagtgttatatggtgctgacttgacctgaaagaggactccgtacctcacaactgaaagggaacgtatccaacagggaaacacaatatggcagagtaattaagaggtattgctctggagtctgattactacttaatctttatgtgaccttcaccatagtacctacagttttaatgcttcagtttcttccttttaaatgggataataatgaaacctgacacttaaggttgttg

SEQ ID NO: 295025 - DNA, 624 bp, Homo sapiens
atgaatattagctgggattcttattctgctccatcatagaatattgttgtcttatttattgaaagttatctcacattctagagtttgcaatgtggctttgaatacaatgattaacacaattattttaacataataattaaaatatagaatgcttactgtgcatcaggcaatatattaagtgctaatttgtctcatctaatcctgaaattaaatctataaagtgaatattggtgtctaaattttgcagatggggaaactgtggtttaggatagtgaagagagtttttaaagatcattcagttaatgcggttaaagacctgagcccaggtctggctgatcttcaagctccagctcttaaccactatgctctactaccttgcttgttattttatacatatcaatatagatttakatgtcctggctccaaaacagtatctatttccctcacagcaccaactctttgggtgtttttctctcctgttagagagagagttctgaccagtggccattaaacatacttccagttctggcaaccagatttccagttctattctgattgttctgatggtttttgttagtttgttttctatttgtttgtttaactcttgcctttataaaaaaaaaa

SEQ ID NO: 295026 - DNA, 624 bp, Homo sapiens
atgaatattagctgggattcttattctgctccatcatagaatattgttgtcttatttattgaaagttatctcacattctagagtttgcaatgtggctttgaatacaatgattaacacaattattttaacataataattaaaatatagaatgcttactgtgcatcaggcaatatattaagtgctaatttgtctcatctaatcctgaaattaaatctataaagtgaatattggtgtctaaattttgcagatggggaaactgtggtttaggatagtgaagagagtttttaaagatcattcagttaatgcggttaaagacctgagcccaggtctggctgatcttcaagctccagctcttaaccactatgctctactaccttgcttgttattttatacatatcaatatagatttatatgtcctggctccaaaacagtatctatttccctcacagcaccaactctttgggtgtttttctctcctgttagagagagagttctgaccagtggccattaaacatacttccagktctggcaaccagatttccagttctattctgattgttctgatggtttttgttagtttgttttctatttgtttgtttaactcttgcctttataaaaaaaaaa

SEQ ID NO: 295027 - DNA, 1025 bp, Homo sapiens
gtagattctgtgtgtcaggaattctgaaaaggcaaagtaggcacagctgttctctgcctacaacatctaggaccccagttacaaatacttgggattaagggacaactctaacatctaggagctggagtggtttagcagcatctccaatcatgcctggcacatgaacaaggatgaatcaaaagctgaactgagctaggagtgtggaccagagcacatacatgcaggctttccacttggcttggtctcctcagaacgtggcagctgggttctgaaaggtgatatcccaaggtggatgagctgaagaacaagcattctcagactcggcaatcatatggtgtcacttttgttttgtattctatggtacaagtaaatcactaagaaatggctagattcaagaaaagagaattagatgctatctcttgatgggggaagtaagatcacagtgttgaagagcaygtgtgatcggaggtatttttacggaaatctttgaaatatataatttgctacaaccttcaactctacactttccccatttcatcatwcctggccatgcgagcacatttggcccatacaggtccaggtgaaaggctggaccgtgaatgctcctaggatagccttcaaccaatgcctacgattttcctttccwttgagagatgggagaaatgttctccatggtctctgagttacccaaaggtgttaagcttcagctgcccacagtggaaactggcttgtgaggttcccttcactggctttcttccctacctcatctcacattccactcttctcctagtgtttcttgtcatcacttcctgtgtaactgaccagcaccttaatccttgtctcagggtcatctttggaagaccaaagtgaacacccttcaatatctaattgtaaaagtcatgtggttatgtgctgtgtttaacatagttcttagaaagattaagtgctgacaattgccctcagattacataaccaaagaattccttccagtcaagtatctaaagaatcaagccaaggcttaaatt

SEQ ID NO: 295028 - DNA, 552 bp, Homo sapiens
gtaatcctctgactgacttaaaacttcagggtcaatacaagaccaattagttcaattcactgaagcgatcattccacaatgacratgtagagtttcccaggaaacacattgaagctgcagaaatggaggtagtgcataaaaaataaataatagtctcatgatttcctgttctcatcagatggttggatttaaagtatggaaaacacattcatggtaaagtctatattactactaataaattaacacaatagtatcataaaaacactaactgataacagctatttggtggcaggatttcccattcattttcatgggaaatactcccccaagttcataatgggaagttacaaatgctaactcaaactcagagcctgcttatatatgaacgtgcattcagtagaaatgtggtacagtttataaatggactcagggaagatatgtgactccaattaaataaggaagcaaaagatgtcaaataaatattcctctcaaggactcttctcagcccaagaggccctggagatttagcgagagggaaatttactagtaagc

SEQ ID NO: 295029 - DNA, 552 bp, Homo sapiens
gtaatcctctgactgacttaaaacttcagggtcaatacaagaccaattagttcaattcactgaagcgatcattccacaatgacgatgtagagtttcccaggaaacacattgaagctgcagaaatggaggtagtgcataaaaaataaataatagtctcatgatttcctgttctcatcagatggttggatttaaagtatggaaaacacattcatggtaaagtctatattactactaataaattaacacaatagtatcataaaaacactaactgataacagctatttggtggcaggatttcccattcattttcatgggaaatactcccccaagttcataatgggaagttacaaatgctaactcaaactcagagcctgcytatatatgaacgtgcattcagtagaaatgtggtacagtttataaatggactcagggaagatatgtgactccaattaaataaggaagcaaaagatgtcaaataaatattcctctcaaggactcttctcagcccaagaggccctggagatttagcgagagggaaatttactagtaagc

SEQ ID NO: 295030 - DNA, 590 bp, Homo sapiens
cccacaaccttgagtgaaccaagcccagccagtgcacagcaggatacagagccatctctccttacccttaggccctggaaaagtaaactaaatgtttattattgcaagccactgagttgtggggtgacttgttatgctgccttatkgaacaataattgttaataattaaacataaattgacagatgaataacaacagcctatgccagttgagccctgaccttgtgcaaggcactagactaaggacttgagattcgtgatttgtttcgattcttacacagtttggaggggtgggttctgttttcctattttaaaagttagatgaccggcctaaagtgacactattagcaggtggtgaaattgagatttaaatccagggcaatctgattctaatacccattttccaacctactacactgccttcctgagttctcatttatgtcagtgtggaagggttaggtcccattcttctactcatcttgacttcttttgtattacattaataactatttattgagtacttactacatcgcatgcattgaatctgacatacagtaaacatccattgcttaaatgtaagttagctactatt

SEQ ID NO: 295031 - DNA, 635 bp, Homo sapiens
tatggccaagccacttttcacagctgctacactgatttatgaaaccaactgggataatatagttaattatctctaagttgcagtgatgggtgcatttcaattttctggtataatttaaacagactttgattaaggcctgtgttttaggctgtaactttcaatagcaagtatcaaacatgctgtaataataataattatttattgtatattccaacaagagctgtatttttattacatcactctacccttcaagtctgtaaatgccttaatttattttcatcttgtgtaattttctttacaactatggcaagctagaatatacttgtacgttataaaccaggtctgtggacatactgcagaagaatcatctgagcaagacaggtttctggattccttccataggagactcgcatttattagatttgatctagaggctgagaatctgtattttagcagaggttgcccagatgagtccagtctgtgatcaggcctgggtaccactgtaatgtgtaattgtgagactgtctttatgactctcaygtacacacctatcagcatctttcttaaactttgcatctctgatttgtagccaacaattcaagatttgaccatagaactcctaaaatgaaaatgaa

SEQ ID NO: 295032 - DNA, 509 bp, Homo sapiens
ttaccaaagaggcttagttccacttttcacgagatcccattcattacctacataatgaatttagaacacatcgaactctcttgtaatccacacaacttcagttccttttgtgttccttgagcatggcctctgtattgtccaaaaggcacctcctatagttatatttgattcaggttgattctgaatggaatagaaattaatgcatagaaggaagagaacccctgatagaggccagctgtgaatgaaagcagcagtgaatgaaaacaaagacaggaaatcaatacagtaatattgccagaagcagctaaatatagaagaacccacatttatgttatttgtaccatccttgcaaatacctgtggrcatgttaccagccagcccattccccaggagggccaaagttcatcctgatatgggggtgaatctatatgtaaggctaacttactctttaaaaaagtggcttagagccattttcatcttctttactattagtatttgtaaaagtgttg

SEQ ID NO: 295033 - DNA, 541 bp, Homo sapiens
gatggtggtgagggtcaagaaattgagctaaagacttatgcctgaggcctaaattaccacacattataagattttttaagccctgagagacaattatttatctgcttgtaaacctacagcatcacttcccacctctagtgcctattactctgtacccttagtaaatatatgcttcatatctgcatgtatctatgttgtccattggagtacattyttaaagtcaagctctacacaaattaacttaagcaaacacacaatgcacttagtgttaagaatgtggaaaagagacctaaccagaaatattaaaaaagtactcaacaaacctagaggagcttacaagtctatggatgtaagcaaatgaaatggtccaggcacaggggctcacgcctgtaatcctaacactttgggaggccaaggtgggtggattgcctgaattcaggagtttgagaccagactcggcaatatggcaaaaacttgtctctaccaaaaaaagaaaaaaaaattagccaagcatagtggccaagtgcctgtagtcccagct

SEQ ID NO: 295034 - DNA, 596 bp, Homo sapiens
tagcccaggaagctgagattcacataggctatattgtcttccctaagttccatacatagtgactgggagagccagaattcaaaccccaggagactgattccaaaatatagcaagtacaatctacacccagccaaccagattagcactgggctctattatccatggctcctctcctttccttatgtgtttgatatagkcagggacagtgaaatttcaggaaatagttagagaccagaattgaagatcacatcatcattcttttttcctctttgatattcaagaaagttaaattgtttcatcaaaaacattgagatgcttaacataaaatgtataacctctttgaaaagctttatcctactagagttccaaggggaaataatgaaagaatgcattataaattctggccacaaacacatctatatttttattcaattttgtcactgtcaaaaatattgaaagtattggggaacatttgatggattttctggagattttagcatctttgagctttggtcaaaaaactaatttatcattattacttggcccttggacatttgtattctgttttgcaaacctcacaaaatgatcatttcctt

SEQ ID NO: 295035 - DNA, 623 bp, Homo sapiens
tgtgtgtgtgtgtgtgtacatgtttgcttatttgcctaccatctgtctcccaaagtagaaagaaaaggccaatgaagcaaagatttttgcctattgtttccagtacctagaatggtcctagaatacataatataataagtattagtgccaaatgcaatggaggccacaggggaagaagtaagcagattcgtccagggtgggctggagaaggaaccagaggaaacaatgtttcaagtagggacttggaagaggcacaacastttgtggaggagtaaggcaagagcattgcaggcaaagggaaaggtagaaacggagggagggatgcatgaaagtgtatgatgtgtttaggcagtgatgaagccaggagtgagttgaggagagtaactgtgaacagtatgtagcatggcaaggtgatgccagcacatacaatctatagctatgatacaatgtgtcagttcctgctcatctccttccacctgacagggccccacccaccttccccaatgccacctcattttccaaaggcactttatcaagaaagtctcagcaccattggctgggttttagtgcattgactaagcctgcagttctccttggcaatctctgttctatttccttcaaac

SEQ ID NO: 295036 - DNA, 590 bp, Homo sapiens
aatcggttaactcaatcaggatatatccatggagtttaaaattaaatagctattgaaaatgatattgtatagcaatgttgataaggaaggaygtcatcatatgtttcaagttatttttaaacttttaattttgagataatttagattcacgtgtagttgtaagaaacaatatagaggggtcctgtgtactctttttccggttttccctaatggtaacatcttgcatagctatagtacaatattacagaaatttacactgatacagtctaccaaccttattcaagtttcaccattgttacatgcactcacttgtgtgtgtgtgtgtgtgtgtgtgtgtgtgtgtgtgttgagttctgaccaactttgtcacatgtgtagatttgtgtggccaccatcacagtcaaaatacaggacagctctatcacaaggtattcagaatatttaaaggaaaaaaaatcaactaagaaaatagtattatatgtatttttaaaaacaaacaggacatgtaagcaccaagaaattaagcctggctggctctgagtgctgggatggtagctgacttacatcttcctctgtgctggtgtgtacat

SEQ ID NO: 295037 - DNA, 590 bp, Homo sapiens
aatcggttaactcaatcaggatatatccatggagtttaaaattaaatagctattgaaaatgatattgtatagcaatgttgataaggaaggacgtcatcatatgtttcaagttatttttaaacttttaattttgagataatttagattcacrtgtagttgtaagaaacaatatagaggggtcctgtgtactctttttccggttttccctaatggtaacatcttgcatagctatagtacaatattacagaaatttacactgatacagtctaccaaccttattcaagtttcaccattgttacatgcactcacttgtgtgtgtgtgtgtgtgtgtgtgtgtgtgtgtgtgttgagttctgaccaactttgtcacatgtgtagatttgtgtggccaccatcacagtcaaaatacaggacagctctatcacaaggtattcagaatatttaaaggaaaaaaaatcaactaagaaaatagtattatatgtatttttaaaaacaaacaggacatgtaagcaccaagaaattaagcctggctggctctgagtgctgggatggtagctgacttacatcttcctctgtgctggtgtgtacat

SEQ ID NO: 295038 - DNA, 590 bp, Homo sapiens
aatcggttaactcaatcaggatatatccatggagtttaaaattaaatagctattgaaaatgatattgtatagcaatgttgataaggaaggacgtcatcatatgtttcaagttatttttaaacttttaattttgagataatttagattcacgtgtagttgtaagaaacaatatagaggggtcctgtgtactctttttccggttttccctaatggtaacatcttgcatagctatagtacaatattacagaaatttacaytgatacagtctaccaaccttattcaagtttcaccattgttacatgcactcacttgtgtgtgtgtgtgtgtgtgtgtgtgtgtgtgtgtgttgagttctgaccaactttgtcacatgtgtagatttgtgtggccaccatcacagtcaaaatacaggacagctctatcacaaggtattcagaatatttaaaggaaaaaaaatcaactaagaaaatagtattatatgtatttttaaaaacaaacaggacatgtaagcaccaagaaattaagcctggctggctctgagtgctgggatggtagctgacttacatcttcctctgtgctggtgtgtacat

SEQ ID NO: 295039 - DNA, 549 bp, Homo sapiens
cttttacccatcttcctctatgactttcagtactttccaaatggtgtggactatgaaaaaaaataaataataacaaaaatgtggttacatcagacacaggtggaatgagagggagctttattaaataagagcatattaaaatgtgttaaaataaatatcttttaatttgaacattaaattttgtcagcctgtagcatgtcaattcaacatatctgttaaaaatgagatttttaggagctttcctgacatgtgtaattctaagaggttgcgaacagtattccttctcagaagcatgtcctctgtaatcatattatctggactaaagacagaggcctggtgctgagacttcacatttttattttggcattttaaaggctgcatatgtcttctccctgtcagactcttctccacttcgttttactctgcctcctggtttcctttcttctgtcacgtctccttagacaaagttycacttctcatttccatgaatccttggtctaacatcagttgaacattctctgcagtgcctggggctctttggaaaagaga

SEQ ID NO: 295040 - DNA, 595 bp, Homo sapiens
ccctgctcccattcctgctcttatccccattatatcctcccccactctcaccatcaccatgctttttataaccactgttcttttttacatatagacaattcttacttatttttccagacttagctgaattgtcccctccctcagccttctctgatttagtaaattcgccttaactctcagtgttagcacttaaaacattgcattataattttgcaattctacttttgtattttcctttagacaaaaaaaacttcttaaagactagaactgtgaaacaatcatcttcgtacccccagcacctgtagttgttcctcaataagtgtgtattaaactgaacaacttaacttgtgtatacacagcaaagatgaatgtgattatgttggtatttcagttatctattgctgcagaaaaaccacccytaaatatagtagcttaaaacagtgtgatggttaattttaggtgtcagcttgactggattcaggaatatccagataagtgataaagcattatttctgggtatgtctgtgagggtgtctctggaagatacttgaatcacaggactgaataaggaagagctgccctcagcgtggccggg

SEQ ID NO: 295041 - DNA, 1192 bp, Homo sapiens
cactgatatcagctgagaaaataatcaattctgctgcaaactcaccttgcacataatgtcattcatttgcccttgtaaatgatttaatagactttctggggactgaactattcatcctataaaaggccaacattaagaaatgtgagaaagtgctagaaaggttagacttttcaaaagtaagtagaatctccttatgcctgtgtgaagtggatgatttaattaatagagcaggaatactgggagcttaagttagacctagaatcctcaggggcatgaattcttgagtcagcaagagagagtcagtgcctcaaggctgagatatcagtcaaacctctgtcctcmacttttctggggtataaagtgtttgtttgttttttttttctcttttccctatgcaacaacgcagcagcagatccaaaataactatccctagtgtagagacccatcagcgatgctaactccactcatgacgtagctgctcgatatttggtcaaaattagctctttttcatagaatgtagcttagattttcctcctatgcattcgctaaaagcaaaagtaaccaccttaacacctgtcatataaagaagacattttatttgcctcaaacaaaatawgtcaaaaactcaaatgataactttgaatccccatagtgtactatattccattcctgctagtcccaaaggcattagaaatggtactgagagtaaaaacaaaatgatggtactgaacagacatgacactgataagcaagtcgtgtcacttcctgagactcagtttccccaacctgccctgcctactaacaaaactgtggtgaggtgcagatttaagtatagaataggtgctcattwaatgtttgtaagataattaaggatttcatgtgaataaaaagtcattatgaagggaaaatccttaaacaaaaagaaggggtgatgaaaaatttaaatagtgaacagggagtggggagatgttgttccattggtacaaaatttcagttagacagggggaataagttctggtgttctactgcacagcaaggtgactgtactgaataataatgtattatatattccaaaatagctacaagagaggattttagatgttctcgctagaaagaaatgacaaatatttgaggtgatggatatgctaattaccctgatttgataattccacaatgtatacatgggttgaaa

SEQ ID NO: 295042 - DNA, 607 bp, Homo sapiens
tagcctttaatgtgtatgtgtcaaggagcaaagaaagcctgtctgtatctggaaagacaaatactgatgtgcaaagggaaacagccataagaaatgaagagaaagtcatgaaaatgtttggatttctggctctagtctgttttcataaattctggttacaagtcattccccaagtcattcctttattcttataaaaaattcccattcttgccataagctagcctgagttgatttttgttacttgtcatcactgacacttaagtgatacataaactgaacaatctttaccagagttgtcatgtacagttgtacactgcataacactggggagtgccagtcayatcactgattgcattatataaccacatgcagtcctgacttgtatggtcattgagtttttgagcaatatatttcctgagtgcttaattcatcaaatattgattgagtacctattctacttaataaattctattctagagattgtactagttataggatgcaaagattaaaaataaaaacaggccctactctccacatggtcacagtctaggaaagcagaccaacaaaaaaacaatcacaacataatgtgatatagacgacaaagaag

SEQ ID NO: 295043 - DNA, 573 bp, Homo sapiens
gaggcttattcactactgtgagaacagcaggggaaagacctgcccccatgattcaatccctcccacaatacatgggaattatgggagytacaagataaaatttgggtggggatacagaaccaaaccacatcactcctccttattaacctttaaccagaattctttcctaaggggtacacagaaaccagctctagaaaacaagaaacagatgacttattcctttgtcacctttagccaatcatctgaggctgtgaccagattctccctccctctttacagtttccaggtgacagctcatcacttcacaatgcatcccttcctaaagactgacctccatctctgggccagttttggccaactcttgaaggatgtgcagtgacggttttcatgtcctctgcttcaccttttgatgtcagagggtcaagaactccaccctcggatcatgctaatgttgtcgtttttgaacacaccacccatgaagaggcatgaagctcaattgcacatatgcatgcttctcctttcataaatattcatgactcctatagcttattaaatatgtatacctggccaccc

SEQ ID NO: 295044 - DNA, 581 bp, Homo sapiens
attttgcatttctaacaagctctgtaatagtggcaatgctactggtacatagatcaccacactttgagtaacaagcctttaagcaatggggcattgtaggctattaagcagggaataaaatggcactgcagaatgatctcccaatatagtgggatggtcatattaggcataggatgtgaggaagcattaaggcagaagaccagttaggaarctatttcaagatccacatgagaactgaggaaggcaggaattagactcactatatgtgaacttgagtgtgtagtgctagggaacagtaaggagtattcttcctttcctgcttctgtctggatttgtgctgcagaataatggagaactttaaaattgtcttctttaatagcgcaatatgtttgctgagtgtctacttttatatctactgcattcttaaagcccatttaaaattattttcattttgacctgcaaaatctactcttgatcaaataatttgcaatcaagtggtagtttcaagtgggctgaattcagtgctaagacaggtttatgatgaaagaaagtattcacagggatatggagcattgtcattt

SEQ ID NO: 295045 - DNA, 571 bp, Homo sapiens
agtgctctccattatcccttcaatgcatgataaatagttgtaatcaatatctacctgtaagtttggctaaaaaccagcttctgcaaagcccagccaggagctcaagtgttctgttcccccagctgtcaatcagagtagggagggcatgaaggagacataggagatagattcatgaagaatacttgttacttttatatgtgatctgcaactttaagaattttttttcctgatactaccaaaatgaattcatcaaaagatagcctaatgatgaggcttttctgccactttgctgttattagactccagggagtaaatgtctcttattatyataaaaagggaaattatgagctttttctccaagagctataagacaatcttatcttcattttcattcttccaggtggttatgttgaagatgtaaatattctccctgctgtgagtattactgcagctgcccaaagatgctttattttaaagatgtggatacaggaagataaaagcatcagaaacactgcatggggtaagactgtcctggctgccagggtcttggtttagacagtggtagcaatgg

SEQ ID NO: 295046 - DNA, 512 bp, Homo sapiens
tgtcaataacctagtgaaaatctctcacattccaaatcgaccactctcagaaataactactattaatagtttgacatatgtatcaaatactttcaatatattctgtgtttttcacttgacatattattgacaccattcatatcaatacacagatatggcttgggcactttccatcatatggatgaataataatttgtttgactaccagccttttcataggcattgattttccttttaactttttgctgttataaatatctgtgccgtcaattccaaagcataatacttattattttcttggataattcccaaaagtggaatttcagggttgctctccaattagtttgttccarcatccatgtggtgtgcagaattatgtgcaaagatgttcacgtcctaattcctagaactttagaaaataataggttacatggcaaagagaaattaaagttgctaaatcagataaataaaaaagagtgagaatatcttggattatatgggtgggcccagtg

SEQ ID NO: 295047 - DNA, 488 bp, Homo sapiens
aagttgtcagtaatccttcaacaacctcccagacttgaataagagcccgtttgttattctcctgatggttctaggactatgtctccaggtatactggagctactgatgagtcggtagctgctgcctatgaaaattgcccctgtctctggccccctcctaagtggccccacccatcagagcattaccttttcaagagctagcctgaaatggagcagcggggctctcagcttcacaagctcttcctcaaagcacaraagaaatatgctttcacaggcagttgttcaggtagctcaggtgtcaatttttgggtcatctgtccagaaagtctttccaggaattgtctgaggagtaagctccatgtttctgctatatcaccctgtacctctggccatatctgctcaggacctgacacctaactcaaggcaaactgattttgtctaccaggaatttgtaattgaaatgaaaagagtgggccccagtggtctcag

SEQ ID NO: 295048 - DNA, 642 bp, Homo sapiens
  misc_feature (1)...(642): n = A,T,C or G
gcaaatttactgtttatttttctttatgaaacgtaagagttgccaagcaaagtatttctaagtaataatctgtaaaatgagccacagatgagcctagcaaattcacttagtagtcattaaaagaattaaaacccnnagaggtggaacatgttattgggccgctcataagttagaatgagaaaaagtttttttcttatgaataaaatgtgaattttgaaactgtttatttttgagtgtttaaatgtgatatttattgtaccctatcttcacataacatgatttatgttttcagagagctcacaatctaaagtagaattgacccaccaataatagcttgcaaacacactcaagcttttcttgttttttgaaatctttctaaaaattttcctacttggatttctcatttttcccttaggattttgtttaatatggatttaatttatttgaagaaatggtaactcagatttacatattttatttatgatcagttcctctgttagactatcaaggttaaatcacaagtatattcatttattcaagaaayatttttaagcacctgttttaaccacttttcttgttgctggggatttagcagtatttccaggggtaatgcttatatggattttacattctagcgaatag

SEQ ID NO: 295049 - DNA, 568 bp, Homo sapiens
atagcaatgttaatttcctggttttgataatagtattttggctatataggatgttaacattagggtgaagggtatatgggagctctttgtaatgtttttgtgacttttctataagtctacaattgtttttaaaatagttttttaaaagtcaacaatatgtcagaaataacatcttctgtaattattgattgaaacttagatgaaaatttttagatatcacaaggatgtgtgaatatatggtatttcaaaattattttatggctacatgagcaaaaaygtctcctttgaggagtttgactaggccaaaagaaaaaagaaactaaaaataccaatataaatggttcccctaggaaaggctccagccatatcatcctgctgtgaggtccattgccagcaagccccaccatacacacagagcttctaattagctttttaatatctcattcttaattatgaacagatagtcataggtaaggaaggccactgatgtgaaaaatggtgattaaagcaaaagagagtaaaagagatttggaggagaagacaatgcaaaaaatgtggcccttaaaat

SEQ ID NO: 295050 - DNA, 574 bp, Homo sapiens
tgtttaaaaccaaatttatcatcttacttacctccctcaccaaatgcctctgctcctgagattccaatgtcaataatggccctgctatcctttggtgttatgcttgactcttccttcttctttctctattgtttgaaggtatttccacagttattgtacttctgactcctaatgccattgctgcaggtaggcctggctttatatgccctaagctgtggtatacagagtacccaacaagtacccatatgtgggaggtcctggagctgtgcccaaagagggctcattagcagtagatagcattccaacaatactctgcgccaagaaatgagatcagaatccagggaatgaagccaaacttggctagtctgttgccaagctggaagttcttggacacggttataagcaaagggaaagaagccagtagagagggagagattgactgatgatgaaactgagagaagcagtaatggatggggcagggtcctgggggaggcgatcaaaaggatcgcgktatgtctccttgggagtgggctggttctgatgattggggtcttggggagagggagttatatgc

SEQ ID NO: 295051 - DNA, 493 bp, Homo sapiens
cactccccttgtttcttcaggcccttttgcaatctccccgcttcacccttctctcccctccctgcccctggccctaccttccatccagacaagtactgatctgctttctgtcactacaggttagtttgcattttctagaattgtatacaaatgtaccatatggcttttttttttgtctggtttcttttactcagcataattattttgagattcatccaggttgtagtgcgtatccacagtttattcctgttattgctgagtagtactcagggkgtggaatttgtttatccatttactagttgatggacctttgggttgtttccagtactcaagggttcagtggacgtaaggtctgatgaatacataagattaatgaggagacgattattatttttatgggtcttggaacactttgttgccagtactcttgtggcattgttgtcccttactgtagttgtttttttaccatcagtctttctgtgtaccaccctat

SEQ ID NO: 295052 - DNA, 493 bp, Homo sapiens
cactccccttgtttcttcaggcccttttgcaatctccccgcttcacccttctctcccctccctgcccctggccctaccttccatccagacaagtactgatctgctttctgtcactacaggttagtttgcattttctagaattgtatacaaatgtaccatatggcttttttttttgtctggtttcttttactcagcataattattttgagattcatccaggttgtagtgcgtatccacagtttattcctgttattgctgagtagtactcagggtgkggaatttgtttatccatttactagttgatggacctttgggttgtttccagtactcaagggttcagtggacgtaaggtctgatgaatacataagattaatgaggagacgattattatttttatgggtcttggaacactttgttgccagtactcttgtggcattgttgtcccttactgtagttgtttttttaccatcagtctttctgtgtaccaccctat

SEQ ID NO: 295053 - DNA, 608 bp, Homo sapiens
gttcatgtatatttcaaagataacttatcttcattcctgattttgatctttctttggtattggctcctagctctctggatttatgtatctctgcccctgtcccttttgaaagtagttaatcttccccagtagttgtgaatataatgtactggaaaagaatgtaggctttggagcctgtagtagttattaggctgtttattaaatatttctgattctccctctgggcataacagatttttacctccctgcctccttaaaggtaggaatattcatatggcttgtattggtcaagaaactggaagtgtaaaggatgtggccacttccagatggaaagtttaagggcctatgtgtgattcaactcaccactctcctttttaacttctgcttccataatcatggaatcatggagatggagccttcctcagattgagtctccgaccaaggacaacatagaacagaaccctcaacaaataacsttagttgtttttaagtcactaagacttagaggttggctgttatccctgcagaacccagcttctacagtgccaaagacagtcctagactcagatccttgaacaaagtatggaatttctttgactccctcaggg

SEQ ID NO: 295054 - DNA, 532 bp, Homo sapiens
atgacattagtgagaaaatagaatcttcttgattaatctgggataggagaatcagaaccataagagattagtttcagagactggcctgagattctctaagattttctaagayatcttaaggtgaaatttgactttacgtgctaaacctataattgttgtcaccattgtatgcatttttcccttagcaactcctacctagttttattagttcattctcctgctgctaatgaagacatacctgagaccgggataatttataaagaaaagaggtttaattgactcacagtactgcattgctagggaggcctcaggaaatgtacaatcatggcagaaggcaccttttcacagggcagcaggaaagagaatgagtgctgggcaaagggggaagcactttataaaaccaacagatctcatgggaactcactcactatcatgagaacagcatgggggaaaccacccccatgattcaattatctccaccttctcctgccattgacatgtcgggattattacaattcaaggtgagatttgg

SEQ ID NO: 295055 - DNA, 579 bp, Homo sapiens
ggctacaggttccatgcaagtcttaaatccaacagggcagtcattaaaccttaaagttccaaaatgatctcctttgactctgtggctcacatccaggtcatgatgatcaagaggtgggttcccatggtcttaggcagctccatccctgtggctttgcttccccctctccactgctttcatggctggcattgagtgcttgcagcttttccaagggcacagcgcaagctgtaggtggatctatcattctgggggaaggaggatgtcatagctccattagtcagtgccccagtggggactctgtgtgggggctctgaccccacatttcccttctgcactgtcctaacagaggttctccatgagggctctacctctgcagcaaacttctgcctggaaatccaggcatttccatacatcttctgaaatctaagtggaggtttccaaacytcaattcttgtcttctgtgtactgacaggaccaacaccacatggaagctgccaaggctggggacttacaccttctgaagcaatggcctgagctgtactttggccccttttagccatggctacagcagctgggatg

SEQ ID NO: 295056 - DNA, 480 bp, Homo sapiens
cagcattcctgttgatctcaattccatgtagtcaaagagaaagaacccagaggtgggcagaggagcaaaataattacttacctgacagatggggaaggaagtcttaagtctgtaattaaaggctactgaccacaatgagcacatctattcctcagatcytggtttttaatattctccaataaaaggaagtttccttggagaaatggctgattctaggattggggtaaggagtatacaaggatcccaaagcatcttgtatgttagagcccctaagctctttcggttggctcctgtgtccctttgacttacctccatcatagtgtgtgtgtgtgtgtgtgtgtgtgtgtgtgtgtgtgtgtgtgtctgtctgtctgtctgtctgtgtgtctgtgtgtcccagccatagctggaagaatttaagaaagaaaataaataagaaagtattggatgataatgcaaggtatagaattcaagctcata

SEQ ID NO: 295057 - DNA, 480 bp, Homo sapiens
cagcattcctgttgatctcaattccatgtagtcaaagagaaagaacccagaggtgggcagaggagcaaaataattacttacctgacagatggggaaggaagtcttaagtctgtaattaaaggctactgaccacaatgagcacatctattcctcagatcttggtttttaatattctccaataaaaggaagtttccttggagaaatggctgattctaggattggggtaaggagtatacaaggatcccaaagcatcttgtatgttagagcccctaagctctttcggttggctcctgtgtccctttgacttacctccatcatagtgtgtgtgtgtgtgtgtgtgtgtgtgtgtgtgtgtgtgtgtgtstgtctgtctgtctgtctgtgtgtctgtgtgtcccagccatagctggaagaatttaagaaagaaaataaataagaaagtattggatgataatgcaaggtatagaattcaagctcata

SEQ ID NO: 295058 - DNA, 476 bp, Homo sapiens
agctagaacttaaggaatgagtaggaatattatagatggctgtagcaaggattgggtgtgagggtggggatcagtaaaactagaaatgagaggtggatcagatttaaaaaccagggctgggtgtgttggctcacacctataatcctagtgctttgggaggctgataggtgaggattgcatgaacccaaggatttaagaccagcctgggcaacatagcgagtccccagctatacaaaaaaaaaaaaaamacacaaaaattagccaggtgtggtgggttgcacctgcagtctcagctactgaggaggctgagggaggaggaatgtgtgatctcaggagttggaggctgcagtgagctgtgatcatgcagttgcactccagcctgggtgacagaatgagataccatccccaaaataataaaataataaaataaaaaaacctggcgccaaggaatcttgatttttatcctttaacataga

SEQ ID NO: 295059 - DNA, 630 bp, Homo sapiens
caaacctcatgattttcttgtttgttgtctgctgacctgacaggaggcaaattcagggacatgcccggcatctttggaggctcctaggtccccttttaacctttggtgagtgaaaccttggtcctctgtctgcaagatctgtttcaaaattctggtgaaaggagctggagatccttgtctcaaaatagagaagtttgtcagggtaactggctgccaagcagagacttcctttcttccacactggaagccagtggtggcggatgttgctattaatggtccccaggatttgaggggactgtactctcctggcattttagggtctacgtctggatcgaagctgtaccaactctgaggggagtaaaagcggacagaccaggaaggcctgactttatccacagtagaacatattaggcracaccctggaggatgtcctaagagaatttagaatgcatgtcccatgtgctgtaagatttcacccttgcagatgtggcgaatgaagaataaaaatctccttactatggcctaggaaacctacatgttctgacccctaccaactgcccaccctccccttgcctcaaaaagaggggcgtattcagtcctgagggcttgcccccactctacgtattcact

SEQ ID NO: 295060 - DNA, 641 bp, Homo sapiens
agtatggcagttaatctaattaaccattaactattttaaaacaaaacactctgttttgtaccggaaaaagggtaaaatcaaatatatagaccaaaatctgtgacttctttctgtcgagggccagacaataaatatgttaggcttttggtcatgtagtttctgtcacaactgcttaactctgccattgtagagtgaaagcaaccattgacaatacataaatcagtagatgtggctgtgtttcaatacaactttatttacaaaaacagactgtcagccagatttggctggaggattgtgctttgtccagcactgctctagatgacaataacaagatgcaagaagcagtgtgtttagtaagttgttacatattttactctcctagayatgtttggaaagagagtagaaatattaaataacttagatatgttttaaaatgtataaataaacatgcttgttaaaaaaaaggtagttaatcactaaaaattaaaagtatatcgcttccaagttaccagaagggaaaaaaaggaatatcaatagatactagtgaaagtaaaaaatatgaggacatataaataatcattatctgtgttttacctgtcccaggtaatctgagttggtaaaacatattagaaagaagattg

SEQ ID NO: 295061 - DNA, 1952 bp, Homo sapiens
attagtttttaaaagaactctgaattttagaagaaggcttaaaatgcccagaaattttattaagtctattaggtgtctctgtgcacctgacaactcactgtaacacagtgagatcttttaggaaggtaggaccttcttgcacctggagggcaccaaatccattcttcttgccatgtctaacaagaatatctgctggaatcctactctgctccgtatattaaggatcctcagagttagaagaaatcttaaattttctcttccttatcctcccaaatggtaactatttctacaacatcttctctagtgccttatctggtatayatttaaacctctctatgatgtgacatccatccatccactgaatagttgttggttactgggtatgcccacaatatgatttgatgctaaagacatacaagtgagaccaggacacacagttttcatctttgcaagcttctcagggacaggcaaatcctgaataagtggcagtacagatatttcattaccattgtcattaatgtgawttgctgtctccactttttccttcctgtatgtctgccaagatattcaggttatgcctactggaaggtaaagcaaaacaaaaactcawacatgcaaacaaaagacctctgccttgaccctgcttttcctttgtctttcattctttcttatgcttttctatctcaaattaccagtcaactcactaagcctctatgtcctcaccactagcaaacttttcccacttgttatctgatttctgtttcactgctctagagaaagtgctctctgcagaaccactggtacttttatatttatcatttctaactaaccactttctacttggctccwtacctgaagctgatcattaaggtattttcctaagcaaaggacttctcatctatgagcagagagctgtcagctgttaatacattttgactctggtcatgcaatgaaaaggggcaggtttcagcacatatacaatggtatggggcatctgccttaatttaggggttaaagaagctgaagaacaactgtgagttagccagaaaaggatgagaaggaagatggagggctcgcaaggtcaatgtggctaaatcatagacaatgagggtgatggagataagattgaagctggagagagacgcaggggcatgaatacctctcctgaaawcccatctcatctccaaaagccctttggagaatcttccccaacactgagctgacataagtctacctgtcgctttcacccctcagtcccagttctgctccctggggctgtttaggaggatgattacacttggatggcagtcctccaaccctcttcctaacaggtgagattttcagcaacagcatcattaaatgaaagatattattgaaatgcagtgctccaaataatgtgcwtacctgaagctgatcattaaggtattttcctaagcaaaggacttctcatctatgagcagagagctgtcagctgttaatacattttgactctggtcatgcaatgaaaaggggcaggtttcagcacatatacaatggtatggggcatctgccttaatttaggggttaaagaagctgaagaacaactgtgagttagccagaaaaggatgagaaggaagatggagggctcgcaaggtcaatgtggctaaatcatagacaatgagggtgatggagataagattgaagctggagagagacgcaggggcatgaatacctctcctgaaaacccatctcatctccaaaagccctttggagaatcttccccaacactgagctgacatawgtctacctgtcgctttcacccctcagtcccagttctgctccctggggctgtttaggaggatgattacacttggatggcagtcctccaaccctcttcctaacaggtgagattttcagcaacagcatcattaaatgaaagatattattgaaatgcagtgctccaaataatgtgc

SEQ ID NO: 295062 - DNA, 584 bp, Homo sapiens
gatgtggctgaatgtgatgaactgctggtcagtggccacccccctcccctggtgacagcagcacatggaaggaaaaagcagaatcttgttgatttcaggtggaccccagcatagcaagggggtgtaaggtggttcctcctgtgctacagctttgggggcatggtaactcagcagggaggaatggatggcattggaagaagggaactacctgccttttgtggcttcagggggttctatgatagacacagtatgaagagaccatgagcacagtcaagggtcctgaagactcccaaaaataaccaaggaagatgttgctacaggtgaagggggctgagatcttgcagttctggaaatcaacaagcctttgggtattcatgttaatgtgtcctgctttttgcataggctgmggaagcctggggaaatatgggtttccctagaagagagccacattgcactcagagtggaaattcaccatccgccttccattttcccctcttccccaaattcatatgttggtggcataaggggcctgatgccacctaccttttgggaatattcactcagcaagcaaagtttgcatacaa

SEQ ID NO: 295063 - DNA, 578 bp, Homo sapiens
agatcctgtgctaggtgctggggacacaagggtaaacacgttgtggttcctcgagttattcagtcatctgacagaccctgaagggactcaggatgtggctgaatgtgatgaactgctggtcagtggccacccccctcccctggtgacagcagcacatggaaggaaaaagcagaatcttgttgatttcaggtggaccccagcatagcaagggggtgtaaggtggttcctcctgtgctacagctttgggggcatggtaactcagcagggaggaatggatggcattggaagaagggaactacctgccttttgtggcttcagggggttctatgatagacacagtatgaagagaccatgagcacagtcaagggtcctgaagactcccaaaaataaccaaggaagatgttgctacaggtgaagggggctgagatcttgcagttctggaaatcaacaagcctttgggtattcatgttaatgtgtcctgctttttgcataggctgaggaagcctggggaaatatgggtttccctagaagasagccacattgcactcagagtggaaattcaccatccgccttccatt

SEQ ID NO: 295064 - DNA, 448 bp, Homo sapiens
ggagcaggagccagagggaacctcttagctgctggcaggaggcttggaagcccagcagctttgattacagtaagatgtcccaccctgcccscagttcacccccagctttccaagcatttaaatgctctttgtttcttaaaacccaggctgcctcagcctatactgagcctttgtgtgcattagaaagagacaccctcttggggccaatgcagagtttggccagaggagcctgggctggagttcagcccaccttggagttcactgggcccctttgtgaaggctgcacgctgcacaacttaataagaagtcagcactccttataagaagcctgtgaggtcagtcaggaacagaagaccccaacctcacccatgaggaacctgaggctccagttggcatagggctggaattagcaccgtatctcccggctcatggtcaggcagattctatt

SEQ ID NO: 295065 - DNA, 448 bp, Homo sapiens
ggagcaggagccagagggaacctcttagctgctggcaggaggcttggaagcccagcagctttgattacagtaagatgtcccaccctgcccccagttcacccccagctttccaagcatttaaatgctctttgtttcttaaaacccaggctgcctcagcctatactgagcctttgtgtgcattagaaagagacaccctcttggggccaatgcagagtttggccagaggagcctgggctggagttcagcccaccttggagttcactgggcccctttgtgaaggctgcacgctgcacaacttaataagaagtcagcactccttataagaagcctgtgaggtcagtcaggaacagaagaccccaacctcacccatgaggaacctgaggmtccagttggcatagggctggaattagcaccgtatctcccggctcatggtcaggcagattctatt

SEQ ID NO: 295066 - DNA, 589 bp, Homo sapiens
cactcctattaaagccactaggggtgtttgctaaaatgcagattatgggttcccaacacagatgtattgactcagaatctctaagggtgaggatttgaatatacatttataaaaagcaccctaataataataataacctaggttcatataatgcttcctctgtgacatgttctttaatattagctcatttaatatgtacaacaatttgtgaggtaggttatattattattccatttagcaaatgatgaaactgagacccagagaggtaaagtaacctgccaagtttataccactacttagtgattgaactgggattcagacctaggtgctgcgatagttgggctcctaatgtaggagaggaaaaatatttgtgctctactatcttatgtttagtgcctggagcctttgaattaaactgacgaaaggtagattagcaggaggaaaaatacagagtttatttacccgtgtaacaggcatacatgtgggasagctctgtgatgagtaactcaaaggagtattagaatttggggcttatgtaccatcttaacaaaggataataaaagtggagaacaagggaaataggttaagg

SEQ ID NO: 295067 - DNA, 540 bp, Homo sapiens
ggagggggtggtgtgttcagactgtctttcttggtgctctacatggatggtctcaagacagcttcaacttggatatggttggtggcatggcgggaatgccaatgcatttagtagctgggcattggccaaccaagcaatttacagggttgagggaatggcttcaagccagtatcccttggggcatgatgagaaaccaccagccctggggtcatctatgtgatgagtatttgcttgtagagcaagatggtgggtgggagctgggagggacyttagaagaatgctgtggtgagctaagaggggagacctctgagagaatcaagcccaggttcctgctaatggagcaattattagcctgctggtctccaaagcacatcctataacctaaagcagcatccttgtctgcatcacttcatgccggacctagctgtgatacatcctcagattccaagtctgttgcttcagaggacagggaatgtgccagtactctctgatagaggtggactcgaggcgcttcaacagtttagtgattcctcctccatc

SEQ ID NO: 295068 - DNA, 505 bp, Homo sapiens
tactaaacttaaagctctgagtttgcaaagcaaaggaggagaagacatcttccttargtgaagcaggggtagtttctagaaagacgtgtatgggatacagatttgggggcttgaaagagggagatgcaagggttcatccaagtgggatagatttcttctgaagacctaggcctcctttccttgggtgataaaatggaacagcaaaacaggaagagttatcagctggggtcttcctacatcatgctgggctgagagatctacctcaccctttggcaaaaaaactcagaatatatttatcatagcctagtaaatgttatatctggaaagactggtgaagcaggaagtatatagggaaaaggcaaggcttctacattgcacaactgcagggggtacaatacacatgggattcaacgtagaggactcattctggaattcggcaacatagcacccctgagtaagggagaacatttgcttcctgttcagcctttagggtatggtgaacacc

SEQ ID NO: 295069 - DNA, 505 bp, Homo sapiens
tactaaacttaaagctctgagtttgcaaagcaaaggaggagaagacatcttccttaggtgaagcaggggtagtttctagaaagacgtgtatgggatacagatttgggggcttgaaagagggagatgcaagggttcatccaagtgggatagatttcttctgaagacctargcctcctttccttgggtgataaaatggaacagcaaaacaggaagagttatcagctggggtcttcctacatcatgctgggctgagagatctacctcaccctttggcaaaaaaactcagaatatatttatcatagcctagtaaatgttatatctggaaagactggtgaagcaggaagtatatagggaaaaggcaaggcttctacattgcacaactgcagggggtacaatacacatgggattcaacgtagaggactcattctggaattcggcaacatagcacccctgagtaagggagaacatttgcttcctgttcagcctttagggtatggtgaacacc

SEQ ID NO: 295070 - DNA, 511 bp, Homo sapiens
tgcttagaaaagacatggagctcagggaattgaagcatctttcagcaaagaaaaagtcaccctttctccaggcagacaaaaccccctacagagaggcaagccttggtgagcagacagcaaactaaatccaccctaatttacctggtcagccaggtgccctgatgaccctgaaacccctataycctttcctctacttttggaaacctagttgttcagattgtctttcaattctcttactgccccatacccttcaacttaagttagccagagtatgtttctgttgcttgctatcagataacccctaagagatacatagcagtcatattgtagagacagagctgagggagcaccagcccccattatgaattattcaactgaagcaacactggggatacttatgggacatcagtggcccaaataataactgagtcacagggaattataaaagtcaattccctgatattttttctcatagactgacatacacacagacatacatacaggtgcacac

SEQ ID NO: 295071 - DNA, 404 bp, Homo sapiens
atttccattgtttttattgctgccattattttcacaggtgatccagagtcctcaccgtctactctcccatcccttcaaccaaactttcctgggcaactctgatgccaggcatttctagcactgtgacagaacctggkggaggacagagggctccacttcaaaggtaaccacctgtctccttctgctataacagggctgacctcagtgcagcagagggcagagcttggaggcagctgctgagaatttgcactctaaagacatccacctaaatcacaagctttatatctgggcactcagccagacctcctgaccatatcctggactgcggactttggatggtggaacgggggtggaattgaacattaaatgagcaacatgctaattccatgcaaatgaatatctat

SEQ ID NO: 295072 - DNA, 404 bp, Homo sapiens
atttccattgtttttattgctgccattattttcacaggtgatccagagtcctcaccgtctactctcccatcccttcaaccaaactttcctgggcaactctgatgccaggcatttctagcactgtgacagaacctggtggaggacagagggctccacttcaaaggtaaccacctgyctccttctgctataacagggctgacctcagtgcagcagagggcagagcttggaggcagctgctgagaatttgcactctaaagacatccacctaaatcacaagctttatatctgggcactcagccagacctcctgaccatatcctggactgcggactttggatggtggaacgggggtggaattgaacattaaatgagcaacatgctaattccatgcaaatgaatatctat

SEQ ID NO: 295073 - DNA, 505 bp, Homo sapiens
ttttgttacagggggtctattccaattaagaacttatgagggttgatgaaaaaattggctttcttcccccacaggattcttggaaaaatgaactattatactcagcatgagacccagaggaggtggggactgctgggcaggacctcttaaacttcctagtaaaatgttcctaatggagaatgaaagggtatctcaagagtcctggggtacactctgaagctgccagctataagcataaattccttttaacctcatggactaccgtaaaaattctcaagaattttgcattctcctacataatgtttttatataaatatgatgttttgaatcagttgtcaattagtaaaattgatcacagaggaaaattcaccatattcatgttatagctttaggaactgcatgtcctaccacctggcgtatgttattttgagaagcatagcccattaacaacaatattcagatgcatagaccycctgattctaagctttgtggaggtcactactgc

SEQ ID NO: 295074 - DNA, 553 bp, Homo sapiens
tgggtttcagaacacatttataattctattacagaagaagaagcaggcagggattggatgttgagtgagtaacgcagtgtccactgtggcaaccagatgactccctggatcagtacattatccaaatgtatttggatagttctctctgatcaataaaacaaaggcttctgagtcaacccagtctaggtgctcctgtgggcatctcatccatcagtttccaaagacagccaagttggtcacatccttgcaaagcaaaagctcaggggcgtcatttactaccaagatgccctttggggttcagctcattggaatcagagatatcccagcaagcatgggaagaagagcacatcactacaatacaggaggctcaggtggcagccaygccacctagaagacatctcacctcactggctggaataggccaggattgagtccacaacttgaagccttctctggatcacagatggaagaaggcaaagggtacccttcagcagagggtcctcaaagaaggctggatttacagcagctgcttgttttctcttgtttttctttt

SEQ ID NO: 295075 - DNA, 331 bp, Homo sapiens
tccttagaagcaagctccctgtgagctgaaaaattctgtactcagacctctggacagaaggctgcctctgaagtgacaagaccagccactgaagtcccaaactcaccagctgggaaaatagtcttccagagaaggtctttcccaggaaccagccattamcatgcagggatgccgtagacagtgaagtgttgggggcagatattaactgtactgaacaaccaaccaaaagagcagattgaaccacactaatatgtgaaagcttggaccaaactggacctatgtcagtgtgccttgttttatttttaaaaaaactcaatcaaaagtgtttgtt

SEQ ID NO: 295076 - DNA, 539 bp, Homo sapiens
atattttcaacttgtcaattggtttaccaggacataactccatcataagtcagggagtatctgtacaccctgggaaatagtgacccaagaagtttgtcttctgatacatttctagaactgaaataacaaaggtgaggatgttacaccccaaatggagttcctctctgcccaaatcttgataatcttgatgtcatggacagarcacagccttccaaaccaaaaagttctggcttaactcttgcccatgacactggccagctgtactgcagagctttcctggccctgcttactcatctataagatgggggaaaatagggcatagctcacaagtggtgaaaagaatgatagaaaacaattcaaatgaattttcattaacaaatctttcttgagtgcttaccatgcatcaggcaccaggcactgttctagatacataggatagagcaacagtgagcaaaactgattgtggccaggtgcagtggttcatgcctgtaattccagcactttgggagactgaggcaagaggattgctttaccccagg

SEQ ID NO: 295077 - DNA, 547 bp, Homo sapiens
gagagagcgggtgggagggaggtgcaagaagagagggcactttgctgtttacagctaagccctggtgtctgaaagcctcaaactgaagacatcaataattcatacattcatatgctgtagagtatttccccttttgtcacatatctggccaattgatttcccttggccacaaacctgctgcttttagaacatcattaataacaagtcaactggtaaaatcttccctgggagagggggctttggttgggagaggttcctgaccttgtttcccccaagaaaaggggctstgagcagccctggcagcagaatgtatgcacatgggctgggagccttcctcctcctgttttagtggaagaagggactgggggccagagagatgagatgcccaccctatggcctccccaggctattgctggaaccctctgatagggttacagggagagaaggaaagagagagagagagagaacttgggagcctcagaataagaatacaggttcctaatggaaccctctctagcagcctcctcctcctcccctcctcacccca

SEQ ID NO: 295078 - DNA, 644 bp, Homo sapiens
tagtgtgtctgatgtttcattctaactttagtagcattagagggtggaggcaggttctggtttgtgcaaaagcccacacaactggggccasccatctagagaagacctctcttcttgcctcttctactaataaggatttcctttctaccagtcataaagcatttagttcctactgccttgaattatgagatgcctgcccaagagtcttaccttccaaacaatgttgcaatgttgcaaatatctaacttctgaggctatacttgtgtcacttttatataccctaaatcatcccaagcactgccttgatataacatcaattcattgtatttatagaatgcatgaacaaataaatgaatgattccagaggacattttccctctctgtgaacctattgaaaactcacctgagaatgactaaaggaaaaacattcatggatcttggatagaatttcttgcttccctctcagaaaatctgagtttcatacacaaaataaagtaaaagtttaaaataacatctagcatgttttacacatagaatatgttcaacaaatatttgctggttggctcagatacactaaggacactgctccatattgttcctgcttcatctccatgtcttggcccaaagccttccactaccccatc

SEQ ID NO: 295079 - DNA, 644 bp, Homo sapiens
tagtgtgtctgatgtttcattctaactttagtagcattagagggtggaggcaggttctggtttgtgcaaaagcccacacaactggggccacccatctagagaagacctctcttcttgcctcttctastaataaggatttcctttctaccagtcataaagcatttagttcctactgccttgaattatgagatgcctgcccaagagtcttaccttccaaacaatgttgcaatgttgcaaatatctaacttctgaggctatacttgtgtcacttttatataccctaaatcatcccaagcactgccttgatataacatcaattcattgtatttatagaatgcatgaacaaataaatgaatgattccagaggacattttccctctctgtgaacctattgaaaactcacctgagaatgactaaaggaaaaacattcatggatcttggatagaatttcttgcttccctctcagaaaatctgagtttcatacacaaaataaagtaaaagtttaaaataacatctagcatgttttacacatagaatatgttcaacaaatatttgctggttggctcagatacactaaggacactgctccatattgttcctgcttcatctccatgtcttggcccaaagccttccactaccccatc

SEQ ID NO: 295080 - DNA, 576 bp, Homo sapiens
ctgccttgaattatgagatgcctgcccaagagtcttaccttccaaacaatgttgcaatgttgcaaatatctaacttctgaggctatacttgtgtcacttttatataccctaaatcatcccaagcactgccttgatataacatcaattcattgtatttatagaatgcatgaacaaataaatgaatgattccagaggacattttccctctctgtgaacctattgaaaactcacctgagaatgactaaaggaaaarcattcatggatcttggatagaatttcttgcttccctctcagaaaatctgagtttcatacacaaaataaagtaaaagtttaaaataacatctagcatgttttacacatagaatatgttcaacaaatatttgctggttggctcagatacactaaggacactgctccatattgttcctgcttcatctccatgtcttggcccaaagccttccactaccccatctgcccagctgacctatacctgctgcagtcactcaggtactggaattttcccagaagggcatcaccagagctatttgctaaatggactccactcctccattttgt

SEQ ID NO: 295081 - DNA, 507 bp, Homo sapiens
ctgcaggcctttgatcttagacttcccagcctccagaactgtgagcaataaatttgttgtttataaattacccagtctaaggtattttgttttaacagcacaaatggactaagaaaggtacctaacctgcctgggggtttcaggtaagscttcctgttgaggagctggtcttgcaattgagtgtggggagggggggatgtttctcatttctttgccctctctgaaagagcagaccctctgaggaccactacttttcagtttggaagactattgcaaaagtcaggggagagaatatgaagacctgaattggagcaataattttaggaatggagcagaggggaagatttcaggactatactattttacaggtaaaatggacaggtcatggtgatagaatatggggaaggaggaaattgaagtgtgtcaagagtggttaccacgtttctgactagggtggttgggcaattttcatcaaggcagggaattcggaagaagcatgattttgag

SEQ ID NO: 295082 - DNA, 473 bp, Homo sapiens
tcttcccataaactcctgggaccccattaaacayaaactgcctagcattcacttcactgctcctgaaaaaggaacgggatcgatttttctcggctggggagcaaaggctcacgatctggagctgaggtttagactcatcagacatctcttcagaagaggattcactctctgtgaggctcctggcattcactgctgacgtttagcttgtcaaatcaatgctgaggggagcagcatcctcctcaaagattacaggtcaaaggaacaaaaagaaaaatttttagagaagcatttacagaaaggatgagccccgacaagaggcttgttctagctgagcagagacacacagttgaggaaaaagaaatcttccagccacctgtggaatgtttctacctttattttgcatgcagggaggatttgcctgtttacctggaggttgagttaccagcactatgagagaaagggtgatttcaggc

SEQ ID NO: 295083 - DNA, 605 bp, Homo sapiens
agtgaatttagtataggtctgtcccatgtaatatttgggatatacttacactaaaaatacattaaagattattttactaacattattcattgttcatttgaaatgcaaacataactgggaatcctgtattctatttggcaacccttattatagtctgcacctgagttggagttgacttgctatctctgacctctacattaatcatcacttcaggcagtagaatgattaaaactcggttctaattagttttaggggtagctattagattatgtagcttggaattacatcaggcactgatggattcaagagcttaaacaataggtgaggtctctagccctcttttcagccctcagtcccacttccctgttggcttcttctacagtctagctctttccacctgacaaagaggaagcctcccccgatggcagatttatttattcccaacttaacgacgagggaatttccatctctcaacttctctgtagcacttcagggcaactctgattggcctagtgtggtttctgcacccatctctaaacctgtaactgttgctatcaggacaggcctagactggaccaygggtctgtgcctatggtgggggttgg

SEQ ID NO: 295084 - DNA, 555 bp, Homo sapiens
gaaagggtgatttcaggccatctttcatggttcagtacactgcacatctttctctcttggtgtaatgattccaaagagcctttgccattcccatttgttcaacattaaaygacttttagcaatgagagtggtgcccctgggatgaaagctgttagcttggccatgactccggcacctatgctggcccttcccctccaaggtgttcctttttcatagtgtctttgacccagccttgactcgaggcaccacatgcccacaaatctagcctcaggagaaatcggtctgagtaaaaacatctgtttcaccttcactctcaggctcagttttgtccctttatggacagatgggacttactgcccccagacactgctgtcctcagctgtgtgggacattcagtaaggcttatttctttgcataagcaaggattttagaattcatttccccagatttttttcttacaagaactaataaacatttttaaatgtctgtaaatttccagaacaaatatgtatcaggagtttgatgatagcctctactgcactgtgggtagctagc

SEQ ID NO: 295085 - DNA, 506 bp, Homo sapiens
acacaggagaaatgctgtgtaaaagaaaatagagaaggggtcaggaaggctgggagagctaccagaccrtgacgcaggtccaacccccagggaagtagaaaaagagaagtttgggtggatgcatcctacactgtggtacagaataaactgtcagcaaagctgttagcaagtccttgagctgaagtcaccaatgaaggagtcccatgtcccccaggtacaggcccaccctagtatctccaccaccttggtcactggcaaggagtagccctgagagatgaggttcagcccaaatctgtcgacggatttcagagcatggctgctgggctctcagccaattcgcctgctggaatagttggtctgcaaggtgcaggctcacggctgctggggtagatataaacccagaaactgtgaggggacaggtctgaggtatgttccacacagttcctcagtgagttcccagcaggactaggccccagttgtccattgcaataacccacttttactgg

SEQ ID NO: 295086 - DNA, 506 bp, Homo sapiens
acacaggagaaatgctgtgtaaaagaaaatagagaaggggtcaggaaggctgggagagctaccagaccatgacgcaggtccaasccccagggaagtagaaaaagagaagtttgggtggatgcatcctacactgtggtacagaataaactgtcagcaaagctgttagcaagtccttgagctgaagtcaccaatgaaggagtcccatgtcccccaggtacaggcccaccctagtatctccaccaccttggtcactggcaaggagtagccctgagagatgaggttcagcccaaatctgtcgacggatttcagagcatggctgctgggctctcagccaattcgcctgctggaatagttggtctgcaaggtgcaggctcacggctgctggggtagatataaacccagaaactgtgaggggacaggtctgaggtatgttccacacagttcctcagtgagttcccagcaggactaggccccagttgtccattgcaataacccacttttactgg

SEQ ID NO: 295087 - DNA, 573 bp, Homo sapiens
cttaccttgtgctgactattagtctacctcctggaaccctgggaatgcccctctaacagtatggtccacactgtattacctacagttatgttcaaaagtgtcaggaaaacatgcacacagtgaaacacattgatcaaaagttaaaagggaagagacagcgtagaaaaaatttatttctaattggaagaaataggactaacattctcaaaataattagaaaaccagtaaacgctaaaccacatggctcaataggtatttagggaaaggaaagagctgcacctttcttttcagggatacaaatttttgtttaatgtgtcttagaaatttgggaagatactcttaactctcaaaaaatcagcccttagaggcacagcaggtaattaggttccacctaaggtttgagatctcctagattttaaccttaaacatttagcccatatgccattttaacaaatcataacagtccttatagacagtcctggactctttgcgaatatgatctgtcaatgcrctttctttttatttaactttttctgagcaccatgctctgcagcacatggctagtaagaagca

SEQ ID NO: 295088 - DNA, 534 bp, Homo sapiens
aggactttgttgactgcagcctggggtggattaatgttcaaggagttcacattcactaacaaacaatcaggctttccaactgattycataatttatagaagggatggccctgcccctgtaatatacggcagtggcttcatacatatgaattaagaggctacatacaaatcaagccctagaacctttagaggctgcatatgtgccagccggtcaggggagcttgtgatacaatcagtaaacagtgaagaggccagcattctttatctaaactccaatatgcacacatggccttgcattaagaaggctttggggagaatataccacattttatgagaatggacataggggtggagaaaaaaagtggttggaagtggtgatttggccaatgatgattatagaagagcaactgttttcttaaaataaagttaaagatcataatacatgaccacaatagatgcacaacagaagacaaggtgcagcgtcttgtgtgtcacttctacagattttgcttttgaaactattagttgtgtaatc

SEQ ID NO: 295089 - DNA, 584 bp, Homo sapiens
tgtgatacaatcagtaaacagtgaagaggccagcattctttatctaaactccaatatgcacacatggccttgcattaagaaggctttggggagaatataccacattttatgagaatggacataggggtggagaaaaaaagtggttggaagtggtgatttggccaatgatgattatagaagagcaactgttttcttaaaataaagttaaagatcataatacatgaccacaatagatgcacaacagaagacaaggtgcagcgtcttgtgtgtcacttctacagattttgcttttgaaactattagttgtgtaatccctcktacggactttttgtttcctgaaagttctgtgctttttgagcggaataatgtacctaccgtataacaggattttatctaatgcttttttcaccaatgcatgcaaaaataattaaactaaaaaaaaatcccaagagctttaaaaattataacatagtttccatatgaatttgtaggacaagtacaattttaattttccaaaaatgaagcatttaaatacagcaaaatctgtcacttttgaataactaatgaatgaatgtattttttgt

SEQ ID NO: 295090 - DNA, 636 bp, Homo sapiens
tttgaggctgcaatgaactatgatagcattgcggcactccagcctgggcaacagagtgagatcctgtctcttggggaagaaaaggggagagaaaaatgtagatgtaaaagatgaccccaatgtggaacttgtaaaataatctaagcaactccatgactcttgctggggagcatcatggccaccttctcttgttggcacctaggttcccacaggagtgctgggtcatgtgctttatttgttgtctcaggtaaaaaagctttaggtccctcatttgtaatttactgaaaaggaagtgaaactgctgaacaaacttaaatggctttgattggtgttttttcctcccctatggatcagttgactaactattaaaaataaagtttcttcatccttttggttgagattaactayatggaagcagacctaaggtttaggtgtgaggactacttggtgaatgctgaatttgcacaaaggaaagtggatggtcttcaaagatctccattatgttaggggaaagtggtgtgccaagcacactgtcagaggccatctccctttcccttctccctttaccgacaagggattggtggcaggtggggaaagccgaggtatttctctgcttcttgtgggatctccagcttt

SEQ ID NO: 295091 - DNA, 600 bp, Homo sapiens
atggtttccatttccttggctggaccttgacttctggatctccccataggtttgccatgagatgaattaaaacatgaattaatccaagttcctatttcaaggagctcacaattgagtggaggaaagagatcagtatataattttaataaatgatgataaatggtatggggacacagaaagtgggttcaaaatgccttcacaggtgttttcttgtttattggctagctgtgatggtgtggcatagggaccttggcaattatagtttttatcatcaactattaatatgagattgctataagaatggtcaggacaaattcaaaataaatatgaattttctatgttattaagtgcccyctacgtggaaggcactgggtctaggcacaagggaagaaaaaatgaattaatttacgttcctatttcaaggagctcacaactgagtggaggaaagagatcagtacataattttaataaatgatgataaatgatatggggacacagaaagtgggttcaaaatgccttcaaggttgttttgtttattggctagctttggtggtatggcatagggagatgggcactcactaacagccatgagaattaagc

SEQ ID NO: 295092 - DNA, 578 bp, Homo sapiens
actgaaggaagaattggtactcttcgtttaaagagaattcctggaaggcacacacacagcattcctgcttacatctctgtggtcagggctttcacatggcaacatcaagccacaagggaaatgttttagtggggcagtgatgtgttcagctaaaactttcttataaagaaagggagaacggctactgagaagcaattagtagtctctgccacaggaagcgcgagttaaaagcattccaatgaccatacacttcatctgtcgtttccatggctgcagatggtcaaaacaccacagagtcctgaggagttccctgggaagaaattattgtttactttgccaaatgattcatctgtgktgttcaagtggattttaaagtgtctacgaggggcagggtgtgggatgggagtttaaggggcaggatatggggaaaaaggcagcaagatctgggctgatcagaagtccctccaaagaagtactgaccagaaccatgttgtgaaatggaaatgaaaagtcccaagaaaagaaaggctctcctggcaagatgtcactgcagctatacagacattcctctgtttcga

SEQ ID NO: 295093 - DNA, 578 bp, Homo sapiens
actgaaggaagaattggtactcttcgtttaaagagaattcctggaaggcacacacacagcattcctgcttacatctctgtggtcagggctttcacatggcaacatcaagccacaagggaaatgttttagtggggcagtgatgtgttcagctaaaactttcttataaagaaagggagaacggctactgagaagcaattagtagtctctgccacaggaagcgcgagttaaaagcattccaatgaccatacacttcatctgtcgtttccatggctgcagatggtcaaaacaccacagagtcctgaggagttccctgggaagaaattattgtttactttgccaaatgattcatctgtggtgttcaagtggattttaaagtgtctacgaggggcagggtgtgggatgggagtttaaggggcaggatatgggraaaaaggcagcaagatctgggctgatcagaagtccctccaaagaagtactgaccagaaccatgttgtgaaatggaaatgaaaagtcccaagaaaagaaaggctctcctggcaagatgtcactgcagctatacagacattcctctgtttcga
